(19) United States
(12) Patent Application Publication
(10) Pub. No.: US 2004/0123343 A1
(43) Pub. Date: Jun. 24, 2004

(54) Rice nucleic acid molecules and other molecules associated with plants and uses thereof for plant improvement

(76) Inventors: Thomas J. La Rosa, Fenton, MO (US); David K. Kovalic, University City, MO (US); Yihua Zhou, Ballwin, MO (US); Yongwei Cao, Chesterfield, MO (US); Wei Wu, St. Louis, MO (US); Andrey A. Boukharov, Chesterfield, MO (US); Brad W. Barbazuk, St. Peters, MO (US)

Correspondence Address: Lawrence M. Lavin, Jr., Patent Department, E2NA; Monsanto Company, 800 N. Lindbergh Boulevard, St. Louis, MO, 63167, US

(21) Appl. No.: 10/437,963

(22) Filed: May 14, 2003

Related U.S. Application Data
(63) Continuation-in-part of application No. 09/837,604, filed on Apr. 18, 2001.
(60) Provisional application No. 60/197,872, filed on Apr. 19, 2000.

(51) Int. Cl. A01H 1/00; C12N 15/82; C07H 21/04; C12N 9/24; C12N 5/04

(52) U.S. Cl. 800/278; 435/69.1; 435/200; 435/320.1; 435/419; 536/23.2

(57) ABSTRACT

Polynucleotides useful for improvement of plants are provided. In particular, polynucleotide sequences are provided from plant sources. Polypeptides encoded by the polynucleotide sequences are also provided. The disclosed polynucleotides and polypeptides find use in production of transgenic plants to produce plants having improved properties.

### INCORPORATION OF SEQUENCE LISTING

[0001] Two copies of the sequence listing (Seq. Listing Copy 1 and Seq. Listing Copy 2) and a computer-readable form of the sequence listing, all on CD-ROMs, each containing the file named pa_{—}00562.rpt, which is 383,903,639 bytes (measured in MS-DOS) and was created on May 12, 2003, are herein incorporated by reference.

### INCORPORATION OF TABLE

[0002] Two copies of Table 1 (Table 1 Copy 1 and Table 1 Copy 2) all on CD-ROMs, each containing the file named pa_{—}00562.txt, which is 51,368,827 bytes (measured in MS-DOS) and was created on May 9, 2003, are herein incorporated by reference.

### FIELD OF THE INVENTION

[0003] Disclosed herein are inventions in the field of plant biochemistry and genetics. More specifically polynucleotides for use in plant improvement are provided, in particular, sequences from Oryza sativa and the polypeptides encoded by such cDNAs are disclosed. Methods of using the polynucleotides for production of transgenic plants with improved biological characteristics are disclosed.

### BACKGROUND OF THE INVENTION

[0004] The ability to develop transgenic plants with improved traits depends in part on the identification of genes that are useful for production of transformed plants for expression of novel polypeptides. In this regard, the discovery of the polynucleotide sequences of such genes, and the polypeptide encoding regions of genes, is needed. Molecules comprising such polynucleotides may be used, for example, in DNA constructs useful for imparting unique genetic properties into transgenic plants.

### SUMMARY OF THE INVENTION

[0005] This invention provides isolated and purified polynucleotides comprising DNA sequences and the polypeptides encoded by such molecules from Oryza sativa. Polynucleotide sequences of the present invention are provided in the attached Sequence Listing as SEQ ID NO: 1 through SEQ ID NO: 102,483. Polypeptides of the present invention are provided as SEQ ID NO: 102,484 through SEQ ID NO: 204,966. Preferred subsets of the polynucleotides and polypeptides of this invention are useful for improvement of one or more important properties in plants.

[0006] The present invention also provides fragments of the polynucleotides of the present invention for use, for example as probes or molecular markers. Such fragments comprise at least 15 consecutive nucleotides in a sequence selected from the group consisting of SEQ ID NO: 1 through SEQ ID NO: 102,483 and complements thereof. Polynucleotide fragments of the present invention are useful as primers for PCR amplification and in hybridization assays such as transcription profiling assays or marker assays, e.g. high throughput assays where the oligonucleotides are provided in high-density arrays on a substrate. The present invention also provides homologs of the polynucleotide and polypeptides of the present invention.

[0007] This invention also provides DNA constructs comprising polynucleotides provided herein. Of particular interest are recombinant DNA constructs, wherein said constructs comprise a polynucleotide selected from the group consisting of:

[0008] (a) a polynucleotide comprising a nucleic acid sequence selected from the group consisting of SEQ ID NO: 1 through SEQ ID NO: 102,483;

[0009] (b) a polynucleotide encoding a polypeptide having an amino acid sequence selected from the group consisting of SEQ ID NO: 102,484 through SEQ ID NO: 204,966;

[0010] (c) a polynucleotide comprising a nucleic acid sequence complementary to a nucleic acid sequence selected from the group consisting of SEQ ID NO: 1 through SEQ ID NO: 102,483;

[0011] (d) a polynucleotide having at least 70% sequence identity to a polynucleotide of (a), (b) or (c);

[0012] (e) a polynucleotide encoding a polypeptide having at least 80% sequence identity to a polypeptide having an amino acid sequence selected from the group consisting of SEQ ID NO: 102,484 through SEQ ID NO: 204,966;

[0013] (f) a polynucleotide comprising a promoter functional in a plant cell, operably joined to a coding sequence for a polypeptide having at least 80% sequence identity to a polypeptide having an amino acid sequence selected from the group consisting of SEQ ID NO: 102,484 through SEQ ID NO: 204,966, wherein said encoded polypeptide is a functional homolog of said polypeptide having an amino acid sequence selected from the group consisting of SEQ ID NO: 102,484 through SEQ ID NO: 204,966; and

[0014] (g) a polynucleotide comprising a promoter functional in a plant cell, operably joined to a coding sequence for a polypeptide having an amino acid sequence selected from the group consisting of SEQ ID NO: 102,484 through SEQ ID NO: 204,966, wherein transcription of said coding sequence produces an RNA molecule having sufficient complementarity to a polynucleotide encoding said polypeptide to result in decreased expression of said polypeptide when said construct is expressed in a plant cell.

[0015] Such constructs are useful for production of transgenic plants having at least one improved property as the result of expression of a polypeptide of this invention. Improved properties of interest include yield, disease resistance, growth rate, stress tolerance and others as set forth in more detail herein.

[0016] The present invention also provides a method of modifying plant protein activity by inserting into cells of said plant an antisense construct comprising a promoter which functions in plant cells, a polynucleotide comprising a polypeptide coding sequence operably linked to said promoter, wherein said protein coding sequence is oriented such that transcription from said promoter produces an RNA molecule having sufficient complementarity to a polynucleotide encoding said polypeptide to result in decreased expression of said polypeptide when said construct is expressed in a plant cell.

[0017] This invention also provides a transformed organism, particularly a transformed plant, preferably a transformed crop plant, comprising a recombinant DNA construct of the present invention.

### DETAILED DESCRIPTION OF THE INVENTION

[0018] The present invention provides polynucleotides, or nucleic acid molecules, representing DNA sequences and the polypeptides encoded by such polynucleotides from Oryza sativa. The polynucleotides and polypeptides of the present invention find a number of uses, for example in recombinant DNA constructs, in physical arrays of molecules, and for use as plant breeding markers. In addition, the nucleotide and amino acid sequences of the polynucleotides and polypeptides find use in computer based storage and analysis systems.

[0019] Depending on the intended use, the polynucleotides of the present invention may be present in the form of DNA, such as cDNA or genomic DNA, or as RNA, for example mRNA. The polynucleotides of the present invention may be single or double stranded and may represent the coding, or sense strand of a gene, or the non-coding, antisense, strand.

[0020] The polynucleotides of the present invention find particular use in generation of transgenic plants to provide for increased or decreased expression of the polypeptides encoded by the cDNA polynucleotides provided herein. As a result of such biotechnological applications, plants, particularly crop plants, having improved properties are obtained. Crop plants of interest in the present invention include, but are not limited to soy, cotton, canola, maize, wheat, sunflower, sorghum, alfalfa, barley, millet, rice, tobacco, fruit and vegetable crops, and turf grass. Of particular interest are uses of the disclosed polynucleotides to provide plants having improved yield resulting from improved utilization of key biochemical compounds, such as nitrogen, phosphorous and carbohydrate, or resulting from improved responses to environmental stresses, such as cold, heat, drought, salt, and attack by pests or pathogens. Polynucleotides of the present invention may also be used to provide plants having improved growth and development, and ultimately increased yield, as the result of modified expression of plant growth regulators or modification of cell cycle or photosynthesis pathways. Other traits of interest that may be modified in plants using polynucleotides of the present invention include flavonoid content, seed oil and protein quantity and quality, herbicide tolerance, and rate of homologous recombination.

[0021] The term “isolated” is used herein in reference to purified polynucleotide or polypeptide molecules. As used herein, “purified” refers to a polynucleotide or polypeptide molecule separated from substantially all other molecules normally associated with it in its native state. More preferably, a substantially purified molecule is the predominant species present in a preparation. A substantially purified molecule may be greater than 60% free, preferably 75% free, more preferably 90% free, and most preferably 95% free from the other molecules (exclusive of solvent) present in the natural mixture. The term “isolated” is also used herein in reference to polynucleotide molecules that are separated from nucleic acids which normally flank the polynucleotide in nature. Thus, polynucleotides fused to regulatory or coding sequences with which they are not normally associated, for example as the result of recombinant techniques, are considered isolated herein. Such molecules are considered isolated even when present, for example in the chromosome of a host cell, or in a nucleic acid solution. The terms “isolated” and “purified” as used herein are not intended to encompass molecules present in their native state.

[0022] As used herein a “transgenic” organism is one whose genome has been altered by the incorporation of foreign genetic material or additional copies of native genetic material, e.g. by transformation or recombination.

[0023] It is understood that the molecules of the invention may be labeled with reagents that facilitate detection of the molecule. As used herein, a label can be any reagent that facilitates detection, including fluorescent labels, chemical labels, or modified bases, including nucleotides with radioactive elements, e.g. ³²P, ³³P, ³⁵S or ¹²⁵I such as ³²P deoxycytidine-5′-triphosphate (³²PdCTP).

[0024] Polynucleotides of the present invention are capable of specifically hybridizing to other polynucleotides under certain circumstances. As used herein, two polynucleotides are said to be capable of specifically hybridizing to one another if the two molecules are capable of forming an anti-parallel, double-stranded nucleic acid structure. A nucleic acid molecule is said to be the “complement” of another nucleic acid molecule if the molecules exhibit complete complementarity. As used herein, molecules are said to exhibit “complete complementarity” when every nucleotide in each of the molecules is complementary to the corresponding nucleotide of the other. Two molecules are said to be “minimally complementary” if they can hybridize to one another with sufficient stability to permit them to remain annealed to one another under at least conventional “low-stringency” conditions. Similarly, the molecules are said to be “complementary” if they can hybridize to one another with sufficient stability to permit them to remain annealed to one another under conventional “high-stringency” conditions. Conventional stringency conditions are known to those skilled in the art and can be found, for example in Molecular Cloning: A Laboratory Manual, 3^{rd} edition Volumes 1, 2, and 3. J. F. Sambrook, D. W. Russell, and N. Irwin, Cold Spring Harbor Laboratory Press, 2000.

[0025] Departures from complete complementarity are therefore permissible, as long as such departures do not completely preclude the capacity of the molecules to form a double-stranded structure. Thus, in order for a nucleic acid molecule to serve as a primer or probe it need only be sufficiently complementary in sequence to be able to form a stable double-stranded structure under the particular solvent and salt concentrations employed. Appropriate stringency conditions which promote DNA hybridization are, for example, 6.0×sodium chloride/sodium citrate (SSC) at about 45° C., followed by a wash of 2.0×SSC at 50° C. Such conditions are known to those skilled in the art and can be found, for example in Current Protocols in Molecular Biology, John Wiley & Sons, N.Y. (1989). Salt concentration and temperature in the wash step can be adjusted to alter hybridization stringency. For example, conditions may vary from low stringency of about 2.0×SSC at 40° C. to moderately stringent conditions of about 2.0×SSC at 50° C. to high stringency conditions of about 0.2×SSC at 50° C.

[0026] As used herein “sequence identity” refers to the extent to which two optimally aligned polynucleotide or peptide sequences are invariant throughout a window of alignment of components, e.g. nucleotides or amino acids. An “identity fraction” for aligned segments of a test sequence and a reference sequence is the number of identical components which are shared by the two aligned sequences divided by the total number of components in the reference sequence segment, i.e. the entire reference sequence or a smaller defined part of the reference sequence. “Percent identity” is the identity fraction times 100. Comparison of sequences to determine percent identity can be accomplished by a number of well-known methods, including for example by using mathematical algorithms, such as those in the BLAST suite of sequence analysis programs.

[0027] Polynucleotides—This invention provides polynucleotides comprising regions that encode polypeptides. The encoded polypeptides may be the complete protein encoded by the gene represented by the polynucleotide, or may be fragments of the encoded protein. Preferably, polynucleotides provided herein encode polypeptides constituting a substantial portion of the complete protein, and more preferentially, constituting a sufficient portion of the complete protein to provide the relevant biological activity.

[0028] Of particular interest are polynucleotides of the present invention that encode polypeptides involved in one or more important biological functions in plants. Such polynucleotides may be expressed in transgenic plants to produce plants having improved phenotypic properties and/or improved response to stressful environmental conditions. See, for example, Table 1 for a list of improved plant properties and responses and the SEQ ID NO: 1 through SEQ ID NO: 102,483 representing the polynucleotides that may be expressed in transgenic plants to impart such improvements.

[0029] Polynucleotides of the present invention are generally used to impart such biological properties by providing for enhanced protein activity in a transgenic organism, preferably a transgenic plant, although in some cases, improved properties are obtained by providing for reduced protein activity in a transgenic plant. Reduced protein activity and enhanced protein activity are measured by reference to a wild type cell or organism and can be determined by direct or indirect measurement. Direct measurement of protein activity might include an analytical assay for the protein, per se, or enzymatic product of protein activity. Indirect assay might include measurement of a property affected by the protein. Enhanced protein activity can be achieved in a number of ways, for example by overproduction of mRNA encoding the protein or by gene shuffling. One skilled in the are will know methods to achieve overproduction of mRNA, for example by providing increased copies of the native gene or by introducing a construct having a heterologous promoter linked to the gene into a target cell or organism. Reduced protein activity can be achieved by a variety of mechanisms including antisense, mutation or knockout. Antisense RNA will reduce the level of expressed protein resulting in reduced protein activity as compared to wild type activity levels. A mutation in the gene encoding a protein may reduce the level of expressed protein and/or interfere with the function of expressed protein to cause reduced protein activity.

[0030] The polynucleotides of this invention represent cDNA sequences from Oryza sativa. Nucleic acid sequences of the polynucleotides of the present invention are provided herein as SEQ ID NO: 1 through SEQ ID NO: 102,483.

[0031] A subset of the nucleic molecules of this invention includes fragments of the disclosed polynucleotides consisting of oligonucleotides of at least 15, preferably at least 16 or 17, more preferably at least 18 or 19, and even more preferably at least 20 or more, consecutive nucleotides. Such oligonucleotides are fragments of the larger molecules having a sequence selected from the group of polynucleotide sequences consisting of SEQ ID NO: 1 through SEQ ID NO: 102,483, and find use, for example as probes and primers for detection of the polynucleotides of the present invention.

[0032] Also of interest in the present invention are variants of the polynucleotides provided herein. Such variants may be naturally occurring, including homologous polynucleotides from the same or a different species, or may be non-natural variants, for example polynucleotides synthesized using chemical synthesis methods, or generated using recombinant DNA techniques. With respect to nucleotide sequences, degeneracy of the genetic code provides the possibility to substitute at least one base of the protein encoding sequence of a gene with a different base without causing the amino acid sequence of the polypeptide produced from the gene to be changed. Hence, the DNA of the present invention may also have any base sequence that has been changed from SEQ ID NO: 1 through SEQ ID NO: 102,483 by substitution in accordance with degeneracy of the genetic code. References describing codon usage include: Carels et al., J. Mol. Evol. 46: 45 (1998) and Fennoy et al., Nucl. Acids Res. 21(23): 5294 (1993).

[0033] Polynucleotides of the present invention that are variants of the polynucleotides provided herein will generally demonstrate significant identity with the polynucleotides provided herein. Of particular interest are polynucleotide homologs having at least about 60% sequence identity, at least about 70% sequence identity, at least about 80% sequence identity, at least about 85% sequence identity, and more preferably at least about 90%, 95% or even greater, such as 98% or 99% sequence identity with polynucleotide sequences described herein.

[0034] Protein and Polypeptide Molecules—This invention also provides polypeptides encoded by polynucleotides of the present invention. Amino acid sequences of the polypeptides of the present invention are provided herein as SEQ ID NO: 102,484 through SEQ ID NO: 204,966.

[0035] As used herein, the term “polypeptide” means an unbranched chain of amino acid residues that are covalently linked by an amide linkage between the carboxyl group of one amino acid and the amino group of another. The term polypeptide can encompass whole proteins (i.e. a functional protein encoded by a particular gene), as well as fragments of proteins. Of particular interest are polypeptides of the present invention which represent whole proteins or a sufficient portion of the entire protein to impart the relevant biological activity of the protein. The term “protein” also includes molecules consisting of one or more polypeptide chains. Thus, a polypeptide of the present invention may also constitute an entire gene product, but only a portion of a functional oligomeric protein having multiple polypeptide chains.

[0036] Of particular interest in the present invention are polypeptides involved in one or more important biological properties in plants. Such polypeptides may be produced in transgenic plants to provide plants having improved phenotypic properties and/or improved response to stressful environmental conditions. In some cases, decreased expression of such polypeptides may be desired, such decreased expression being obtained by use of the polynucleotide sequences provided herein, for example in antisense or cosuppression methods. See, Table 1 for a list of improved plant properties and responses and SEQ ID NO: 102,484 through SEQ ID NO: 204,966 for the polypeptides whose expression may be altered in transgenic plants to impart such improvements. A summary of such improved properties and polypeptides of interest for increased or decreased expression is provided below.

[0037] Yield/Nitrogen: Yield improvement by improved nitrogen flow, sensing, uptake, storage and/or transport. Polypeptides useful for imparting such properties include those involved in aspartate and glutamate biosynthesis, polypeptides involved in aspartate and glutamate transport, polypeptides associated with the TOR (Target of Rapamycin) pathway, nitrate transporters, ammonium transporters, chlorate transporters and polypeptides involved in tetrapyrrole biosynthesis.

[0038] Yield/Carbohydrate: Yield improvement by effects on carbohydrate metabolism, for example by increased sucrose production and/or transport. Polypeptides useful for improved yield by effects on carbohydrate metabolism include polypeptides involved in sucrose or starch metabolism, carbon assimilation or carbohydrate transport, including, for example sucrose transporters or glucose/hexose transporters, enzymes involved in glycolysis/gluconeogenesis, the pentose phosphate cycle, or raffinose biosynthesis, and polypeptides involved in glucose signaling, such as SNF1 complex proteins.

[0039] Yield/Photosynthesis: Yield improvement resulting from increased photosynthesis. Polypeptides useful for increasing the rate of photosynthesis include phytochrome, photosystem I and II proteins, electron carriers, ATP synthase, NADH dehydrogenase and cytochrome oxidase.

[0040] Yield/Phosphorus: Yield improvement resulting from increased phosphorus uptake, transport or utilization. Polypeptides useful for improving yield in this manner include phosphatases and phosphate transporters.

[0041] Yield/Stress tolerance: Yield improvement resulting from improved plant growth and development by helping plants to tolerate stressful growth conditions. Polypeptides useful for improved stress tolerance under a variety of stress conditions include polypeptides involved in gene regulation, such as serine/threonine-protein kinases, MAP kinases, MAP kinase kinases, and MAP kinase kinase kinases; polypeptides that act as receptors for signal transduction and regulation, such as receptor protein kinases; intracellular signaling proteins, such as protein phosphatases, GTP binding proteins, and phospholipid signaling proteins; polypeptides involved in arginine biosynthesis; polypeptides involved in ATP metabolism, including for example ATPase, adenylate transporters, and polypeptides involved in ATP synthesis and transport; polypeptides involved in glycine betaine, jasmonic acid, flavonoid or steroid biosynthesis; and hemoglobin. Enhanced or reduced activity of such polypeptides in transgenic plants will provide changes in the ability of a plant to respond to a variety of environmental stresses, such as chemical stress, drought stress and pest stress.

[0042] Cold tolerance: Polypeptides of interest for improving plant tolerance to cold or freezing temperatures include polypeptides involved in biosynthesis of trehalose or raffinose, polypeptides encoded by cold induced genes, fatty acyl desaturases and other polypeptides involved in glycerolipid or membrane lipid biosynthesis, which find use in modification of membrane fatty acid composition, alternative oxidase, calcium-dependent protein kinases, LEA proteins and uncoupling protein.

[0043] Heat tolerance: Polypeptides of interest for improving plant tolerance to heat include polypeptides involved in biosynthesis of trehalose, polypeptides involved in glycerolipid biosynthesis or membrane lipid metabolism (for altering membrane fatty acid composition), heat shock proteins and mitochondrial NDK.

[0044] Osmotic tolerance: Polypeptides of interest for improving plant tolerance to extreme osmotic conditions include polypeptides involved in proline biosynthesis.

[0045] Drought tolerance: Polypeptides of interest for improving plant tolerance to drought conditions include aquaporins, polypeptides involved in biosynthesis of trehalose or wax, LEA proteins and invertase.

[0046] Pathogen or pest tolerance: Polypeptides of interest for improving plant tolerance to effects of plant pests or pathogens include proteases, polypeptides involved in anthocyanin biosynthesis, polypeptides involved in cell wall metabolism, including cellulases, glucosidases, pectin methylesterase, pectinase, polygalacturonase, chitinase, chitosanase, and cellulose synthase, and polypeptides involved in biosynthesis of terpenoids or indole for production of bioactive metabolites to provide defense against herbivorous insects.

[0047] Cell cycle modification: Polypeptides encoding cell cycle enzymes and regulators of the cell cycle pathway are useful for manipulating growth rate in plants to provide early vigor and accelerated maturation leading to improved yield. Improvements in quality traits, such as seed oil content, may also be obtained by expression of cell cycle enzymes and cell cycle regulators. Polypeptides of interest for modification of cell cycle pathway include cyclins and EIF5alpha pathway proteins, polypeptides involved in polyamine metabolism, polypeptides which act as regulators of the cell cycle pathway, including cyclin-dependent kinases (CDKs), CDK-activating kinases, CDK-inhibitors, Rb and Rb-binding proteins, and transcription factors that activate genes involved in cell proliferation and division, such as the E2F family of transcription factors, proteins involved in degradation of cyclins, such as cullins, and plant homologs of tumor suppressor polypeptides.

[0048] Seed protein yield/content: Polypeptides useful for providing increased seed protein quantity and/or quality include polypeptides involved in the metabolism of amino acids in plants, particularly polypeptides involved in biosynthesis of methionine/cysteine and lysine, amino acid transporters, amino acid efflux carriers, seed storage proteins, proteases, and polypeptides involved in phytic acid metabolism.

[0049] Seed oil yield/content: Polypeptides useful for providing increased seed oil quantity and/or quality include polypeptides involved in fatty acid and glycerolipid biosynthesis, beta-oxidation enzymes, enzymes involved in biosynthesis of nutritional compounds, such as carotenoids and tocopherols, and polypeptides that increase embryo size or number or thickness of aleurone.

[0050] Disease response in plants: Polypeptides useful for imparting improved disease responses to plants include polypeptides encoded by cercosporin induced genes, antifungal proteins and proteins encoded by R-genes or SAR genes. Expression of such polypeptides in transgenic plants will provide an increase in disease resistance ability of plants.

[0051] Galactomannanan biosynthesis: Polypeptides involved in production of galactomannans are of interest for providing plants having increased and/or modified reserve polysaccharides for use in food, pharmaceutical, cosmetic, paper and paint industries.

[0052] Flavonoid/isoflavonoid metabolism in plants: Polypeptides of interest for modification of flavonoid/isoflavonoid metabolism in plants include cinnamate-4-hydroxylase, chalcone synthase and flavonol synthase. Enhanced or reduced activity of such polypeptides in transgenic plants will provide changes in the quantity and/or speed of flavonoid metabolism in plants and may improve disease resistance by enhancing synthesis of protective secondary metabolites or improving signaling pathways governing disease resistance.

[0053] Plant growth regulators: Polypeptides involved in production of substances that regulate the growth of various plant tissues are of interest in the present invention and may be used to provide transgenic plants having altered morphologies and improved plant growth and development profiles leading to improvements in yield and stress response. Of particular interest are polypeptides involved in the biosynthesis of plant growth hormones, such as gibberellins, cytokinins, auxins, ethylene and abscisic acid, and other proteins involved in the activity and/or transport of such polypeptides, including for example, cytokinin oxidase, cytokinin/purine permeases, F-box proteins, G-proteins and phytosulfokines.

[0054] Herbicide tolerance: Polypeptides of interest for producing plants having tolerance to plant herbicides include polypeptides involved in the shikimate pathway, which are of interest for providing glyphosate tolerant plants. Such polypeptides include polypeptides involved in biosynthesis of chorismate, phenylalanine, tyrosine and tryptophan.

[0055] Transcription factors in plants: Transcription factors play a key role in plant growth and development by controlling the expression of one or more genes in temporal, spatial and physiological specific patterns. Enhanced or reduced activity of such polypeptides in transgenic plants will provide significant changes in gene transcription patterns and provide a variety of beneficial effects in plant growth, development and response to environmental conditions. Transcription factors of interest include, but are not limited to myb transcription factors, including helix-turn-helix proteins, homeodomain transcription factors, leucine zipper transcription factors, MADS transcription factors, transcription factors having AP2 domains, zinc finger transcription factors, CCAAT binding transcription factors, ethylene responsive transcription factors, transcription initiation factors and UV damaged DNA binding proteins.

[0056] Homologous recombination: Increasing the rate of homologous recombination in plants is useful for accelerating the introgression of transgenes into breeding varieties by backcrossing, and to enhance the conventional breeding process by allowing rare recombinants between closely linked genes in phase repulsion to be identified more easily. Polypeptides useful for expression in plants to provide increased homologous recombination include polypeptides involved in mitosis and/or meiosis, including for example, resolvases and polypeptide members of the RAD52 epistasis group.

[0057] Lignin biosynthesis: Polypeptides involved in lignin biosynthesis are of interest for increasing plants' resistance to lodging and for increasing the usefulness of plant materials as biofuels.

[0058] The function of polypeptides of the present invention is determined by comparison of the amino acid sequence of the novel polypeptides to amino acid sequences of known polypeptides. A variety of homology based search algorithms are available to compare a query sequence to a protein database, including for example, BLAST, FASTA, and Smith-Waterman. In the present application, BLASTX and BLASTP algorithms are used to provide protein function information. A number of values are examined in order to assess the confidence of the function assignment. Useful measurements include “E-value” (also shown as “hit_p”), “percent identity”, “percent query coverage”, and “percent hit coverage”.

[0059] In BLAST, E-value, or expectation value, represents the number of different alignments with scores equivalent to or better than the raw alignment score, S, that are expected to occur in a database search by chance. The lower the E value, the more significant the match. Because database size is an element in E-value calculations, E-values obtained by BLASTing against public databases, such as GenBank, have generally increased over time for any given query/entry match. In setting criteria for confidence of polypeptide function prediction, a “high” BLAST match is considered herein as having an E-value for the top BLAST hit provided in Table 1 of less than 1E-30; a medium BLASTX E-value is 1E-30 to 1E-8; and a low BLASTX E-value is greater than 1E-8. The top BLAST hit and corresponding E values are provided in columns six and seven of Table 1.

[0060] Percent identity refers to the percentage of identically matched amino acid residues that exist along the length of that portion of the sequences which is aligned by the BLAST algorithm. In setting criteria for confidence of polypeptide function prediction, a “high” BLAST match is considered herein as having percent identity for the top BLAST hit provided in Table 1 of at least 70%; a medium percent identity value is 35% to 70%; and a low percent identity is less than 35%.

[0061] Of particular interest in protein function assignment in the present invention is the use of combinations of E-values, percent identity, query coverage and hit coverage. Query coverage refers to the percent of the query sequence that is represented in the BLAST alignment. Hit coverage refers to the percent of the database entry that is represented in the BLAST alignment. In the present invention, function of a query polypeptide is inferred from function of a protein homolog where either (1) hit_p<1e-30 or % identity>35% AND query_coverage>50% AND hit_coverage>50%, or (2) hit_p<1e-8 AND query_coverage>70% AND hit_coverage>70%.

[0062] A further aspect of the invention comprises functional homologs which differ in one or more amino acids from those of a polypeptide provided herein as the result of one or more conservative amino acid substitutions. It is well known in the art that one or more amino acids in a native sequence can be substituted with at least one other amino acid, the charge and polarity of which are similar to that of the native amino acid, resulting in a silent change. For instance, valine is a conservative substitute for alanine and threonine is a conservative substitute for serine. Conservative substitutions for an amino acid within the native polypeptide sequence can be selected from other members of the class to which the naturally occurring amino acid belongs. Amino acids can be divided into the following four groups: (1) acidic amino acids, (2) basic amino acids, (3) neutral polar amino acids, and (4) neutral nonpolar amino acids. Representative amino acids within these various groups include, but are not limited to: (1) acidic (negatively charged) amino acids such as aspartic acid and glutamic acid; (2) basic (positively charged) amino acids such as arginine, histidine, and lysine; (3) neutral polar amino acids such as glycine, serine, threonine, cysteine, tyrosine, asparagine, and glutamine; and (4) neutral nonpolar (hydrophobic) amino acids such as alanine, leucine, isoleucine, valine, proline, phenylalanine, tryptophan, and methionine. Conserved substitutes for an amino acid within a native amino acid sequence can be selected from other members of the group to which the naturally occurring amino acid belongs. For example, a group of amino acids having aliphatic side chains is glycine, alanine, valine, leucine, and isoleucine; a group of amino acids having aliphatic-hydroxyl side chains is serine and threonine; a group of amino acids having amide-containing side chains is asparagine and glutamine; a group of amino acids having aromatic side chains is phenylalanine, tyrosine, and tryptophan; a group of amino acids having basic side chains is lysine, arginine, and histidine; and a group of amino acids having sulfur-containing side chains is cysteine and methionine. Naturally conservative amino acids substitution groups are: valine-leucine, valine-isoleucine, phenylalanine-tyrosine, lysine-arginine, alanine-valine, aspartic acid-glutamic acid, and asparagine-glutamine. A further aspect of the invention comprises polypeptides which differ in one or more amino acids from those of a soy protein sequence as the result of deletion or insertion of one or more amino acids in a native sequence.

[0063] Also of interest in the present invention are functional homologs of the polypeptides provided herein which have the same function as a polypeptide provided herein, but with increased or decreased activity or altered specificity. Such variations in protein activity may exist naturally in polypeptides encoded by related genes, for example in a related polypeptide encodes by a different allele or in a different species, or can be achieved by mutagenesis. Naturally occurring variant polypeptides may be obtained by well known nucleic acid or protein screening methods using DNA or antibody probes, for example by screening libraries for genes encoding related polypeptides, or in the case of expression libraries, by screening directly for variant polypeptides. Screening methods for obtaining a modified protein or enzymatic activity of interest by mutagenesis are disclosed in U.S. Pat. No. 5,939,250. An alternative approach to the generation of variants uses random recombination techniques such as “DNA shuffling” as disclosed in U.S. Pat. Nos. 5,605,793; 5,811,238; 5,830,721 and 5,837,458; and International Applications WO 98/31837 and WO 99/65927, all of which are incorporated herein by reference. An alternative method of molecular evolution involves a staggered extension process (StEP) for in vitro mutagenesis and recombination of nucleic acid molecule sequences, as disclosed in U.S. Pat. No. 5,965,408 and International Application WO 98/42832, both of which are incorporated herein by reference.

[0064] Polypeptides of the present invention that are variants of the polypeptides provided herein will generally demonstrate significant identity with the polypeptides provided herein. Of particular interest are polypeptides having at least about 35% sequence identity, at least about 50% sequence identity, at least about 60% sequence identity, at least about 70% sequence identity, at least about 80% sequence identity, and more preferably at least about 85%, 90%, 95% or even greater, sequence identity with polypeptide sequences described herein. Of particular interest in the present invention are polypeptides having amino acid sequences provided herein (reference polypeptides) and functional homologs of such reference polypeptides, wherein such functional homologs comprises at least 50 consecutive amino acids having at least 90% identity to a 50 amino acid polypeptide fragment of said reference polypeptide.

[0065] Recombinant DNA Constructs—The present invention also encompasses the use of polynucleotides of the present invention in recombinant constructs, i.e. constructs comprising polynucleotides that are constructed or modified outside of cells and that join nucleic acids that are not found joined in nature. Using methods known to those of ordinary skill in the art, polypeptide encoding sequences of this invention can be inserted into recombinant DNA constructs that can be introduced into a host cell of choice for expression of the encoded protein, or to provide for reduction of expression of the encoded protein, for example by antisense or cosuppression methods. Potential host cells include both prokaryotic and eukaryotic cells. Of particular interest in the present invention is the use of the polynucleotides of the present invention for preparation of constructs for use in plant transformation.

[0066] In plant transformation, exogenous genetic material is transferred into a plant cell. By “exogenous” it is meant that a nucleic acid molecule, for example a recombinant DNA construct comprising a polynucleotide of the present invention, is produced outside the organism, e.g. plant, into which it is introduced. An exogenous nucleic acid molecule can have a naturally occurring or non-naturally occurring nucleotide sequence. One skilled in the art recognizes that an exogenous nucleic acid molecule can be derived from the same species into which it is introduced or from a different species. Such exogenous genetic material may be transferred into either monocot or dicot plants including, but not limited to, soy, cotton, canola, maize, teosinte, wheat, rice and Arabidopsis plants. Transformed plant cells comprising such exogenous genetic material may be regenerated to produce whole transformed plants.

[0067] Exogenous genetic material may be transferred into a plant cell by the use of a DNA vector or construct designed for such a purpose. A construct can comprise a number of sequence elements, including promoters, encoding regions, and selectable markers. Vectors are available which have been designed to replicate in both E. coli and A. tumefaciens and have all of the features required for transferring large inserts of DNA into plant chromosomes. Design of such vectors is generally within the skill of the art.

[0068] A construct will generally include a plant promoter to direct transcription of the protein-encoding region or the antisense sequence of choice. Numerous promoters, which are active in plant cells, have been described in the literature. These include the nopaline synthase (NOS) promoter and octopine synthase (OCS) promoters carried on tumor-inducing plasmids of Agrobacterium tumefaciens or caulimovirus promoters such as the Cauliflower Mosaic Virus (CaMV) 19S or 35S promoter (U.S. Pat. No. 5,352,605), and the Figwort Mosaic Virus (FMV) 35S-promoter (U.S. Pat. No. 5,378,619). These promoters and numerous others have been used to create recombinant vectors for expression in plants. Any promoter known or found to cause transcription of DNA in plant cells can be used in the present invention. Other useful promoters are described, for example, in U.S. Pat. Nos. 5,378,619; 5,391,725; 5,428,147; 5,447,858; 5,608,144; 5,614,399; 5,633,441; and 5,633,435, all of which are incorporated herein by reference.

[0069] In addition, promoter enhancers, such as the CaMV 35S enhancer or a tissue specific enhancer, may be used to enhance gene transcription levels. Enhancers often are found 5′ to the start of transcription in a promoter that functions in eukaryotic cells, but can often be inserted in the forward or reverse orientation 5′ or 3′ to the coding sequence. In some instances, these 5′ enhancing elements are introns. Deemed to be particularly useful as enhancers are the 5′ introns of the rice actin 1 and rice actin 2 genes. Examples of other enhancers which could be used in accordance with the invention include elements from octopine synthase genes, the maize alcohol dehydrogenase gene intron 1, elements from the maize shrunken 1 gene, the sucrose synthase intron, the TMV omega element, and promoters from non-plant eukaryotes.

[0070] DNA constructs can also contain one or more 5′ non-translated leader sequences which serve to enhance polypeptide production from the resulting mRNA transcripts. Such sequences may be derived from the promoter selected to express the gene or can be specifically modified to increase translation of the mRNA. Such regions may also be obtained from viral RNAs, from suitable eukaryotic genes, or from a synthetic gene sequence. For a review of optimizing expression of transgenes, see Koziel et al. (1996) Plant Mol. Biol. 32:393-405).

[0071] Constructs and vectors may also include, with the coding region of interest, a nucleic acid sequence that acts, in whole or in part, to terminate transcription of that region. One type of 3′ untranslated sequence which may be used is a 3′ UTR from the nopaline synthase gene (nos 3′) of Agrobacterium tumefaciens. Other 3′ termination regions of interest include those from a gene encoding the small subunit of a ribulose-1,5-bisphosphate carboxylase-oxygenase (rbcS), and more specifically, from a rice rbcS gene (U.S. Pat. No. 6426446), the 3′ UTR for the T7 transcript of Agrobacterium tumefaciens, the 3′ end of the protease inhibitor I or II genes from potato or tomato, and the 3′ region isolated from Cauliflower Mosaic Virus. Alternatively, one also could use a gamma coixin, oleosin 3 or other 3′ UTRs from the genus Coix (PCT Publication WO 99/58659).

[0072] Constructs and vectors may also include a selectable marker. Selectable markers may be used to select for plants or plant cells that contain the exogenous genetic material. Useful selectable marker genes include those conferring resistance to antibiotics such as kanamycin (nptII), hygromycin B (aph IV) and gentamycin (aac3 and aacC4) or resistance to herbicides such as glufosinate (bar or pat) and glyphosate (EPSPS). Examples of such selectable markers are illustrated in U.S. Pat. Nos. 5,550,318; 5,633,435; 5,780,708 and 6,118,047, all of which are incorporated herein by reference.

[0073] Constructs and vectors may also include a screenable marker. Screenable markers may be used to monitor transformation. Exemplary screenable markers include genes expressing a colored or fluorescent protein such as a luciferase or green fluorescent protein (GFP), a β-glucuronidase or uidA gene (GUS) which encodes an enzyme for which various chromogenic substrates are known or an R-locus gene, which encodes a product that regulates the production of anthocyanin pigments (red color) in plant tissues. Other possible selectable and/or screenable marker genes will be apparent to those of skill in the art.

[0074] Constructs and vectors may also include a transit peptide for targeting of a gene target to a plant organelle, particularly to a chloroplast, leucoplast or other plastid organelle (U.S. Pat. No. 5,188,642).

[0075] For use in Agrobacterium mediated transformation methods, constructs of the present invention will also include T-DNA border regions flanking the DNA to be inserted into the plant genome to provide for transfer of the DNA into the plant host chromosome as discussed in more detail below. An exemplary plasmid that finds use in such transformation methods is pMON18365, a T-DNA vector that can be used to clone exogenous genes and transfer them into plants using Agrobacterium-mediated transformation. See U.S. patent application Ser. No. 20030024014, herein incorporated by reference. This vector contains the left border and right border sequences necessary for Agrobacterium transfornation. The plasmid also has origins of replication for maintaining the plasmid in both E. coli and Agrobacterium tumefaciens strains.

[0076] A candidate gene is prepared for insertion into the T-DNA vector, for example using well-known gene cloning techniques such as PCR. Restriction sites may be introduced onto each end of the gene to facilitate cloning. For example, candidate genes may be amplified by PCR techniques using a set of primers. Both the amplified DNA and the cloning vector are cut with the same restriction enzymes, for example, NotI and PstI. The resulting fragments are gel-purified, ligated together, and transformed into E. coli. Plasmid DNA containing the vector with inserted gene may be isolated from E. coli cells selected for spectinomycin resistance, and the presence of the desired insert verified by digestion with the appropriate restriction enzymes. Undigested plasmid may then be transformed into Agrobacterium tumefaciens using techniques well known to those in the art, and transformed Agrobacterium cells containing the vector of interest selected based on spectinomycin resistance. These and other similar constructs useful for plant transformation may be readily prepared by one skilled in the art.

[0077] Transformation Methods and Transgenic Plants—Methods and compositions for transforming bacteria and other microorganisms are known in the art. See for example Molecular Cloning: A Laboratory Manual, 3^{rd} edition Volumes 1, 2, and 3. J. F. Sambrook, D. W. Russell, and N. Irwin, Cold Spring Harbor Laboratory Press, 2000.

[0078] Technology for introduction of DNA into cells is well known to those of skill in the art. Methods and materials for transforniing plants by introducing a transgenic DNA construct into a plant genome in the practice of this invention can include any of the well-known and demonstrated methods including electroporation as illustrated in U.S. Pat. No. 5,384,253, microprojectile bombardment as illustrated in U.S. Pat. Nos. 5,015,580; 5,550,318; 5,538,880; 6,160,208; 6,399,861 and 6,403,865, Agrobacterium-mediated transformation as illustrated in U.S. Pat. Nos. 5,635,055; 5,824,877; 5,591,616; 5,981,840 and 6,384,301, and protoplast transformation as illustrated in U.S. Pat. No. 5,508,184, all of which are incorporated herein by reference.

[0079] Any of the polynucleotides of the present invention may be introduced into a plant cell in a permanent or transient manner in combination with other genetic elements such as vectors, promoters enhancers etc. Further any of the polynucleotides of the present invention may be introduced into a plant cell in a manner that allows for production of the polypeptide or fragment thereof encoded by the polynucleotide in the plant cell, or in a manner that provides for decreased expression of an endogenous gene and concomitant decreased production of protein.

[0080] It is also to be understood that two different trausgeniic plants can also be mated to produce offspring that contain two independently segregating added, exogenous genes. Selfing of appropriate progeny can produce plants that are homozygous for both added, exogenous genes that encode a polypeptide of interest. Back-crossing to a parental plant and out-crossing with a non-transgenic plant are also contemplated, as is vegetative propagation.

[0081] Expression of the polynucleotides of the present invention and the concomitant production of polypeptides encoded by the polynucleotides is of interest for production of transgenic plants having improved properties, particularly, improved properties which result in crop plant yield improvement. Expression of polypeptides of the present invention in plant cells may be evaluated by specifically identifying the protein products of the introduced genes or evaluating the phenotypic changes brought about by their expression. It is noted that when the polypeptide being produced in a transgenic plant is native to the target plant species, quantitative analyses comparing the transformed plant to wild type plants may be required to demonstrate increased expression of the polypeptide of this invention.

[0082] Assays for the production and identification of specific proteins make use of various physical-chemical, structural, functional, or other properties of the proteins. Unique physical-chemical or structural properties allow the proteins to be separated and identified by electrophoretic procedures, such as native or denaturing gel electrophoresis or isoelectric focusing, or by chromatographic techniques such as ion exchange or gel exclusion chromatography. The unique structures of individual proteins offer opportunities for use of specific antibodies to detect their presence in formats such as an ELISA assay. Combinations of approaches may be employed with even greater specificity such as western blotting in which antibodies are used to locate individual gene products that have been separated by electrophoretic techniques. Additional techniques may be employed to absolutely confirm the identity of the product of interest such as evaluation by amino acid sequencing following purification. Although these are among the most commonly employed, other procedures may be additionally used.

[0083] Assay procedures may also be used to identify the expression of proteins by their functionality, particularly where the expressed protein is an enzyme capable of catalyzing chemical reactions involving specific substrates and products. These reactions may be measured, for example in plant extracts, by providing and quantifying the loss of substrates or the generation of products of the reactions by physical and/or chemical procedures.

[0084] In many cases, the expression of a gene product is determined by evaluating the phenotypic results of its expression. Such evaluations may be simply as visual observations, or may involve assays. Such assays may take many forms including but not limited to analyzing changes in the chemical composition, morphology, or physiological properties of the plant. Chemical composition may be altered by expression of genes encoding enzymes or storage proteins which change amino acid composition and may be detected by amino acid analysis, or by enzymes which change starch quantity which may be analyzed by near infrared reflectance spectrometry. Morphological changes may include greater stature or thicker stalks.

[0085] Plants with decreased expression of a gene of interest can also be achieved through the use of polynucleotides of the present invention, for example by expression of antisense nucleic acids, or by identification of plants transformed with sense expression constructs that exhibit cosuppression effects.

[0086] Antisense approaches are a way of preventing or reducing gene function by targeting the genetic material as disclosed in U.S. Pat. Nos. 4,801,540; 5,107,065; 5,759,829; 5,910,444; 6,184,439; and 6,198,026, all of which are incorporated herein by reference. The objective of the antisense approach is to use a sequence complementary to the target gene to block its expression and create a mutant cell line or organism in which the level of a single chosen protein is selectively reduced or abolished. Antisense techniques have several advantages over other ‘reverse genetic’ approaches. The site of inactivation and its developmental effect can be manipulated by the choice of promoter for antisense genes or by the timing of external application or microinjection. Antisense can manipulate its specificity by selecting either unique regions of the target gene or regions where it shares homology to other related genes.

[0087] The principle of regulation by antisense RNA is that RNA that is complementary to the target mRNA is introduced into cells, resulting in specific RNA:RNA duplexes being formed by base pairing between the antisenise substrate and the target. Under one embodiment, the process involves the introduction and expression of an antisense gene sequence. Such a sequence is one in which part or all of the normal gene sequences are placed under a promoter in inverted orientation so that the ‘wrong’ or complementary strand is transcribed into a noncoding antisense RNA that hybridizes with the target mRNA and interferes with its expression. An antisense vector is constructed by standard procedures and introduced into cells by transformation, transfection, electroporation, microinjection, infection, etc. The type of transformation and choice of vector will determine whether expression is transient or stable. The promoter used for the antisense gene may influence the level, timing, tissue, specificity, or inducibility of the antisense inhibition.

[0088] As used herein “gene suppression” means any of the well-known methods for suppressing expression of protein from a gene including sense suppression, anti-sense suppression and RNAi suppression. In suppressing genes to provide plants with a desirable phenotype, anti-sense and RNAi gene suppression methods are preferred. More particularly, for a description of anti-sense regulation of gene expression in plant cells see U.S. Pat. No. 5,107,065 and for a description of RNAi gene suppression in plants by transcription of a dsRNA see U.S. Pat. No. 6,506,559, U.S. Patent Application Publication No. 2002/0168707 A1, and U.S. patent applications Ser. No. 09/423,143 (see WO 98/53083), Ser. No. 09/127,735 (see WO 99/53050) and Ser. No. 09/084,942 (see WO 99/61631), all of which are incorporated herein by reference. Suppression of an gene by RNAi can be achieved using a recombinant DNA construct having a promoter operably linked to a DNA element comprising a sense and anti-sense element of a segment of genomic DNA of the gene, e.g., a segment of at least about 23 nucleotides, more preferably about 50 to 200 nucleotides where the sense and anti-sense DNA components can be directly linked or joined by an intron or artificial DNA segment that can form a loop when the transcribed RNA hybridizes to form a hairpin structure. For example, genomic DNA from a polymorphic locus of SEQ ID NO: 1 through SEQ ID NO: 102,483 can be used in a recombinant construct for suppression of a cognate gene by RNAi suppression.

[0089] Insertion mutations created by transposable elements may also prevent gene function. For example, in many dicot plants, transformation with the T-DNA of Agrobacterium may be readily achieved and large numbers of transforimiants can be rapidly obtained. Also, some species have lines with active transposable elements that can efficiently be used for the generation of large numbers of insertion mutations, while some other species lack such options. Mutant plants produced by Agrobacterium or transposon mutagenesis and having altered expression of a polypeptide of interest can be identified using the polynucleotides of the present invention. For example, a large population of mutated plants may be screened with polynucleotides encoding the polypeptide of interest to detect mutated plants having an insertion in the gene encoding the polypeptide of interest.

[0090] Polynucleotides of the present invention may be used in site-directed mutagenesis. Site-directed mutagenesis may be utilized to modify nucleic acid sequences, particularly as it is a technique that allows one or more of the amino acids encoded by a nucleic acid molecule to be altered (e.g., a threonine to be replaced by a methionine). Three basic methods for site-directed mutagenesis are often employed. These are cassette mutagenesis, primer extension, and methods based upon PCR.

[0091] In addition to the above discussed procedures, practitioners are familiar with the standard resource materials which describe specific conditions and procedures for the construction, manipulation and isolation of macromolecules (e.g., DNA molecules, plasmids, etc.), generation of recombinant organisms and the screening and isolating of clones.

[0092] Arrays—The polynucleotide or polypeptide molecules of this invention may also be used to prepare arrays of target molecules arranged on a surface of a substrate. The target molecules are preferably known molecules, e.g. polynucleotides (including oligonucleotides) or polypeptides, which are capable of binding to specific probes, such as complementary nucleic acids or specific antibodies. The target molecules are preferably immobilized, e.g. by covalent or non-covalent bonding, to the surface in small amounts of substantially purified and isolated molecules in a grid pattern. By immobilized is meant that the target molecules maintain their position relative to the solid support under hybridization and washing conditions. Target molecules are deposited in small footprint, isolated quantities of “spotted elements” of preferably single-stranded polynucleotide preferably arranged in rectangular grids in a density of about 30 to 100 or more, e.g. up to about 1000, spotted elements per square centimeter. In addition in preferred embodiments arrays comprise at least about 100 or more, e.g. at least about 1000 to 5000, distinct target polynucleotides per unit substrate. Where detection of transcription for a large number of genes is desired, the economics of arrays favors a high density design criteria provided that the target molecules are sufficiently separated so that the intensity of the indicia of a binding event associated with highly expressed probe molecules does not overwhelm and mask the indicia of neighboring binding events. For high-density microarrays each spotted element may contain up to about 10⁷ or more copies of the target molecule, e.g. single stranded cDNA, on glass substrates or nylon substrates.

[0093] Arrays of this invention can be prepared with molecules from a single species, preferably a plant species, or with molecules from other species, particularly other plant species. Arrays with target molecules from a single species can be used with probe molecules from the same species or a different species due to the ability of cross species homologous genes to hybridize. It is generally preferred for high stringency hybridization that the target and probe molecules are from the same species.

[0094] In preferred aspects of this invention the organism of interest is a plant and the target molecules are polynucleotides or oligonucleotides with nucleic acid sequences having at least 80 percent sequence identity to a corresponding sequence of the same length in a polynucleotide having a sequence selected from the group consisting of SEQ ID NO: 1 through SEQ ID NO: 102,483 or complements thereof. In other preferred aspects of the invention at least 10% of the target molecules on an array have at least 15, more preferably at least 20, consecutive nucleotides of sequence having at least 80%, more preferably up to 100%, identity with a corresponding sequence of the same length in a polynucleotide having a sequence selected from the group consisting of SEQ ID NO: 1 through SEQ ID NO: 102,483 or complements or fragments thereof.

[0095] Such arrays are useful in a variety of applications, including gene discovery, genomic research, molecular breeding and bioactive compound screening. One important use of arrays is in the analysis of differential gene transcription, e.g. transcription profiling where the production of mRNA in different cells, normally a cell of interest and a control, is compared and discrepancies in gene expression are identified. In such assays, the presence of discrepancies indicates a difference in gene expression levels in the cells being compared. Such information is useful for the identification of the types of genes expressed in a particular cell or tissue type in a known environment. Such applications generally involve the following steps: (a) preparation of probe, e.g. attaching a label to a plurality of expressed molecules; (b) contact of probe with the array under conditions sufficient for probe to bind with corresponding target, e.g. by hybridization or specific binding; (c) removal of unbound probe from the array; and (d) detection of bound probe.

[0096] A probe may be prepared with RNA extracted from a given cell line or tissue. The probe may be produced by reverse transcription of mRNA or total RNA and labeled with radioactive or fluorescent labeling. A probe is typically a mixture containing many different sequences in various amounts, corresponding to the numbers of copies of the original mRNA species extracted from the sample.

[0097] The initial RNA sample for probe preparation will typically be derived from. a physiological source. The physiological source may be selected from a variety of organisms, with physiological sources of interest including single celled organisms such as yeast and multicellular organisms, including plants and animals, particularly plants, where the physiological sources from multicellular organisms may be derived from particular organs or tissues of the multicellular organism, or from isolated cells derived from an organ, or tissue of the organism. The physiological sources may also be multicellular organisms at different developmental stages (e.g., 10-day-old seedlings), or organisms grown under different environmental conditions (e.g., drought-stressed plants) or treated with chemicals.

[0098] In preparing the RNA probe, the physiological source may be subjected to a number of different processing steps, where such processing steps might include tissue homogenation, cell isolation and cytoplasmic extraction, nucleic acid extraction and the like, where such processing steps are known to the those of skill in the art. Methods of isolating RNA from cells, tissues, organs or whole organisms are known to those of skill in the art.

[0099] Computer Based Systems and Methods—The sequence of the molecules of this invention can be provided in a variety of media to facilitate use thereof. Such media can also provide a subset thereof in a form that allows a skilled artisan to examine the sequences. In a preferred embodiment, 20, preferably 50, more preferably 100, even more preferably 200 or more, of the polynucleotide and/or the polypeptide sequences of the present invention can be recorded on computer readable media. As used herein, “computer readable media,” refers to any medium that can be read and accessed directly by a computer. Such media include, but are not limited to: magnetic storage media, such as floppy discs, hard disc, storage medium, and magnetic tape: optical storage media such as CD-ROM; electrical storage media such as RAM and ROM; and hybrids of these categories such as magnetic/optical storage media. A skilled artisan can readily appreciate how any of the presently known computer readable media can be used to create a manufacture comprising a computer readable medium having recorded thereon a nucleotide sequence of the present invention.

[0100] As used herein, “recorded” refers to a process for storing information on computer readable media. A skilled artisan can readily adopt any of the presently known methods for recording information on computer readable media to generate media comprising the nucleotide sequence information of the present invention. A variety of data storage structures are available to a skilled artisan for creating a computer readable medium having recorded thereon a nucleotide sequence of the present invention. The choice of the data storage structure will generally be based on the means chosen to access the stored information. In addition, a variety of data processor programs and formats can be used to store the nucleotide sequence information of the present invention on computer readable media. The sequence information can be represented in a word processing text file, formatted in commercially-available software such as WordPerfect and Microsoft Word, or represented in the form of an ASCII file, stored in a database application, such as DB2, Sybase, Oracle, or the like. A skilled artisan can readily adapt any number of data processor structuring formats (e.g., text file or database) in order to obtain a computer readable medium having recorded thereon the nucleotide sequence information of the present invention.

[0101] By providing one or more of polynucleotide or polypeptide sequences of the present invention in a computer readable medium, a skilled artisan can routinely access the sequence information for a variety of purposes. The examples which follow demonstrate how software which implements the BLAST and BLAZE search algorithms on a Sybase system can be used to identify open reading frames (ORFs) within the genome that contain homology to ORFs or polypeptides from other organisms. Such ORFs are polypeptide encoding fragments within the sequences of the present invention and are useful in producing commercially important polypeptides such as enzymes used in amino acid biosynthesis, metabolism, transcription, translation, RNA processing, nucleic acid and a protein degradation, protein modification, and DNA replication, restriction, modification, recombination, and repair.

[0102] The present invention further provides systems, particularly computer-based systems, which contain the sequence information described herein. Such systems are designed to identify commercially important fragments of the nucleic acid molecule of the present invention. As used herein, “a computer-based system” refers to the hardware, software, and memory used to analyze the sequence information of the present invention. A skilled artisan can readily appreciate that any one of the currently available computer-based systems are suitable for use in the present invention.

[0103] As indicated above, the computer-based systems of the present invention comprise a database having stored therein a nucleotide sequence of the present invention and the necessary hardware and software for supporting and implementing a homology search. As used herein, “database” refers to memory system that can store searchable nucleotide sequence information. As used herein “query sequence” is a nucleic acid sequence, or an amino acid sequence, or a nucleic acid sequence corresponding to an amino acid sequence, or an amino acid sequence corresponding to a nucleic, acid sequence, that is used to query a collection of nucleic acid or amino acid sequences. As used herein, “homology search” refers to one or more programs which are implemented on the computer-based system to compare a query sequence, i.e., gene or peptide or a conserved region (motif), with the sequence information stored within the database. Homology searches are used to identify segments and/or regions of the sequence of the present invention that match a particular query sequence. A variety of known searching algorithms are incorporated into commercially available software for conducting homology searches of databases and computer readable media comprising sequences of molecules of the present invention.

[0104] Commonly preferred sequence length of a, query sequence is from about 10 to 100 or more amino acids or from about 20 to 300 or more nucleotide residues. There are a variety of motifs known in the art. Protein motifs include, but are not limited to, enzymatic active sites and signal sequences. An amino acid query is converted to all of the nucleic acid sequences that encode that amino acid sequence by a software program, such as TBLASTN, which is then used to search the database. Nucleic acid query sequences that arc motifs include, but are not limited to, promoter sequences, cis elements, hairpin structures and inducible expression elements (protein binding sequences).

[0105] Thus, the present invention further provides an input device for receiving a query sequence, a memory for storing sequences (the query sequences of the present invention and sequences identified using a homology search as described above) and an output device for outputting the identified homologous sequences. A variety of structural formats for the input and output presentations can be used to input and output information in the computer-based systems of the present invention. A preferred format for an output presentation ranks fragments of the sequence of the present invention by varying degrees of homology to the query sequence. Such presentation provides a skilled artisan with a ranking of sequences that contain various amounts of the query sequence and identifies the degree of homology contained in the identified fragment.

[0106] Having now generally described the invention, the same will be more readily understood through reference to the following examples which are provided by way of illustration, and are not intended to be limiting of the present invention, unless specified.

### EXAMPLE 1

[0107] A cDNA library is generated from Oryza sativa tissue. Tissue is harvested and immediately frozen in liquid nitrogen. The harvested tissue is stored at −80° C. until preparation of total RNA. The total RNA is purified using Trizol reagent from Invitrogen Corporation (Invitrogen Corporation, Carlsbad, Calif., U.S.A.), essentially as recommended by the manufacturer. Poly A+ RNA (mRNA) is purified using magnetic oligo dT beads essentially as recommended by the manufacturer (Dynabeads, Dynal Biotech, Oslow, Norway).

[0108] Construction of plant cDNA libraries is well known in the art and a number of cloning strategies exist. A number of cDNA library construction kits are commercially available. cDNA libraries are prepared using the Superscript™ Plasmid System for cDNA synthesis and Plasmid Cloning (Invitrogen Corporation, Carlsbad, Calif., U.S.A.), as described in the Superscript II cDNA library synthesis protocol. The eDNA libraries are quality controlled for a good insert:vector ratio.

[0109] The cDNA libraries are plated on LB agar containing the appropriate antibiotics for selection and incubated at 37° for a sufficient time to allow the growth of individual colonies. Single colonies are individually placed in each well of a 96-well microtiter plates containing LB liquid including the selective antibiotics. The plates are incubated overnight at approximately 37° C. with gentle shaking to promote growth of the cultures. The plasmid DNA is isolated from each clone using Qiaprep plasmid isolation kits, using the conditions recommended by the manufacturer (Qiagen Inc., Valencia, Calif. U.S.A.).

[0110] The template plasmid DNA clones are used for subsequent sequencing. Sequences of polynucleotides may be obtained by a number of sequencing techniques known in the art, including fluorescence-based sequencing methodologies. These methods have the detection, automation, and instrumentation capability necessary for the analysis of large volumes of sequence data. With these types of automated systems, fluorescent dye-labeled sequence reaction products are detected and data entered directly into the computer, producing a chromatogram that is subsequently viewed, stored, and analyzed using the corresponding software programs. These methods are known to those of skill in the art and have been described and reviewed.

### EXAMPLE 2

[0111] The open reading frame in each polynucleotide sequence is identified by a combination of predictive and homology based methods. The longest open reading frame (ORF) is determined, and the top BLAST match is identified by BLASTX against NCBI. The top BLAST hit is then compared to the predicted ORF, with the BLAST hit given precedence in the case of discrepancies.

[0112] Functions of polypeptides encoded by the polynucleotide sequences of the present invention are determined using a hierarchical classification tool, termed FunCAT, for Functional Categories Annotation Tool. Most categories collected in FunCAT are classified by function, although other criteria are used, for example, cellular localization or temporal process. The assignment of a functional category to a query sequence is based on BLASTX sequence search results, which compare two protein sequences. FunCAT assigns categories by iteratively scanning through all blast hits, starting with the most significant match, and reporting the first category assignment for each FunCAT source classification scheme. In the present invention, function of a query polypeptide is inferred from the function of a protein homolog where either (1) hit_p<1e-30 or % identity>35% AND query_coverage>50% AND hit₁₃ coverage>50%, or (2) hit_p<1e-8 AND query_coverage>70% AND hit_coverage>70%.

[0113] Functional assignments from five public classification schemes, GO_BP, GO_CC, GO_MF, KEGG, and EC, and one internal Monsanto classification scheme, POI, are provided in Table 1. The column under the heading “CAT_TYPE” indicates the source of the classification. GO_BP=Gene Ontology Consortium—biological process; GO_CC=Gene Ontology Consortium—cellular component; GO_MF=Gene Ontology Consortium—molecular function; KEGG=KEGG functional hierarchy; EC=Enzyme Classification from ENZYME data bank release 25.0; POI=Pathways of Interest. The column under the heading “CAT_DESC” provides the name of the subcategory into which the query sequence was classified. The column under the heading “PRODUCT_HIT_DESC” provides a description of the BLAST hit to the query sequences that led to the specific classification. The column under the heading “HIT_E” provides the e-value for the BLAST hit. It is noted that the e-value in the HIT_E column may differ from the e-value based on the top BLAST hit provided in the E_VALUE column since these calculations were done on different days, and database size is an element in E-value calculations. E-values obtained by BLASTing against public databases, such as GenBank, will generally increase over time for any given query/entry match.

[0114] Sequences useful for producing transgenic plants having improved biological properties are identified from their FunCAT annotations and are also provided in Table 1. A biological property of particular interest is plant yield. Plant yield may be improved by alteration of a variety of plant pathways, including those involving nitrogen, carbohydrate, or phosphorus utilization and/or uptake. Plant yield may also be improved by alteration of a plant's photosynthetic capacity or by improving a plant's ability to tolerate a variety of environmental stresses, including cold, heat, drought and osmotic stresses. Other biological properties of interest that may be improved using sequences of the present invention include pathogen or pest tolerance, herbicide tolerance, disease resistance, growth rate (for example by modification of cell cycle, by expression of transcription factors, or expression of growth regulators), seed oil and/or protein yield and quality, rate and control of recombination, and lignin content.

[0115] Polynucleotide sequences are provided herein as SEQ ID NO: 1 through SEQ ID NO: 102,483, and the translated polypeptide sequences for these polynucleotide sequences are provided as SEQ ID NO: 102,484 through SEQ ID NO: 204,966. Descriptions of each of these polynucleotide and polypeptide sequences are provided in Table 1.

[0116] Table 1 Column Descriptions

[0117] SEQ_NUM provides the SEQ ID NO for the listed polynueleotide sequences.

[0118] CONTIG_ID provides an arbitrary sequence name taiken from the name of the clone from which the cDNA sequence was obtained.

[0119] PROTEIN_NUM provides the SEQ ID NO for the translated polypeptide sequence

[0120] NCBI_GI provides the GenBank ID number for the top BLAST hit for the sequence. The top BLAST hit is indicated by the National Center for Biotechnology Information GenBank Identifier number.

[0121] NCBI_GI_DESCRIPTION refers to the description of the GenBank top BLAST hit for the sequence.

[0122] E_VALUE provides the expectation value for the top BLAST match.

[0123] MATCH_LENGTH provides the length of the sequence which is aligned in the top BLAST match

[0124] TOP_HIT_PCT_INDENT refers to the percentage of identically matched nucleotides (or residues) that exist along the length of that portion of the sequences which is aligned in the top BLAST match.

[0125] CAT_TYPE indicates the classification scheme used to classify the sequence. GO_BP=Gene Ontology Consortium—biological process; GO_CC=Gene Ontology Consortium—cellular component; GO_MF=Gene Ontology Consortium—molecular function; KEGG=KEGG functional hierarchy (KEGG=Kyoto Encyclopedia of Genes and Genomes); EC=Enzyme Classification from ENZYME data bank release 25.0; POI=Pathways of Interest.

[0126] CAT_DESC provides the classification scheme subcategory to which the query sequence was assigned.

[0127] PRODUCT_CAT_DESC provides the FunCAT annotation category to which the query sequence was assigned.

[0128] PRODUCT_HIT_DESC provides the description of the BLAST hit which resulted in assignment of the sequence to the function category provided in the cat_desc column.

[0129] HIT_E provides the E value for the BLAST hit in the hit_desc column.

[0130] PCT_INDENT refers to the percentage of identically matched nucleotides (or residues) that exist along the length of that portion of the sequences which is aligned in the BLAST match provided in hit_desc.

[0131] QRY_RANGE lists the range of the query sequence aligned with the hit.

[0132] HIT_RANGE lists the range of the hit sequence aligned with the query.

[0133] QRY_CVRG provides the percent of query sequence length that matches to the hit (NCBI) sequence in the BLAST match (% qry cvrg=(match length/query total length)×100).

[0134] HIT_CVRG provides the percent of hit sequence length that matches to the query sequence in the match generated using BLAST (% hit evrg=(match length/hit total length)×100).

[0135] All publications and patent applications cited herein are incorporated by reference in their entirely to the same extent as if each individual publication or patent application was specifically and individually indicated to be incorporated by reference.

[0136] Although the foregoing invention has been described in some detail by way of illustration and example for purposes of clarity of understanding, it will be obvious that certain changes and modifications may be practiced within the scope of the appended claims.

What is claimed is:

1) A recombinant DNA construct comprising a polynucleotide selected from the group consisting of a polynucleotide comprising a nucleic acid sequence selected from the group consisting of SEQ ID NO: 1 through SEQ ID NO: 102,483.

2) A recombinant DNA construct comprising a polynucleotide selected from the group consisting of a polynucleotide encoding a polypeptide having an amino acid sequence selected from the group consisting of SEQ ID NO: 102,484 through SEQ ID NO: 204,966.

3) A method of producing a plant having an improved property, wherein said method comprises transforming a plant with a recombinant construct comprising a promoter region functional in a plant cell operably joined to a polynucleotide comprising coding sequence for a polypeptide associated with said property, and growing said transformed plant, wherein said polypeptide is selected from the group consisting of:
a) a polypeptide useful for improving plant cold tolerance, wherein said polypeptide comprises a sequence identified as such in Table 1;
b) a polypeptide useful for manipulating growth rate in plant cells by modification of the cell cycle pathway, wherein said polypeptide comprises a sequence identified as such in Table 1;
c) a polypeptide useful for improving plant drought tolerance, wherein said polypeptide comprises a sequence identified as such in Table 1;
d) a polypeptide useful for providing increased resistance to plant disease, wherein said polypeptide comprises a sequence identified as such in Table 1;
e) a polypeptide useful for galactomannan production, wherein said polynucleotide comprises a sequence identified as such in Table 1;
f) a polypeptide useful for production of plant growth regulators, wherein said polypeptide comprises a sequence identified as such in Table 1;
g) a polypeptide useful for improving plant heat tolerance, wherein said polypeptide comprises a sequence identified as such in Table 1;
h) a polypeptide useful for improving plant tolerance to herbicides, wherein said polypeptide comprises a sequencc identified as such in Table 1;
i) a polypeptide useful for increasing the rate of homologous recombination in plants, wherein said polypeptide comprises a sequence identified as such in Table 1;
j) a polypeptide useful for lignin production, wherein said polypeptide comprises a sequence identified as such in Table 1;
k) a polypeptide useful for improving plant tolerance to extreme osmotic conditions, wherein said polypeptide comprises a sequence identified as such in Table 1;
l) a polypeptide useful for improving plant tolerance to pathogens or pests, wherein said polypeptide comprises a sequence identified as such in Table 1;
m) a polypeptide useful for yield improvement by modification of photosynthesis, wherein said polynucleotide comprises a sequence identified as such in Table 1;
n) a polypeptide useful for modifying seed oil yield and/or content, wherein said polypeptide comprises a sequence identified as such in Table 1;
o) a polypeptide useful for modifying seed protein yield and/or content, wherein said polypeptide comprises a sequence identified as such in Table 1;
p) a polypeptide encoding a plant transcription factor, wherein said polypeptide comprises a sequence identified as such in Table 1;
q) a polypeptide useful for yield improvement by modification of carbohydrate use and/or uptake, wherein said polypeptide comprises a sequence identified as such in Table 1;
r) a polypeptide useful for yield improvement by modification of nitrogen use and/or uptake, wherein said polypeptide comprises a sequence identified as such in Table 1;
s) a polypeptide useful for yield improvement by modification of phosphorus use and/or uptake, wherein said polypeptide comprises a sequence identified as such in Table 1; and
t) a polypeptide useful for yield improvement by providing improved plant growth and development under at least one stress condition, wherein said polypeptide comprises a sequence identified as such in Table 1.

The application's sequence listing, which the Patent Office published only in electronic form, follows.

SEQUENCE LISTING (204966 sequences)

SEQ ID NO: 1 - DNA, 418 bp, Oryza sativa
  Clone ID: PAT_MRT4530_100000C.1
gaccaccgctttggttctcctccactgcttgggacgccgccgccaccgcctgcgctgtagctgttggcaggaaaaatgatgtctggcagtggttacttcaggcttgaataaccctatgtcttcagactctcccggcggcgacggggcctgataccacgtccataaagtttgccgactgcaaactgcagatctttccgacttgctaggtcaagggcgagatctaaggcggctaccgttcggccaccgaggcggaggacacgttttcttactccaacttcaacaggaggaaggacatgctgcagaagctggggatctagatcttacgacccccagcagggcgggaggctcctgatgttactcttcttgggagactagacctaatttgacgtgtgcacctccctcggggaggagaggaact

SEQ ID NO: 2 - DNA, 537 bp, Oryza sativa
  Clone ID: PAT_MRT4530_100001C.1
tcgaattaattaagctaggacaattaataagtagctaagtagtccaatactatgggcggcggcaagaataaggtgcaggtttgtgctgtgtcctttgctgctctgaatatggtcattctcatgcatattggtgcagtgcttgcatgcgagctcttactgttcccacccttacgccgtcggtgatgctcttttcgtctctgtctccttgtggagggtattatcttcttcatctttctctctttttttcttcttctttttcccttttttttcttttcccatcctttattttttcctttctcttttttcctttctcctttccctctctttttttcctcttctcttctcttcttctttcctctctttccttcctttcctttttccctttttcttctctttccctctctctctctttaccttccttccctttcctctccttcttttcattgttccatctttctttctcttcttccacttccctccttctcttctcttccactttctttctctctctcacactcttttctcacttcttcttct

SEQ ID NO: 3 - DNA, 1606 bp, Oryza sativa
  Clone ID: PAT_MRT4530_100002C.1
tcaggcgttgccgcagagacagcgagcgagcgagagagcgcgaggcggaggtgagtgacgaccatgcaggcggtggtggcgaacggcggcggcggggacgtggtgcagaagccgcagcaggtggtggcggcgccgccgccgccccaggcggcgctgccgccgccgcctcattgggtggccatgccgttcgcgcccccgggggcggcggccatggtaatgcagcaccagatggcgccggcgccgccccagttcgccccgcacttcgtgccgttccacgcggtcggcccgccgccgccgccgcagccgcgggcggcgccgccgcccgtggccgtggcgatgggctccccggcgccgcacgcgcagggcggcggcggcgggcaggaggagaacaagaccatctgggtcggcgacctccactactggatggacgagaactacctccacagctgcttcggctacaccggcgaggttgtagcaataaaggttattcgtaataagcaaactggacaatcggagggttatggatttgtagagttctacagtcatgctgctgctgagaaagtacttgaaggatttgctggtcatataatgccaaacactgaccaaccttttaggataaattgggcatcatttagcatgggggacagacgttcagatattgcttcagatcattccatatttgtaggcgaccttgcttctgatgtcaatgataccacattactagagactttctccaaaaggtactcctctgtcaaaggtgcgaaagttgttattgatgctaatactggtagatcaaagggctatggttttgtgagatttggagatgataacgagaagacacatgccatgactgagatgaatggtacttctggacctactggttcagctgctcgatcagatggagatttgacaaacacaactgtatttgtcggtgggcttgatccaaatgttagtgaagatgaccttaggcaaacattttcgcaatacggtgaaatttcatcggtaaagatcccagttgggaaacagtgcggctttgtgcagtttgttcagaggaagaatgcggaagatgcattgcaaggactgaacggaagcaccattgggaaacagaccgtgcgtctttcgtggggacgcaatccagcaaacaagcagttgaggagtgacaatggcagtcagtggaacaacgggatgtactacgcagcctcgccgttttacagtggatacggctaccctgcaccgttccctgctgatccgggcatgtacgctgctgcttatggcgcctacccgttctacggaaaccaacaacaagtgagctaagaggtcacttgtgcttcacctcaaactggagctaggcacgcaagcattagcagtagctcttgctagaagaaaaaaagaacaaggtagacgacggtttcctaggtcagctagatgcagtcactggttatgtaaagtacattactacacgaactagctagcgccactaagccgccctattgactggccatggtctgctgaactcttcttccagaaaagaagttttgacctggagctgcaccttattgaagtagaacaataaactattcaaatacctaaaaaaaaaaaaaaaaaa

SEQ ID NO: 4 - DNA, 291 bp, Oryza sativa
  Clone ID: PAT_MRT4530_100003C.1
ttttttttttttttttaaattaattatttatttattaaagttgtattaattatataaaatttaaaacataagaaagtactttaatattcgattacataattagatgaacaaattaataactggcaaaaaaacttaaacatatgtaatagaaaatttcttaaaacaatagttaaaatacataaatggaggattaaactaaaagaaacataaaggtagttaaaagggagttttaagttataacgaataaaaaaaaggaacgttattgtaaataaataagacaatattctaagg

SEQ ID NO: 5 - DNA, 435 bp, Oryza sativa
  Clone ID: PAT_MRT4530_100004C.1
atgggcggccgcgccttcaaccattcatcccaagagaaagtgggagggaaagtggcgtcctccacgtgctcgcgtaccccgactgcgttgtgcaacgtcgacgaccgacggcgcccggcaaaaaaggcaggagcggcgggaggtggccggcgaggagggagccgcggcagaggaggtggcggctatggaggaaacgcgaagccggttggtgaggcagaggaggtgcagccggcagccaccaccccagcggaggaagaagaagacgaagactcgaccgccacgtcgccggcgtctgcacccggcgcgagcgaggagccggaggaggccccggcgggcacccccgacgccaaggcagaggaagcgctgaacccttccactgagtcagccgaggagccatccgccggccatctccccaaccgcggccaccgtcagtaa

SEQ ID NO: 6 - DNA, 539 bp, Oryza sativa
  unsure (1)..(539): unsure at all n locations
  Clone ID: PAT_MRT4530_100005C.1
gcacgaggtcttttaaatgtcaatatatcttctttttatgtatttaagcgtccctttgtgcttttatttttggtttgcaagttgtttatgtatttcatttaagaaaggtgtatggattacatgtatataatcctcgcaaaaaatgcatgtatatattgtggatttagccatctattttccctgctctttcatgctttcaaaagggccagcggtcacttggtattgtgtgggtgctctgcacatgactatttttataaatatgtaaatcatgtttgcgtatccctgcatcttatgctagacgttgattagttttcagcaaaaaattgggaagttatacttggttgaaatcagtattttgtcgatggttgtcataaatatatcaaaagttctaaactagaaaaaaaatggtatccccaaatctaaaatatttccttatgagttcacgttaaatgaaatggnctcatgcatatacagatgagtatcttatggaatgattcactcatttaccaaaaagatagtacaatattattcatcataga

SEQ ID NO: 7 - DNA, 240 bp, Oryza sativa
  Clone ID: PAT_MRT4530_100006C.1
atggcggtggatgtagcctccgtcacagtgtcggcggatcgaggcggagacggcggcttttctcggcacgaccgggcctgggctgaggtcagtcgggccggcatggcccaacgaacaagccgtgccatgccgtgccagcccacgggctacgaccacagcccaggcacgacccaagaagcctcgggccgtgctgggctggcccgacggcctggccagcccatcgtgcctatgccggcctag

SEQ ID NO: 8 - DNA, 1880 bp, Oryza sativa
  Clone ID: PAT_MRT4530_100007C.1
ttagctatgcttttgtatagtgtggttcattgtggggcactggactgtgaagtggcggagataagcccataggggtcgcttgtaataaacaccaaatctcagttgaagaaaaatgatcaagaaggagaagaactttggcttagattctagttgagcaacgtacacatagagtatacgcataagaattgctacctgattcagggttctccattcactttcaatcattgattcgatcttgtctaaggcaacttcgcttgtaaccttgtgctcattgatatagcactctactgtgtttgcggcatctcctttgttctttcttccagacttgaatgcagcaatgtcgttcatgaaacgcataatctttgcacaagctataacggcacttgaacgtactgttgtcaattcaaatgattccttcgttactgcatcaccctggccaactgcagcagtcacacagagtagtggaacagtactggacagggttgacaaagcaacccgctccttaaatgctggcttgtaattttgatgcaaccattcaaattcttgcaggtaatacgtggatagattttggaactcttttttcatgcaggtcacccggtatttgtcactggcctctacttgagcttcagtctccctgaagtaattcagcagtgcacggtagaactttttcatgtactctggtagtaatgagatagcactttcatcccacctttgtatggcttcattcagcttcctgcattcctcgatggtggcatgatcatcatatgtgtcatccataaggacaatgaatacaattatcttggcaaggatcatccgtgtgagtgttaagttttcttcatagaatagcgcataggaccaaagatatgactccactgcacgatctctaacatgacttagctcgacatatccataaagatctttccaccactgagaaaaagctttgagctccttcaagtggacatgctgcagaaggttaaattccagctttgcaagatctaaaagaacaacaatacattcttcctcctgtccgtactccagcatgtaatgcaacatttcaactctcttgtaggttctcggtaatggtaagtgtagggcacggttgatttgattatctagaggggccttgagcctacttccatccctcattgattcgaggtggtgccttgcaaaagacatagcttcttcaagttctggctcatcatggacaaggaggtgagctgcattgtacaaacttaataatgcccttggttcatcagctattgtattgatgaacctcccatcctctcctttgaatttttcgaatacatctggagatacccaaatgccatgctccctaagtaagcgaaagtggagagcaacctcgtggaggctagagctagtgaattcactttctttgatgtcacttattgcattgtttatctcatcttggaaaaggtgatctattccaagacgttgaactgcatctactaagtgcattttcttggctgtatcattgtgcgtctcaaacagtatacggacgtcctgttttagtttatcagccttttccatcatccaatcctccgatttctgtagtggctttgggtcatagttgataaagaagtccccccacacagagggctcaaagctagacacctccttcgcaggagtgattgattgtgtggacacaacttgtgcagcatgtcgatgcgcattgctttgtcgtcggaaggagacttttgccggggcaccagcagaaaggagcccaaccggcggccagattggaggatggcctgtcctagcatgcacaacaccatgagagaagaagaaagggagagggatggaagtagacatactagtatatttcccttgggagggcaatagcagttcactgatatgaacga

SEQ ID NO: 9 - DNA, 716 bp, Oryza sativa
  unsure (1)..(716): unsure at all n locations
  Clone ID: PAT_MRT4530_100008C.1
cacaccaatgctacctaccaaattcccctacctgaagtacttgagtatttctctcattggattgaccaattcgccagcttatgattatctctctctagtttcctttcttgctgcttcncctttattggagactttcttcttggctatatctcagcaacaagcagaacaggaatccacgtggggaagttcctcgcttatgaggcagattccggagcaccgatatgagtacctcaagagtgtgacgatcaacggtttctgctccgcgaagagcatggttgagctaacatgtcatattcttgagaacgcagcatctcttgagcaccttactctgaacacgaaccttggcttggctaatcgttctgaacagagtcctggtattctcaagggaagtgcctaaagctctctcggctatccagaaatacatcgcagggaaagttccctctgctgttagattaagtgttctggatgctagtgaatgaaacgctatagggcatcaattatcattttgtgaaccacgcgtccacgctcattttgtgcaactttttgatgaaccacgctctgtttactaaattattggggtcgttaaaagtttagttggagtatgctttcttggttacaatctttgtaagacttttgtggtgttcttataatatataaaatataactggtgggcgaatgcctgtcagttttcctggtcaaaaaaaaaaaaaaaaaaa

SEQ ID NO: 10 - DNA, 227 bp, Oryza sativa
  Clone ID: PAT_MRT4530_100009C.1
atgcccattgatgtggtgtggggaaggggaaagaggatgtgggatgtcatcgtgttggggatgatggcgatcggtcctccagcaaagggaggtgggattgattggagtgaaggagggattgattggagtgaaggagttgggaggagcaaagtggacgacggagagaatgagtcggagaggaagaaagaggagaaacagatatggagaataagaaataaatctagggt

SEQ ID NO: 11 - DNA, 190 bp, Oryza sativa
  Clone ID: PAT_MRT4530_10000C.1
atgaaagaaggaccaacacaagagcgcccgaggagtcccacccgggcgagaagaaagccacccaccctcttttcggctgtatcggaccctctatcacaaacggtcgccgcgcggcgtccgacctcgcccgtacgtccccgccccccgtggtcgctcgattttgttggtggtggtaaataaattggtctgt

SEQ ID NO: 12 - DNA, 915 bp, Oryza sativa
  Clone ID: PAT_MRT4530_100010C.1
ctattccagtgatttcgcatgccacttcaaccttagggcctgaccaaagaaattcatgtccttcacaccgagaccacctttctccactagagagcatacctttcgccacgagaccagacaatgtccgccactcacctcttcctgccccttccaaagtaatcctcggcattttcgctctatgtatttgattgcccatctcgggaattgcaggaccgacatgtagtgaacaggtagggccatgagtactgatttgatcaaacaaagtctgccgtcgatggatagcatctttggtttccagtcagcaactttctttgctaatttgtcaaggatgggatgtacttcagcttttgttggtttccttgttcctagtgggaggcccaggtaggtgatgggtaaatcttccacatgacaggaaatgatggcctcaaccatcgcccgctgctgatcgttgcattgtatcggtgtgatcgtgctcttgcagaaattcgttttgagtcccgttgcctcaccgaacagcgtcagcagtcttttgatcgtgcttgcttcaccggccgttggcctaaagaacaggactgcatcgtctgcgtacaccgagatggggggcatttgccttcttgcgttcagtggcgacaacagccctgcctgcttcgctcgattcaccatggcttgcagggcatccattactaacacgaagagcaatggcgacaaagggtcaccctgcctcagtccccttgctggcttaattggatcagagagcaccccatttatcagaatgcttgtttcttcagtcaggaggacagccgagaaccatcgtctccaattcgggccaaatccccttaactccaacgtggacaatagaaaaccccacgagatagtatcaaatgctttggaaatgtccagcttcaatagcatcat

SEQ ID NO: 13 - DNA, 387 bp, Oryza sativa
  unsure (1)..(387): unsure at all n locations
  Clone ID: PAT_MRT4530_100011C.1
aattcggcacgagtagatccancttttcaccataaactaacaatggtttctattcagcthhatwttgttgtctaacaattcgcatgctcctctttatactgcttaaaatggaagttatggaagtaaaaattcctggtttcaagtattgcttcaggatttatagtaacagtgcagagtgctatttatgcataattcatccataattttggtaagatgctggacttctttttatcaatcatatcatttcacaggcaagacacttttctcactgtacaaatattcaaagtctccaagdagcatcgcattcaccgttcctatgatttgacgcatatcacattcggtgactcataaccaaagttggaattkgggttccttttgtttataaaa

SEQ ID NO: 14 - DNA, 1533 bp, Oryza sativa
  Clone ID: PAT_MRT4530_100012C.1
gtcttttaataaaacgtgtcgtattatattatctccgctcccacacaaacacgcagagtcggagtaggtagcacacagaaagagtagtctatcgtacagaggttgcagaggatcctggccattgcggccccgtcctgcctacaaagaccccgctcacccaaagctttccctgctgtcgttgctcttatcctatcctacgtttgttgctcggttgcttctcttctttcctctctgtcttctgtcttctcttcttcttcctcaccaaagttgttgagttggtgtcctgttcttggacggacaagggtgtttatccaaaagaaatccatcccgagatttgcttctcttgcgcgcacactggcaccgtccggatcgctgaatcttgctggtggtggtggtggtggtggtggtggtggtgcacggccatgtcgacggcggtggcggacgtgccaccggcggcggcctacgggttccccggatcggccaagagagggaagcctgaggaggtggtggtgctgatggggaagaggaggaacgaagggttcttcatcgaggaggaggaggaggaggaggaggtgctgacggagagctcgtcgatcggcgcgccgtcgccggcgagctcgtcgatcggggagaactccggcgaggaggagggaggggacgacgaggaggaggtggagagcaagctcaaggcggaggatgagcaggtcggcctcggctgcttggacgccttggaggaatccttacccatcaagagggggctctccaacttctacgccggcaagtccaagtcgttcaccagcctcgccgaggcgacggcgtcgccggcggcggcggccaacgagctggccaagccggagaaccccttcaacaagcgccgccgcatcctcgccacctggtcgcggcgagcctcctgcagctccctcgccaccgccacctacctcccacctctcctcgcgcccgaccacgccgtcgccgagggcgacgagggtgaggaggaagacgacgattcagacgacgatgagcggcagcaccgtggcaagaacggcggccggcgagagtcggcggcgccgccattgccattgccgccgccgaggctcaccttgcacacccagatgggaggaatggtgaggaggaatggaacattcaggtcgccgaggtcgctctcactgtctgatcttcagaacagtggcggttcatgttagtttgctgctattagtacaaaaaaaataataatttttacagttagagcaaaaagccattgatctccttttggctggtagagttgttactgctacaactgcttactattagtaactatataattataattataattgcaatgcataaggtccaagtttgttgtgatctactatgattctagtaactctctggtttttctgagtcctgacctgattaagaagacatgtatcaactatgtatatctatgaactgacctaacttgaggctatcattaactaatgatggtttatgattagtcaaaaaaaaaaaaaaaaaagaaaaaaaaaaaaaaaa

SEQ ID NO: 15 - DNA, 722 bp, Oryza sativa
  Clone ID: PAT_MRT4530_100013C.1
gcacataattccttagtatagattattctgtgaaacatttgagaaccaaatcattcccctccgccgccgcggcggcggcatcaagaaacgccaagaactcggcgagcacctcgccctccagccacgccacggggagaagatggccgtcgaactgcacgtactccgggagagacgccgtaacttatatatataataaaagtaacttacatatataataaaaagtaatttacaacatacatacatacatacatacatacatacatacatacatacatacatacatacatacatacatacatacatacatacatacatacatacatatatatatacatacatatatatatatatatacatacatacatatatatatatatatatatatatatatatatatatatatatatatatatatatatatatatatatacatacatacatacatatatatatacatacatacatacatacatatatatatatatatacatacatacatatatatatatacatacatacatatatatatatatattagaatataattatgcaagtataagcacatttttttttacttcgacacagtctttgacatactgttttacgtttctttcgtatggaaactatatttggtaatcgacgtatatatactcattttcctaaatattatacaaacagttatgaaagcaatcttaatacatttgacaacatttaccattcca

SEQ ID NO: 16 - DNA, 333 bp, Oryza sativa
  Clone ID: PAT_MRT4530_100014C.1
ctatcccccagccttgtcgtcggagaattgttctcgggggataaggctcttcgacccttgaccagatcttacatggtcgtttgtccctgcataatctgacaaggccttctccgctctgggcgtccccagccgaagttcacttaggttcctcagaggccttgccagggcggcgtaaagggacatgaggataggtttcaactctaggtgttgtcgtggtaagggatcgttgggaaggaacactttgacgatgttctttaccgtggaacggttctctagccagctggcaaggactccatgaccaagagtccaggagcaaagcaacgagcacgtcat

SEQ ID NO: 17 - DNA, 312 bp, Oryza sativa
  Clone ID: PAT_MRT4530_100015C.1
atgggctggaagattcatttctgggccgaatcgacgaagatcttggccgaaaccccggagtcccgcgccccgtcgcttggtgggccgaggcgggaggaaagagttgctatccgatcctacacggattctacggaggcccagaaatcccaccgtttctccgtgctcggcccgcaaaaaacgctcatgccgcccccttcttgccgatcgtgcatcctcgcggcggtgccctcatctgctccgcgattctgcgtgctgccccactacgattcgccagccgcggcggcggtgccgggtgcgtcggtcggtcgctag

SEQ ID NO: 18 - DNA, 573 bp, Oryza sativa
  Clone ID: PAT_MRT4530_100016C.1
atggcccagaagggtgggagcgggagcagacctatccacctaccttgccatggctcatggaggttccgctgtctttgccatggatgccagccccagccagctgccaccaccaccatggatacctgtcgacgccacgagtttagtctactccatgacgtgctcgttgctttgctcctggactcttggtcatggagtccttgccagctggctagagaaccgttccacgaggctatgctccccacggagctacgacatcagagcacacgagtgcagaagtactccgacgaggagcaggaggagcagcgaagtgacgatgtaaagaacatcgtcaaagtgttccttcccaacgatcccttaccacgacaacacctagagttgaaacctatcctcatgtccctttacgccgccctggcaaggcctctgaggaacctaagtgaacttcggctggggacgcccagagcggagaaggccttgtcagattatgcagggacaaacgaccatgtaagatctggtcaagggtcgaagagccttatcccccgagaacaattctccgacgacaaggctgggggatag

SEQ ID NO: 19 - DNA, 922 bp, Oryza sativa
  Clone ID: PAT_MRT4530_100017C.1
cggacgcgtgggtgccctctcgttccttgttggaggcattggaggatttctctatctgttgctgctccaaaaatctgtagacgggttgcggcgcttaattcaccatcagaagctggcagtgcccagccctctgtgaaaggtttcagtggcataaggaggccatggttaatattgtcactgttaatggtcgctggagctgttgcattgaaatatggagcgggtggtgacaaacttgaaatgacgccagtcgagctctttgttggcactgcagggttcctggcgaacaaggttgccattcttctcgcggcattcaaacccttgcagagtaatttgaaggctgaagaccgatctggagactgaacatagtcaggctgccttgaatatactaacatttatatagcggctatacagtatcatgatctgaatgttaattatcgaagtgcctagttcaagtttccagagggaacttgagccttatctctagctcacaagcacagctgccgatcacaaatgctcttcttgaatcgtaagcatttctttaagggttcaactcggatatgaatttttcatctgaagtataccgaaacttcactgatttcacatcacaggcatggagattggcagtgtggcctatatcaacattccagacatttgaacagatcccaatgataatctaggtgacatagtatagatgtatagtcacatgatagtgccataggcttatagcagaacaatatattcttcaatgtatgtaaatctggtatactaatggttacaattttaatgattatgtacagtaatacttctgcttctaccagaatatattatattattggcgtatataaatccggtactaatgattcaaatgtaataattaccatgtatgaatagaaatcgctttggtaaaaaaaaaaaaaaaaaa

SEQ ID NO: 20 - DNA, 429 bp, Oryza sativa
  Clone ID: PAT_MRT4530_100018C.1
ccggaacaatgggggtccatttagttggttgaactggggacatgaatttcctggttggtttacaattttaacgaaatccgtgggtttacaaaaggtttttccccctccccttgttggatgttgggaaggatgctccttttttttgggaacctgaatgactgaacacccttttttttttgagccctgtccttgtttacatccccgtcctaatagatgtactggcctgtccccgggtaaagccggtttgcccacccgttgaaccccatcccgatggccgaaacaatgggccggcctttttcgccggggttttgcagggggtccttgatgtaaaaaaacccgttggctgccctggagttgaaaagcttcgggggaacccccgggggccgtttccagtttttgtccaggccgttccccagggtttttggaaag

SEQ ID NO: 21 - DNA, 575 bp, Oryza sativa
  unsure (1)..(575): unsure at all n locations
  Clone ID: PAT_MRT4530_100019C.1
ccacgcgtccggactgtgcgatgtactcagttcatcagatcaggtacgcgtattgactgtgcatagatacaatatccttggtcttttttacacaaagtacttcagaatgacatgactagatacatgtgcacactgtttgtccttagtcctcttgtagtacagcatgtgaccattgtggtcgtggctgcaattaatcgttgtacattttacgtgcccaaacagttagttttactgctaccgaccggcccattatattggtggtgacagatcaatcgcagttctagtgctgttgggacgaggcggccggtggaaggaattttgttgtcccttcattatttcacaagtggggaaaaagatcttctctataacgaagtcttcaattcaagccagaataatttaaggnnttcgatcatttttttcttatataaattacagtactttcttattggtgcattgttggagtttttttttttgggggagtggatacatgagatatataggctcccgacctccccctattagacttagaaaaaaaaattagcaattgtattaagccttattctttttttttaatt

SEQ ID NO: 22 - DNA, 454 bp, Oryza sativa
  Clone ID: PAT_MRT4530_10001C.1
gattcaatctactgaacagctgaagaaaaatgggtggaagggttctgagttttgtgttctttgtgggatgcttgaaaccactgatcacattcttttccaatgcccaatggcctctttagtttggtgcatatgcagagatgcttttgactcgagtattatacctaggtcttttgaggatttctacctgatcaatggctctttgggtggggatgatctgagagttcttttgtccctacttgctgcagtttgctgggtgctgtggtccactaggaacaacatgatttttagagaaaaattagtctactcacccctatcattaatgttccaaatcaattcatttttgcagctcgggagaatccttagcagcaaggacgctgagaattttgacaagattactcggaagctcatggatgctacttcaactctgagacaaccaagatctggagttggctga

SEQ ID NO: 23 - DNA, 525 bp, Oryza sativa
  Clone ID: PAT_MRT4530_100021C.1
atgccccttcccctctcctctctcgcctccgccgcctcccctccctcgcctccgccgtcgctgccgccgccacaagccccacgtgccaccaccaccgacggatcaggcgcgggggaccacgggagcgattccggaggaaatagcggcaagggcagcggcggcggcggcggtagcgacgatgacgactgtgaggaggccgagttcgggcccctgctcaggttcgatgaggtgctgcgcctagccatggcacgcggtgtctcgctcccggccgatatggaggcggccaaggatgctggcatctgggaagtcctgttgctccgctacttcgatctgcaggcagcaccatggcctctagccgcgatgatccgggcattctcgatgctccacaaccgaatgttagccgacccatcattcctcttcaaagttggaaccgagggattcatggatacagccatcacccccagtttccattctcttatcctgcacagttcatcggatgacatatttgtgattccaaaagagtaa

SEQ ID NO: 24 - DNA, 466 bp, Oryza sativa
  unsure (1)..(466): unsure at all n locations
  Clone ID: PAT_MRT4530_100022C.1
cttcgtgcagatgatcctccttgggtaagaagacagcttgaattgcaagaccaacaactggcagagaatggacacagggatggtagtaggacactgaaaaaccacacatggaaatcacaagattttgactgctctccgtctcaagattttggctattctgatgacgaagaattgcttcattcatcaggtgcatgatatggggagatgtgagataatgctaactggtctcttgatctgcaattattatgcctagcttcactgtagaactcacttagttgtagaggatatagagtacttatgttagcgtagcaagttattaatggcttgaatggcgaatactggtaatgtgtgcggtaactcatgtacatgcatgatgtggtggaaatgtaaaaaaagtacttataatcaacagatggtggaaacctaaacnntcgaaatcatgtgnttatgacaaatnaaaanaata

SEQ ID NO: 25 - DNA, 1841 bp, Oryza sativa
  Clone ID: PAT_MRT4530_100023C.1
aactgtaattatatcagacttttgattttaccttctgaatcggatcatgtgggtcaaagcaatcaatggtatttgatctgttcatctcactgatcacattcttataaaaatcaattgtgccagaaaaggaacaaatttgtatttaggagactggtggctggagctcgctgctgtcgatgttgcattgccgttcatctttgatggcctgcattttttttttcaaatattcaggtaggacatggctacaactgctgagaaccaccgtcctgctcaggtgctctttattggattgtaactttgaaagtgctaattaacaaatacaatcacttgcttgaagcagatgatctgcaaactgaatcatgtactcctgataaaatcaaaaggataaaaatgtccagctcgcttcgatccttttcttatttattccaccctgtaatttaaactggaaacacatatctgaagtcaatttggactgtggggactggtgtcaggtcctgcgtagcttcagtgtgaaggaggatggacaatgcaacaaaggaaatccggcatccactggagcaaggtagcatccaaggttgggtcatggggcgtggatacatgcaattgaaacgttgctttaatctgcttgctgtctacactgtgccaactcttcacgtttaatagcatcctaaaagtcatccagaatcccaaatatgtcatccgatggtcatcgcaggataagagaatggaaactgggggtgatggctgtatccatgaatcaataggtgatgtctcaactactcgctccagaccattgatgatctgatagcgcgtattagatgatacagcaaggaacacaccccatagagcagcacttttaattagtggagggacagggatatcctcatctgattttttgacactcctcttggcagtcattatcatattggcaattccttgaccaatgataccacatacaaatccaaccgagccatacaagacacccttataaaagaatgttccaattctttgctgaactgtgaatctgcagcctggcctttcagcttcaaaaacactgcttggcaaagatccagccatcctgttcccacgcgtccgcccaccagtccaagcagatgcctttccaaatctcacgtacggagccaacagccccacaagtgcaatatcaactaccactcccactagaaggtctgcggcgtacagctcaaactccgcccagaaatcctcccccctcttctgcacctccgcaaacgtggcgcagcgcgagtcaatcacaacctcggttccaactttgaagaggaatgatgggtcggctagcattcggttgtggagcatcgagaatgcccggatcatcgcggctagaggccatggtgctgcctgcagatcgaagtagcggagcaacaggacttcccagatgccagcatccttggccgcctccatatcggccgggagcgagacaccgcgtgccatggctaggcgcagcacctcatcgaacctgagcaggggcccgaactcggcctcctcacagtcgtcatcgtcgctaccgccgccgccgccgctgcccttgccgctatttcctccggaatcgctcccgtggtcccccgcgcctgatccgtcggtggtggtggcacgtggggcttgtggcctggagcaggagagggaatggggtttggggggcagtggggagaataacctggaggagagctggtggaggggtcttagctcgtgagagggatttgatggggaggaggaggagatcacggcggcagcgacggcggaggcgagggaggggaggcggcggaggcgagagaggagaggggaaggggcatggcgctcccggccgg

SEQ ID NO: 26 - DNA, 1459 bp, Oryza sativa
  Clone ID: PAT_MRT4530_100024C.1
agcacgaaacagagaaattatttgagggacatatccggtccttacttgctgtaagacaaaagtgttgtatcaatcattaatgcacatttgatgaacaactttcatgtttgtcccaaacagctaaacaagggagggagcagttaaaataaaatattttttttggcacatgcatgccaaccttgtgatgcgacgtgcttcatacgctcttcaaacaagcaaatgagttcctagcctccactgttccacatagctgctgctgttgctgcttcttctgtcccaaagaatgtaaagaacagaaagcaaaagcttcgcccatttttcatgcttgaggcaaaaataaaatgctgtttcataagcattattgaacaccactccatcgtgcccaatcaacgaactgcatcccaccatagatattgttggcaaaacggacaccaacagtgaaagccattgcaacaggtggcacacgtttcgcaataggtgatgtctcaactactcgctccagaccattgatgatctgatagcgcgtattagatgatacagcaaggaacacaccccatagagcagcacttttaattagtggagggacagggatatcctcatctgattttttgacactcctcttggcagtcattatcatattggcaattccttgaccaatgataccacatacaaatccaaccgagccatacaagacacccttataaaagaatgttccaattctttgctgaactgtgaatctgcagcctggcctttcagcttcaaaaacactgcttggcaaagatccagccatcctgttgaatctcccaaaaggaccagtcgaagcagatgcctttccaaatctcacgtacggagccaacagccccacaagtgcaatatcaactaccactcccactagaaggtctgcggcgtacagctcaaactccgcccagaaatcctcccccctcttctgcacctccgcaaacgtggcgcagcacgagtcaatcacaacctctgttccaactttgaagaggaatgatgggtcggctagcattcggttgcggagcatcgagaatgcccggatcatcgcggctagaggccatggccctgcctgcagatcgaagtagcggagcaacaggacttcccggatgccagcatccttggccgcctccatcatgtcggccgggagcgagacgccgcgtgccgcggcgaggcgcagcacctcatcgaacccgagcaggggcccgaactcggcctcctcgtagtcgtcgtcgtcgtcgccgccgccgctgccgctgccgccgcctccacccttgccgctgtttcctccggagccgctcccgcggtcccccgcggcgcccgatccgtcgccggtggtggcgcgtggggcttgtggcccggagcaggagagggaatggggtttggggggcagtggggagaatagcctgggtgagagctcgcgagaggggtttatggggaggag

SEQ ID NO: 27 - DNA, 468 bp, Oryza sativa
  Clone ID: PAT_MRT4530_100025C.1
atggtgcaaactctatataatcccactgttggtgcaaacattatgtctacaacctttgcattaaattgcttcgggggcgaactatttgcgccaacaaacaaaaacttctggagcccctctagtcccatcatcgaaggttatgggattcttcgtagagtgtcgatccagcacaatgatgtcgaagctatcctcgacttcaatgttttgaaagtctcttatttcgatcttttcgttggccatcccatagagaaacttctccttgatgtgccgcataccggagtccttgacattaaactcgggaaaatggtgtttttcattttgatcttgcgattgaaaaattctatgatggaacccattcctgattccgagccaattgaggaagtgatggctatctctccttttgaggcccccgaatccctcctcgaaaatgatgccaatgcattcgtcgaggagctaggacgatcatag

SEQ ID NO: 28 - DNA, 761 bp, Oryza sativa
  unsure (1)..(761): unsure at all n locations
  Clone ID: PAT_MRT4530_100026C.1
gggctgcaggaattcggcacgaggcacactctactgctgctcatcaccatcatcaccaccatggcagtgctcctctccatccggtcctcctcttccggccgggtcttggcggcctcctcctcctccacgccacgcgcgtctgcgtgcgagaggtgcgtgcgcaacggcaaggccgcctactcgccctcgctctcccctctcccacctggtggtggaggaggatgtgggtatggggccatggccatggagatggagctgaatgggggattccttgcagccgggggtccaaggcagcacgggggagggcttggatgtggaaggtgctttcagatgagatgcagaaatgcagaggtgtgcagtaacgcaggcgtccgcgtcgtgctcaccgactttcacaggagcaacagtacggacttcctgctcggtgggcccgctttcgcgggcctggccaagcccgggatggcccacaagttgaagaagcttgatgctctgtcagtagagtacagaagaattccctgcgactacaaggacaagaacctgtccatattagtagaagagcagagcaaaaggccaaacaatttggtcatcaagttcctttaccaaggtggccaaactgatatcttagcggtggatgttgctcaggtgggatcatcggattggcggntcatgacccgggtctatggacccgtttggagcatcgaccgggcccccaacggaccgcttcagttccgggctgtggtgaccggtggttacgacgggaa

SEQ ID NO: 29 - DNA, 155 bp, Oryza sativa
  unsure (1)..(155): unsure at all n locations
  Clone ID: PAT_MRT4530_100027C.1
ctttccttgaagattgcaagcaagatcaanggggacgggctaatctcaatgtgcggtggcctaccaatgtggcctgaaggcatcccaaccccgggacccattcaccaaatcctcttttggcagagcccaacaatgtctatgatgtacaagatcat

SEQ ID NO: 30 - DNA, 1170 bp, Oryza sativa
  Clone ID: PAT_MRT4530_100028C.1
atgggtgacggccacgccgccgataaacccacgccgccgccgccgccgcggccggtcttgctcgccggcgcttcgggcgacgccaagctctgccgcgccgcggcgctgtcacgcgaggaggtcatccgccgccgccggcgcggcctcctgcagctccactccctctaccgcgcccagctctgggcgctcgccgacgagctctccgcgaggcacgccgagtactggtgggagcacggctccagccccgacgccgggaatgccgttggtggcggcgctccccctcctcctcatccggctgtgaatggcggcggcgctgctgtcgagattgcggctgccagggcggggtgctccgcggcgaattgcggcgccaaggcgatgcccttcgcggcctactgcttcgatcacatcctcttcgaccccaagcagctgctctacaagccctgcgccttcgtcaccaaccgaagatcatatttggtattttatatatgtgaaaaacgatacttgaaaaatgatgtactgtgcacgcccgtggtaaatgctgatgcccactctatgcctattctcaactactctttcttccatcaagaagttggctgtcctcttcttcctctctttctcctagttgaacacatcgatctccagctcctagctctcaagccttcatcaccttccaggcttccttgtccctttgcttcacagctccttcacttcaccaacaaagaaagcggtggggttccaaatgttccatgctctagctaccaagtagcagcacaccagtgtgagattcacaggtttcaatcgaggcatgacgatgccaaatgggccagaggcttctgttctctcacttgctccaactcgattcccctctcggggtctgctctctcccatgatgggccagaagctccacgtggcatgcaaaatggggtagaaacttgtgggaaacctgttctgacaggcattactccatcacgatgttctgatcatgatccaaaatctcagaggctcgttatagaagctttgaaaaaagttggaattgacctgcacttgacaagcaatggagtgccaaaactgaatctattgatttgtgaaacagtccgccaaattcagaggaaaagaaagatgcagttgaatggcgcaaagaatgcgccatttcatagatcgtcggattga

SEQ ID NO: 31 - DNA, 482 bp, Oryza sativa
  unsure (1)..(482): unsure at all n locations
  Clone ID: PAT_MRT4530_100029C.1
cccacgcgtccgcccacgcgtccgcccacgcgtgcgcccacgcgtccgcccacgcgtccgcccacgcgtccgggcgccagatccatcccacgattgaaatcagttctacgaatgcactgaagttttcaatttcacaacatggtcgatgcacttcattatatctgaaatgagttaggaacttgctatcaaccccttgtttatggctgtaaatttgcaaaagataataattttggctggtaagtacaagtatttggtgatgtatatccttgctcattttcttaatctgcaaatgaaccaagtagatttgtttgatgtatatacttaataactttcttaagctgcaaaaggagccaaactagcagtgtcgttttatggcttgtaaatgccatttttggttttgcttncatgatgagcaggtctagtcagtagaatttggtctgtgtatatctctaaccactttagnntggttgggaatctatcta

SEQ ID NO: 32 - DNA, 268 bp, Oryza sativa
  Clone ID: PAT_MRT4530_10002C.1
atgaagcctcggaggatccctatgcctactaccaggagggagatgaagacgatggcgctcagtgctcgacgtggttaccctagcccaagcccctcctctgccacgctgcctcgcgccccgcgcgccgtgcgcccgctccgcctccctactgccgccgccgctgcgccgcacgccgtcaccaccccgtacgttgcccctgttgcccgttcccgcgaaattctttacccttggggggcatttccgcttgaccccagacgccgcgcgccgg

SEQ ID NO: 33 - DNA, 160 bp, Oryza sativa
  Clone ID: PAT_MRT4530_100030C.1
cccctctaactaattgtaggccgttaattcccacaaagggggttaacactgtatatttcacagagtaagggccgaagtatagcttatatgaactacaggaaaaacatactcagttgcagtctgatctacagaaaagtaaggaaagaaaaaaaaaaaaaaa

SEQ ID NO: 34 - DNA, 207 bp, Oryza sativa
  Clone ID: PAT_MRT4530_100031C.1
atgatgatgaactgtgtagtgtgggctgtggcaaatggatgtgtcttgcatgtggacttcgagctgggcctgcagcctgatgggccgacttataggctcatcaagagaacatgcatcgatggttccatccatgccaggcgaggcgactggcaaatggtaatactgatgcgtgacacagccggccgcacagcacaggtgtaccgcgtg

SEQ ID NO: 35 - DNA, 807 bp, Oryza sativa
  Clone ID: PAT_MRT4530_100032C.1
ccggcggagaagaggctactgctgccggtggcgctgacgatgacgtagaagcatggaggaggggagagggtgtgggcgcgaccgtggaggccgtcgtcgcgcgcaggggacgcgtcattcgtggaggccatcgtcgtgcaggcgcgggtgttcgacttccggtcgtcgctcgtcgacctcctcaccgtatcctccgcgcgcacgcttctgatacactgtgagcaatcgacgcccgcccctctgagggccgcccccacgccgccggcctccgtcgccactccaccagctgccatggatgacgacggcggtctcctcgctctccccgttgcgcctcccgtcggctcttcttcctccgtgctctgcgaggacggcgtctcgggcgccgccgacgaggccgccgccccgcgctgctcgccgctgctactcgatctgaacctgcccgcctcgtccccgtcgtcttccgataacaggtggagcagcgtgtcgcaacaccaatccatctcgtcgacttcggcggcggcagcagccgacggggacgaggccggcaggttcagatcgaacagcagcggcaagcagcgcggggcggcagcctcgtcagcggcgcgcgagacgccgtcctcacggagcacgaaggatgaggagccgatggggagcgcaacggggagagcgaggaggccgccgtcatcatccatgggagctggtggagaggcgacggaggctggcggcatagggggcggccctcctattcccacgtcgtcgtcatcgccaccgccgccgcggccgccgctgccgcatcgcccgtcgccg

SEQ ID NO: 36 - DNA, 3200 bp, Oryza sativa
  Clone ID: PAT_MRT4530_100033C.1
ccaaatcctgagtcgtccatgacggctccacccacctgagcagcacgcaagctctccccaccaccaccaccaccaccagcagcagccaagagcagcaagaacaagagcttggccctctacttcttttgcaaggtcagctgcatcgattcaactgtactcctccctctactttgctggtgcagtttgcagtgatccatctggaatggagttcgccacaggggcaatgagcacgcttcttcccaagctagtggagctgctcaaggaacaatatgatctgcagaagagtgtgaaggaggggataacatttctcatggctgagctcaagagcatacaagctgcacttgagaaggtctcaaaggtgccgctagaccaacttgatgagcaaaccaagatctgggcttgggacattagggagttgtcttatgacattgaggacaacattgataccttcatgctacgtgtggatggtcttgagccagccaagaaacataatttcacatggttaattgacaagtgccaaaagtctttgtccaagataaagatccgacacaaaatagccaatgaaatcaaagatatcaagagccaagtcagggaggtgatggaacgacgtgataggtacaagattgatgatgtcgctactattcctccaacatttgtggatcctcgcatcttgacattatatgagaatgtcaccaagcttgttggggttgataaggcaagtgatgatctaatgaagaggttgtctgtgggggatgaggcgcccaagaagctcaagatggtctctgttgttggaattggaggattgggcaagacaactctttccaaagtagtgtttgacaagcttaaactgcaatttgattgtgctgcttttgttcctgtcggtcaaaaccctgaaatcaagaaagtcctgaaggacatcctagttgaacttaacaaggacaagtacatgtcatttgatgtaacaacagtaaatgaaaggcatatgattaatgagcttcgagaataccttgacaataggaggtacttgattgttattgatgatgtatgggagacatcaaaatggaacattattaaatgtgctttgattgatagtaatcgtggaagtagagtaatcataacaactcgtatttatcaagttgctaaagtgaagctgctgaagaatttggtggtgtttacatgatgaaaccctttctgatgataactcaaaaaagttattcagtagaatatttggtggagattatgcctgactagttcaactggtaatcaatcggcaaaagattaaacaaatgtggtggcatacctctatctataattacaatatcaagttttggttgataaacctgtaggactggtctgcaatttatgactctattggtttttggactagagatcaaaatgaggcggttgaagcagaacacaaggaagatattgtcttttagctactatcacttaccctcatacctaaagacttgtatgttgtacctaagcatatatccagaagatcatttgattaaaaaggatactttgatatggaagtgggtagctgaaggctttgtccaagaggaacaagataagccattatttgaggtcggcgagaggtactttattgagcttataaatagaagcatgatccagccaatggagaatgatggtaagatttctggctgccacatacatgacatggtgttagatcttatccgaaacataatagccgaagaaaactttgtaaaagtattcgacaaactacatgaggtgcacaggttgtcttcacagaggagtactgtccgtaggatagcactgcatgagagttggaaccaaggcaaaaacaatgaccttgctgttggcatgacacaattgaggtcattcaatgccatcaagtgtactattagcatgatgccctcgcttctgagcttccaggttctacgcgtgctagagctacaaggctgtaatgtcacaggaggtttatacctcaagcatatcggaaagctacgtcagttgaggtacctaggaatgagaggcacacgtgttgctgagcttccagtggaaatagggaatctgatgcacctgcagacactagatgtccgatacacaggtctgaaggaactgccgtcgaccatttgtaagctaagcaagctgatgcggctgtgcgtcgctggaggaacgggcgtgctgatgggtggttggaatctgagttcactgcaatacctaaagatgggctatggttgcatcaaaagtaacaaagacttcgccatagaagtgggcaagctgatggagctgagaatccttaagatttatgtagagaacaagtttgacaagggcacgaagaacgctttgctacagtctctgtgctgcttgcgtagactccagaacctgatgatagatttccccttgccatttcagaatacgatgagcatctgggatggctgggacctctgggagccctcacctcagctccgtgtgttccgtatatgcggcattgagctgcctcggcttccagagtgggtgaactccatgtgcgtcccgtacctctccgagctgcgacttgacgtggtagccatggaagcacgggacctggacatgcttgcaaggatgccagcactccgcacactctgcctgagaacccaggcgagattttcatggacagttggtggtgccggactgtttccgaacctgagattctgtaggatggacatagcactcacatttcttcaaggagccatgccgatgctcatgaagcttcaattatggctgtgggcgtctgaatattgtgccgccactgacgttggattggggcacctccctctgctcaatcgcgtcgaagttatcctccactgctgcgatgcgactaccaggcaggtggaggaagcagaggcggcgtggaggcacatggtgaattctcacccgaaccgtcccgccattcgtgtgtcccgacttgaagagttcatatcgctctcgcactttgtttttcagtaccggatgaaaggagatgaagataatgatgatgaggagatttcagctaaggatcacgttgacggaaattgtgacgatgggaattcagcatatacggaccaagaggagctgtgcttgctctcctggaggctggtgagcgaggaacaggaaacggagagcttccttccattgacctgctgcaccgatagattgaacatattggaaatagaaacttgtagtgtttcctgagc

SEQ ID NO: 37 - DNA, 105 bp, Oryza sativa
  Clone ID: PAT_MRT4530_100034C.1
gggacaaaggtgagaaccggtccggaacggccgcggaagacccacgcgtacgcacgagatcgcgagagccgccctgtatttatctcttccaaagcacaacgggaa

SEQ ID NO: 38 - DNA, 1068 bp, Oryza sativa
  Clone ID: PAT_MRT4530_100035C.1
atggagcacacgagcagcacgtccgcgcacgccggcgagcggccaccggcgccggcgccgttcggccctctgccggtgctcgtctacgaccacggcctcgacccggtcagccgccgccacaccgtggtccgcatcgccgccgccggcggcggcgccggcaacaccatcgccctggagacgacgcacgtcgtcgtgccggagctgacgagcaacgactaccacgtgacgccgcacggttgggtgttcctcagcgagccggcggccgccgggaccacgcggcggactcgcctgtggaacccaaccaccggcgagagcgtcgagctgcctcgcatggagcagctgctcccggcgaactggaagtgctacctctccgacgaccccaccgccgcgtcgtgcgtcgtgctcgtgctggccatgtcggagcccagcctcctctactgccacgtcggcgccaccgccggcggtgggtgggtcgcccacgactacgacatcggcgacgtcggcctgccgccttcctacgcgccgccgcggcgacagttcatctcccagatcgccgccgtgaacggcaggttctacttcgcggacaccggcaagcttggcgtcctcgagttcaccccatcgccggagttcagctacctcgactacccgcacatcgagttccccgaggggtccaacttcgccaagtcattcctggtggcgtcccacggcgagctgttcgacgtgtacgtcttcttcaaggggttcacgccggagatcctcgccgtgcgcgtgtgcgccatcgacctcggcggcgccggcgacgagcggccggcgttccgcgaggtgggcgacctcggcgaccgcgcgctcctcctcggcgacgccaacgcggcgctcttgtgctcggcgagcgcgcacggggtgaagggcaaccgcgtctacttcatgcacaacatattggaggagccggacggtgggccgctgcgcgtctacgacctcggcgacggaagcatggagaccgtgcggccgtgccctggtgtctcggagctcatgtgcaaaccgttctgggtgatgccctccgcaccatga

SEQ ID NO: 39 - DNA, 255 bp, Oryza sativa
  Clone ID: PAT_MRT4530_100036C.1
atggctcgactgctgcatcgattggaggaacgtgcatggctcggccagtgcctgcatgtgtcagccggttatccagccaagacgccgcgagtgctggctgccccgtggtgcacgaccacgacgcgcgagatcgaagagccaccaggcgatgcgtggtgcgaccgtgcggctcaggacggggacaacgatgatcggagatctcgccagccgcggtacgcgcaaacgggatcaaaaacaggcaaactacaattaatc

SEQ ID NO: 40 - DNA, 1768 bp, Oryza sativa
  Clone ID: PAT_MRT4530_100037C.1
atgctgttcggcgtcgccgccgccggggccgaggccgaggcggtggaggataaggccgcggccgagcaccaccaccaccagcagcggcagcagcacggcgcgctcaacctcaacgtggaggcgaaggacatgaagctcgactacctcttctccgacctcgacccttacctcaacgtcgagttcgcccgcttcccccacgccgacagcgtcgtccccaacggcgccggcgccggcgccgccatagagctcgacttcacctgcggcctaggcgtcggcgtcggcggcgccaagcagtcctacagctcctacaccgccaccgacctcgctcacagcggctcgtcgtcggaggtgggcgtggtgccggaggccatgtgcggcggcggcggcgccatcgatctcgacttcacgaggccgaagcctcaaccctacatgccgtacacggcgactcctcctccgagccacagcgtagtaagcgcgcagatgtcgtcgtcggtggtcgacgtgggcgtggtgccggagcgggcggcggcgatgggggaagggagggaggcgaggctgatgaggtacagggagaagcggaagaaccggcggttcgagaagacgatccggtacgcgtcgcttcaacattccaaaaagcattccaatttcaacacctgcaattatacggtcctttggatgtaccacagcactgaactcacatttccagtagctgtgtccagtgcatctgagcttcctctcggtgaggtcaagccatgatttactacgggtaatgtgaacgaaataaacatgcacggcaggaattcttgtagagttttacagatcaacagatagggtagtgctaacaagttaaacaattattgttggaacatatcattgtttgcatcatatccagcgcgttgccttcgagcaatcaggtttttctcaaactccttcaggtaatctaggagcaacacacaagtgaagagaaggaatccaccgaagtagttgctgccacctccaccacctccgccgccaccaccaccgttgccggagcggaatggaggaaggcgggcgtggtgccggaggccatgtgcggcggcggcggcgccatcgatctcgacttcacgaggccgaagcctcaaccctacatgccgtacacggcgactcctcctccgagccacagcgtagtaagcgcgcagatgtcgtcgtcggtggtcgacgtgggcgtggtgccggagcgggcggcggcgatgggggaagggagggaggcgaggctgatgaggtacagggagaagcggaagaaccggcggttcgagaagacgatccggtacgcgtcgcgcaaggcctacgccgagacgcgcccccggatcaagggccgcttcgccaagcgcgccgaccacgacgccgacgacgccgacgccgacgccgacgaccccgccgccgtcccatcctcctacatgctcgacttcggctacggcgtcgtcccgtccttctgatcgccgcccgccgccggccaccgccgccgcgccgtcgcttgtaatcttgtatcaaatcgatcgatcgatgtgtaggggcgtagtaatcccatgtagtactcattttgagctagctcacgctagttttgtacactactactgctactaattacgtgcttactacttagtggtaattatttttttgatcagcaagatcatctatattgtattagctccccccaacgaataaatcacaactatatggtattattcatcaaaaaaaaaaaaaaaaaagaaacaaaaaaaaaaaaaaa

SEQ ID NO: 41 - DNA, 1249 bp, Oryza sativa
  unsure (1)..(1249): unsure at all n locations
  Clone ID: PAT_MRT4530_100038C.1
gccaagcaaacgcgaggccgacgacgacgacgaggaggaggaagcgcagccactagtcgcggcggcggcggcggcggcggcggcgggtgatcggaggagggatggtggggcttgtggaggagggaggttggatgntttttttttttttttttttttttttgcaggaaaaagaactcttgaggttgtttcacatgtgcaccaaagaggcaaaaaccactccatgcttccctatttatacacatactactagcagtatgcatacataactacaaggtagctaggtgcagtccctaaaaagaaatgaccccatcactagccagcaactaaagataattaaccctacatactaatccttacaagaggcatatatatcgaagacaatggaggaactaccatctcaaaatttaaatccatgtgagaggacggcgtactcctcgcagctcactaacgtagtctcaagatgtctctcgcaagtgatgccactcattctgtccaccagcataaagggtgactgaactgctatccgctctgatacctcggcgagagatgttaagttgcacttgatcacggcctcgacaaagtagcatgtctcgtcctttgtatttccatcaggcacgtccaccacaaatgattcaatcacaagcgtccctggtcttccatcgatgctctccggatggacagttacgatggatgagtagttcctgaggcggtggtcgccgccgacgaacttgacgctgaggatgtgctcgtcgtcgtcgagcagctcgagcctctccgtgctggtggtcgccgggaggccggtcttgacgttgacctcgcgcacgctgccgatctcgaggtcgccgccgcgcacgacgcagcggctgacgaacggcttgtacctctgcggctggtcgaagctccgcaccagcgaccacacgaggtgaacaggagccttgatgtgcttgacgagcgcggagctgcactggtgctcgccgggggcgtggctgtggagcctccgcatgtgctccgcctccgccgccgccgcagcccccgccgccaccgctcctcccccacccccacccgccgcatcatccccgaccctccaacctcctcctcccacaagccccaccatccctcctccgatcacccgccgccgccgccgccgccgccgccgcgactagtggctgcgcttcctcctcctcgtcgtcgtcgtcggcctcgcgtttgcttggctcgcctcgcctgcggcgagaagagggtagcggtg

SEQ ID NO: 42 - DNA, 206 bp, Oryza sativa
  Clone ID: PAT_MRT4530_100039C.1
gctttttggccaatgccggaaaccatgcaatggtgctggatgcttgcaagaccggatgccctggtggagttcaaatgcctcaccacgtcgagactgcccgtggacatttgcttgcaacgcccgttacaagggatttccgccgtgggacaaatgaaggtgtggacggcatggcgcctgcttggcaagatatggttgcacggagttgc

SEQ ID NO: 43 - DNA, 420 bp, Oryza sativa
  Clone ID: PAT_MRT4530_10003C.1
acgggcccggactgactggctggatcgacgcatgcgtgttgtttttgctgtcccacaccaagccatctgagcggtagtcttcgtcgccgtcgcgcgccaccaccgtggcaaccatggccgatgcgctgacccgccctgtggcaggcacgggccactgcttctggcgcaagaagacggcggtggccgtttcctactgcaagccgggacgcgttctgatcaaggtgaagggagtcctgatcgagctgatcaggccggacatgctccgccttaaggcgttcgagcccatcctgctgggggggaggtcacgcttcacggacatggacatgaggatccccgttcgtggcggagggaagacgttctagatctacgcgattcgtctggccattgccaaggcccctcgttgcctactaccataagtac

SEQ ID NO: 44 - DNA, 887 bp, Oryza sativa
  Clone ID: PAT_MRT4530_100040C.1
gcaggaatattatactggttcaataagcatattctttgactatgaaaggatttcatagtgcaaaggagaactcctttcatatgtatatattacagcacaatccaagatccacccaaatcaaaaggcccccaaccaagcccaagtgttagcggaatgtcatccaagaacacaacaatactatactacaatgggaagccagctcaaatgcaggaaaaagaactcttgaggttgtttcacatgtgcaccaaagaggcaaaaaccactccatgcttccctatttatacacatactactagcagtatgcatacataactacaaggtagctaggtgcagtccctaaaaagacctaagcccatcactagccagcaactaaagataattaaccctacatactaatccttacaagaggcatatatatcgaagacaatggaggaactaccatctcaaaaagatttaaatctctagcaaccatttgaagcttcttattcatgccagttcgcatgtcccgtgccagtgatgaccctactgttcaagtggcgaggtgggtgactgaactgctagccgctctgatacctcggcgagagatgttaagttgcacttgatcacggcctcgacaaagtagcatgtctcgtcctttgtatttccatcaggcacgtccaccacaaatgattcaatcacaagcgtccctggtcttccatcgatgctctccggatggacagttacgatggatgagtagttcctgaggcggtggtcgccgccgacgaacttgacgctgaggatgtgctcgtcgtcgtcgagcagctcgagcctctccgtgctggtggtcgccgggaggccggtcttgacgttgacctcgcgcacgctgccgatctcgaggtcgccgccgc

SEQ ID NO: 45 - DNA, 419 bp, Oryza sativa
  unsure (1)..(419): unsure at all n locations
  Clone ID: PAT_MRT4530_100041C.1
cctcccatctgaaatcggnactgccctatccccatganttggttggctgaaanctttgactgacacccatctgctgccccgtgaggatttagtgattccttgaaatccgttgagcctatgctattattgtagttcagcctttttgccttgtaaaatcaagttgaatgcttgagctttctcacatttagcactggttctcgcttgagtgttgaacggtgaccatgaagaatttgatcaccttttggctataatctgaaattttgtcaaggtgccagaacgagcaggaaactggttgaggctgcttaactttcctggtgtcttctctaggatgtgcatgtacccctctccatcacatacttgaattgtgatagccttagcatgatctgtattaatctttaaaaaaaaaaaaaaaaaaaaaa

SEQ ID NO: 46 - DNA, 375 bp, Oryza sativa
  Clone ID: PAT_MRT4530_100042C.1
tctttaaaccctcataactcactcattttaactcggatttgtcactactgattcgtgtaacgacccgcctctcccaggccgggcccgcttacatctggcagctttcataggtcatagagtgccctcacagaccaacacaagtcttttctgcacactttgtcctcactcgtgtgcaccgggaagaattttccggtcggtcacccattccaaattgctccaggccaagcacgcttaaccctggagttctttggagatcggcttccggaaaagaagctacaacttgttaatatgagtattctattaatcctattaagccctaggccgggatgtcacatcctcaccccctcaagattagagttatccactatagaagca

SEQ ID NO: 47 - DNA, 795 bp, Oryza sativa
  unsure (1)..(795): unsure at all n locations
  Clone ID: PAT_MRT4530_100043C.1
gtgtgccccggtgttgcatgngggggtnagggtggtccctccccttgggcgcccctnattgacggctgtcctcgtccttttttccctccctcgctgttgtgtccgattcttaatgccatctggtcacgaacaaggtttcccgactgggaaatcggggcagtggagccgtcaacgcattgaatgtgagtgtagctcactcatnaggcaccccaggctttacactttgantgcttccggctcgtatttgtgtgggaattggtgagcggataaccaatttcgacacaggaaccagctgatgacccatggattacgccaagctgnntgaatgacgactgcactgatagggaaactggtacgcctgcaggtgaccggtgccggaatgtgcccgggtgctgacccacgcgtccgggggcccactgcaacaaatctggggccacccacctgcagcgacccgctgccacaccaccatgtctgtgctgacacactgtgcgtgcctgcatgcctgtcgtgtgaatgttgaaagctgcttgtgcgcgccgctaatgtgcaaaacgggatgcgatggcgttgggtggtgcgtgtgcgcgcngcagcggtgttgagtgtttgtgatgacgagcgagctgggagggtgatggagaaaggagaggtcatcctcttgtgtgtggatntactacttgaaattgaggagagctgggttggtgggttaatgggcgacttggcatgggtgggtggatttggtaatataagaacacccaagangatgaattaagccaaaaaaaaaaaaaaaaaaaa

SEQ ID NO: 48 - DNA, 516 bp, Oryza sativa
  Clone ID: PAT_MRT4530_100044C.1
atggcccaaccttggcgcccgttcgtcgccgacatctcgccggtcgcagtggccgacgacgacgacccaccggcggcgtgcgccgcgtgcgcccacctggggcgcgcgtgcccgacgggatgcccgctggcgcgctgcttcccggcggccggggaccagccagcggacggccggctattccggaacgcgttccgcctcttcggcgtcggcaacgtcgtcggcttcctgctggcggccggcggggacccggggaaacggcgcgacgccgcggtgtccgtcgcctacgaggccgacgcgcgggccgacgaccccgtgcgcggcgcccacggcgtggtgatggacctcgagcgggagctcgactgcctgaaggccgaactcgcaaccgcgcagagcgcgctcgcgcggcaccgccaatacgcccagccgccgccgccgccacccgacgcactcgatcgagctcgagcccttaactacttctgccatggatgctgcggcgacgtcgacggagcggcctga

SEQ ID NO: 49 - DNA, 1228 bp, Oryza sativa
  Clone ID: PAT_MRT4530_100045C.1
gcacgaggcccgtgggggcattcctcgattgtctgccgagattggtaagccctcgcgacgattcatatcctgccgctttcttcctccgtttaggatttgcaatgatctgcttgttcgtcccttctgatcgttttatatcctgcgaggaagattgtggcgggtggtccgggatccgggcaacctgatgttaatgtcgcaggttgcgtcattgatgtttcggtttgtatcgccctacgtgaaaccatataaacaggttgtagaatggcgcaaagaacctgactcagcaaaacattcacctttatactactataaaatatattataagatcccagacgcatgcatctttacaagtccgtgcatagaaattttgtaggaacttttgtagagtttgaattgtttgtaacaacagatattcctgcaggttatttgctttcatagaacaggataaggatgaaaatttgtgagatgtcccacagtttccacgttcgtctgaccagcattcaagaaggcatatgctggacatgtggttccaatgacagtcaaggctcaatgaatgggctaaggttaatgttggaagccattaaccttagcagtgaagtatgctaaggtattatgaatgatgaaatgcactgggcgccgagcagtgaattacgccacgttttgatggatatgcgttttgcctagaaagcattgtctgacacaagaatcagcagcacatgtttaagttcaaagttgtacttcttttacaactaaaatgtgtaaattcaaatttgtaacccaaactgacctgaaagcaggttttgtttggcatgttcacattttgcaggtccacacctacaagatctggagcatctgtggtcactcagagatacattaagttttggcttttgtatatgttggcaagaaggctgctgctggatgcaagcatgcccctttaacctgactgtatggcaccatgccaatatgtgctatgtgcacttattttgtatagctgtctgttgggctgtgtgttatggtggccaatatgtgatgtgctcaatggtgtcaagtgtggtatggctatgtgctggcttttgtatagaccaaatttagtggcttttgctgtagggctttgtggcagttcatcttggtgtgcaatggaattgatttgtccttttgatatgtgatttgccttatgacatttttattatacaaatctcaattgaattctgtcaaaaaaaaaaaaaaa

SEQ ID NO: 50 - DNA, 303 bp, Oryza sativa
  Clone ID: PAT_MRT4530_100046C.1
ttgcgtgtgttttttttgttatagtggggagccaagcctaacctggtgggttcatattatcagagaaaccaacacaggtgcttcatcagggagacaggaggtggttgacgttcacattggctatacaaaaaacaaatttcttcacgcaggaaggtaataagcaatccaaccttcaaccgtagacttgttttctgacttcggggcagtttttattacaaaaagcaagaattacactcattggtatgcttacagcgccggatgtgactggaaaagaaaaccctttatgggggggacgaacatttt

SEQ ID NO: 51 - DNA, 665 bp, Oryza sativa
  Clone ID: PAT_MRT4530_100047C.1
tattatattttattttttttttttttacatggaacaaaaaacaaacagatgatcacttattcattctcagttctgatctagcaaaagcacaagggaagcctggagattccacaaattcagacaaaaaaaaattgctagtttgctatcacagagaaattacagaaggttttgtttcctgttgtagtattacatttcaacaagaccattgaggattacatcggaatcatgtcttcacttggtagttcttttaacaaccatatgataatacacagtgctaaactagttctgggagttcatgccccacttgtcccagatcaccccaaaagaatgaacaaaactttaccgagagcagaagaatttacgaaaatcaaacggccatagttccctaatccgcctttgtcaagtgcaaaatagaaaggcggcaggaactggtctgcaggatcatagagtaaaggagtagaatcgcttgcgacctttaggcttaaattcctcagcaggggcataaatcttgacactgaatagtcctgtgccatcctgtgctatatcaaaggtaaaatcctaaaatatccttgcaccacccattccgaaagaatctctgtcatcttgttagttgtggattgctgcgtctctcttctgatcgatgatggaataactttgctattgac

SEQ ID NO: 52 - DNA, 296 bp, Oryza sativa
  Clone ID: PAT_MRT4530_100048C.1
atgagggtggcagtggtggacaagagcggcgcagctcaacggcatcagcagggatggtggagctgtgcgctgcgggatgtgacactggccttacggagatcctgcagtgatagagggcttcagggtagagcgacggtgatgcaaacaggcagccatggctgcgccgtcaagtgggctatggggagaggggatccgctcttccctctcaccctctccctctctaacccaactatgtggatggaggttgagtgcaccagatgtcttcctcctgctaggtggccacttggggtcgaggc

SEQ ID NO: 53 - DNA, 981 bp, Oryza sativa
  Clone ID: PAT_MRT4530_100049C.1
atggcagatgcttctcgacttctggcgagtgagattgagatgataatgatattagttcaaggtggaatgggtatggttgcagcttcactaatgatacctccttaccctaacaacaaccttcaccatcaccaccaccattgcagctcaaaccaagaaccacacttaccattacatccaccagctttcctcatgtccgcgccgtcgtcgtcgtcgtcgccgtcgacgctggacgagtacgacgcgcgcttcttcttccccggcgccgacgcgtacaccgccggccaccggcaggatgaggagacgctggaggccgtgctgcggcagccggtgacgacgacggccgcggcggcggcggcggtggagggaggtggcggcggtggaggaggaggcgccgggggatcccccgcggcggcggcggcggcgacgcggaggcggccgttccggacggaccggcacagcaagatccgcacggcgcagggcgtgcgggaccggcggatgcggctgtccgtcggcgtcgcgcgcgacttcttcgcgctgcaggacaagctcggcttcgacaaggccagcaggacggtggagtggctgctcacccagtccaagcacgccatcaaccgcctcacccttcccgactccgccgacgcggcggcggcgcccgcgttcgccgccgctccaccgccggcggatcagcattcctcggccatggccgccgccgcagcatcggctgcgaaggagaaaggggaggcgagctcgtcgagcaccaccaatgcgtcgtcggcgcgggcgagaaacagagaccacgacggatcatcgccggtggcgcccatggacgagcgcgggcgccgcggtgtcgagctcgactggacggcggcggcggcggcgagcaccgagcagccgatggacggattggagtactacttccaatactacaatcatctggaggagataatgagctgcgacccaacgacgacaacggatgagtaa

SEQ ID NO: 54 - DNA, 587 bp, Oryza sativa
  unsure (1)..(587): unsure at all n locations
  Clone ID: PAT_MRT4530_10004C.1
gccgaagctggcgtaagccaagaatatggagggaggggtggccatgtgatacctcacgacttncccctgcttatacttctccgcccccctattcctttggctatctgccaaccagtgctgttcgtatgatgacacaagagcctcggaccgcgcatcggtgttttatgaacaggcattacgcctctgctccgcgatggaaacttcccgggccgtcgtgagataggcctgcgtattggaagccgagcctaggaggagcggctcaccatctagatgctcctatgccagcgtatcctgttactcggttctgcgcaggatggtatgacgtgctgatcctcatcatatgccaactcttgctgcttgttgctgaacataccactaatgacatcaagtatgattattaactcaccagtaggcttactgccattgagcttgtgcagctatgtggccatgatgatatgccaggctgatatctaaacatggcagctttctactgtcgacatgacatgtttcgcatgtctgttagctcatgtgacaacatactatagattttgcatgcctactgcgagatgcatgatccatcagccata

SEQ ID NO: 55 - DNA, 1551 bp, Oryza sativa
  Clone ID: PAT_MRT4530_100050C.1
atggttactacggatacaaccgttgctcacatcatggataaacaagatgatatcaagatcaagttttccaagtgttggaatcctattcggccacctgctacactactgacttcaaacttccgccgaatctgcatacgacatccgttttcggcgcaattgagggaacaaggtgctgcatcacctgtaatgggcctatgggcttgtaacttcatctgggaccccggcccaagaataaagttgatctgcaccggcaagattagcaacccacggagaggtgtatcgatcgcaaaggcgcaacacaacgtcttgtacggttgtagtcagatcgtcaatgtttctctcaaatttcatcgccgccgccgtatgtttgctctcatcgggatttacgaaaatggaatcagctcgctgccacggttctatttttgtagtttttagaagtttctgtcgccgtacaacaattgtttgccaaggcatcgatatatccaacctccattgaggtgcttggttgagtcggtgtacatcaccattccgcttgctttgggagttcaaaacattcaacaaaaggagaatggtgtacttgagaaaaaagaggatgttgcaccagcggagtctgaagaaagtttgcaacgtcaactaattggtgctgagataaatgaaggtgagcaaccattagtggaaccaattgctgawttgcctttgtcacaagttgatttatttgttgttccttgtgataaagaagagttgtgtgataatgcttcacttatatccatgccacaactagtgaatgaacatgctatatctactgtttcattgtgtgctgattttaagcatgttgttcacattactaatgatgttgaggaacgtaatttgataacttatttaaatactttgggctatgttcagtttgatgatttttgtgagctcaataatttggaggagaaattatttgctaagactgattttccatgtccaactaatgttatttttcatatctttggtgaatataatgaaagaggaatatatttggttcatagagttttcatctcttcggatttagagagatatgttattgctaatcacactacttcgagtttctctagttttgattggatgaaacatgatattttgaatggaccatgtgacgagcaccatatggaaaaaccgaggacggttttctgtgaagaaggggaggatgatgtgaccatatttactacggatacaaccgttgcccacatcatggatgaacaagatgatatcaagatcaagtcctccaagtgttggaatccgattcggccacctgctacactgctgacttcaaacggctgttgaatctgcatacaacatccgttttcggcgcaattgagggaacaaggtgatgcgtcacctgtaatgggcctatgggcttgtaacttcgtctgagaccccggcccaagaataaggttgatctgtaccggcaagatcagtaacccacggagaggtgtatcgatcgcaaaggcgcaacacaacgtcttgtacggttgtagtcggatcgtcaacatttctctcaaattg

SEQ ID NO: 56 - DNA, 1342 bp, Oryza sativa
  Clone ID: PAT_MRT4530_100051C.1
atggcggccgccggctggccgctctcctcctccgtcgccgacctcctccccgcctccctctcgctcaccctcctcctcgcctccctcgtacaccctctccccccctctgcccccttcctcctccgcctcctcgcgctacttatcccttctccccgcccctcccgtgcgcaggtggtcgtcgtggtgctggccgccgccgccttcttcttcgagcacatccgcaagatcggatgcacgcactcgctggagaggactgaagtctcggccgctttcttcgaggaccccaactcgctcaacaaggttcgttgcccttcaatttacgaccctgctgagaagtacatttcgttgatcatccccgcttataacgaggagcaccggcttcctgaggctctcacagaaacactcaactacctgaaacaacgttcagctgtcgagaagtcatttacttacgaggtcttgatcgttgatgatggaagtactgatcatacatcaaaagttgccttcgagtttgtaaggaaacataaaattgataatgttagagttcttctacttgggagaaaccatggtaaaggcgaagcagtcagaaaaggcatgctccattcacgtggtgaactgttactcatgcttgatgctgatggggcaactaaggttactgatttggaaaagcttgaagcccaggttcgcgcattggctaaaaaggctgagtccagcctagcaccatctagcagtccatctcagagactatctgatgctgaaattgctgtttttggttcacgtgctcatctggagaagcaggctcttgccacaaggaaatggtatcggaattttcttatgaaaggtttccacctggtagttttattgacagctggtcctgggatcagagacacacagtgtggtttcaagatgtttactcgagctgctgcaaggaaactttttacaaatatcagattgaagaggtggtgttttgatgttgagcttgtatacctatgcaagcatctcaggatcccaatggctgaagtatctgtaaactggactgaaatacctggatccaaagtgcgtatgacaagcatcctgcatatggtatttgagctcctgctgatcaaagtaggttatggactgagcatatggaaaatctattcatagaccatatgcacggtacgctgacaatcaccatagcttatcatcactggactgtataccaagcttagtctcacatgtaaaatttttccaagattttcacctagagagaatccatttgtggcgctgagtattccatcatagatttcaacaaagatatagatcactgtgtattgttcctgctgatgaaattctttaatcattt

SEQ ID NO: 57 - DNA, 195 bp, Oryza sativa
  unsure (1)..(195): unsure at all n locations
  Clone ID: PAT_MRT4530_100052C.1
acgaatttcattagattcattaggctagatgattccattcgacaccacaaaagcatccgaggcattaagaggatacaagtntttcatcacgncatcacccatccatccatcacagaccaaatgaactcccccaactttnctggngctaacgacgncgatgcttcattnattcagacgccggtggatccgaaccct

SEQ ID NO: 58 - DNA, 550 bp, Oryza sativa
  unsure (1)..(550): unsure at all n locations
  Clone ID: PAT_MRT4530_100053C.1
gcgtccgggaccgcgtgaactttcgctactctcgcctactnatcacgaagcacctacctagcgtccgccgcgtgcgccggccgtgcggggtgcggcaggctggtccccgccatgaggcgggggctgtcggtccacctggtgcaggccagcatgaacgccggcgaactcctgctgccagctacctcgcctcgagcgtggtctgcagacggaggggctgatgcccctggacaacaccgcaggggggggagacggagccctgaacatctgattgaaggagactgcggctggctacctgggcctgggggctctgttgggaaacttggtgcctacgaggaccgttgttgcgaagagctggagactactcggcaggtcttgcggcgtgagcagctcagctcggctcggggagatgctggcggcagcttggcctgagctcactactccgttgtctaagtaaacgcgctgctgtgccttcgccgaattaggaatctgggcgccaactggcctggccgacagggatgtcttggggtcatcgctggtgaacgttgctcgg

SEQ ID NO: 59 - DNA, 860 bp, Oryza sativa
  Clone ID: PAT_MRT4530_100054C.1
gcagacaaggtgaaaaatgccgcataagggaaatgaggggaaaaatggggaggtgaatcgaaaaaccagcagccgcagccgccgccaccgagtgtgtacacaagtcatatacttgatgatgatgtttttctatatagagagaggctactgccatgtatggtcccccatgttggtatggaattcaaatgttcagatgaggctgggatgttttggcatagatatggaggtcaaaaaggctttgaggttagaaaaaggtacacaaagaaaatcagatggtgaagtaacatcatataggtttgtttgtggaaatgagggtcatcgaggaaatgacaaaagggatcatctaacaaagtgtcctcgagctgaaaccaaaactaattgtcaagttcgtatgagtgtagcaatggacaaaaagaagggaaactataaagtgtctgagttggttcttgaacacaatcaccccttgcacttgcatgaaaccttgcacttgatggcctcgtaaaggaaaatttcagatttacaagcttttgaaattgaaacagcaaacgattctggaattgggccaaagacggcatatgagttggctagtcgacaagttggtggatcacataatctaagctacaacattcgtgatcacaagaactatttgcggagcaagcgccaaagggagatggcatatggtcaagaaggtagaactatttgagaactcaaggatggatgcttgctttcgctataaattcctctcccacaaatttctcaacttggcacaacaagctggaaagatacaaagcaaatggcagcagaagcacatttctcttccatggcgtcctacagaagccaaaccacctcgtcaaaacatc

SEQ ID NO: 60 - DNA, 195 bp, Oryza sativa
  Clone ID: PAT_MRT4530_100055C.1
atggcttgtgtttggattggccgacctaaaaggagttctattggtttcggctatgataaattcaatgatgtggcggtcggactggtggaggtcgtcatcgtcgcgggtggagatctggccgggagtggaatcgtttggaaatcgccctgcgcgtcgaggaggtcgccggagagagagaagacgggatctgcttga

SEQ ID NO: 61 - DNA, 846 bp, Oryza sativa
  unsure (1)..(846): unsure at all n locations
  Clone ID: PAT_MRT4530_100056C.1
ccacgcgtccggaagggaaggcctgatcggattcgagctgtgccggcgaggagaggagatatggacgcgaagcagagcgtggcggcggcgaagccgtcgctggcgaagaagacggcgtcggcgtcgttccggctgaggaacggcagcctgaacgcggtgcggctgcgccgcgtgttcgacctgttcgaccgcaacggcgacggcgagatcaccgtggacgagctggcgcaggcgctcgacgcgctgggcctcgtcgccgaccgcgacggcctcgccgccaccgtctccgcctacgtccccgagggcgccgcgggcctccgcttcgaggacttcgacgcgctccaccgcgcgctcggcgacgccctcttcggctcgctcgacggcgccgccgccgccggcgagcccgncgncggcggcggggcacgaggaggaggagatgcgggaggcgttcaaggtgttcgacgtcgacggcgacgggttcatctcggcgtcggagctccaggaggtgctcaagaagctcggcctcccggaggccggcagcctcgccaccgtgcgggagatgatctgcaacgtcgaccgcaacagcgacggccgcgtcgacttcggcgagttcaagtccatgatgcagggcatcaccgtctggggcccctgatctccaccaatcccttcaaacatcttttgaattccatccaaatttcaaccaaacacgcacgcgcgcagtccaaattgaatcaaactgaacatcactaggttaactcaatatatttatctcatgcaattacatcactgtatgtacatgtgacaaagcagggcctgagctttgttgctatggcctgttttgtgttt

SEQ ID NO: 62 - DNA, 130 bp, Oryza sativa
  Clone ID: PAT_MRT4530_100057C.1
gggcccacctaaaccttggggccctctctcaaagccacctccttcctgggggtccaggttatgggggacatccacagtttatgcccccaaggccgaaagacaataataatcctcccccggatgtcccctt

SEQ ID NO: 63 - DNA, 451 bp, Oryza sativa
  Clone ID: PAT_MRT4530_100058C.1
ggaattcttaggtcctgtaagtaaatgtcttggttgctcataggtgacagtgaggcaattacacaaagaatgccatttctccctgttgaaagaagagaattttgaacatccctgcaaggatcaggagaacggatttcctggagagtgtgctttattatcttttattttttccctttttgtgtattttttctcttttattgtgtaaaaggtgcttgtctatacatcattttgatgtgcatcgttgccctgctggtcctgcaacaagtaaagaatctcacatgtacgaccagtcctttctgtgtatatggagagaagtggagaggcacacgaatagttgagttgtcgattgctgcaatgattctaaccaaagcttcaggtttattgtattggtcatattgtaccttttataccattttctttagttctcgtttaaaaaaaaaaggaggggggg

SEQ ID NO: 64 - DNA, 1547 bp, Oryza sativa
  Clone ID: PAT_MRT4530_100059C.1
ggatgctaggcccagaataaaccgcccccaaatcggctataagacccttactccgccgatttaatccacggataatcactgcggcatcgtaggccttttttgagctataaatagagctcctgatgccctcctccactccacaccgaaaccgctccaatccccaaatcctcctcatctcctcttccagaacctttctttttcgatttcgtgttcgagttctttgtgattgcagcgatggcgtccgtggatctgaccccgaggcaggcgaggaaggcgtacggcggcgatggtgggacctactacgagtggagccccgcagacctgcccatgctggaactcgccaacatcggcggcgccaagctgtcgctcaacgccggtggcctcgccctgcccagcttttccgactccggaaaggttgcgtatgttcttcaaggcaagggcacttgtggcattgtcctgccggaggcgagcaaggagaaggtgatcgccgtgaaggagggagactccctggcactcccctttggcgtggtgacatggtggcataacctcccggagtccccaatcgagctcgtcatcctcttcctcggcgacacatcgaaggcgcacaaggccggccaattcacaaacatgcagctcaccggtgccaccggcatcttcaccggcttctccacggagttcgtcggccgcgcatgggacctcgccgagtccgacgccgtcaagctcgtgtccagccagcctgcctccggcatcgtcaagatcaagtccggccagaagctccccgagccgtcggccgccgaccgcgagggcatggcgctcaactgcctggaggcgccgctcgacgtggacatcaagaacggcggccgcgtggtggtgctcaacacggcgaacctgccgatggtgaaggaggtcgggctcggcgccgacctggtgaggatcgacggccactccatgtgctcgccggggttctcgtgcgactcggcgtaccaggtcacctacttcatccgcggcagcggccgcgtccaggtggtcggcgccgacgggaagcgcgtgctggacacccacgtcgagggcggcaacctgttcatcgtgccgcgcttctgcgtcgtctccaagatcgccgacgcctccggcctgcagtggttctccattatcaccacaccaaacccgatcttcagtcacctggcggggaagacgtcggtgtggaaggcgatctcgccggaggtgctggaggcgtcgttcaacgcgacgccggagatggagaagctgttccggtccaaaaggatcgactcggagatcttcttcgcgcccaactgagcagcttccctttgccattgcgtcgtcgcgtcggtgtcgtcttaaattaggattaagtcattaataatttcatctcttatcatgagatgttactaccttctgtcagtcttatgctattgcggttgaactgtggtgattcgccacttaaaattctattctattcgagagtgccttctggtgcaaaaaaaaaaaaaaaaaaaaaaaaaaaaaaaaaaaaaaaaaaaaaaaaaaaa

SEQ ID NO: 65 - DNA, 688 bp, Oryza sativa
  Clone ID: PAT_MRT4530_10005C.1
atgaccgtcgtcgccgcctcgaccagggcgctcgtgttccaacgggtgcctggtcgcatcgtcgtcgcctccattctctcactgcggcagcctccgtcccgtcgccaccgccgacaggctttacaccgccctcagccgctccatcgcgccgtttagtcatctcctgttgccggccacgcgcgccagcttcagctgcggctgccaccgtggcctccacgagcgccggcctccgctgccaccggccgcgcctttgcacacgccggtttttgccgtcgccagcccgccgccggtcgcagcttcgcacgcgctagcctccttcaccagctgccgccagccaccagacgccgccgccttcgcctcccgtcgtcgctgcccgagagcggcttgctccggccagatccagatccacccatggggaggccggatccagccgcggcggcgctgaatctgccgcctccacgccgtgtcttcaacctctgctccgcgcgccggcccgccttccatgcacatagcgccgtcgacgtttggccttgccgccgccgtcccagctggccgctcggttctccggtagctgcgaggggagggagaggaggagagagtggcagcggcggtgctaggtttccccccgagtcgcccacgcgtgggcgacctaggtttgggtgtttcttttctccccctggagcactct

SEQ ID NO: 66 - DNA, 191 bp, Oryza sativa
  Clone ID: PAT_MRT4530_100060C.1
cgcgacgtgcggccgatgaatgtggcacggaacgtcgcgccgggcacgacaaaagcggaagggcctcggactcgagagatggctcgccgtcggttgtcgcctctacgacggggaggataagctgcggctatagggcaactaggcacaaccaaggcgatgtgtacgtacgcggcacgcacgacgccgacccg

SEQ ID NO: 67 - DNA, 220 bp, Oryza sativa
  Clone ID: PAT_MRT4530_100061C.1
gcacgagggaagcttccagaccccgagggttagggtacgcatgcggcggcggaggcggcggcggaggcggcgatccggcgtgggcggcttgtatccggggccgtcagcgtagcggcggcgctcggcgcgctgtggctggcctgcgccctcaggatcgccagcgccgtcaaccactgtctcgcggtgaaggcggcgggcgtctccgtctgggccgacgcca

SEQ ID NO: 68 - DNA, 342 bp, Oryza sativa
  Clone ID: PAT_MRT4530_100062C.1
atggagcggcagcggcggcgggtgacgctgaggcggcgacagcgggagcaggggcggcggcggtggcggagcttgcggcgcaccctagcaggggaggggaggaagaggtatgacagcctctccgccatggccaccgccgtgcgcgccgctacccgccttcgccttcgcctccgctgccggttgcatgagcgcgtcgccggtgcccaagcgagccccgcctcccccgctggccactcgcgataccttcccctccgctccaccgacagtcgctcgagcaacctccgcctccaccgccagcgccagcgcccgagcgtcgtccttcactcctgcgctgggggttaa

SEQ ID NO: 69 - DNA, 721 bp, Oryza sativa
  unsure (1)..(721): unsure at all n locations
  Clone ID: PAT_MRT4530_100063C.1
attcggctcgaggcgtgtcttcccccaacgaaaccaacgaggtttcttggggtatcttgaattctgcgcttaacgcttcgaatctttgaattcattcaaagatctccctctacgcatatcagggcactatggctgccacggtgaaacaaatgtctttgatcgtgtcactgttgggtgtggtgtccttcattttgggagttgttgctgaaaacaagaagcctgtggctggaacacccgtgcctggttcggatggtatctctgtcacctgcaagtacccagccgatccaactgttgcattggggtatctttctacagcatttcttgttgcatccactgtgattgggtatatgtctttgttttacccttacaaaggaaagtctattccacaagggattctgtttaagcacaccactttcacagtgttcttcaacatttctttgttcaccgctggattagctgcagctatgctgttatggccaacaatcacagaacacattcacctgacacgcaatgtgcaccagaatctcagctatgaatgccctacagccaaaactggtctcctcggaggcggcgcctttctatcccttgattcatctctcctttggttgattgcccttatgttagctggcaatgctcgtgaggatttctttggagaagaagaagatggtgacaagggtgaatttggtgcagcctcctctgatgctntatatgatgccgattc

SEQ ID NO: 70 - DNA, 339 bp, Oryza sativa
  Clone ID: PAT_MRT4530_100064C.1
cccacgcgtccgcccacgcgtccgccgatcgcaaatactctctctcgccgatagcagtaggagcagcaatggccgacctcgccggctcatccaccgccttcgccgccaagccgcgcctggcgcgcgcgccgtcgtccccggccgcgcggatctccgagtcgcgctccgagtcgggcaacaacggcggggccggctgagatggcgccatccctggcggagtagaaaagacgttctgcgaggcgctggcagcattatcttggtgcatgacttacacactgatgctcttctgtggcatttcaatcagattagcagaatggtatagtcctgaagctttcattt

SEQ ID NO: 71 - DNA, 219 bp, Oryza sativa
  Clone ID: PAT_MRT4530_100066C.1
atgcccatctttagtcccgataaaatctgcaagcgcacggaagataccgatgtagcacttcacccgggagtattccaaggtattggccagcccgctgctctcaaatatcgctctactgcatacccggacagggagaacttcagtgtaattgagggctatcactacctctacacccacctcaaacctaccgtgggatacgaaacaaccaccgacaattaa

SEQ ID NO: 72 - DNA, 378 bp, Oryza sativa
  Clone ID: PAT_MRT4530_100067C.1
cctcactaagggaatatgcttgcggctgctgctttcccctccctggtcgccaaatgctcccggcacctccaccgtcccacccacctcgccccttccccactcccgcgctgcccctgctgcctgccacctcctgcgcatgtggcttctccactgtgtgtcctgtgtgctgaccggctgtgcgtgtgtgttctgtgtgctgtgctgtgtgtgtgaccgaccgggccacctgtctggacgtgactgggctcgtgttctgtggcgacgccccacgtggacactgtgctgtgactgggacgtgttgtgctgacttgtgcgtgactacactgacgggggtactgtgtgttgtgacgctgtgctacgttggactgtgttgtgcgc

SEQ ID NO: 73 - DNA, 153 bp, Oryza sativa
  Clone ID: PAT_MRT4530_100068C.1
atggcggaggaggcgcgtgttggccgcctgaccggcgtggggcacggagcgggactacccacttgcatctctgcgcagcaggcggtagccggcggcagagttgcgcaccggccaactcatgaaatatacaagaaaggatttatgggtggctag

SEQ ID NO: 74 - DNA, 669 bp, Oryza sativa
  Clone ID: PAT_MRT4530_100069C.1
acatagaaatcagccgagaaaggagtagctaagctaggagaggatacgtagtacgtaccagtaccaatggcttcttcagctgtcgttgccgcctgcgtcgtcgtcgtcgccgctgcgctgctgctggtcaccgcccccggcgcggcggcgcagcccggcggcgcgtcgtccgggtccggctgcaacgccggcctcatccggctcctcccatgcctcggcttcgtcggcggcaacaacgccgcgccgtcgaacacgtgctgcgccaacctgggcagcatggtgcacgacgagccgctctgcctctgccaggccctcagccagtccggcggcggcggcgcgatcccggtgcccgtgaaccggacgcgcgcggtgcagctgcctctcctctgccgcctcgacctcccgccggcggccaccgcctgcccagggtttgatctagggggagcagcgccatcgccgccggtgagcgtcccgcgctcgacgccgaactccactgctccatcgacgccgacgccggtgacggtgacacgggcgccgccgcaacagatgacaccgtcaccgaagacaagcagccagacgccggaatacagcagcgggctcaagctgatagctgactgcgttcctgtcgcacttggttttatggcgttggtgtcagctctgacattctga

SEQ ID NO: 75 - DNA, 4143 bp, Oryza sativa
  Clone ID: PAT_MRT4530_10006C.1
tcaccacactgagtgattatgcatcctccatccatcagcaatttgctgggcatttccagcagcagctctccttaagcagcccttggacagccatcgccatgcctgggaaatcaggacattctttgttgttggctctttggcattgtgatagctacgatggctggtgatctgcttcctcactgtgccgacagcttccggggacgaacagtttgaagagtccgtgcttgaattgggtaggcacccgccaacaatcatccgaccataggcagcataggcactatcagtactgccggaaacactgtaccccctaataagagcgttatatgtgaaaacgttaggcttccagcctttcgtcagtagctcttcatacattttcccagcttcagcagccttccctgcttttcctaagtggagaattagtgaattataagtgtacaagttcgggacaattcccttcttctgcatctcattgaatagagacactgcttcctctaatctttttgattttccaagaccatcaatgagcaaattgtaagtaattagatcaggttcaagacccatttctaataattgcctaaaatatgttagaccatcatttaactgtcctgccttgcagagtgtgtcaataataatcgtgtaggattttatatctgggtttattccctggtcaaccatatcctgaaacaaatgacagaccttctctgtattaccagctattcgatgtccattcagtagtatattgtagatagtgcaattggccttgcatccatactccagcatctcattgaaaagattttctgcatcttctatccttccagcttttaacagaccatcaagaagagggccatatgtgcatggtgtgggtgagaaaccttggctcatcaggttgtagtacaaatcaatagcctgctccaaccttcttgactttacaagacctgaaatgattgtgttataagtaacataagttgattcatatcccttgcgatgcatctcttcttgaacttttagcatttcctctatccgcattgactttcccatggcatcaagaagtaagttgtaagtaaactcatctggaccacaaccgagttccttcatttcagcaaacaagccttcagcaatatctattaggttttcatcaacaagcccacaaatcaaagaattatataatccagtttttagtgaaactccaaagctcttgaactttttgacaagttcatgtgcttcaagagctttcttctgcttacagagatgcttaattaatgggcacaaaaagaaatcatccaaggtaataccacttgatgctatgatttcagcaaactcaattgacttttcgatgccagccttcttcagtatcccttccattagtgaatggcatgaagacctatctgttttggagccaggttggaggaagtagtccttgataatatgcagagcttccttcatcagtccaattttcacaaaacttgggaggatagtacacagtgttgcataatctggaataagaaccttcttcatctgacaaaaaatactgaatgcctcattatatctttcttctttaacaaggccatatataacagtgttgtaagacgaaagatcaggtatgcatcctttcgtagtcatactgtatagcatatcaagtgcatcattaactgccccgttcttgcagagacagtcaagaatcgtattgtatgttatcaaattaggaggataattactgtggtacatttcttcaagcagatgcattacctccttgactttaccttcccttcccaatcctgccaaaagtgtattgtaagtcccatctgttggctctagattcatttcttttagttgataaaagatccgccaggcttcatcacccctgcctgccttgtagagtgtatcaatcaaagaattcacggcaagaacatcaggaacacaattattttcaatcatatcatagaaaatcttcacagcttcatcaaattttgatgccttgctgcaacacttgatcatcatagtgtaggtgatagtatccggagaaacccccatagcttttaattcatgaaataccctttttgccatgccaagtctaccagatttggcaagaccaaacaaaacagcattaccagcaacaacatctggcacaatccctttgctcttcattagttcatatctctgtattgcctttatagattcaccagattttccatagtaatttatgaaaagaacatgtgtgtaaccatttggtttaggtccatgaatatccatatgtttaaacagctctaaggcatcaccaaatctatcagctttaagaaaccccgatatcagcgagttgtatgaatactgctcaggcactatacccttttgtttcatctcatcaaacatttccaaagcttcaaagaccctcccaacttggcacaatgcatcaataactgctgtataagcaacaacattgtcattgtacccatcagctttcattgcattccagatttccatcactgattgcgagtcaccattgtcaccaaacttatctaacagagtaatgtaggtcactcgatcaggtttttgatcactcttcttcatcttccaaaaaacatccttggcatcactgatacggccagcatcgcaaagaacctgtataagcacggtatgggtaatgacatccggcttacacccttcattctccattttcgcaagtatccgataagcttcatcgaatcttttggcttgtccaagaactcgaatacagatggtgtagctatacacattcggcttcacgccatgagcctccatttcacgcaacaaccaaagaaccgtctcgacatccctcctcttcccgaacgccaccatcagcacagagtaggttctcacactaggcacaacaccatccaccatcatcaccctataaacctccaacgcctccctatcaaacccggacttcacaaggaaataaaccaggccattatacgtgtacgcgttcaagacaatcccggcctccttcatgaccggcagcgccaccggcgcgctccggagtcccccctccacaccaagccctccgaagatcgccgcgaacgtgcccacgttcgccttgacgatctgcctctgcattacgtcgaacacctcggccatgtccccgacccggccatggcccgcggcatgagctcgagcatgtagttgcacgacgcggtcgtgtgggccaccctgggcttccgcgccgccgacctgaaccgctcaagcgcctcggcggggccatccgccgacctgagcgcgtggatgacgtcctccgccgccctccgctcgtcgcacggcggcggcgcgcgcggctgcacccgggcgcggccgattcgccgcttactgggccgagacggcgatagtccaggtgaggaaacccccgcagtcctcgacgacggcggcgacccgccgaggacgccggagcagcagcagacctccaacatccggcgagcaacaacgacaacaacaacacctgaaaaattcccaagaagcaccaagaaactgaagaacccattgggaaacgatagaaaacacagcaatgccccaaggaggaaaacgacgccaaaagcgccaccgccgcctgtccttgagaaccaggacgttgttttcacaacatgaccgtcgtcgccgcctcgaccagggcgctcgtgttccaacgggtgcctggtcgcatcgtcgtcgcctccattctctcactgcggcagcctccgtcctcctcaccgtccactgccaaccaccgggagcgtcgccaccgccgacaggctttacaccgccctcagccgctccatcgcgccgtttagtcatctcctgttgccggccacgcgcgccagcttcagctgcggctgccaccgtggcctccacgagcgccggcctccgctgccaccggccgcgcctttgcacacgccggtttttgccgtcgccagccacgcctctactgcctccgccgccggcggccattgcgtcctccgcgcgtgccagtctccaccgccgccggtcgcagcttcgcacgcgctagcctccttcaccagctgccgccagccaccagacgccgccgccttcgcctcccgtcgtcgctgcccgagagcggcttgctccggccagatccagatccacccatggggaggccggatccagccgcggcggcgctga

SEQ ID NO: 76 - DNA, 357 bp, Oryza sativa
  Clone ID: PAT_MRT4530_100070C.1
atgacggagatcgtgaccggcggagtagactgcgtcatggcggcgaatcgccacgacgagccacgacgagcgatgacggctctcctccgcgcgccaccggcttccctcctcgccccctccgccgtcggcgatgatgacggctcgcctcctccgccgccgtcttccctcctcgccgcctccgccggccgcttcccctcctcgcccctttcgccgccggcgacgacgatggctcgccttctccgccgccggccacgacgggtgacgacgacggctcacatccggccgccggctctcctcgttgacgcgacgacgacgccgacgccgacgcagcggctcggctcgacgtgggggcagtag

SEQ ID NO: 77 - DNA, 933 bp, Oryza sativa
  Clone ID: PAT_MRT4530_100071C.1
agctcagccagcgcttcatcgccctctccaagatcgtccctggcctcaagaagatggacaaggcgtcggtgctgggcgacgcgatcaagtacgtgaagcagctgcaggaccaggtgaaggggctggaggaggaggcgcggcggcggccggtggaggcggcggtgctggtgaagaagtcccagctgtccgccgacgacgacgacggctcgtcctgcgacgagaacttcgacggcggcgaggccaccgccgggctgccggagatcgaggcccgcgtgtcggagcgcaccgtgctggtcaagatccactgcgagaaccgcaagggcgccctcatcaccgccctctccgaggtcgagaccatcggcctcaccatcatgaacaccaatgtgctccccttcacctcctcctccctcgacatcaccatcatggccaccgctggagagaacttctcattatcagtcaaagatatcgtcaagaagctaaatcaagcattcaagttatccctgtgaaggacttgctttcctgatcaagtctaatctagatcaaatctttggttggtaatcttcctactacctttttatcattagccttgagagaaatctgaggctgatggttctaattaggtcctttccctgcttctgcttctgaagagagtttgcttgcaatccaccacagagcacaccccctcaaggatttagccattaaccacctgtttttgctgcatgggtgcagagaatttgcagattacctaaatatccacctacaagtcttctattttctctcccatcacatttttttgcatggattgagctagtcactccatgttcttgggagagggtagaaatgtaaaaaagagacctgtctttttctagggcctgtttatcaaggggagtttgactttttcaaaaaaaccttattttcatttctccccttctg

SEQ ID NO: 78 - DNA, 145 bp, Oryza sativa
  Clone ID: PAT_MRT4530_100072C.1
aaggcaacttggtaatgggggtgcaccaagagtataagcattatcccccatgaccatcaaaagatacgaataattatcgcacccacaacatataacttaaccatcctgctcgacagctcgatttgcacgagctcacaataaaaca

SEQ ID NO: 79 - DNA, 1950 bp, Oryza sativa
  Clone ID: PAT_MRT4530_100073C.1
cgagaaatatataaggctgtcatgctttttacttgttactgtgcagacgcttttttttttttttttttttttagaaagcgaagccttccgaaggagcaccattgactcagagcggcactattaccgcgtcaaaatcccgggataaccagtacagtttcataactacgcaatcctactgtcccaggaccaagcaaaatcacacaaccctttgtccctctctactactgcactactattcgtaccagctgttcaaatgaaccaattcaacccccgtttctatctacgctgaagtacagtattacgtactaatataaacacatatttgcacccggcacttcccctcagccaaaagaaaggtatggcaccgattttctggttcaaaatgggaagtgactgcggcatgtgtcattgttcttcaacatgtacgtctgtctcatcgtatatctcctcctggagcagctcttctatgacatcctccatagttatgataccgacagcttcttcatcttcattcagtgtcggcaatggctcttcatgtatttgaagaacatctgattgatctttggaccattttctattcctgttccctctattagaattctgagagttggggcagctcttccatcttcttagtggaggaagattcttcacaaccttctcaccatgcttatcatcaattgagatcgcaacctctttgttccacatggaaagaaagaaagaaaacaaggagaaaatggtaagataaaaggcaagagttccaccgtcgttggcaggaggttcagctgcataatttgcattggtttgtcttatgactactgccatgtgactgtggcccttctgaaattcatttaggatgtcatagaggggcatgtcttctgaaacacgaggaattttgcggatagttacgctctttataggaatttcatcatcagggttgatggataataaattcttcaccaatatcaatccaataatgtttgtcttcttctcataataaaccggcaccctgctatgacctttgtcaaggactttttgcattagatccctgtcaagctttgcatttatatcaatagcaaatgtttgacataggggtgtcatagcatctttagctttcttttcagtaagctcaagagctccagctattatagtagtttcatcgtgggttaactccccacctttaccagcctcatttccatgcagggtcacgagtgtttttagttcagctctacggaaaagagctgtatgacctttaccaagcagatggtccagcagcttgcttatcggatatgcaacagggaagcaaacccaaacgagcacacggactaatggagcaactgaggcaccaatagccagcccatagcgtgaacagatggattgtggtaatatctcaccgaacagcaggatcaatgtcactgagatcaaaatcgcaccccaagcagtcaccaagctatcaaggaatatgggcagagcctccatggctgcagcattgcagatcagaagagtacatagcagaaggtgctggtttttcacaacaggcaatatcttagctgcgtgcttgcggtcctggtcggtgccggacttggcgaggacctcgaggtcgacgaggctgagggacatgagccccagggtgagccccgacatgagccccgcgaagagcaccagcaccacgatgatcaccacgtgctcgaagaaggccgccccgcagcagtggtactccaccgccatccgccgccgacgccgacgccactccccccctactactcccccgcccttccgcgctcgcgacgcaccaccgcctcctcctcctccgccgcctcctcctctctcctctcgcgctcgccggagcccgcggctcccgcgctatttagcggcgagggggagcgggagggacgccgcgtggtgtgcgctgcccgagcgagctgggcgaggcgagattttggaagagaagag

SEQ ID NO: 80 - DNA, 921 bp, Oryza sativa
  Clone ID: PAT_MRT4530_100074C.1
atgctccgccgccttcctccgtgcctccggcgagcgctccccgcctcctcctcctccacctccgctcctcgccgcggcgttcgcctcgcggagcatggccaatcccctcctcaatccgcgcccccaccgccttctccggctacgcagaaggacggcgcggtgcgtactccgggtggcggatccgccgcctcgtcgctgaaccccgccgaggtcgcccatttcgcctcctttgctgagacctggtgggatactgaagggccattcaagcatttgcttgtgatgaatccaacccgagtgtcttttatccggtccattctatgtaaacatttcaggcgggatccaaattcatctaaaccacttgaaggtcttaaaattattgatgttggatgtgcggctggcatgctctcggagcctcttgctcggatgggagctacagttaccggaattgatgctgctgacgaaagtataaagattgcacgcgtccatgctgtgattgagcatgtggataatccttcggagttctgtgggtctctgtcagctttgacagttcctaatggggcctttgtgatttctacaatcaaccgctcaataagagcatttgcaactatgatattttccactggtattcaagtgtctagaatagtaaatgcaattctgtttcacaatatgtggtcttcaaggaagcatagacaggaaataacgattcctaaaggcacacaccattggtcaaaattagttacccctgatgagctagtgcaaatgctggaaaaagcctcaatctatgtacaagaaatggcagggattggttataatccatggcgtggagatttttccatgtcaaaggatactagtgtggattattttgcttatggcataaagaaagttgaaacaccctcagtagtgtcacaaactcaagcttag

SEQ ID NO: 81 - DNA, 312 bp, Oryza sativa
  Clone ID: PAT_MRT4530_100075C.1
atgcatcttggtgcatccatggtgccgcgggcgctagttgatgctaccgagaagaccacctcactcgcctcgccgccacccgagaaggtcgcgatgctctactacagcgacgaggccaccctctactccgctagcgacaaggaattcctcgatggcggcgaggagggcgagggtggcgacctcggcggcaacggcaaggggcgtggcgagggtggcccgtgccacaacacgttgggcggaggtaagtgccaccgctgcgtcgtccgcggagagctcatcgaggtggcactagggttgaaagcagacgattga

SEQ ID NO: 82 - DNA, 1476 bp, Oryza sativa
  Clone ID: PAT_MRT4530_100076C.1
atgggtgacgggcgaggggatgaggaggagtgcagggtggcgctgctgaatggcggcggcgcggcgaaggagggctggcaggtggtgtccggcggcgacggcaagctgaggaggagggtgtgggaggagtcgaggaagctgtgggtcatcgtggcgccggccatcttcagccgcgtcgtcacctacagcatgaacgtcatcacgcaggcgttcgccggccacctcggcgacctcgagctcgccgccatctccatcgccaacaccgtcgtcgtcggcttcaacttcggcctcatgcttggcatggcgagcgcgctggagacgctgtgcgggcaggcgttcggcgcgaagaagtaccacatgatgggggtgtacatgcagcgttcgtggatcgtgctgctggcgtgcgcggtgctgctgctgcccatgtacatctacgccgaggacgtgctgctcctgacgggtcagccgccggagctgtcggcgatggccggccgcgtctccgtctggttcatcccgctgcacctctccttcgccttcctcttcccgctgcagcgattcctgcagtgccagatgaagaacttcgccagcgccgcggcgtccggcgtcgcgctgtgcgtccacgtcgccatcagctggctcctcgtctcccgcttccggttcggcctcgtcggcatcgcgctcaccctcaacttctcgtggtgggccaccgccgccatgctcttcgcctacgtcgcctgcggcggatgcccggagacgtggaacggcctctccctcgaggcgttcgcggggttcgtacgttttttgcagttgctgacagaatttgtgtgcttaatttgcagcttggagaactggtactacagaatcctcatcttgctgaccggtaacctcaagaacgcggctattgcggtcgacgcgctctccatctgcatgacgatcaatgcatgggagctgatgattcccctggcattcttcgctggaaccggggtgcgggtggcgaacgagctgggcgccggcaacgggaagggcgcgaggttcgcgacgatcgtgtcgtcggtgacgtcgctggtgatcgggctcttcttctgggtgctcatcgtgggcctccacgacaagttcgcgctcatcttcacctccagcgacgtcgtgctcgacgccgtcgacaacctctccgtcctcctcgccttcaccatcctcctcaacagcatccagcccgttctctcaggtgtggctgttgggtctgggtggcaatccatggtggcctacgtcaacattggcacctactacctcatcggcatccccatgggcattctcctcggatggctcttcaaacttggcgtcctgggaatttgggcgggtatgatcggcggaaccgcagtgcagacgctaattctggccatcataaccatccgctgtgactgggacaaggaggccatgatcgcaagcacacgcatggacaagtggtcgcaagtccggtga

SEQ ID NO: 83 - DNA, 405 bp, Oryza sativa
  Clone ID: PAT_MRT4530_100077C.1
atgagagtaaccattgaaattctaacacagatagggtaccaaataattaatcgtgacaaccctgatgatccactcttttgttcttttggttatccagttacacatggtgcctttcctccagatgtttctgttccagcgctgatgcttgagccttgtgctgggcaaaaactaggactatttgtttctgcgcctgaagttgctatccgtatgttgagggatcagggcaggccatcaccttttgagccgaatttcggtcgtccagaaccacgcaagatacgaagtgtcacacccgatggtatgacaggggacgtgcgtacaggagatggggattctgaatatgtcctggaaatggaggaagcggattcgtcaggtattcagagtgtggaaggtggaattatcctttag

SEQ ID NO: 84 - DNA, 288 bp, Oryza sativa
  Clone ID: PAT_MRT4530_100078C.1
atggctggtcccccaaaggagacggtgcagggcactgagaggctgatttggatccatgagatgaggcggacccgacaacttgatttgattgtaaccagcttgcttgctgcagaaaaccttgaaagtttggaggagaactaccatataggagatgaagatggcaagaagaacagtccatgcaacggttggctggggaggagagcaacgactaagagtaatatacaacaattagaagaatgcataaccgttgactacaggatgaagatccctacagaggtctatgcctaa

SEQ ID NO: 85 - DNA, 475 bp, Oryza sativa
  Clone ID: PAT_MRT4530_100079C.1
tgctgctgctcgtcttcctcctcttcctcctcgcaagcggccgcgcgcgtcgatccggaagccgctcgccgccgacgccgccgccgcatcagcagccggagtgggagcgggggcggcgaatctggagccgaggggacctgcattgccgcgggagggcagcgggtagctagatctcctcccccctgtgcctccttccttggacagccgcggcagcggcatggtggctgctgcggcagcggctaccgcgccagatccggcgcaccccgcgcgcccgccgctcacgccggccctcgacaagcccaactccgccgccgaaaccctagcccagccccccgccttccgccgcgcgcgcgggggtgacctccgcgccgccgccgccatgggcatcgtcttcacgcggctcttctcgtcggtcttcggcaaccgcgaggcccgcatcctcgtcctcggcctcgacaatgccggcaagaccacc

SEQ ID NO: 86 - DNA, 345 bp, Oryza sativa
  Clone ID: PAT_MRT4530_10007C.1
atggagataatatatctgacaggagatgagaagaaggcggcgccgttgagagagctccccggcgcggcggagcggctgtacaagaacaccgccgaggcggccgtggacgcgatgcgcatcatcttgaagcaatgcgagcgatcaaagacggtgaagcgcgtcatccacactgcctccgtcaccgccgcctcgccgctccgggaggacggcggcgaggggtacaaggacttcatcaacgagtcctgctggactccactcggccagtctcacccatacagcagcgacatgtcggctataaatcaatttctccgactgcagatacacgttggaagaatgtgtgcttaa

SEQ ID NO: 87 - DNA, 1088 bp, Oryza sativa
  Clone ID: PAT_MRT4530_100080C.1
atttgctccttcacggcaataaagaactcggacggggtcctgcactccctcgaaagacgagacgcaaattcctttgggtaggaggtgaggaaatttcagggggaaaaaaatgcagagttagctgggacaaggtctgtagacccaaagatttgggtggactaggggtgtttgatctcgatcgtttcgctagggctctgagaattatatggctgtggtacgagtggaccgatccagacaaccatggagtggcaccacggtcccctgtgaccaagaggatagagatctctttgcagcagcaacgaccatcactttgggggacggtaatatggcgagatttcggcactcacattggttggaagataagacccgaaacaaattggcgccggccatcttcgcagcctccaagcgcaagaatatatcagtgcacaacagtccatctatgccaatttgtctaactgtggacaatgatccagtgcatggctcctctcaacgcgcaacgggataccatcacttggaagtttatggctaatggagtctactcaagtaatttggcttatagaatgcaattcatgggggcagcatgaacaatcttcaaccaatcaataaggaaatgttgggagccgccaaagtgcaaagtcttctcatggctcgtaatcaaaaatagagtttcgacggtagacaggctgtagaagaggggatggacgaaccaccactttttcccactctgctgtgcctcgctagaatcggctctttatcttctcgccaaccgtaggatttcaaagagaatctggagcacactacagagttggacaaaaatcgatctccgcataaacaaatggaaagcctacgccaatgaagaagattggtggtacaaagtttcaaacacgccatacgtcatgcggaaagcgttaaagttggtgatcatcctcgtgacttgggagctctggtgcgagcgtaatgccagaatttttcggcgcctagccacaacgccagccatgatcgtggccaaaatcaaggaggaggcgagaacctggatcatgacgagagctgttaggcttacagagaccattccctgtggagagtagtgt

SEQ ID NO: 88 - DNA, 683 bp, Oryza sativa
  Clone ID: PAT_MRT4530_100081C.1
gccgctgaacgcttgcaactgatcagtcgcgtcgatgccacacgaaatcgggccgcgcgcataaatctcagctttcatctgatcgacaccggaaatggagttgtagtcaccgaccttgaaaacggtatagttctgaatggggttgcacccgccgtccggtgagcaggtaccgcactgattgaacggcgtacagtcctgattctgagcctgataattgttgcaggtctcatcgggaatgccgttgtcgtgagcataggcatagacaggaatgtcgtcaccgccgtcacaggagccggcgttaccgcagtcgatgacgttctgagtcgacaggtaagccgaaggccacgcacctccgcgcttgatattgatgcggtcagccaaagccgaagtgctgccgaacgcccaacacgaaccacagtattgaggaatgtgctgattgcgtgaagtgctgcaataattctttccgttgacgttgcgccagtcccagtctgacggaatgtcctccggattgaggtattcccacggctcgggctcagacaggaatttggcgcggggcccggcgcggaacgccaaatcgcgtttcagaccgtgattacggccgtccacggccacggcgatcgacagggcgaccgctgtgacgaccaacaacttactgagcatcttgatttatcgagttaacagaa

SEQ ID NO: 89 - DNA, 203 bp, Oryza sativa
  Clone ID: PAT_MRT4530_100082C.1
ctgtgaccgtagcaaataccaacatcgtctaggaggcggcaacctccaaaagtaataacaacccggttgccggtcagactgttggtggctccaatctgactggccccggctcggtcagactgccatcggctctggtgactttggatccccaagacgtggccatccaaccaacttgccaggtgcccggttagaccgagcccagc

SEQ ID NO: 90 - DNA, 1565 bp, Oryza sativa
  Clone ID: PAT_MRT4530_100083C.1
cccacgcgtccgcccacgcgtccgcccacgcgtccggcccccacctcccctgcctcctcgccttcctctcccgctacccctcccgcgccctcgcctccctcgcctccgccctcctctcccgcttccccttcgcctcctcctgttccccctccccctcctccgacgacgaccacggcgtcgaacacgaggaatcgggccgcgtcgatggggtggaggaggtggacgagcacccggccgacgacggcgaggtgaggcgggaggcggtggtggtggaggaggagcgggacgcgcgcgccgcgctgcagcgggagctggagaaggagcggagcgccgcggcgtcggcggccgaggaggcgatggccatgatcctgcgcctgcagaaggagaagtcggcgctcgagatcgaggcgcgccagcagcgccgcaccgccgacgagcgctgcgccttctacgaggacgaggtggaggagctccgggacatcgtgctcgtgcgggagcgcgagtcccgcgcgctgcagaaggaggtggacgcctaccgccgcctcctcggcctcgccgccgaggacggcgacgacgacgacgatgaggatgatatgatgacgcctcctagcaccatggtggagggcgagccaagcacgtccagatctgtgtataaggatagtagaaatggcgcgatgccgcaattggggaatgactatgggttcagcttgaagacgccgttttcgccccaagaactactgtcacctattaaagtgggtcatatcaaagggatcaatgaggataagctgtctgctgggccatctgagaaaattcccatggttggattgaaaccagaggttgatagctccaaggatgatcgcgtggagacgattgaaatccttccactatctgctcgaagcttagatcaggttggttatggtgaagttgttgctgcagttgatacaaaagctccagagcaactgcctcatgagtttcaggaggagtgtggaggtgtagacaagattggtggtgattctacgggaagtgagaatgatgcgaatatctatgatgtgcatgtggttgatgatatatgcttcccaactgaagttaaaggcctgatttgccgaagtttctcagatgcaacaatgcaagcagagaagttacaaaacagagttgctgcagatgatctccttgggaaaagtctgaatgccattaaaggtgcacaagacaagataaagcatgcagcaagtgaaagaaagcaatcattacagctgcaactcttagaggacatagctaaccaacttcaggaaatcaaggttgctgcagaagcagggcgacagctgcattgtgcttcccctagaaatttgaagaaaagctaggacaggcatattttggcatcaacggtgacacggttgatggtgtacatgtttgttctgatttttggtctgttgatttcgtggcatggttaaggtttgtttgttcttttggttacataattttggtttgttattgatgtacatgtacataaaaggtagatttgtttgttgcttgcaatcctatctgctttaaacgaattacacgttttt

SEQ ID NO: 91 - DNA, 240 bp, Oryza sativa
  Clone ID: PAT_MRT4530_100084C.1
atggatggcgacgtcggcccacgcatgtccggccggcgggcagcggggatcccggcaaccccactcccggattcccgagcttctcgagcttccccggccggcgacgtgcacgcattggccgccgggccccgccaccacggtcgtgctacacggcggacgccggggaaaaaaaggtgctatcgcaagccaggcattcggaagatccttcgcgtaagcggcaaaaaggctaagcttagctag

SEQ ID NO: 92 - DNA, 366 bp, Oryza sativa
  Clone ID: PAT_MRT4530_100085C.1
atggagcttctccggcgacgagcgtggtgccggatgcagtccttgagctcgagcccattggatatggttatatatggtgccagcgccagcaccgttgatgctcgcggatggggaggacaccgccgaatctcacgagtggggagggcgctactactgcagctcgcgggtgggaagggagagagcggcagcgcggaaagggctcagcggcgcaaggaaggaggcagcggcaacaaagcagggaaaggggcatcgatggttcttgacggtagagccgcaggacacggggcagcgaggtggggatccggcgccagcgggccttgtgagctgcacgggaaagggggtgacaaggagcggatccggtgctga

SEQ ID NO: 93 - DNA, 1050 bp, Oryza sativa
  Clone ID: PAT_MRT4530_100086C.1
atgggccacgcatccaccgacccgtcggcgtccgatcacgacgccccggcgcgccgccgccgccaccggcgccgcggccttctccgattccgccggcaccgatctccgaccccgccctccgccgacccaccaacgccagaactcaccccgtcgccctccgcgccgccctcctacttctcctacccggacatcgccgccaccgcctcctacgtcgtggtcgccactctgccggtcttccgcggcgaccccggcgagtgccccgacgcccacctcgcccgcttcgaccgcgtcgtcaacagcgccacgtcgccggacgccgcggcgcgcaccttcccggcgtccctcgacggcgacgcggcgctgtggtacgatctcgcggccccaggcgccgacgactcgcccccgccgtgggacgccgtacgtgccgccttcctcgacttcttccgccctccaggcgccgccgaccgcgcgcgcggggacctcctgtcgatgaggcagcgccccggcgagcccgtcaaccggtactacctccgcatgcagggcatcctccggcggttccccggccgcggcggcggaggcgcggacgtccccgaatcgttcctcaagtccgcgttcgtcgacggcctcctccccgagttccacgactgggtggcgccgcagcgtccggaggcgctggacgtggccgtggcgctggccctgagctgggagcgcgccgagagcgtgcgcgaggcgcggcgcgcggcgaaggcggcccggatgaccaagtgcgagttctgcgacacggaaggccacgaggaggcgcagtgcgagacgcggaggaggatgagggcgttgtgcctgaggaggagcagcagcagcaggagaggaggcgccagcgccaccatggtagtggaggaggcggcggaggaggaggggggcgggagcatgaggttcgcgcggctcgggagcacggtgagcacgcgatcggcgcagtgccagtgccggaagcatcagtgctggaagaaggcggtggtggtgagtgagctcgccggagacggcgaagggcgatga

SEQ ID NO: 94 - DNA, 475 bp, Oryza sativa
  Clone ID: PAT_MRT4530_100087C.1
ctctctacagttcccttcccaaaatccctcccctcgggcccctcttccccttcgattctggcggtttgccgccggcgagggttggaggaggggtccggccacctcccctccactagtattgtatagttagatttgtttttaggtcgtcaggtgtttcctgtagttagggtttgtccttagttggtgtttttgccgacgagtctccatgggtgccgttgtggtcggcggcgacggcagttggtggcggtggaggtgcgagatccaaagacctgtggatgaatcgacggaaggagctggctccttgcggcggcggcggcggctgcatcgtcgtttgcggccgggaggttgccaccccgttcctagcgttgcgtgcggtgacttctcgtggcttgcatcgtctggatctgctgtcgcccggagcttgctgctcgtggtgcatgatgatagcccgtcgacgaggtggcggttcgagagc

SEQ ID NO: 95 - DNA, 768 bp, Oryza sativa
  Clone ID: PAT_MRT4530_100088C.1
cagaatcacccgaggcagttgaaggatcgaggaaagaaattcagagatgcttcactttggaagaagctaccgatacaattctcctctgcagttctattgttcatgaccttgcatacaaggcagcgacaattgcactggaccatgagcaggaacgagtacacgcagagcctactcgcccatctgttaccatcgttggaaagtctattccaaaggaggatggtttacttaagctgactcacagacgaacgcctaaccgtaaggttaaaaggaaaagattggaaggtgaaacaaccataaccgaaaatgctgaaaagaaagatgatatctctacagaccactcacccgtgcgttcctcttctggaattacaaggacatctgagagcatgaagcctccaaaactggaatccaagtgcaactgtataattatgtaagttactcaagcatctggtacggcaaaggtgacttgaaatagaggttggaattgatgtattatggtagttccattccacgcgcaatcaagtcgtccacagttggtgagtgacacagggccttaagttagattttttttttttttgtgatggtgcattccgttttttaggtaacagaagtgcaccccagagctattcttttgtaaattcttttttcccctatgttcctgttttgtcagatcttctgcttgttatgtggtctatcagggttgtccaaagtgtgaattactagattaaatatctgtatttatagcctgttttgttgcaatgcatgaggctt

SEQ ID NO: 96 - DNA, 1666 bp, Oryza sativa
  Clone ID: PAT_MRT4530_100089C.1
ccgatccccacccagctcctcaccttatccctcccgcatccaccgctccatcgctcccgcatgcccgcatccaccggctccatcgccgtaccctaaccgtcctgtgccaccgtcgccttcgatcctccccgccgccatcgccgtcctcctccaccgcgtcgccgacggctccatcgccgtcccctaaccgtcccgtgccgccgccgccttcgctcctccccgccgtcctccaccagctccctcccccactgctcgcctcgccgccgccaccgcctccgtcaaaccatcgctggcgcagggaggactccttgcggcggactccgaaaccctagacactgcccccaacgccagtcacgccgtcctgtccaccgccgcgtcctcctcctccccatcacccgccgccaacgccaacgccaccgccaccgccaccaacacctactcctccgtccacccaccaccgacgccgaatccaccacccacccgcaaccgatgccgaatcccccgccgtcgagtccgcttcagatccccccgccgggccgactcctactcctcctccccgccgccaacgcctactcctcctccccggctccccccgccgttgatgcctactcctccgcgtcgccatcggctccaggttgtcgtcatcaggtggctcctcccgcggcgcccccactgccagcgccaccgccaccaacgccccatcctcctccccagtcgccgcaccacgcctccaccgccgacgcccccatcgccgccgtctcctcctgcctcatcacgtaggcgcaccctcgaccgatccctgccgccggaagtcctcaccacgccacttccccaccccgcccaaccaccgcgccgcctcgctcctctcccatcgccgatcccacgtccccaaatcaccgtggaatccacgccccacaagcccacgacctcccaggtctacaagccggattcatcatcgacctcacctccgcaggccggctgcatcaaccccccacatcccggcctcccactagaccaccacccccatccccgccattttctcccccgccgctcactgccgcctccctcctcgccttccccagccaccgccgtcgcctcccaagccaccgccgtcgcctccctcctcgccatccccagccactgcgccgccaaaacccaaaaggacgtcaccgccccccgaccttccacatacccccagtaccccacctgtgattccctcccctccatctgacgccaaacggccgcgcccattcccccgcggtcccgatccttcgccccgaagcctcccactaccaattggtcccatccctcctcctcccgcttcccccccgtcggcgccacctcactctcccacccccatcccgccgcctcccccgattcctcccccaaacccctcctcctcctccgccgccgctgccgtcgccatgggtggccccctcaccgccgccggaggtcgaggagatgggggcgccaaggcggtggaaccgctccggcctccgccgccgcccgaccatcctgctcgacaacctccgccacagcttcttccgcctccaggacatcgcgctgctcatcttcgacgagtgtcaccacgccaggggcaatacaccgtacgcctgcattttcaagttttagttgtttaatgcagcaacagtgccttagtaagaat

SEQ ID NO: 97 - DNA, 226 bp, Oryza sativa
  Clone ID: PAT_MRT4530_10008C.1
atctgcaaatttttctctttctagcgaccagctgatcaggtacgcggggagaggcgtccttagtgactgaccaccccctcgttgtctggggaggggcgcctgataggaggagagccctcgtcgtcccgtacccttttgcagcagtaagggccgaagtaaagatgcttgttgtggggtgcagcagagatgggagggcctcatatttgtttttttaatacatacagga

SEQ ID NO: 98 - DNA, 621 bp, Oryza sativa
  Clone ID: PAT_MRT4530_100090C.1
ggcggcggtgagggggccacccatggcgacggcggcggcggcggaggaggaggaggggtttgggggaggaatcgggggaggcggcgggatgggggtgggaggaggagacggcggcgatgggggcgtcggcggtggaggcgtggtgcggcgactggggaggaggatggggcgttggtggcggtggcgctggcagtgggggcgccgcgggaggagccacctgatgacgacaatctggagccgatggcgacgcggaggagtaggcatcgacggcggggggagccggggaggaggagtaggcgttggcagcggggaggaggaggagtaggagtcggcccggcggggggatctgaagcggactcgacggcgggggattcggcatcggttgcgggtgggtggtggattcggcgtcggtggtgggtggacggaggagtaggtgttggtggcggtggcggtggcgttggcggcgggtgatggggaggaggaggacgcggcggtggacaggacggcgtgactggccgatggtttgacggaggcggtggcggcggcgaggcgagcagtgggggagggagctggtggaggacggcggggaggagcgaaggcggcggcggcacgggacggtta

SEQ ID NO: 99 - DNA, 549 bp, Oryza sativa
  Clone ID: PAT_MRT4530_100091C.1
tcagcggacgagcaccgagctcatggtgtagagcgccagccccagcccgcaacctgttcctagagacgctgaaggacagcctggcgcggcagcgagcttggcggcatcggggaattgcctggagatggcctggcatgcgcggccaaagtgggcgtggtgtagcgacggggcgaggaggcacgacatggcggtgagcacggtgcggtgcgagccccggagcgaagcgagcattagggagacggctttaagtatgtcgagtgtcttaacggtgtggtcgaggaggtcaccagtgaggcaggcggccacgtcgagcagcttggagaggaaggcgagggagaggagcggtggctgatgggagaccgctgactcagacccagccgatcttgtcatagccgatctggacttcagccgattcctgcccgcggcaaggcggttggcgacgtgggcttggagggtgtggaggacatgcagctcgtcgtcctgcgcgtggccaaaggaggcgacggcggtggcgctgcagcggaagctgaggaggccgaggaagcccat

SEQ ID NO: 100 - DNA, 1139 bp, Oryza sativa
  Clone ID: PAT_MRT4530_100092C.1
catcttcgacgaacacatccatctccactgcccggcggtcacctccttcaccatggttaactgccacatcgctagcagacacgcggaatgtgagccgtcggatcgctaaatccaacggcgcaccgatccccacctagctcctcgccttatccctcccgcatccaccggctccatcgctgtaccctaaccgtcctgtgccaccgtcgccttcgatcctccccgccgccatcgccgtcctcctccactgcgtcgccgactgctccatcgccgtcccctaaccgtcccatgccgccgccgccttcgctcctccccgctatcctccaccagcttccttccccactggtcgcctcgccgccgccaccaccttcgtcaaaccaccgctggcgccagggaggactcctcgcggcggactccgaaaccctagacactgcccccaacgccggtcacaccgtcctgtccgccgccgcgtcctcctcctccccatcacccgccgccaacgccaccgccaccaacgcctactccgtccacccaccaccgacgccgaatcctccacccacccgcaactgacgccgaatcccccgccgtcgagtccgctccagatccccccgcccggccgactcctactcctcctcctccccggctccccccgccgccgatgcctactcctccgcatcgccatcggctccaggttgtcgtcatcaggtggctcctcccgcggcgcccccaccgccaccgccagcgccaccgccagcgccaccgccaccaacgccccatcctcctccccagtcgccgcaccacgcctccaccggcgacgcccccatcgccgccgtctcctcctgcctcatcacataggcgcgccctcgaccgatccccgccgctggaagccctcctcgccatgccacttccccaccccgcccaaccaccgcgccgtctcgctcctctcccatcgccgatcccaccatcgacctcacctccacaagccggctacatcaaccccccacatcctggcctcccactagaccaccacccccatcccgcggcggcctccgtcgtcgactccgcttccccgtgcgcagcccacgtccacgccaacagtccgtcgcctacgccacatctcgcgactggatccgctcctctcc

SEQ ID NO: 101 - DNA, 821 bp, Oryza sativa
  unsure (1)..(821): unsure at all n locations
  Clone ID: PAT_MRT4530_100093C.1
ttccgctcctccttcgccttcgcggcttcgcctctctcccacacatgcatcgccatcgccgtcatcgtcaggactaagctctgctctgcatctgcaccaccacccagctgcagcccgaacaagaagacgagcatctcatctcatctcatctgccgatcgatcgattcgctgcagggagagctgaacaatggagttcgtgttgatcatctcgctgccgctcctcatcctgatcataatcgtcgcggtggttctctgcatcatctgccgctagctgaatggtgacacctcattgttcttcctgcccatatcttgatgtgaacatatcatgtatcaattgattagtatctcatgactcacaacagagcagtctcgtactctctttggggggccagtgtggttgtgattagtttggccctagctttgatgagcaaaaagacattgattctgaatgtcatacatacatatgtgctgtgagaatcccctctctgctttggttcgaataaaattgtttgtagtagagcaaggttcaagattcatctgttgacttgtggagtcatctaatagtaacagtcaagagtgagatgtgggttagtagtgttatctaattggaatcggatccaactgttgccaactagtactagtacttgtaacatgggcagacactccagcagcacaagcagctactgtagtgtttagctgtacatttagctgatgaaaagatgacgatggtactactctgatcttagctgaatccgagaggcaacgatttctgtcggaaattgatctcttttttatgaaataaccgnaattccgaatgcttc

SEQ ID NO: 102 - DNA, 2677 bp, Oryza sativa
  Clone ID: PAT_MRT4530_100094C.1
ctcaaattagtgcagagacgttactcgcacgtgggcaaataaagtggtcgtactctctgagataggaatctatcacctgtcatccactagagtaccatttgtgcaaagataccaattaacgtgtcgagtgaacatgagcatttgtgacactaaaccccagcgatccactaattcattttttccgtccaaatcttacattggatgaaaattgtaattctctacacatatatgaaattgtctattcgtctcacaattacgctctgcatcttcctaagagcagtcctgtgcagacagttaatgtagaaggcgaacgttctattctcaaggagacagtttgtcttaaggcctgccaagaactacatgccattggtgcactcacagattctcttttaccagaattagatgttccatgtgatgaagaacctgacatcggtatggttgagaacaaaattgagcagccttcttactttccagaagaatttgtggataattggcgctccttttctcgtcttggcatatattattgctataagatctcattggaaggatgtcccaaaacagcttctccaactgacatactgttagctttgaagtgtgatttgggatctgactttacttctagctcatttaaattgccaggtgggcaagacaatgctagtgttaccatgaaatatgttggcatcatccatctcaatcaagaacaggtaattattgctagaagatttcagacaactattctttcgtttcttattggtgatgaccatttggaggttagcaatggtattaaatacttccatgagatgcaagtgcctattggagtagtctatctacttctgcctttagtttctggcagaattaataggtgctgtaataaatcccgatcgtcagcaatatatgaaggtatcaacgaagaagcatgaaacggcctattggaacctcttgccacccccgaaaccatcgagcctgacccggtgaaagggctgcaagaattttgtgatcgtagatcattccaaaataacctacgaaaaaaaccatgttgatggagtctcatcggtcattgctcgggtgaaggctggagagactacatactccgcaacaaaatcaggtccctgcaagttggcgaaaaagttggcatcaaaggctgtgcttaaagatctgattgctggtcacaaagatacagaggctgctgcagtatagtgatgcttaactatttaagcgtgcaacagtagctaacaattgatatagatagttgcgcacaatagaaaagttttggttggattcatacatgtaatttggaaatgctcctttttgtgtgctcgcaaacgatgcgtgtgaacggcctcatgaattctggtaggttttcatgcttcaaacttacaagtatcgcaattttgtaaattacaaatacgggcatagcacacctgcccatgccatgcagtagtttttttttcctcgaaatagtagcattagttgtatattactcatagcatcagattgtacagaaagcatgccagcaaaaacgaaaaaatgtacagacagcattttgttcgcatcaagggaaaacttgttttaagactccaatgcagctctgtgccagctggcctgcagcagtaatctttagggttacattcatgctgaggagtttaatccaagagattggatcatcccttgcttggactatgatgagcgtgataacaaaaaaatttcctttctggcacccaatggtatgtacagccaaaggaaaatgtctattaaaagtaagaggattgcggattcagttgaggccttaattggggcttacctcagtactgctggggaaaaggcagcatttcttttgatgaaatcattagggatgaatatagaatttcacactgaaattccagttgaaaggaaaatttcaatgaaagctgaagagttcattaatgtgaggagcttagagggaatgcttggttacaagttcaatgattctttattattgctcgaagcattgacacatggctcatatcagacttctggccctacttcatgctatcagaggctcgagtttcttggagatgctattttggatcatcttttcactgaatattactacagcaaataccctgactgtactccagaattgttgacagatcttagatctgcctctgtgaacaacaattgttacgcgcatgcagctgttaaatcaggattaaacaagcatatccttcactcatcatcagaactgcataggaagatgagctactaccttgaggaatttgggcagtcatttacaggtccatcttatggctgggaagcgggcattggtctaccaaaggttctcggggatgtgattgaatcaatagctggtgccatttatctcgacagcaagtgtgacaaggaggttgtttggagaagcatgaagcggctattggaacctcttgccacccccgaaaccatcgagcctgacccggtgaaagggctgcaagaattttgtgatcgtagatcattcaaaataacctacgaaaaaaaccatgttgatggagtctcatcggtcattgctcgggtgaaggctggagagactacatactccgcaacaaaatcaggtccctgcaagttggtggcgaaaaagttggcatcaaaggctgtgcttaaagatctgattgctggtcacaaagatacagaggctgctgcagtatag

SEQ ID NO: 103 - DNA, 3741 bp, Oryza sativa
  Clone ID: PAT_MRT4530_100095C.1
tcagcggacgagcaccgagctcatggtgtagagcgccagccccagcccgcaacctgttcctagagacgctgaaggacagcctggcgcggcagcgagcttggcggcatcggggaattgccaggagatggcctggcgcgcgcggccaaagtgggcatggtgtagcgacggggcgaggaggcacgacatggcggtgagcacggcgcggtgcgagccccggagcgaagcgagcattagggagacgactttaagtatgtcgagtgtcttaacggtgtggtcgaggaggtcaccggtgaggcaggcggccacgtcgagcagcttggagaggaaggcgagggagaggatcggtggctgatgggagaccgctgttgacagaaaacacgtggcctgggagatctgcttaactccagtgtaggtccaaagctcgccttcggatgtattagcgtgccagttgatttgatcccagccgatcttgtcgtagccgatctggacttcagccgattccgcggtaaggcggttggcgacgtgggcttggagggtgtggaggacatgcagctcgtcgtcctgcgtgtggtcaaaggaggcgacggcggtggtgctgcagcggaagctgaggaggccgaggaagcccatccagccgactacaccgccggtacacaacactgcttgggtgcttttgaagtggtggcggtgactccagctctgacagacacgcggaatgtggatgcagtactcgcccgtctcccctccatcactgagggacattcccatctacaaaagcgtgctagggagcggtatgctgctcttagtgctggcgacaaggaagctaggcttcaaaagatgcgagagtactaccagcgaaaaaagagtattgatcctgtacctacccatgttattttgccagatgaaaagcagcttaaggttttgaatccatgcaagtttgttttaaatgttctgacgaagcgtgcgcgtggaaaacgatgggttttctccctcaatgtcaccggaacgaacacagataatgagaagtcgtatgagttggacacaacatattactgtaagggtatctacaatccgcggtggcggacgacaagcggcgcggggacgggcgcggtggcggagggcagcagcgcgcggggtcgccgagccgtctccgtcacagggtcatcgccggtcgtcgtcgccaactctgtctcctcccagcgaaacccgaaagcaagatttaggacctgcactggagttaagcagacctcccaggccagtgtgtgtttttttatcaacacatgggcctctcagcgaagaggccaagggtggaaggagaaaaatcaggtgcgggagccgtgtcctcaagccacgacgtcgcccaacgtgtcccctagctccgtggctcgacgaaaagcgactgaggagcggaggaagacgcgcccctctgctagggacggcaaactgatggactggcgacggctgtaccagctggaggcgctggagcgggcggtgcgggggaacaccctggcgttcctggagaccgggagcgggaagacgctcatcgcggtgatgctgctccgggcgtacgcgcaccgcgtgcggaggccggactcgcgccgcttcgccgtcttcctcgtccccaccgtcgtcctcgtgggccagcaggcgcgcgtcgtcgagcagcacaccgacctcgtcgtcaagcagttctgcggcgagatgggggtcgacttctgggacgccgccacctggcgatcccaactggaggacggcgaggtgctcgtcatgacgccgcagatcctgctcgacaacctccgccacagcttcttccgcctccaggacatcgcgctgctcatcttcgacgagtgtcaccacgccaggggcaatacgccgtacgcctgcattttcaaggaattttatcacccccagttgaattctagtgcgtcagaccctctgccaaggatatttgggatgtctgcttcgctcatttattcaaaagatttgaatccgcacaattattcaaagcaaatttctgagattgagaatctcatgaattccaaggtgtacactgttgatagtgaatcagctttgtcggagtacataccatttgcttctacaaaaatagtggactttgacgattccaacatttcatctgagctgcatgccaatattctcagttgtttgaatagattgaataaaaaggctgctgaggtacaatcatacgaggaaaacagcctatccttctggggtgaaacattggataaaaatgttgagggcttcattagaaactacagcgaagaagtacatagagaactttcatgtttcttgaagaatggtcatattggtgaaaaatttccagctgattctcaagatgggatattgacacccaaagttcattgccttattcgaactcttctgcagtacaggcatatgcaagacttaagatgcattgtgtttgttgagagagttatcacaagcatagtattagagcacctactttcatctattcatcaaatgtctgggtggaatgttaagcacatggcaggaagccgtcctggtttgctatctcagagcaggaaaaatcatacagaaattgttgaatcttttcgaaaaggaaaggtacatataattattgccacacaaattttggaggagggtttagatgtgccaagttgtaacttggtaattcgctttgatccatcagcaacaaaccagaggggggatgtggaagctcaaactaatgcagagaagtttctcgcaagtgggcaaataatgcgggaggaatctctgagattgggatcaatttcttgtcaaccacttgagaacaccttgtgcgaggatacctattaccgtgtcgagtcaactccagcgttcgatatagacaaggcatctggcacatgcactctgcatcttcctaagagcagtcctgtgcagacagttaatgtagaaggagaaggttctattctcaaggagacagtttgtcttaaggcctgccaagaactacatgccattggtgcactcacagattctcttttaccagaattagatgttccatgtgatgaagaacctgacatcggtgggcaagacaatgctagtgttaccatgaaatatgttggcatcatccatctcaatcaagaacaggtaattattgctagaagatttcagacaactattctttcgtttcttattggtgatgaccatttggaggttagcaatggtattaaatacttccatgagatgcaagtgcctattggagtagtctatctacttctgcctttagtttctggcagaattgattggtgcagtatgaagttctcatcctcaccaatatatgaagctaacaacaaacatatgacacattgccattcttgtaaagatattgatttactgcagacaaaagatggtcctttctgcaggcatggtcttactttgacttttgaaaatcagccgctcttggctggcagtaaacatgtgaaagtgcggaacttcctccacaactgctactctaaaaaagaaaaagaacctggtgatagatatagtgttgagttgccacctgaactctgcagaattatcatgtcaccagtgtccgccaataatttgcacatcttctcatatgttccttccataatgttccgcatccagtgcatgcttctttctgtgaaattaaaggtccaattaggcccaacagtgcagcagtttgacgtaccggttttgaaggttgattttctcatcaatagtttcctatttatgaattattga

SEQ ID NO: 104 - DNA, 496 bp, Oryza sativa
  unsure (1)..(496): unsure at all n locations
  Clone ID: PAT_MRT4530_100096C.1
gcgaagaaagcaggaagaggaggcgtggaggatccgcggtcggtggtggaggtgagggaggcgtcgatggcgttggcagccgggaggcgggggaggcgccgggggaggtggaggcgtaggtggtggccggctggcgcgggcggaggcagaggcacggttggaggtgtcgccgacagaggcggcggaggtggagaccgatgccgccgtcgggcctcggccgcctcccttcccgccatgggcccgctaccgtgccacggctccagatccgtcgttagtcaacgtgcctcccctcccgcccctgacgaatctggcggntaggccggggcagccgccgcgcctcccctcccacccttgccggatctggtggccgggccggcgctggcgcccccgcccctcccgcctctgccggatctggcggccgggccagcgccgccgcgcctcccctccctcccctgcatagagaaagagaggagagatagagaagaagtggaagaga

SEQ ID NO: 105 - DNA, 364 bp, Oryza sativa
  Clone ID: PAT_MRT4530_100097C.1
ggggggaaggggttccccaaaagggttccaaattttttcccccaagactttttaaatacccctaaattgcccttttatttttaaacccccttttacccccccccccaaatttttccattggttccccccccctcccaagggaaaaaaaattttgtagcccttgaccgaaaggcttttggaggcccccttcccgaggacagggttccccttttttttccccggggtacccccggatttgccctttcccctggtaaggaaggcccccccggccttttaaatgttttccccttttccgaaccaagcttttaggttttttttttgggggcccccccaatagaaaaaaccccccccccccgttttttgg

SEQ ID NO: 106 - DNA, 347 bp, Oryza sativa
  unsure (1)..(347): unsure at all n locations
  Clone ID: PAT_MRT4530_100098C.1
tcccccgccgcccacagccccccnnngccgggnnagggnnnncccgnncncgccgggnaanaaaagcgcccncnaaaannncnaggcgggncnnnaaagccaccaacccngnnaagnncnnnnngnanccccgncgcaagaaacccggccaaaaggccccggggcaaacgaccccaacggggaagggcccaaaccccccccccccccctaggggccaaaccaccggcacccagggcaaaaggacccaacaccaaaaaagccccccgcggcgcgccgggggacccccnngnccggtnnngcagnaaannannnnnnccaaaaggcccccacgctgcctccgtcactga

SEQ ID NO: 107 - DNA, 2166 bp, Oryza sativa
  Clone ID: PAT_MRT4530_100099C.1
ttttaaataaattttttttttttttttgtttttaaacaaaatgaaagtaacaaagagattgaatatacattatatacattttggatccagtcccaaaacaatcgagatccatgcatatgcatgttccatgatcgagctactaatttagttaatcaaccgcggcgactgcagttggaatgtgtgagatgcatatatatatatatatataacaacaagtatatgtatatgaaaataaataatgggggccggcaattgatgcaggtgagtgagagatcgaagatccatatatagtgtgtagtacgtaggtccgggctgggggctggggcgatgatggttatagtacaggagtgaaaaattagtgcatcctgccctgctgcgtctgggggagaaggccggggatgtaagggacgccgaacttggggatgaactcctggccctggatgaaggcctccacggtgaactccttctggacgtcctggtaggtgagggactggacgcccttccacttggcgcgcttgctcatgtcggcgccggggccatggttgtcaacctccgcgtagtagagggtgtccagggcgaagttgccgttccactccagccaccccaccggatccaccaccgccccgatctcgttctgcacgaagatggtccgcgagtactccttccacggccgcgccaggtacgtcttcaccttgtccgtgaacttctccaggtccgggtgcggcgccaccgtgcagttgtggatcaccgtccctcccgccgacctcttctcccgccgcccctgcgccgttatgatgttcacctggttgtccatcggcttacgaggctggagcaagcagttctgaagaacaacctgcgagttcccgaatatgaagtcgattgtccccgacactgtgcagtcgcggaagaactggcgctgcgcgtgcgggtacagcgtgtcctggtacccgtcgaactcgcactggtagaacaccgccatgtcgctctgcgcgcggagagccaccgcctggtggttctccggccccgccgtgttctccaccgtgatccccctcatgaagaagccgttcccgatcgcctccatcgtcgccgtgtccttggtcgtcaggttcatcttgaagttcttgttccccgtgatgatggtcttcccgatgccgtcgcctatcatgttcacgttcgtcgccggccgccccaccgacacgtactcattgtacgtcccggccttcacgtagatggtgtaccgctccttgttcttcgggggcaccttcgccaccgcctcgccgatcgtcttcacgtcgccgctcccgtccgccgccaccgtcacgtccggcttgaactccacgggcccggcctcgggccccgccgcctccagcagctgccgcctcccgccctccgacatccacaccggcatgccgtcgtcggcgagcaggcggcggcggccgatgttgaggctgccgagcgtggcggagaactggtcgacgacggcgaggatgtcctccgtgagctcctgcgagctgttgagggcgcttttcatcttgtcggcggcgtcggtggtggtgttgaggaagccgtcgaggcaggtgccctggtaggtgagggcggcgctgagccaggtgcggaggtcgtccacggccttgtggaagttggtcatctcgaaccccccgagcttctcgaacgacgtcttgaggtcgtccacggcatactccagcagctccttgcagttctgcagggcgcccgacgtgcgcttgtcgttcttgagctcctccagcgtcgacgactcgctgatggccttggagatcttctccgacgtcacggcgaacatggccttggccaggtccgtcggcgagctggcgccattgccggcggccttccccagctcctcctcgcacgtctgctggtagtccgtcggctggcagaaggccttcaccgacttcaccgacgtggacagctcgccatcctccttgccgccgccgccgttcttgaacgacaccacgcacacggctgccaccaccgccaccaccagcacggtggaagcgccgatgatagcacctttgctcatggttccctcgccgcccggccgcccccctgcgctctgcctgctgcctccctagctagctccaattaatgacgacgatatagctacctagctcggatcggacgcgtgggcga

SEQ ID NO: 108 - DNA, 1232 bp, Oryza sativa
  Clone ID: PAT_MRT4530_10009C.1
gaaaagggttccaattatataaattataatggtatttttcaaaactagcaaaataataatggtatggatctaattaacctttttttagcataaaggcacaaacacatctgggtccaaatcggtgccaactacacatacgcaaattactaaacaccaacgagcaacgcaacagccgcatatcacagcaatcccattctcttggcgcattccacactaccttccagcgtctcctccaccccatacttgtatctgaaccccaaatccgtgagcttgtttgtatcacctcccaccctcacgccctcccctaccacctctcggagcttgatcgtgatctccggatacttggcggagaagtggtcgacgaagtccttcatgttggggtacccggcggcgcagaggaaacggccggcgatggacggctgctccatgcagaagacgtgcgcgtcgcagacgtcgtcgatgtgcgccagcggcacggagccgagcagcgcctgcaggtacttgagtccgccgtggtaagactcctggccgatgagcggcgccacgatcgccgggacgctgagcaggtggtagagccgggtggtgtcggcgtcgccgccgacgagcgcgcacgccagggtgaccacctcgaacgccctgctctcggactcgttgtacctcagcagcgccttttcggatagcgttttggatgatgcgtaaacagccgacatgtcgctgctgtatgggtgagactggccgagtggagtccagcaggactcgttgatgaagtccttgtacccctcgccgccgtcctcccggagcggcgaggcggcggtgacggaggcagtgtggatgacgcgcttcaccgtctttgatcgctcgcattgcttcaagatgatgcgcatcgcgtccacggccgcctcggcggtgttcttgtacttgctgctgggttcatgctgaaacggggtggcgaggaggaagacgaactcgcagccggcgatggccggctcgaaggtgtcggcgtcgtacatgtccgcctcgaacagcaccagccgctccgccgcgccggggagctctctcaacggcgccgccttcttctcatctccaagatttctcaatgttccatggacgatgcagcctcgttccaagagcttcttgacgaggcaggtcgcgatgtagccgctggccccggtgacacacaccctgcagccaccgccgtcatcggcaccattgcccgccgcgacctccgccgt

SEQ ID NO: 109 - DNA, 742 bp, Oryza sativa
  Clone ID: PAT_MRT4530_1000C.1
ttttttatttttatatgactaaaaagtgaattattttctataattgaaatatattcatgggcacatacagaaatagttacagttgctccaaaataaaacagttacaatttggaaacaaaattacatagagagagagaataaacaggatgacgatcgaattaagttacatgtatatatatttctactgaaattttatcaagcaccgaggagctgaagatcgatgagctagtgataatactagtagtggatgtcgttgacgagggcgcagtgcttcctgatctcgccctcggagccggtcttgacgccgaccatgcccagcttcgccatggacctcgcgaacacctggaagaacacctccggcgggctggacaccacgctggcgatgttggcctccgcggcggcgtcggtgacgagggcggcgtcggactggaagagaccgcggcgcctgaggaggccgcggtagtagcccaggtcgaaggtgaggaagctgcccgggtccatctccacgatcgtcgtgttgtccgacggcgccgcgcacttgctccgccgcaggttcgccgcgtactccgcgtccagcgacgggtccgcgtcgccggggccgcctttcccggtgaagttgtacagccgcttgctgaacgagttgcagtgcgcgatgccgatcgtgtgcgcccctgaccacaccctgaggtcggcgaggtcgaggcccttgctctggaaggaggagaggaggtcggtgaagttc

SEQ ID NO: 110 - DNA, 414 bp, Oryza sativa
  Clone ID: PAT_MRT4530_100100C.1
tgaaaatattgtaagttgttttgacttttgatgatccatacccatgtttttcatcccttctggatgtaccactttcaccgtctacacgtttgctatatctgatcttaagactcagtgctctcataatctactgtgtctgctggatatgccccacttccatagctcacatgcttgctatatataatcttaatattcagcatttgcataaagttttgattatgttgatgaatcattcatttattcattttccttaagttaactacaacagtcagttgtaatgaatattttatgtttggtcagtataaagtatctattagtttcttagctactgagtactagttccaacaccataatgcataggttgtattaccaaagtcttaatgtttaatccttaatctccactacagctgatac

SEQ ID NO: 111 - DNA, 312 bp, Oryza sativa
  unsure (1)..(312): unsure at all n locations
  Clone ID: PAT_MRT4530_100101C.1
gacgttgcaatacgtttctattaccaccaacccaccattgcattatctgttaaattgcnnnnnnnnnnnnnnnnnnnnnnnnnnnnnnnnnnnnnnnnnnnnaattcgccctatagagagtcgnattacaattcactggccgncggtttacaacgtcgagactgggaaaaccctggcgttacccaacttatatcgcttgcagcacatccccctttcgccagctggcgtaatagcgaagatagccgcaccgatcagccttnccaacagntgcgcagnctnnnnnnnnnnnnnnnnnnnnnnnnnnnnnnnnnn

SEQ ID NO: 112 - DNA, 2649 bp, Oryza sativa
  Clone ID: PAT_MRT4530_100102C.1
ggggctgggtgagctcctcctccttgtgtcgtgaacgccctaaggttgagacaaacacccaggcgaccctccctttttctgggcgctgtccccggccttgccgccggtgagggcgtagcggatgatgaacttgaggacgtcgagcgggaggtaggtgacgacgctgaactgccacacggcgccgccccaccgccacccgatgccctggatccggcagaaatcccagcgcgcgtacacggcgatcgccgtcgccaccatctgcgcagcgaagaaggcgaagagcagcaagaacccgggcctctcgacgaacgaccagctccgcgacctcgtcacgaagatgagcgcctggctgattatgctcacctgcaggtacagcgccgccatcatctccttctcgttcgtcttgatcgacctcaccccgaacgtctctgtgaagaagtcggtgtcgtgcgcgaggtagaagaagagggcggtgatgagcgccatgtacgtgccgagcacgatgcccgtggcgaagatctccttgagcttccacgagtccggggtcggggacggcttgacgcggtccttggagattgtcatgatggtgccgtcgttgaggatggcgatgatgagcaccatgaacggggcgaagtcgaacttccagatgatggcgatgaggaggaagccgaggacgatgcggatggtgatggacaccgcgtagatggtgtagttcttcatccgctggaagatggcgcgggaggtgagcaccgcgctgacgatcacgctcagcccgggctccgtcagcacgatgtccgacgcgctccgggcggcgtccgtggcgtcgtccacggcgatcccgatgtccgccttcttcagcgccggcgcgtcgttcacgccgtcgccggtcatgccgcagatgtggctcatctcctgcagccgcttcacgatctcgtacttgtgctccgggaacacgccggcgaacccgtcggcgcgctcgatcagctcgtcgatggggaggccgttcacctggctgttcttgtcgccgaggagggtggtcgacgggtacatgttggtgcccatcccgagccgccgccccgtctccttggcgatggcgagctggtcgccggtgatcatcttgacgttgacgccgaggtggagcgcgcggcggatggtctccgcgctgtcgtgcctcggcgggtcgaacagcggcagcagcccgatgaactgccacgggtcgccgccgctgtccttgctcttctccggcacctgctggtacgacacgccgagcgaccggagcccccggtcggcgtagctgtcgatcagggcgtggaccttcttctcggcgtcggcggccatgttgcagagctcgatgatctgctccggcgcgcccttgctcaccctgtgccagtcgccattgccgtcgatgtaggtgatggcggtgcgcttgtcgacggggttgaaggggaggaagtgcacctcctggatccccgcgcgtgcctccttggggtcgtcgagcatgttcacgatgcaggtgtcaatggcgtcctggttctcgacgcgcgacgccctggcggcgtagaggaggaccatgtccttgtcgacgcccttggagcacacctcgatgagggtcttgtcgacggtgagcttgttgagcgtgagcgtgccggtcttgtcgctgcagagcacgtccatgccggccatctcctcgatggccgtcatgcgcttggtgatggcgccctgctgcgacagccggtgggagccgatggccatggtgacggagagcacggtgggcatggcgatggggatgccgccgatgaggaggacgaggaggttgtcgatgccgtcgcggtaggcgcggtgctggatcgggtacatgacgagcacctcgaccgccatgccggcgccgatggagatgatgcagaagttgccgatggcggtgagcacctgctggaagtggccgacgttgttggtgctgtcgacgaggtgcgccgccttgccgaagaaggtgcgcacgccggtggcgatgacgacggcctcgatctcgccctgcttcaccgtggagcccgagaacacctcctgccccgggtgcttgttcaccggcaacgactcgccggtgagcgccgactggtcgatcttgagcgggtcgccctcgagcagcctcgcgtcggcggggatgatgtcgccgagcttgatgctgatgatgtcgccggggaccaagatcgccgcctcctgctcctcccacctgccatccctgagcagcttggtcttgggagccaggccggccatgagcgcggcggcggcgtcgccggcgttggcctcctcgatgtaggagatggtggagttgatgatgagcagggagacgatcccgacgaagtcctgccagtcgggcgggcggccgccgccgttggcgaggacgatggccatgatggcggcgatctccatgacccacgacagcgggttccacatgaagcccaagaacttgagaagcttgctctccttcttctcctccagcttgttcggcccgtacagccgcagccggctctctccctccgctccggtgagccccttccggtcgcatttcagcttctggaacacctccgccaccggcgccttcgacaggtcgacggagtcgtcgttgatgtcgtcgagggagagggaggacgccat

SEQ ID NO: 113 - DNA, 300 bp, Oryza sativa
  Clone ID: PAT_MRT4530_100103C.1
atgggatttggaagcggtggaggagacaaacgacgagccgtcgcgggcggggcggccgagacggcggcggcggcggcgacgtcgttcttgtttgtctcccagaacgagagcagcggcatgctttggttgctgctttgcttggcttcgctggagatggagagggacgtcgctctcgctcgggttctgggcgggcatttccacaaacacatgaagggcgtcgtcggcgccaggccagccaggctctgccggcggcgctccggcgaggccctgcccgtaggccggcatgaggcagcgaaataa

SEQ ID NO: 114 - DNA, 162 bp, Oryza sativa
  Clone ID: PAT_MRT4530_100104C.1
atggcgatggctgctaagcaagctccaattgcggcagtggtgacgctccatccgctactgtggatgcgctcggcgatgacagatcgagtggcacagagggagcagatttggagggtggcaccgatgagcaatgctgagtacggtggctgccggtggtcatga

SEQ ID NO: 115 - DNA, 372 bp, Oryza sativa
  Clone ID: PAT_MRT4530_100105C.1
atggcgatgcaacttccaaacatgtgtagcatggcccctgcctacttccagctctctccctatgttgggccgggatggtgtactgtcaccgacttgcgggatgttgttttatgggccatcatcctcccgctccaagcccatgatccagcccaagtcgtcgcgcacctcgggcgatccgacctcgccgttgcttgctcagacgccggagacgacgacgacggcggcggcggcggcggggacgagatgacggtgttccacttcctcaactgcgccgccctcaccttcggcccccacgtcgtctactactcggccaccccgcttgaacggtctggacagagattcgtcgcgtcgtcagcggaaggaggtgcttga

SEQ ID NO: 116 - DNA, 526 bp, Oryza sativa
  Clone ID: PAT_MRT4530_100106C.1
ttatactggttcaggccccttaataggtaatagccctaattcagttgatatgggattatatgatggaaaaccacaggttacaaagggaacgatggaactcgatgaaaccggcgagatcgtaatcgagttggttcgactagatctcccggcgacttggctcctgcaggctccgacttcgtaggctgtgggggtggtgttggctgtgagattcgatgccttaggtcttcccagggggtcccttttatatcgcagatcaggtggtctccaagtaggactcggagacatcggacccttatccgtaaccctgacagtagcccccgacttctgcttaaatgaactcatgtaaccgatcgcgacttctgatgtcgaagttgctgtcgttctcaactggtcgatctcagtatgagaaccgtagagacaaggagtggtcgacaacaccatccgaagttcaacggttataagtgaatttaaactgaagtctgaaaaaccgccgcgcgtaacggacccagaaatttctggcggccat

SEQ ID NO: 117 - DNA, 759 bp, Oryza sativa
  Clone ID: PAT_MRT4530_100107C.1
atggcggagcataaggcggcgaagagcaagtccaagtcaaagagcggcggccatggccatgacgcggcggcggcgtccaagaagtcgaaaggcggcaaggccaaggcgaacaacgccgcggcggcggcgccggcgacgtcgctggacgcgctgttcaggccgtgcggcgacgtgaaggggctccggttcggcgcccagctcgtcacccgcgcgctcaccgtgcgccgcgccgcgccgctcgagctcccgcacctcctccgcgtcgccgacgagaggcagcgggaggcgccgctggcgttcgcgccgacgacgacggcgtacatcccgaccaacttcgccatcctggcgcaccacgcgtggcacaccctcacgctgggcctcggcaccaggaactccaaggccgcggtgttcgtcttcgagtccgccgccatgaaggccgccgccgacgccgcgtggccgcaggtcgtcccgctcggcgacgccgggaggcgcctcatccgcgcggcgcccggcgcgccggagatggcgaggttcaagttccgcaagggctgcgtcaccttctacgtctacgccgcgcgcaccgccggcgcccgcggcttcgcccgcgccgacgagctcagggccgtcgtcgaggccgtcgccaagctcaaggacttcctggaccacaccgccatgctcgcgctgccggggcagaggagcatcgacgtcgccgccgccgccgacgccgcggcggcggcgccggtgggcgtcgtgcattaa

SEQ ID NO: 118 - DNA, 403 bp, Oryza sativa
  Clone ID: PAT_MRT4530_100108C.1
aaacctgtagggtgttcttttatttatataggtttttgagtttaaagtggttttacttcatttgttattttttttctgaaacggaaaaaaaaaagggcgtgttattctataacttgtaaaaaacgtgcctataattaataaattgagagaaattcataaacaacaggcgccaacaacttgtaaaaattccacccaaaaaacgggcgggtgaaaaactacgaagccctctggatgaccataccctctttttgggggacggttttctaacccacctttagggacctaccctgaaaagaaaaaaaatttggtttaaacccaaaggggaggcaaccccaaaaggccccaatctccccggttttggataggatctgtatcacgcgggaaaaaactccgggctcctgca

SEQ ID NO: 119 - DNA, 822 bp, Oryza sativa
  Clone ID: PAT_MRT4530_100109C.1
atgaggaggacgacaagcgacgacgaagccttgcctcgctgctcgccgccgcctcgcccacgccgctgccgcgcccgaccgccgcacccgttggtgaagaggcggcgctggcggttgcggacggtgacggcgcggccctcggcgaggacgtgggggagccccgtggtcgtcgacggtgagggccatgcggtcagcgccctcggcgacgtcttgacggccgcctcactgctcgccgtcgcgcccggccgccgcctcgcccaggcagccgccgtgcccgactgccgcctcgcccaggcagccgccgtgcccgactgccgcatcgcccagccgccgcctcggcccggcggccgcctcgcccagccgccaccacgcccgaccgccgcctcacgcccaaccaccggcctcggcccggtggccgcctcgcccggccaccacctcggcctggcccccgcctcacctaggccgccgccgcgcccgagcgccgccacctcgccccagccagttgagggagtggttgagggagaagagataagaatgctgcaagtaatagagaataaggctccaaatatttgcagttttgattttggagagtctatacccaatgtgccaaatcttgaaactctcaccatttgctcgtatcacgagataccaaaggacagcatggaggatgactcaatttttggagattcctcaaatatgaggcagatgcaagaatatcgtcatgacaacctccagagtgtgctccgccagtcggactcctctcgcttcgccgccagcgctgctcctcccgtcgttcggccgttgtccgccgcccaaacgtag

SEQ ID NO: 120 - DNA, 407 bp, Oryza sativa
  Clone ID: PAT_MRT4530_10010C.1
gctgcaggaattcggcacgagggagagaactagtctcgagttttttttttttttttttttttttttttttttttttgtgggttttttttgtataattttttcaaattttaattattttataaattccaaaacaaagaatgtgaggtcttcaaatacctttctttaatttttgatcttatgcccagatcttgagatatgagtcccatgatccagttgcgagagccagaccatcagaggaaacaccaaggcaagagacgcggttgtcatgtccttgaagagtggtcttcttttctgcggtcaaggtatcccaaacattgcaagaaaaatcatcataaccagcaaataaataacgtccactctttgaaaaatctacagaagtgataccacagaggatgttttcgtgtgag

SEQ ID NO: 121 - DNA, 281 bp, Oryza sativa
  unsure (1)..(281): unsure at all n locations
  Clone ID: PAT_MRT4530_100110C.1
atggggtttgntaaatacttcttcttaancttaanctctcttaagcttcgcttcctttaatttcctctaattgttgtgctcttagtacaantaancgggtaattaggcttaancatgttgctgctgctgcttatgtgttgttgttgtaagattaaggctgagctaggcttctcctcctgctcctgctgatgctgctgagtggattaattaagctaagctaatgtggatgatgatgtgtacaantnatggatggtgatttgtttnaaaaaaaaaaaaaaaaa

SEQ ID NO: 122 - DNA, 322 bp, Oryza sativa
  unsure (1)..(322): unsure at all n locations
  Clone ID: PAT_MRT4530_100111C.1
ttcccggtcgaccacgcgtccgctggnagctgcctacattaggatttgatgtgngggtgcnnccgtttgtnccagccntggcggcagccccgtgctgcacctgggtctggggttgtggcgatgttctcgcgcgggagtggtctgctggcgtgtcttgcccggcttgccttcccttttgttttctttggttgcccgccctgcgctgggcggggggggcgccctggctgtttcggtctgtgctgcgctgtctgcccggggttttgtcgctgctgccgcgttctctgtgctctgttgtgttgttgggcgtgtgcgctccttctcc

SEQ ID NO: 123 - DNA, 326 bp, Oryza sativa
  unsure (1)..(326): unsure at all n locations
  Clone ID: PAT_MRT4530_100112C.1
aagantaaccctcanatcntctngngtncgcctccggnagacgtnccccggaatataangtcgttcgaccacacncgtccatgncggtgtggttgcnctcggccaccggctccctctcccgggtgagtcctcctccacacgnangagngngtcanctgggnggttcnctcctccccccaccactagannccngnanccnancacgggnggnggcacatctnnaacntctccnggtgttacanctgatnaantacgggnncacccactggcncaccttgncactgtgaaacccnagagcnccccattngatgcttctcagcagatcc

SEQ ID NO: 124 - DNA, 2193 bp, Oryza sativa
  Clone ID: PAT_MRT4530_100113C.1
atgagctcgagcttattagtggcagcttgcgccgtctcttttgtgctgctgtgctcggctgctacgtccccagcatcggctgcagtctacggagttggcggagggctcttgtctatcccttctaatgattccctggctcattgcccctctcgttgcggagatgttggcatcgactaccccttcgggatagcgccgggctgtttccgggaaggcttcgagctcatctgccgcaacaccgccaaaactcctaagctctttctgggtgatggtactactgagatcacagacttgggttataggtatgttttggcccagatatacttcaacattacggtgagaccagaaggtaacctaactgtttgcgaattaggagaagcacaatatcatgtgactgctgtgtctttggatgatgggactctaactgtcggaaacatgatgaatgacacaaactacgagaaagaggcgataattgttcagaccacagatactggccgtgattattcattctcaggccctgtggaagatagatttgatctctctatggaatacgccattgttataagatgggcagttaccaacttaacttgtgaagtagctgtgcagaagaacactacatacgcatgccgcagtagccacagctactgcctgaacgtcacccacaggaaagagttcatgggatatcgttgcaagtgttctcccggttttgaaggaaacccatacatcgaggatggctgcacagaggaggcaaccaacaactttgatggaactcgtgttcttggacgtggaggacatggcacagtttacaaaggcattctatctgaccagcgtgtggtggccattaaaaaatcaaaaatcgttgagcaaactgagatagatcaatttatcaacgaggttgttatcttatctcaaattatccaccgcaatgtggtaaagatttttggttgttgtcttgaatctgaggtgccactgctggtttatgaattcatatcgaatggcacactgcatgaccaccttcataccgatcttagtgttagatgctcgctgtcatgggatgatcgcattaggattgctgtagaagcagcaggggcactttcctatctgcattcagctgctgcaataccaatttttcatagagacgtgaaatcttccaatattctcttagatggcagctttactacaaaggtctctgattttggtgcttcaagatctgtttcacttgatgaaactcatgtggtgactattgtccaaggcacattcggttatctagacccagagtattatcatactggacaactaactgaaaaaagtgatgtatatagttttggagtgatacttgtggaacttctaataagaaagaaaccaattttcattaatgaggcaggtgcaaaacaaagcttgtctcattacttcgttgaaggacttcaagagggctctctaatggaaataatagatcctcaggttgttgaagaggcaaacaaggaagagatcgatggaattgcctcgcttacaatggcatgcttgaaagttaaaggagtagatagacctactatgaaagaagtagagatgaggctgcagttcctgaaaactaagaggctaagaaaattccaactgctcccaggaaatgatggagaaatcgagcaccttttaagcccaaatactagtaactcttatgcacagaatatttatacaaatgctggcaagggcgacgacgatggcttcctcctcttctcccccactccttctctcccctctcccccctcccgacgcggtggagggctcgggcagtgggagagggcggaggagggatgcgacagcggcgacagatctggcggtggtgaggcgtccggcggcggatccgacggtggggaggaagcgtaccaatatcggttcgagaagacaaccggaggtccggagccgccgagatcacggcggcgcgtcgtcctggcggtgccgtcgctgggagtaggcaccggcctaacgaggtggaccacgcctcccgcttcccctcacgccgagtcccccgacaccgcgatccaccgtccctcggcggcggccaagcgcggcggtaaccactttaccgtggggtccgataaccacgccgaaaacggtaaggggaacaagccgtgcgatggcagcgagccgagcaatatcatcatgctgctcgaggaggcggtcgcagcctcgcaggcttag

SEQ ID NO: 125 - DNA, 267 bp, Oryza sativa
  Clone ID: PAT_MRT4530_100114C.1
atggctcgccttcctctccgctcgcgtgcttcgcgccttcgtcgacgctcgcaaccacgagtagttcttgccgagcaaccggtctttccgtcacctcgcaatttacgtgataaggagtttaagagatgtgatgctgatgaggactacttactagaagatacaagtgacacggcggacgatgagagtgaagatacagagaatgataataccatgaatactattcgcactaggatagctgatgctttgattagaacaagaggaggatag

SEQ ID NO: 126 - DNA, 2962 bp, Oryza sativa
  Clone ID: PAT_MRT4530_100115C.1
atgagctcgagcttattagtggcagcttgcgccgtctcttttgtgctgctgtgctcggctgctacgtccccagcatcggctgcagtctacggagttggcggagggctcttgtctatcccttctaatgattccctggctcattgcccctctcgttgcggagatgttggcatcgactaccccttcgggatagcgccgggctgtttccgggaaggcttcgagctcatctgccgcaacaccgccaaaactcctaagctctttctgggtgatggtactactgagatcacagacttgggttataggtatgttatcgacttaacatactacaaaactgtggagaaaaccagtacagacacctacaacacttgctgggtttccactacggatgttactactattgatcactacaactcatatgttgtcagctgttatactggcgatgcagtgttgtaatagtacgcgaaggaggacatagtaggttctttcaggagaagatgtgatgataaaaaggcaacaagaggacgttcttgtaataggatgggatgctgcatcaacgtgttacgaagggtcttggggggctttcagtcaacaattattcgtgatggcagtcctgtagcacaaacaacaccactgcagcacccccctggaatcatgtctttcacgtcatcgggactattatatatcaaacacaagtgaccttttcttaggttggacaaacacaagtaatgttgaaggcacagtactttcttttgctaccatagatcaaccaagctgtgaacgcgcgcgcatgaacaacacaagttatgcgtgtagccctggcagcaattgccggaatgtgtcatctggaggttatcattgttactgctctggttatgaacaggggaatccttaccttctagatggatgcacggattacaaccccaaatataaagaacactgttcaacatcctgtggagacatgaagattcctttcccttttggagtcgaagaaggttgttttgctaacgaaaggtttagacttaattgtacagaaggtaacctaactgtttgcgaattaggagaagcacaatatcatgtgactgctgtgtctttggatgatgggactctaactgtcggaaacatgatgaatgacacaaactacgagaaagaggcgataattgttcagaccacagatactggccgtgattattcattctcaggccctgtggaagatagatttgatctctctatggaatacgccattgttataagatgggcagttaccaacttaacttgtgaagtagctgtgcagaagaacactacatacgcatgccgcagtagccacagctactgcctgaacgtcacccacaggaaagagttcatgggatatcgttgcaagtgttctcccggttttgaaggaaacccatacatcgaggatggctgcacaggtattgcaattggaattggttgtggtcttggctccatagttatcgtgttgggggcaatgatacttgccaataagtggaggaaaggcatccaaaagagaatacggagagcatatttcaagaaaaatcaaggcctactcttggagcaactaatctcaaatgaaagcgccacaaacaaaacgaagatattttccttggaagaactagaggaggcaaccaacaactttgatggaactcgtgttcttggacgtggaggacatggcacagtttacaaaggcattctatctgaccagcgtgtggtggccattaaaaaatcaaaaatcgttgagcaaactgagatagatcaatttatcaacgaggttgttatcttatctcaaattatccaccgcaatgtggtaaagatttttggttgttgtcttgaatctgaggtgccactgctggtttatgaattcatatcgaatggcacactgcatgaccaccttcataccgatcttagtgttagatgctcgctgtcatgggatgatcgcattaggattgctgtagaagcagcaggggcactttcctatctgcattcagctgctgcaataccaatttttcatagagacgtgaaatcttccaatattctcttagatggcagctttactacaaaggtctctgattttggtgcttcaagatctgtttcacttgatgaaactcatgtggtgactattgtccaaggcacattcggttatctagacccagagtattatcatactggacaactaactgaaaaaagtgatgtatatagttttggagtgatacttgtggaacttctaataagaaagaaaccaattttcattaatgaggcaggtgcaaaacaaagcttgtctcattacttcgttgaaggacttcaagagggctctctaatggaaataatagatcctcaggttgttgaagaggcaaacaaggaagagatcgatggaattgcctcgcttacaatggcatgcttgaaagttaaaggagtagatagacctactatgaaagaagtagagatgaggctgcagttcctgaaaactaagaggctaagaaaattccaactgctcccaggaaatgatggagaaatcgagcaccttttaagcccaaatactagtaactcttatgcacagaatatttatacaaatgctggtgatttaacatctgaaggaatcccaggttctggttgctacagtctggagcaagaattatcatcttcaattagtttgccacgctaattaggtataccacggtgaagtgatatctgatatgctttgtagttccgttctgaacagggtatgctgtattgttttacttcctgtgtgtaattttaggttacagtacgtatggatagcccacgcctactgtatattactatcattatttgtgaggaatatatggttgtaagggattaattaaggccaggtgcaaagacaaaatttgtataatcatgaacagatccattcaagtaataatttcatagctccaaaaaaaaaaaaaaaaaaaaaaaaaaactcagactagttctc

SEQ ID NO: 127 - DNA, 111 bp, Oryza sativa
  Clone ID: PAT_MRT4530_100116C.1
ggctggaacgcttcgaaatacatcttcatatcaaatatcaagaaaccagacccagttattgatgcaccatctggccttgcttccatgagccagataacagtaccgttctaa

SEQ ID NO: 128 - DNA, 123 bp, Oryza sativa
  Clone ID: PAT_MRT4530_100117C.1
atgccggacctccctcatcctcgcaacggaacagcgaggacgcaccactgcaccgccggactagcgccgaggctatatcctatcaaggtgattggtgttgctccatacagactaacattgtag

SEQ ID NO: 129 - DNA, 3129 bp, Oryza sativa
  Clone ID: PAT_MRT4530_100118C.1
atgaggcttcttgtattactgtccctcatctccgtcctgacgatcgccggtggcagcaccgatgaggccacgctgcccgctttcaaggcggggctcagctcaaggacgctcacctcatggaacagcagcaccagcttctgcaactgggagggcgtcaagtgcagccgccataggccgacgagggtggtggggctgagcctgccgtccagtaatctcgccggaacgctccctcctgccatcggaaacctcaccttcctccggtggttcaacctgagctccaatgggctccacggggagattcccccaagcctcggccacctccagcatctacggatcctcgaccttggaagcaattcgttttccggtgcgttccctgataatctgagctcctgcatcagcttgataaacctgaccctgggctataaccaacttagtggccacattccggtgaagttgggtaacacactgacgtggctccagaagctccatcttggaaacaacagcttcacagggccgattccagcctcgctagcaaacctatcatcgcttgagttcctaaagttggacttcaaccacctgaaaggcctgatcccgtcaagcctcggaaacatcccaaatctgcagaagattggtcttgacggaaacagcctctctggcgaattcccgccctccatatggaatctgtcaaaactgactgttctccaagtatatgagaacaagctcaaaggaagcattcccgccaacattggcgacaaattacctaacatgcaacactttgttctgtctgtgaaccagtttagcggagtcatcccctcttccttattcaatctatcatcactcacagacgtataccttgatggtaacaaattcagtggatttgtgcctcctaccgtgggaaggttgaaatctcttgtgcgtctatccttgtctagcaaccgacttgaggcaaataacatgaagggctgggaatttataacttcacttgccaactgcagtcagctgcaacagctagatatcgcagaaaattctttcattgggcagctgccaatctctattgttaacctgtcgacaacacttcaaaagttcttcttacgtggtaatagcgtctccgggagcatccccacagacattggcaatttgattggcttggacacgctcgatctagggtccacttctttgtcaggagtgattcctgagagcatagggaagctagcagacttggccataattactctgtacagcactagattgtcaggcctcataccgtcagtaattggaaatcttaccaatttgaatatactagccgcatacgatgcccatttggaaggcccaatacctgcaacccttgggaagctaaagaagctatttgctctagatttgtccataaaccatctgaacggttcggtcccaaaagaaatttttgagctgccgtcactttcttggttcttaatcttgtcagataatactctctcaggacccattccatcagaagttggtaccttggttaacctaaacagtatagaactgtcaggaaaccagctatctgatcaaatacctgacagtataggaaattgtgaggtgctggaatacctgctgctagatagcaactcgtttgaaggaagcatacctcaatctttgacaaaactaaaagggatcgccatactgaacctaaccatgaacaagttttctggtagcatccccaatgccattggtagcatgggcaatctgcaacagctgtgtctagctcacaacaatttgtcaggatcaatcccagaaaccctacaaaatttgacacagctgtggcacttagatgtgtccttcaataatttgcaaggcaaagtaccagatgaaggtgctttcaggaaccttacgtatgcatcagttgcagggaacgacaagttgtgtggtggaatacctcggcttcacttggctccatgtccaattcctgctgtaagaaaggacagaaaagaacggatgaaatatcttaaagtagctttcataacaacaggagcaattctggtgttagcttcagctattgttctgattatgttacagcacaggaaactaaaaggaagacaaaatagccaagagatatctccggttatagaggaacaatatcagaggatttcatattatgcattatcaagaggaagcaatgaattttcagaagcaaacttgcttggcaaaggaagatatggttctgtttataaatgcactttacaagatgagggtgaacctgtagccataaaagtgttcgaccttaaacaattaggatcttcaaggagctttcaggctgaatgtgaggctttgagaagagttcgccatcgttgtctgacaaagatcatcacttgttgttcaagtattgacccacagggtcaggagttcaaggcattagtttttgagtacatgcccaacggaagcttagatagttggctccatcccacgtcaagcaatcccactcccagcaatacactgagcctttcgcagagactcagcattgtggttgatatcttggacgcactggattatcttcacaacagttgtcagccaccgatcattcattgtgacctgaaaccaagtaatattcttcttgcagaagacatgagtgcaaaggttggagattttggcatatcaaaaatcctccccaaaagcacaactagaactcttcaatattcaaaaagctcaattggaatccgaggttccattggatatattgcaccagagtatggagaaggttctgcagtaaccagagcaggtgatacttacagcttaggtatattgttgcttgagatgtttaatggaagaagtcccactgatgacattttcagggattcaatggatctgcacaagtttgttgcagcttcttttcttgagagcgccatgaacatagctgatcgaacaatctggctgcatgaagaagcaaatgatacagatgggacaaatgcaagcacaaaaagaagaattattcaacagtgtttggtgtccgttcttaggctcggcttatcctgctcaaagcaacaacccagagaccgaatgctgttaccagatgctgcatcagagattcatgcaatcagagatgaatatctcaggtcttggatggttgaaaatgaacagagcactcttaactaa

SEQ ID NO: 130 - DNA, 488 bp, Oryza sativa
  Clone ID: PAT_MRT4530_100119C.1
ggccacggcgtacgcttatggttaatcttacggccacgcgtccggaatcggtcaagaggacagcttccctggatcattctgaaaagactgctgccctaaactcagctcgattccgtgcaatgataagcgggccaagcctgcagagctactctggagcatacgggcaattggatgaggtgggaatcattgaggccgacgactttgttgcagatgagttttgcagggcaaaatgccaatcagtgagcgagaagggcatccggaactgcatggacgacctcctggaactgaagcgagtctctcggatgagatgcggaagaagtgcaccacaattatcctgttttcattcagacttctcggtgggtctccgactgatggggaagctgctgttggagatgcgcaacctgctatcgcaggaggctgccaccatccatggattgctaggggggggcccactttgctgccgcagaagagcatcacagtggaacaga

SEQ ID NO: 131 - DNA, 415 bp, Oryza sativa
  Clone ID: PAT_MRT4530_10011C.1
cttaccaggctaaggctattgaaatttcttgccattatgaacattataaatgcttcctttgacaatgaataactgagacccgcgaaggtatttattacatctttcttcgaggctggaggaacacaccaaatgagcggccatcttgctggattgccgatgctcaggtgacctccaaacagtttggcgttgagaccgccattttttttactactgccggggaatgcgtgcaaaacatcctgtatttgtcaaaagaacagcttgaaaaaacttgcagggggaagtcttcttttcacgtgaggtgtccctgccggacctgtcgaaagtgcaatgtcaagcctttgtaacagaacctgcttaattttacgcgctaggtgcctgaattcccgctggtggaggcccctgattagcccttccg

SEQ ID NO: 132 - DNA, 404 bp, Oryza sativa
  Clone ID: PAT_MRT4530_100120C.1
ccaaacacaaattaatcgaacaaatcacttttacatcgttgtatattacaacttattcggatcgttgacaaaaacaacttaaatttttgaacacacaataatgtactaccgattgttttttccccaaatccaaaaggaaagattgccatctatcgcccaattgccctccaagaacatgcaacctgcacaggtgcagaggcctgcatccccctcgaggtagatcacgtcacgtcgcacgtgtgcaacgcatcgtgtgccatgtcatcagttggggaacctgcagtcgcggcggatctcgccgccggtggccggcgacttgacgccgaccctgccgagctgggtcatggcggcgacgaagtcgttgaagaaggcgccctggttggcggcgtagcggtcgacgaggc

SEQ ID NO: 133 - DNA, 2273 bp, Oryza sativa
  Clone ID: PAT_MRT4530_100121C.1
cctgtgctcctggctcccgtttttcttttttttttttttttaggagttcgacaagcacgtgcattcattcattagtagttcagcaccagactggattctccgttcacccatacatagcacagggacctggcttctcagatgagaaattccagttttcaagtagcgttcgtagaattttccaggaagtattaagtgtaagaaccatcttctagatactatatagccacccacgataaactgacaagtcggcaaacttacagacaaactaatactactatatatactaagatggcaccaaaacaaaacaaggaattgtcttgttctaactgactatttcaaggtaatgctgaatcgcacacctcatatgacctcccagtgagcgactcgaagatactcttttgatgctttagcatgtggcgcacatagtacagaccacgaaaatctgctatgaaaaacgcctctagcaaccacagatgcaaatggaagacaactgacagctcaggtggttctgtggatcctggttgacatggcaaaaaaatgcaaggccctttagggggcatgggacgagatggactctgggtcgttcatcccagcgagaaatgcaatgaagacccacagcattagaacaccaatgatggcagcccttatggcattctcgcagctataaggagatggaagctccgcctcatcaaagttcatgcttgcgacaggtgatccatcatcaatggttatctggcgaggttggctcttgctgccttcccctgcctgtattactgaaatattacgcggcttctcacattgcgggcagctgcatttgccaccaagaaaagttggcacaatctgcaagaactcggctaatgtcttcttatatgattctccctcaaaacgcaacttctgctttgtggatggtttcagaacctgaataagagtctgcgcaattactctgacaacaggaggaagacgcacaataaatagtaccccaagacgatttggatagttttcttgaactatagtgataaacgacctcatcatttgcattggaaatctgaatggagaaatcccatgacaatccagcaaaacagttattctcggatcttctttgttggtcaagtatacaataccattgtcgatttgagaaactactgcttgcccaaaccgaggtctatcagaaggggctagactagagcatgcaagaccaagacggactattaaacagggccgaagcatagtatcgaatccatgccaaaaaactaaatgggaccacttctcgagttcgtgcaatgtaagtatatggaaggtttccctccaacgaattgtcttcttaactgaagagagcaaacttgaaaagtcaccattggctgcaatgtaaaatctgcgtagttcatcctcattgaacctttcaggcaaagtgatgccttgtttctcaagttccttgaacagtgatatgagccagttatctggctcggtatcctttgtgccatcagcaacatcccttataccagaagttgatgctgtttcatctgattcagaaggtacatcaggagcttctgtattgctacccaattcatcattgcgcttagaggaccggtcacataatgttgttgtgacagaaagaaacaacagtggtgtcgataattttacttccaaggcaataacctttaccaaaaaagatgccagatgacttgtagactccccgctcaagattaaatgttttcctggcacgatctgcttgactgtcttgggtgaaatggcttttgctggagaagcaaccaatgcaccctggtacttcctgtcactgcctggtttgcttgatgactggaagtttttgcttgaactggccatcgttatgatttatgaagcataggcataaacagaatcttaatccctggttttgaaattgtatcaccacatcaatcaacagttacaaagcagttgcatcgaaccagcaggaaatggagcacaaatgaaatcacgctgcagaatccatcccccgcctgtcaactccttcgaggtggtggtggtggagccgctcctcctccgtcgccggttagggttcgatcttgccttccaccttgcgcatccggggatgggagggagatcgatggtggagacggatctaggcagaggtgggtgggtgcggggcggtggcggtgggcaagagaagggaagggagcgaggcgagatggggagaagggaaggggcagaggaccaccgcaccggcgcacacgcctctcgcggtctcgcacgacctcctccttgtctctgtctctgcc

SEQ ID NO: 134 - DNA, 480 bp, Oryza sativa
  Clone ID: PAT_MRT4530_100122C.1
cacacttagatcgagcaagaaatatagagaaacagagaagctagctaggcagcagcaatggcgggtcaagctaacacaatacaggttcccaccgacgctgagctgctgcaagcacaggccgacctatggcgccacagcttctcctacctcacggccatggcgctccgctgcgccgccaagctcggcatccccaccgccatccaccgcctcggcggagaggaggcggcagcatccttgcccgatctcatggcggccttgtccctcccggcgagcaagcaaccgttcgtccgccggctcatgcagctactcgtcgccgtcggcgtcttcgccgccgacggcgtcgccgacgagcgctaccgactcaccccgctgtcccgcatcctcgtcgacggcgtcgccgccgccgacgaccaccaccacgacgttctccagacgcccttcgtcctcaccgcgacgtcgcggcagtacgtcgaggcggcg

SEQ ID NO: 135 - DNA, 671 bp, Oryza sativa
  Clone ID: PAT_MRT4530_100123C.1
agcaaaacaaaaatctcatttttatcaataatctggcacaaggacggccacaaaaggatacattattatgatttattctgtttaaatttgggcaaaaattatccttgtaattattatctggacccagcaggcaaaataatacattaacttggctgaaatgaaatacaaggtacagagatctatctttggacatgttttgatgcacagtacatcattccacatggatcactagcaggcctgtatcaccacaacagcatcttgggggctgcttcgttctgtcagctgaggatgtatggtgcagtatagaagtacattgacttcaagaaaatacatgggctttgagccttgaatgttcagattatttccttcttttctcgttgaatctttcgaagaacgactttgaggcctcgtacgtcgaccagcagatagcagctgcaggtgcgtggaacagcattcttggcttccatcctctcataagcccagcatatccatcacgctttatgattgttctgaatacatcacctattgagctacttgagaagcgctcacagccgcacacaccctgacactgcagctgagtcttgacaacgtcgagcggcgttgtagactgagccggagcgcgccggtgcggctccggggggggtgcacgggagcgaatcctcgtgggggcc

SEQ ID NO: 136 - DNA, 730 bp, Oryza sativa
  unsure (1)..(730): unsure at all n locations
  Clone ID: PAT_MRT4530_100124C.1
ccacgttggataangtgttagtgttccccctnttgctgatgcggctgatgtggcgccactttgccgtgggacactgaccggactgtgtgtcgcctnaaaaacggtgtgctctgagggacgtgacgaaagactgcgacaggatgattgccacggacctggaaggacacatttgggggaggtttgacgtgcgcctgcggtgccactgtggatgccaaacctggctgatgtgtgtatcggtgacgggtgnggttgagttgctggtttgttgtggtgagggaaggggcaggtgataatagggatgcatgagctacctggaggctgcccatggtgcagcatgaaggccctgctgcagccctactggttggggtgatgatgcactgactgactggtgtgtgccaggatgccctgaattgtgcgtgtggctgggaccccgtggggaaaaaattgaatgaagtgtggctgtgaaaagcatggaacgcatgtgtggcctgaatctgcatgacaacgtgctgatnccacgtgcgtcgatgggtggtaattggaggatttggaaaacctgcatcccangtgatggcctggtggtggctggctgaattgagcttggatgtttgtgcatgcatgtttcttctcttngtctaagattgtttctgctgataaanactcnactntaaacccgagtaatgttggggcgtttnaccccccccattnccttttcccaaaaaaaaaaaaa

SEQ ID NO: 137 - DNA, 353 bp, Oryza sativa
  unsure (1)..(353): unsure at all n locations
  Clone ID: PAT_MRT4530_100125C.1
tcatctcacactctcctctaaatcctcccaataaatcgatccatcgaaacagttcgctctcgattgatttgatttgatttgttgtctgctcgtctgctgcgaagatcaatggaggccgccacggttgtcgctgctccgattccggcggcggatnttgcccaaaggcgctggagaagaagctccttgacctggagttgccgccgttcccgggcccggcgaagaaggccgccgccaaggtggtcgctgctgctcccaagaagaagctcgccggcggccgggatnaccggtccctcgaggacgtgccccacctcaccgactacctccncaaccttccctccttncccaaaccccct

SEQ ID NO: 138 - DNA, 208 bp, Oryza sativa
  Clone ID: PAT_MRT4530_100126C.1
atgtgggcccggaagatcgtgggtccacctgtcggtgggcgcagggcgggggtacgggttgcctggacaggtacagggaagggaaccgagcgggagcacgagatccgtggatatctgcgttggaaccgtgtagcccgcgtgtgctgggtggagcgaagtggatttttattggatttgggcgtagaggatcccgcgcggcgaggtgccg

SEQ ID NO: 139 - DNA, 215 bp, Oryza sativa
  Clone ID: PAT_MRT4530_100127C.1
ggtggtttttttggttcttttaacttttgtgcgttttcccccaaacgccaagttacaaaaaaagaaaaaaaacacaaacaccggagatgctctgaaacctgaaatcaaatgaaggcagataaaaactttcagaaaatgcaaaatagccttttcaacctttgcacgaatgcacacctccgtatttacaaatgcacacataaacaactaaccaccct

SEQ ID NO: 140 - DNA, 644 bp, Oryza sativa
  unsure (1)..(644): unsure at all n locations
  Clone ID: PAT_MRT4530_100128C.1
ccgtttctgttgggcccatgtatacaggtagcacctcgtnctggaaccttgacacacaggatcacatggtcaggcatggctggctgcaacgatttgctggcatgccccgcccatgcaatgccacccgtgctgatgcacacccccatnccgttgatgtttctatcgggtgaaagcatgctgaccacagaagttgcacaaagaagaatgccgttggaattattttggcacacgtgtgctggactgttgaagccacttgcggcagctgcaggagggtggcatggatttggtggcccctgtgtggaaaccatggtgagaaaatggaggtgtgtctgtgtggtgttttggtctgtttggtgtaccacgttctgtataggagttgagtcttacgtngacttacccaagggagaattaaggtgtccccctgttaattctgtgagatattcacccctgacttctcaccacttcgttggaggaacncccagaaaggaaatgtgtgcatagttacaagatgatctcatgtgagtttttttttttcctcttctttttatagaggacaccactggtgatacaaatattcnttacacggntgaataccaagaaagttacttcgagtcttttcctttcaaaaaaaaaaaaaaaaaaaa

SEQ ID NO: 141 - DNA, 777 bp, Oryza sativa
  Clone ID: PAT_MRT4530_100129C.1
atggaagtaatgaaaaagaagaagttctgtagttggaccatccgtcgtatctgctcgccctcttcttcattcatccaattaggtcagaatggatccagggtgcggcggttaggcatccttagacgaaagagtggtctttcaggattggtcgttgtgtgtcaccacctcccacctatcctacacattcgatcaaggttgtcactgcgaagcctctacttgtggtggtatagtgctgcttttagtgatttggagggtgcctcccgtgggcatgcctgctacgctgaagaagtaactaagctatacaaaaagaattcgaaaaggggtctcctctccccaactacactaggctcaaggactaacccttttaacaacccgatcaacgggggaaagaagagtgggaacgtgggcttctttcacagtgccggaaagagggccgcgcccggttccaaggacaagcataagctccctggttcaatccctgcttcttccgggctcaacccgttgcttgttggggaggaagatctaaaaagatacaaagcacctgcagctgaggcatatctcactccagctacaggaggggtggagctggagctcagccaaacagtttcagctccaccaaaactgggagtggagttgggtggagctctctcacaaaatatccgccgcctcatcccggtggaggacttctacctccacgtcgctggcggcctattcgacttcctctaccaccacatcaagaagaacggccacgcccgtctgccatcgggaagaagatga

SEQ ID NO: 142 - DNA, 536 bp, Oryza sativa
  Clone ID: PAT_MRT4530_10012C.1
aaaaaaaaagggacaggagaactagattgcaagatgttatcaaaacgttaacaagtactacaggtaaactctcagggagagggcgagaggctcaggctttccaagctatgagcacgggagactactactcatcatacgctagtgatgggttacaggaaaagagaacaaattcgtcaagcagatttcagaaaaaccacgtaacacctttatacaacttttaatgccctagtgctaggttacagcccttacaggaacagagatcaaatcgtcaagtaaatttctgaaaattcatgaactgaaccactagttatcggcagattcaacagattgaacgcctgcggaaatcgcaatctagcaaaatagccataacttggcatatgaacacctttatacagcttctcatgcctcagaaattttaataatctgttcagcaaacatgcgatatacacctacaattctgtccaagttatgatgccacagcctctccaagggatgatgctccatctgcatttcacaattcagcattcctattgctg

SEQ ID NO: 143 - DNA, 990 bp, Oryza sativa
  Clone ID: PAT_MRT4530_100130C.1
ctatggaagcttgaggtagacaacgacaagggtacgtagggaagctgaagcaggccatgacggcgatcgagaagcaagtcggagaagaagacatcggtgccagttgtgccagactcggggccgggccctgggacgacggtgcaaatgcgcggcagcggattcttggtgtccatgaacccgttcgactcgcctcttgttccgaccctcgccggagtcggagcggtcgccggagttgaggaagacaacgccgggaggactaccagactcccgcgtgaacgtgcacacgtcgagcctctgtacaagacgcgcccaaaactcgggctcagtcttcatcttccattcctcatataaaatgagaatggatttgatctcccttccttcttccatctccttgcccctctcccagtacgtcgctgccccgacagagaacgagccaccttcagatctagcggtggctagcagcatcactatccattcggaggctagggttggagatgagttgaggcttgcagcaggacgcgggtgcttggcggcggcgcagcagctgggtgcgagagcaagggcgaatggcagcgtggatgcaacgcgtgcaggcgcggcagcccagcgtagcgtcggcgcaccgtggcatcctggtatactactgctattccattcaagtggcggtgcatctttctcctcctccctaccaggtgatgctttcctcttgcggggctggatttggtgttggttctctattccagctgctcccattggttgaatttggtgcacaagtctgaccctttaatctgttctgccccttccgatgtgaatcattggctatcgacagagaatttgttcgaatttggctcttcgagttcccaactataaaggatgatgtttttcttggccagattagtgtttctctcctctcctagccacgaggggaggaggggagaacagattgtaagcagcaagttgagcagcaaagacaaaccgatgcagtggcgt

SEQ ID NO: 144 - DNA, 126 bp, Oryza sativa
  Clone ID: PAT_MRT4530_100131C.1
atgcagcccaactcaaaagaaaaactcgtcgagaacaatgagaactatgaaggccttaatctgacccggcgacgattgagggtccaccttcctcgagatggccagcgctcagcagatatgcagtag

SEQ ID NO: 145 - DNA, 473 bp, Oryza sativa
  Clone ID: PAT_MRT4530_100132C.1
ttttactctatcacgctcacagggtcatgtgtgcggctattatcccctcgatttggctacttccccgccgtcgttctgcgccgtcgacggtgacgacctgctgttgatgcatgggagatctgtctggaagagcacactgagatggtttacggcattgcagttctacgggagtttgactaagtaactgtacaacaaaagaaagcgggcatgagtgggagtatatgtggcaaactcacctgatagcagtggtccattgacgggaagagcaatagcggtgaagaggtgcatattatcgggaagtgtaagaggatgtgggcatactagttaagccgtttccttccctacaggcaatatgaccaagcttgacttaccttcgagtattatgttctatatagaagaaaggaactgtggcatcacaacccagacattgttaaatgatgcatggacatctgcatatcgacataacaagaaca

SEQ ID NO: 146 - DNA, 497 bp, Oryza sativa
  Clone ID: PAT_MRT4530_100133C.1
aatcagaggaaaaagccgtgtttatatctatcaagtttttcgcatccactcggagaaagaggcacttctattctttttctgagggaaaaaaaggggcaaaagaatccaagacaacacattgtcaggaacatggcttccaaagtccagagctcctatataacacgtaactaagagcaatctaatcctataatcctccccttaaaaagaaaaccgcctagatgaatggaaaacggctttttcgatcaaccattcattaatatatgtacagttcgccgaaaaccttggttgtcaaaccatattgctaaggggtgtccagtaattaacgccacaacttccaaacgggcagtggcactgacaatgccaaatagctagaagggaaattttccctcgctcctccttggggggcttcatgagatttcttctacagatccaccttcgactgtaattagacagctgctctatgcagctctcaggtaacaagtgcaatgaaagtttga

SEQ ID NO: 147 - DNA, 1983 bp, Oryza sativa
  Clone ID: PAT_MRT4530_100134C.1
atggctgacaagactcttcgcgagttcgctgctccctcctctaagaatgtggccactgggccgcagctcaatttgggagacatggactttgatctgaagtccagcctcattacgatggcgcaggctagcccattctgtcgcaagccgaacgaggatgctaatgcacacctgcaacaatttctggagatttgcagcacgtacactgtgaagggcgtcagtcctgatatcgtcaggctgaggctgttcccattttccctcctcgggaaagcgaagaaaagccccaatgcaccgtcaaggccttggactcgcacatcacgtgctaagtctgtggcaacacgggacattctgggaatgactgcccagagacccatgaagaggcgatgtacatgggtaacaacaacaacaacgggtaccacccgcaaggaggtcaggggtggaaccagccccgtccgtatttccaagaaggcaataaccaagctaactactgacgcacttaataaaaagatggttgctaatgacaagatcttagaaaatataaatgtgaaactagatggctttgcttccgcattccaaaaccagctaagtttcaatgaaatgattgaaacccagttggcacaattagctgctctagttcctacaaatgaatctgggaggattccggggcaacccgaaccctccatagaaaatgttaaggcgatcacgacgaggggaggtactagcagcaacagcagggaaacaccgtctgacgcagcggctgaagaagaaattcagccagaaaagaccgtgccgcagcattactgcgacacgaggttgctgccattcccccagaggatgaggaagccgtcagtggacgagcagttcgctcgtttcattgagacacaaaaattcgaccaggcactctgcgaccttggggcaagtgtaagcgtcatgcccaaggacgtcttcgacaaactcaactttacggtgttggcaccaacaccgatgcgccttcagctggctgactcgtcggtccgctacctagccgggatagcagaagacgtgccggtaaagatacgggattgctttatcccggtcgatttcgtggtgctggacatggacaccgttgcatacacaagttgtttcgttgaagctaaccggtgggtagaacttcttgctatcctaacccccgccgagttagtccattcttatttgtgcagaacgaggcgatggttgtcccgtctgttcaagaagggatctggctcttcatcgggaacgaccaccgacatatcgatggaagacaccgacataccgacaagcctcttgaccgacaccaacctcaaccttatcggtgatcaggaattacaagcctaccatatgctgaaggaccggaagttcagccacactcgggcgtacgatccggaacttctgaggaaaacaggtatggatagtgattttcatgccatttggaatgctgtaatttggcagagatttgcagtagtagatgaaccaggttctcatttgcttaatatacaatttctgtgcactttgaaagaatcagaagatggcatatcctttcttttttccgtaaagagtatacgctttcatggaaaggattaagtacacttcttggttttcacgataactgtaaaaccgatcttcagaaaggaattcccgggttcaagaaaaacagattttgggaagacatttctggtgctccaacttgcagacgtcctaggacaaatgacatccataatcctacacttagacttatgcacaaatggattgctatgactttgtttcctagaggtgatctttgacccattcaaggagatgaattgattatcatgtttgccatggttagaaaaattaaaattgctcctgttaaatgtatgattaggcaatggttagctagcatgaagataggttgggcggtcttctcttcttgtctgacttcttccgtcgcgtcttctataacgaacttgcctagcaaaacttctccactct

SEQ ID NO: 148 - DNA, 210 bp, Oryza sativa
  Clone ID: PAT_MRT4530_100135C.1
atgcggcccactgtggggagccctcaccgccatgggaggaggtggtggctgctgctcctgctgcgattgcgccgcaccatgtcctcctgctccaccttggatgtgcaccctaccgacccccgcaaaccggtgctgctattgccaacttcgtcccctgcattgcatgctgccgtcgatgctccctgcatcctcttaccgcgcttcacttga

SEQ ID NO: 149 - DNA, 924 bp, Oryza sativa
  Clone ID: PAT_MRT4530_100136C.1
atggctgacaagactcttcgcgagttcgctgctccctcctctaagaatgtggccactgggccgcagctcaatttgggagacatggactttgatctgaagtccagcctcattacgatggcgcaggctagcccattctgtcgcaagccgaacgaggatgctaatgcacacctgcaacaatttctggagatttgcagcacgtacactgtgaagggcgtcagtcctgatatcgtcaggctgaggctgttcccattttccctcctcgggaaagcgaagaaaagccccaatgcaccgtcaaggccttggactcgcacatcacgtgctaagtctgtggcaacacgggacattctgggaatgactgcccagagacccatgaagaggcgatgtacatgggtaacaacaacaacaacgggtaccacccgcaaggaggtcaggggtggaaccagccccgtccgtatttccaagaaggcaataaccaagctaactactgacgcacttaataaaaagatggttgctaatgacaagatcttagaaaatataaatgtgaaactagatggctttgcttccgcattccaaaaccagctaagtttcaatgaaatgattgaaacccagttggcacaattagctgctctagttcctacaaatgaatctgggaggattccggggcaacccgaaccctccatagaaaatgttaaggcgatcacgacgaggggaggtaagtccacttgcgatccgccataccctaacaatgcaggtactagcagcaacagcagggaaacaccgtctgacgcagcggctgaagaagaaattcagccagaaaagaccgtgccgcagcattactgcgacacgaggttgctgccattcccccagaggatgaggaagccgtcagtggacgagcagttcgctcgtttcattgaggtgatctag

SEQ ID NO: 150 - DNA, 164 bp, Oryza sativa
  Clone ID: PAT_MRT4530_100137C.1
agaagacgcccgctccatcacctccggagacggaacgaggcgatggttgtcccgtctgttcaagaagggatctggctcttcatcgggaacgaccaccgacatatcgatggaagacaccgacataccgacaagcctcttgaccgacaccaacctcaaccttatcg

SEQ ID NO: 151 - DNA, 379 bp, Oryza sativa
  Clone ID: PAT_MRT4530_100138C.1
aacaaacacatttaacattttttgattttgatcgtttctacacattacattgaactggaaaagataagggaggcccatatttttgcagcaaccagggttacatgaaagccatagagataaactggacggctgtgtaaatctaacaagctctatattcaagggtaagccaaaagtccctgtaccctaggaaaagcgccacaaaaaaaaacatgggtacactcaatagtgtctatggacttgtagtcgggcttttgatccgacgagctcgaggacctccgggatcggattccccagttcatggacatatgcttgatgaaacggcccgacggggggtcggaccctgtatgcgcgcgccggtactctgaggtcgaccctcttg

SEQ ID NO: 152 - DNA, 388 bp, Oryza sativa
  Clone ID: PAT_MRT4530_100139C.1
cccacgcgtccgcccacgcgtccggttctttttaatatgctaaatgagcacgcgacaagatcccttcctgatctgccaccgctcgtgcgctcgctagctcgcggataatgtatcgaacaactgaggagacgcggcagaaatcccaccacctcaccagccaacccgcgcggcgcgccgcgccgcggcgtggttcgattacccaccgatcgatctctcacgccgcaccggcgcggtctcgccgccgccgccgccgcggcagctggaatcgagaggggaagggcgacgggatcgcggtggggaaagccggatgaggaggagggaggagcttacagggtgttggcgtgctggatgtcagcttcgagcaccttgagcgagtccttgtacgcct

SEQ ID NO: 153 - DNA, 310 bp, Oryza sativa
  Clone ID: PAT_MRT4530_10013C.1
aaaaattacattctgaaaataaatccgccatgagattactgcgccaagataatgaagcccaacaaattggtcacaaactatgaaacagtacaagaaaggtcaaagcatctccaccagtaaaattttccacaaaggaaaaaacttcaaactattgatctaccaaaactaggctgaccaaattagggaacccttcacaataaccggtgaggcgttcgcaccatggacgggggctttagacagctgacatttggctggaccttggggtacacaaggggggagctgcaatttccacagtgggaatgcctggagc

SEQ ID NO: 154 - DNA, 574 bp, Oryza sativa
  unsure (1)..(574): unsure at all n locations
  Clone ID: PAT_MRT4530_100140C.1
cgcgtaacgcacacgtagctagcacgtagggtacacgctacgtctagctacttactctctgcatagnngctggctgtaatactagtangcaagctgcaggtgtgctacgatccccatggctgatcagcacagaggagtgatcggcggcgcgcggctacggtgaccgtggtggccagagacgcagcagagacgacagcagcctctatcatgatgacgggctctgaagacggtgaccagcggcgacggccgggggctcgatgctggtgctgtccgggctgatccatgagccagagcaccgtgcatcgccgcatcacagagtaggcccaacacccggggtggcatgggatcaatgcnttcaagacccccggtagcatgggctgcccgagcggaccaatcgcagcaaggcagctcatggcggcccgggatacagtcaacctcgggcgggctcggcgtggccagcgcatcatgccgtgtncgtcggtggaattgtacaaacgtaaccgtaaacccgagagaaacgcaaccnaagccaaggggccgcctagaccccaagcctgggaccccacggcccaag

SEQ ID NO: 155 - DNA, 267 bp, Oryza sativa
  Clone ID: PAT_MRT4530_100141C.1
atgttatttatttttttaatatcgcggtataatgggactataaaacacttattcctttctattaacgcttcataaacctataacagggccgattctcagttatacatacttgtggcattatattctttttacgctacacctatactatttcattagtacattacttttaggccttgtaattcgtctcatttgataagcctaggaaggtctgtagttgatatttaggagtgatgggactgagctatttttccctatttatttttaagg

SEQ ID NO: 156 - DNA, 355 bp, Oryza sativa
  Clone ID: PAT_MRT4530_100142C.1
agccaaaaaaacaattttttcgccatatactgcattaaacaaaggaatacgtcccaaaacattgcttattttaggtccaagggtagactagccctactttagttccacaacaaaaggtgctccacaaagaaaaacaaaaacagaatttcatagagcgaatccatttaggagcctaggggtttccccggcacatggccgaaagccctaaggaacccgtcatacacatgatgggatggggttttcccagaaaaagagcatcttttcccttcaatccccgcaacaactaaacataatctccccttttcaaacacccttgggggctctgaatcacccccccccacccccccgcatttta

SEQ ID NO: 157 - DNA, 426 bp, Oryza sativa
  Clone ID: PAT_MRT4530_100143C.1
tgtttgccacttgggatcccaatgcccacgttggtaaactaatgttgcccacctattttgtgaacactctcggggcccgcctcccacccaccgcagtgcacccgtgcggtttgcctgggatttctcatccatgtcgtgcgcggcgttggggctgggaaccgtaggttggtattgtctggtgtggcatcggtgccatggtgacaggtagggtttggtcatcggaccttgaggcctgagctcctgtcagtgatgaatggctattttggactttcaatctcgattttgtgaagtttcgctgttaccctggcttgagctctcctcgtcattcagctactctctgtaacgatcttatatatatatatatatatatatagacacacaaccaagctaaaataaaaaaaataaaacatgaaaaaaaaaaaaaaa

SEQ ID NO: 158 - DNA, 129 bp, Oryza sativa
  Clone ID: PAT_MRT4530_100144C.1
atggtacatgacccgtttacgcctagcatgatacaagtagaaaagcaggcgtcagatgggtgcaatagtccatatgttcggataagcgcaaatgcaaagctaaaccagcccaaaaaacactacatgtaa

SEQ ID NO: 159 - DNA, 387 bp, Oryza sativa
  Clone ID: PAT_MRT4530_100145C.1
atgccgccctcctacaccccgaccgcccgcctccgcctcctcgtcctcttcctcgcgtccctctcgctcctcttcgcccaaaccctagcctcgtcctccgcggaggccgaggtctccgacccctgcgccgcccccgtgtcggacgggggcagcgaggcccagctttgccccgtgcggtgcttccggccggacccggtctgcggcgccgacggggtcacgtactggtgcgggtgccccgaggccgcctgcgccggcgcgcgcgtggcgcggcgcgggtactgcgaggtcggggccggctccgcgcccgtctccgggcaggcgctgctgctcgtccacatcgtctggctcttcgtgctcggcgccgccgtcctccttggcttcctctga

SEQ ID NO: 160 - DNA, 364 bp, Oryza sativa
  Clone ID: PAT_MRT4530_100146C.1
gcagaagtaggagctgagctagaagcagcggagcgaggtgcacatggccgccgccaccatggccctatcgtcctcgacgctgacacgcacggccagctcagaatgtgtgaactcgaggggcgcatcatcatgcgcaagtcaggacagcgaagcccaagcccgccatgtcagtgagcccaggaaacgaagccgaccgcgtgctctacctcagcccgctctcaggcgagccgacgatctacctgaccgacgagttccccggagactactgcaggcacaccgctgctctgtcaagcgacccagagacgtacgctaagaacctaaagctgaaggtgatccactacaagtgggcgacgctctgaccgct

SEQ ID NO: 161 - DNA, 138 bp, Oryza sativa
  Clone ID: PAT_MRT4530_100147C.1
atggagatgtacagcctgagtatccttcaacattcaattcctcaaggcaaggatgaggagaaatgcccaggggtcttccggctagctccacaaggtggtgggctagacgacctgggttcaaagcctcacccctcctaa

SEQ ID NO: 162 - DNA, 387 bp, Oryza sativa
  Clone ID: PAT_MRT4530_100148C.1
atggcgcggaacgtgagctctggggcgacggcggcggcagcggaacgcgagcttgggggtgactacggcggcgaccggacgcgagctcgggcatggcagcaatggcggaacggaatgcgagctcgacgacagtggcagacgagctcagggacggcggcgatggggcgcgagcatggcaacaacgctgaacgagcttggggatgggaatggtggcgatggaggttggggacggcggtggcgacggtgctgaacgagcttggggatggggacggcggcgggggcgggatgcgaggtgacgacgaccgtgcctgggcgacgacgccacctagctcggagacagtcgcgcggatggacggcgaggcaggcggacggagtggctccaaatga

SEQ ID NO: 163 - DNA, 1242 bp, Oryza sativa
  Clone ID: PAT_MRT4530_100149C.1
agtaaagtaaaatgcatatcttgctcaggtgcaccaaaaccagctgaaattgaacggaaacaaacatattactacgtttcagttcttccatatacccatatacctcctcctttcccggcctaccaggggtagaccaccagatctcctcacgttatacccaaaccaaccgttttttcttctgttcttccctctggtttaatgctaataatagtattattattattacggcactaatacatgacgcatcaacagcatcaagaagaaccaagaacatcagcaacaacaatgccatgcaccatgactaaagctagcgtctttgccattgttcatgatgagtgggaagcaaatctttgcttgggttgggttacgctgtctagcggcggtgcgggcagaaggtgacgatgtaggacgcaccggcggagcaggtgaggatggaggtcgggtcgtcgtaggcgtaggagtaggccttggggcacgccgtcttgaacagccgggagtacgccgtcggcttgcactgctgcgggctcccgaactggccggtgcagcagtactgcggcgcgccgtaggcggcgcaggcgctgcggcatccgacgacgcggttgtcgccgccgccgccgcggacggcgaggccggcggggcagacgcggttgaggtcgctgatgcaccccgcggggacgcagttggcgccggagccgtgggacggggtcatggcgatggggatgttgtagccgtcgacgaggctcacgtcgtagaagtcctgcgcggccggggtggacgcgagggtgatctccgccagcgtggccggcggcgcgccgccggcgccgttgcagtagagcgccccgccgcagtcgcccgtggcgcaggggaggcggctggaggtggcgcggttgggcgccagctggaacccgccgcgcgcgagcagctccttgccggcgctcggcggggtgcccggccacaccgtctccgcgcaccggttgtacagcgccagcgccgccgccgacccgtcgcccgcgagcagcagcgccgcctccgcccccccggcgtccagcgccaccgtcgccaccgccccctcccccgcgcgcgccgccgcgacgacgagccccgccgcgacccgcaccgccatcgccattgctgcctgcgaaccccgcggcgccgctcacctcccgggggggccgccctccgcaaagctcgcgctgcggtacactacactggagtgagtgtgacagtgtgttcgcctcgtgc

SEQ ID NO: 164 - DNA, 353 bp, Oryza sativa
  Clone ID: PAT_MRT4530_10014C.1
tcggttagattagattgatctaacaggactcatggtcaagcgcacctcgcccctttccgtgcgtgagacgcaccgtacacacacctcctctcctctcttttgctgcccctgccctcccctctccataattctcttttctatttgtaagaaatattttttatcaagaaatcaacagtttgatgagttcaaaataattactatagtttttaatatattttgaaagcaaacaatcagatcaagaaaattctcttatgcacctacccactgctgtgtcaatataagcgatgcatgcaacttccatctcttcgattgatctctcacgccttaccgtgcttgttactatgattccatgt

SEQ ID NO: 165 - DNA, 204 bp, Oryza sativa
  Clone ID: PAT_MRT4530_100150C.1
gattacaaaaccaggtaccttgattggcatggtatggcataccgggcctatcaataattataaggatcatttcgcattgaagcatgtagtctattgaccatggaatcgggcaaaatgaaacaacgctcctaacatgcctattactttaatatattcactcttcacttttctgcacaggacgggacatagagtagaggggtagca

SEQ ID NO: 166 - DNA, 3126 bp, Oryza sativa
  Clone ID: PAT_MRT4530_100151C.1
atggctgggagttttgatgggaggatgccaacaagaggagttgagcaggccattgttgctctgaagaagggagcacatctcctgaaatttggaaagagagggaagcccaaattctgcccattcaggctatcttcagatgagaaaacattagtctggtactcgaaggacagggaaaaacacctgagcttaaattccgtttccactgttgttcttgggcagaagactatctgcagagacagagatcaagctgaatgctggtttcttggtttgactgccttaacatcttctccttatagtccacttccattggctggctcaaagagcggtagacagataaacagttgcgcaatcagtccccgcagctatcttcagcgaaagtgcaggttatcagctgcccttgacacaccaaggcacacccaggtatacccatcatacgggagtcccaagatacagaaaaaaatctttggtggtaatctggatagctcagaagcattattttatccaaggcatccaacctcttgtgacattgattcttacatcgagaagcttaaccccaagatagcaactccagtaaaacatggtctgaaggacatcatggttgctaacagaagggcacagaatattacacatacacctaaactgaagacttttgaagggccccgtgtggcatgtaggttggattcacttaaggatgtttttctctggggtagtgttcttggcagcatgttaggcagtgaagacattccaaaatcccttccgagattggtaggctcagctaaaatgcttgatgtacaaagcattgcttgtggggagaatcatgcagccataatcactaagcaaggggaggtctatacctggggcagttatagcagtgggagattggaccaaaaagtaaatgtcaatgcctcctgtcccaaaatggtcgagtctcttgcctctgtacatgtcaaggcggttgcatttggatcaaagcacacgtgtgcaatcacggtttcaggcgaactttttgaatggggtgaaggagctcatagcttgggattgatgaatgactggtatggaaggaaccaatggtttccacataaatttttgggtcctatggacaatatttctgtgtcaaaaattgcttgtggtgagtggcacacagctattataacatcttctggccagttattcacatacggtgacggaacatttggtgttcttgggcatggagatactcaaggagttgctcggccaaaagaagtagagtccttaaaaggatcaagagtgaaatcggtagcatgtggtccatggcacacggctgccatcgtggaagtaatgagcagtttcaagggtaatgctccaagtggtaagctcttcacctggggtgatgcggatagaggaaagttgggtcatgctgacagaaaaatgaagcttctaccaacatgtgttgattcacttactgcttatgatcttattcaggtatcctgtgggacagcagtaactgtggtacttactgttactggaatggtatttactattggaagttctaggcatgggcaacttgggaaccccaaagcagatggtgaatctatttgcagtgttgaagggccacttaaaactgagtttgtcagagagatatcatcggggtcttcgcatgtagcggtgttgactatgagtgggaaggttttcacatggggtaaaggtgcggaagggcaacttggtttaggcgattacagtaataggagctctccaactttagtagaggcattagaaggcagggatgttgaaagtgtagtttgtgggttcaattttactgctgcgatctgtttgcacaagacgatgtcaatgaaggaccaatctgtatgcagcagttgccagatggtttttggttttactagaaaggagcacaactgttacaactgtggttccatgttctgcagttcctgcactagtaacaagatcacgatggcagcacttgcaccagacacaaacagaaggtaccgtgtttgcgatgcctgtttctatcagttgcagaaagttgtggattctagcaaagataagtctaggctaaagatcagcaaaggagaaatgtttaaattggaattaaaggcatacacacctaaattgtcacgcctattcaaggaagcaaacttttttgcagaaaagatggcttcagtacaaggtactaatcagagaaatgaggaacctgccactgcagtgcagacaaaaactgaaagatgggggcaagttgagtgccctgctctattcatatctgcacaagacagttttcaaactcagccggtatcaaatagtgaggggtgtgctatctctttttcacaaagaatgcatgattctgcggtgcttaagtctggcgtctctttacggtttactgacgctcaaagagaagaaatagaaatgatgcaaacagaacttcaaggacaagtgaaacaacttcattcacaggtagctgttctcacagagcagtgtcagcaaaaaagtgttatggttcagctatacaaacaaaaactggatgatacatggttagttgttagggatgaggccgcaaggtgcaaagctgccaaagatatcataaaggttctaactgatcagtgcaatgccttgtcagagaaactttcaattggtcagctgtcagaaaactccaagataacacctaatagcatcccaatgcaaccgacgaaaatagaattgcaagggaacaccggccggaatctggtcacacgcaaactcggccagctgaacaatacccaaaatcatggcagcagcatccaaacagaaaaggaatgtgtacctttgtcaaatgctgttgtgccagaagatgtaccgttcagtcaacagaatggggccaggaaatttagcagcgatgggtacaccacggaagcaccattggctgcccctccgactgatagtgtgactgaacaaattgagcatggtgtatatgtcacattttctacatcgtcctgtggaaagaaagacataaagcgcataagattcagccggaagcattttggtgagaaggaagctcagcattggtgggaacataacaagaccagggtatatgacaactacaaggttgaacaaatggcaacaccgtctgtaactttgagctgctcttcaacacggtga

SEQ ID NO: 167 - DNA, 834 bp, Oryza sativa
  Clone ID: PAT_MRT4530_100152C.1
ctacaagctgtaacaaatatagctgacgacgtggccgtcgatgtggaagcccctgccctccggctgcaccaccacgccgggcgccggcgccggcccggcgtacggcggcccggccttgccggcgcggtagtccgtcccctccgccttgggcaccgggtacgccaccctgtccctgtacccgacgatggccatccggtcgaggtccaccaccagcgtcacgccctccagcggccgcgcgtagaagttggccgtcgcgccggcgacgaagcagagcaccttcgccaccctgctgcggcggggctcgccgtcgccgccgaaccaaccgacggggaacaccgcgcagagcacgtcgtccatgtccaccccgcgccgccgcaccgactccacgaacggcgggtgcttcggcggcagcgccaccgccgcgaactgctcctccagcgtcagcgtcgggaagccggcgccgcggtggacggcgtgcgagaggacggacggggaggaggcgttggcgacgtcgacgcggagctcgtgggactcgccgccggcgcgggcgatgacgaacgcgcggcgcgggagggcgtggcgcgaggcgccgccgccaccgccgtaggcgtaggagagcacatcgggtttgtcgggctcgtcgaggccgacgtagtggaaggtgagcgggcgggccgggacgagcggggaggcgagcaccgcggcgcggacggcggtaagctcggcggcggagagggggtcgagcgggtgggggcggggtgcgcccgcggcggcagcggcgacggcgagcgcggcgaggaggagagggagaggaagcatcgcgcggagtggcat

SEQ ID NO: 168 - DNA, 490 bp, Oryza sativa
  Clone ID: PAT_MRT4530_100153C.1
gtttgtttgcgccgacaccgccttcttgcggagcctgcggccagcgtcgccgctttcttgtcgagtttctagagagaccgaagacatcgacggcatttgtaaatttttggcgtttacaatttgtcctcaactggttgtcgcgatccctatctatattctatccacagcagagcaagaagctgatccggactgcctgccgtacgtcgcccggccggctgtcgcggccttgtccagctgtgagagacgcacaccgcgcacccaccggcgcccccaatggaccccgcggatccggtcgctgtcagcctcctccgcaatccaaatgtccaattgacgcaccacctcgatccgtaccgtcgattgcaccagtaatccgcaattccgcatcatgccgtacaaggggagctgtacgtcggatgcgagaggccatcggcgggcattaaacaatgggcatttgtttgggttggagggggttttgagagagggaatgggg

SEQ ID NO: 169 - DNA, 1392 bp, Oryza sativa
  Clone ID: PAT_MRT4530_100154C.1
caagtaagcaaatcagcaaactgattgcagcgagagtttctgaagtgctcttgttattagccatgaagttggagcatgacttccatatggcaataggggaagcagaggataactatgcaaacaactctaggcttcagcgaaaggctttgctcaagaccaagccggtgcttgacaaggctgtgagacaggtgtgcatggctctccatcctcgagctatgatagttgctgacctaggcttttctgtcgatgcaaacactctcctcttcgtctccgatgtgatcaacacggtagctgatgctcagcaccatgatgagctcaggtgccatcccatggaactccagttcttcctgaatgatctgtctggcaatgatttcaatcaggtgttcaagtcagttaaacagtttactaagtcgatcgcagcatctcatcccaagggagtagcactgcctccattctatatctctgggctaccaggctcctactacaccaggcttttcccttgccaaagtgttcaccttttccattcctcgtactgcctccattggcgttctcagatgatcaaggacatggatcaaaagatgtcagacataaatggagggaacatttacattgccaagagcatgccaccatcggtggtgaaaatgttccaagatcagtttcagaaggacatgtcccttttcctcaagctgcgacatcaggaactagtgcctggtgggcagatgctgctcacattccttggaaggaagaaagagggcgtcttgggatggagatctgagccatctatgtgcattgcttgcagaagctttacaagcccttgttactgagggccttgtggagagggaaaagctggagtcattcaacctaccactgtatgggccatccattgatgaagtaaaagcagtgatcgcattgaacaagctctttggcattgaccatatccagctctttgagtcaaactgggatccctatgatgacatggaaaatgatggcatgtgcagcagccctcagcatggggtgaatgttgccaagagcatcagagcagtgttcgagcccttgctggcaagccatttcggagaatgtatactcgacgagctctttcagaggtatgcacggaatgtagagaggcaccttgcggaggacaatacaaagtactcggtcatagtcttgttgttgaaccgaaaagtatagatcagacacaggacacttggggaatctacatagaaacactacaatatatatttttaattacgcctgtatgctgctagtttacaataagatttccatcaactggttcttaagcttttaccgcagaaaattcgtctacggctggtgaatttcaatttgtgtgtttatttaatccactatagtatttatgcaaaaaaaaaaaaaaaa

SEQ ID NO: 170 - DNA, 230 bp, Oryza sativa
  Clone ID: PAT_MRT4530_100155C.1
gcttggaccctttttggggccccccttttttttttttgggggattgagaagtccgggtgtttacagactgtgggggttttccaagtccagcacactcacctggaaaaatatattctgaagaaaaggcacagcttttctctattcatgaagctgcagactgaaccatcatcagctatctgaaaccaacccagcatttccttgtggtcacccccagagggagggatgttttg

SEQ ID NO: 171 - DNA, 184 bp, Oryza sativa
  Clone ID: PAT_MRT4530_100156C.1
gcctctggccaagcggtacgacgttcacccagggaaacgacgaccggtggaggcggatccgatggcgcagggccgccgacccagggaagacagcggggcgagggcactcgccaccgccggtttagggaagaaggccggcaccattgaccccttctggccagctgacgaggccgagtggcggtag

SEQ ID NO: 172 - DNA, 453 bp, Oryza sativa
  Clone ID: PAT_MRT4530_100157C.1
ttttggttttttttttttttttttttttttttttttttttttttagaattatttcccctttattttattcgacaccataccaaacgggtcaaccaaaaggaattacaagttcacaacatgagacattgaatggattgggtaaagaggacttattgggcgcgcacataatttggggggaaaccagcaaacttaacgggtttgaacgggaccccttcggacgatatcgcaggggagcctttggaacgccgtggacgaagacccgcccttcttcacgggctttcgggaaacggcccttgttttcgccggctttgcccttgcctttcttcccttgtccgacgcgtggttcattagggaacttaccgggcgcttcagcttcggcgccttcacgaaggtgtccccccttctgtccatgccgagcgggacggggacgcccaggtgggcgaccagggggaa

SEQ ID NO: 173 - DNA, 418 bp, Oryza sativa
  Clone ID: PAT_MRT4530_100158C.1
ctatcgcgctgccgcgtcggtctgaagattctccgccgtcgctgccgccttcacgcccatgccgaatctaattcgtgacccgggatccccgccgccacgaccacatcgctctgccggcgccgccctgatgtcgcccaccttgctcctcgcagtgagccgcgccgaccacctcctcccccgctcgctacttgatgccgccatcggcttgctcctgcccgccgccatccccattgacgcatcagtcgggaccaaatgcgtgagacaggagacaaggaaaggcagcgtcctgatggttcggagaactcaatgcatgcgcaaggttgtggcggttcgccgggatccccccgccgcggccacatcgctctgccggcaccaccctgatgtcgcccaccctgctagtcgcggtgagccgcgccgc

SEQ ID NO: 174 - DNA, 198 bp, Oryza sativa
  Clone ID: PAT_MRT4530_100159C.1
atgtcggtgggaattgtgcttgaagggtcaactgtgaggaaaagagagagggggattatacaggtaaagggcatgccacaggcagggtccctgccctcccagttggggagaaggacccccatggcctacattaaaaagtgtcccatgccatgggcggtcagcgatccgaacggccgcccgtgggtggcccccacataa

SEQ ID NO: 175 - DNA, 354 bp, Oryza sativa
  Clone ID: PAT_MRT4530_10015C.1
aaaatatggaggggatgattttggaacattacaagctttggggacattaaccaccacaaacttcccaaaagggaaggttactttttgaatcacaaaagaaggcaacagaaacagccatacatagtttaaggtggttttagcctaagttaacaatttaacattactaaacctaataaaaacttaaggcttactaccaaaactgggggcctcctcatacttacagaaggggttaatatatttttggcccccattcattaagagattcagaacaacatcagactgacagggataacaaggccaagaagaggcccaatttttgccttaaacccaggagtttcattaaagccccaaacg

SEQ ID NO: 176 - DNA, 3692 bp, Oryza sativa
  Clone ID: PAT_MRT4530_100160C.1
atgggggcggaggcggaggaatcgctagatcatcctggatctctgtcggggatgtcgccggcgacccccgacgttgcctggaagccggcggagcggcggcggcggcggtcggaggccgacgcggaggggtcttcttgctgctccctttccgctgctacggcggcgtgggttggcgccggtaatgtggagagtgacgacccgtctgttcgttcggtcgccgccggggagcaatcccgctccgtgtctcggccggaggaggaggaggaggaatgcgcgtcatgtacccaggattccaccgtctctccgccggtgagcgaatgcggcgacaggactgcgcagcaggaacccagcacccaggagtacaccgtctcgccaccgccggtgagtgagtgtggcgacaaagttgtgcagcaggaatccagcaatcaggagtccaccgtctcgccaccaccggtgagcgaatgcggtgataagattgcgcagcagggatccagcactcgggagtccaccgtcttgctgccggtgagtgagtgctgcaacaaggttgcccagcaggaatccagcacccaggagtccaccgtctcgctgccggtgatcgaatgcggcgacaaggtcgcgcagcaggaatccagcacccaggagtcgaccgtgtcactgccgtcgagcgagtgtggagacaaggttgcgcagcaggaatccagcacccaggagtccaccgtgtcgctgccgttgagcgagtgcggagacaaggttgcgcagcaggaatccagcacccaggagtccactgtctcgccgccggtcagtgaatgtggcgacaagattgcacggcaggaaggtgctgccagtgcgatccctacgccggagaaagtggaggctacccctaggagacccaggaagaggtcaacgaaggggttgactcgattcaagattatgaaagatcacaaggcggcccagagaacggcaacacccgttgaagttaagatcaagaggaaagctaaggataatggtaggcggccacttggtgataaatcagtgaggaggaagttgaattttgaaggcgatgcggtggactttgaaggcaatagggagttcagcagagccaagctgatggaggatttgaggtgccttgccaaggttcatggtctgcgcgatgatctgggtgcaggcaagcgaagcaagaaagggaagaaaagaaaaaagatgactggagaacatcaggacaatggcgaatcggcccttgtgccttaccagaaggccccagctgccacatcatcatctgcgctggttccaattcagaattctacgcaacttgctattgtacaccacagaaatcacttgaagaacttgcggacaaaggttttaggccttgatgagaagacattacaagtgtataatgttctgaggaagtgggatgagactgatagtgagagtttcgaaggtgtagacattggcagcgggcctgaatggaatgaaactcggcgtcacttcgaacattacgtggatgtgtttattgctactgtgcatggtttattgggtcccagaagattttctgaatggggaggatcagtaactgattctgttgtgggtactttccttacgcaaaatgtcgctgacaatttatcaagcaatgcttttttgaacctggtggcaaaatttcctccaactaagagacatattaatgctgaagcatgttcaaatttgtctctgttgatagatgacatgagacggaaattgaatttgaatgaacaatctaatggtactgattctggtagttcagattttacaaaacctgtcgattttgagaaagagaatggttacaatgaggaggtaaaaggtaattatggccgagactacagtacaattatagagaattttatatctattattgagaaacatcataaagacatgtctacgtgggacaatgcacgccttgagaacatggtgaaggataagtctggaactccagtatgttcccatagaaccttgagaaagtttatggacacatttgaggagaaagacacttctcattgggataagttacgggaggaagcatatagtaagggatacaaaataaagggaaccggaataagtgattctgctgattgggaagctgtgctacatgcaccagcagttgagattgcaaattccattgcagtcaggggacaacattatgttatagcattgcggatacaggcttttctcaagcgtgtaaagaaagatcatggaaattttgacctggattggcttagatatgtaccacgtgaaagtgcaaaaaattacctcatcagtattctggggcttggagataaaagtgttgactgcatccgtcttttgtcattaaagcataaaggtttcccggttgatgtcaatgtagctcgcatagtcacaaggctaggatgggtcaaacttcaacccttacccttttctgcagagttccatttagttggcttgtatccaatcatgcgtgatgtgcagaaatatttatggcctcggttgtgtaccatttctaaggaaaaattgcacataaatgtttacattgtcaatattgattgtgtattgtttccattacataggcaatctgcacaaaaattatcactccctcctgcagaggggcatgggcatgaatatggtgaagagcaagcaagcactgctactcctggaagactcttgttgtcaaatgatagccacatagcaggttttcaacaagtatgtcaaccgcaaatcaaaataaacatgcctgctggaagagaatccatctataagtgtgagcccattattgagatacctccaagtccagaacatgaatatgaagaatcaccttatgagcaagaattatatgaagatgatctttgtgatattgaagataccataccagaattacagtacgtcctcccagatgatcatgcaatcttggaagagtttgaagatagagttccagaagatccatgtccttatcttctagttgttatttcttgttctgatgaacacacagtgaaaggcacaattctgataccctgtcggacagcaaccagaggaaactttccattgaatggtacctactttcaggatcatgaggtttttgcagatcattcatctagccgttccccgattaccatccctagagaatgcatctggaacctagatagatgcattgtatattttggctcgtcgatacaatcgatcatgaaaggtcaaacaaggcaagacattgaggactgctacaagaaaggatatatttgtgttagaggatttgatcggaatacaagatacccaaagccaatatgtgcaaaattacacgccaccaatgaaaggaacggaacaggtgaaaatagccggaagaagaaaaagacatcacaagaggggaagaagattgatgacaaatcttcctttggcaaattagaaattaactgatatatatatatcaccattaacaaagttgtgtacaaattgtagttggaaggatgctgatagcctctgctagctctagtgtatcatgtagatcagtagatttgcttagggcggctgcatgagtaaatatttggttgagatctcttccacaatgcgccttgtatattagtcaaattccttttttattatgtgtaaacaaaacatcccatcttttatgaggcaaaatcgcactatttagtcttaaaaaaaaaaaaaaaaaaaaaaaaaggaagggcgccaactaa

SEQ ID NO: 177 - DNA, 600 bp, Oryza sativa
  Clone ID: PAT_MRT4530_100161C.1
atggcgagagcagaagaagacgacaatggcagcggcggcagcaccagctgcgatggtgcgaaaggagcagttacctcggctggcgacgctgtgacgactcaactgtggtgccacatcgtcatctcgctccgagccatccagccgaccaccgtcgtgtcattgtctcgcactcactactcccttgccaccgagccgccatcgcgccctcgctcttccctttccaacatcgtgttgtctcgccgtcgagctaccctatcgccctcgctgtggagctgcgtcgatcttgcgccctcgctcctcccttgtcgtcattgccttaaacgaagaagacccctgggccaccttgcgaaatgccgtgtcctcctaccgtctctcctccctcgccgagccaccctcgccccatctcctctggccgcggctctctgtctgggtatggtgaacctcggcgtccctggcgagctctgcgggcgactgctagagctagggaagcagttgttgggtcgcaaccccttcgagctgaagaaggcgcgaccgagctgcttctggggcactgcgccgttgaaggcgtggctgagccaggcctcgacggccaccagatag

SEQ ID NO: 178 - DNA, 186 bp, Oryza sativa
  Clone ID: PAT_MRT4530_100162C.1
atgcccaaagctgaaatgacgaaggacctccaggagatatggccaattcacagtgagcgtgtcgtagggaaaacggcgcgaaccgcttcctacgaaaccgcgatctcgctcagacagcccgagagtacaaccgacgacgcggacgaggaaacaccaacagcagcagcagcggaaccaacggtctaa

SEQ ID NO: 179 - DNA, 212 bp, Oryza sativa
  Clone ID: PAT_MRT4530_100163C.1
ctagctcgagtcttcagctcctcggtgcttgataaaatttccgtagaatatatatacctgtacgtaattcgatcgtcctcccggttattctctctcgtctctctcgtgtaattttgtttcccaattgtaactttttattttggacccactgtactatttctgtatgtgcccctgaatatatttccatcctagaaaaaaaaaaaaaaaaaaaa

SEQ ID NO: 180 - DNA, 1647 bp, Oryza sativa
  Clone ID: PAT_MRT4530_100164C.1
tttttttttttaacgaatacgatcatgatcatgcaccaatcacgcatgtccggtaagctttcattactcattagtgtttccaacagagaaacacgtgagatggttctgtcggaaatgcattcgaggcggaaggaacagatcgccgaaccaaccgtccttcgttggttgcgtaagctctcggtaatcgagatgcgatgacgaattatctaattttttttcgcctcaatccacgtcgcaaattgatttaattttcttgttctgaccatccaccaatcacacgagacatgatggtctcactaagtaaattctttgcgacgatgatcgcaggagtaaattaggagggaagaagtgaaaaaaaatagaggaggaagagaataagccaataataatggcggatcacggcaccggccggcggagatccacgacgacgacgctcacgttgtcggcgctccgccgggcgatcgcgagcttcgcgagaagcaatgccgcgtcggcgcacgccttgtcggactcggccttgtcgacccccttcaccacggcgtcgccgccgccgccgcctgacgcgccggcgggcggcgggagcacggctttggggcgggagcatcccggcggcgacggcgggccgttgctccggaagcacgcccggacgacctcgcacgccatctcgttggtcaccacgtcccacagcccgtcgctcgccaggatcaggcactcatcgtcgtcggcgcgctccgtcaccgtcacctccggctccgacgtcacgtacggcttcaggtagccgtccccgatggctcgagacatggcgaggacgccgagcaccctggcgccgtcccagtagatgacgcggccgcccgccgccttgatgcgctccagctcgtccggccggtccggcttgtggtcgacggagagggggacggggacgccggcgcggcagaggacggcacgggagtcgccggagttggcgacgacgacgcggttaggaccgacgaccgcgacaacggcggtcgagcccacgtggtcgcaccgtgctggcgtctgcagctcgcagcggcaggccggctcaccgccggtgcggctcttggcccagatcgtcgcctcatcgtccatccgcgcgaaccctttctccatgacgtccttccacgccggtgccgccgccgccgcctccttgccggagaccgccttcttgtacgcgtcgacgacgagctcatgcatccggtcctggcacatcctcgcgacatgggagcaaccatggccgtcaaagacgccgaagaagtggtgcttgccggaagaggtggagccccgcaggaagtccggcctgatggacacggcgtcctccatctcgcgccgccggccgaacacggaggtgacgccgtacctcggccaccacctggacccgaactccgcgccggccgacggacggcacgggcctgcggtcgccgcgcctgcgcccgcacgcgcgcccgccaccctctgccgcttgccgcagcgcgccacaccggcgtcagcatcctcctgcggcggctcgagagagccggccgcaaagcggaagccctccaccctacggcgccgcctggcgatcgccgtggcgccggccgccgcagccggcatcgacttggccgcctcctcgcggcagatctcggcggccat

SEQ ID NO: 181 - DNA, 831 bp, Oryza sativa
  Clone ID: PAT_MRT4530_100165C.1
atggccgccggcggcgaggcgatcccggaggagaggtggaaggagctggttcgctccttgggaaccgagcagctcgtcgacgccatctacgtcgccatcgacgatctgtccgcgcgcgagcgcgacacgatctcgccggagctttggcggcgcctcggcgaccgccgcgccgcctacaagaatcctttcgcacgcgatggattgggctccggctgctccgccggtgaggacgaggttgagaagatcaagaccaagctcgtagccgtggtcggggaagacggcggcaacccgaggtccgactcgtcgtcgtcggaggccgtggtcgagttgctccgagcgctgcaggccgtgccgatgacgttcgagacgctggaggcgagcaagatcggcaaggcgatcagcggcctgaggaagcactcgtcggagcaggtgcgcgacctcgccgccgcgctctacaagagctggaaggcgctggtcgacgaacacctgaccaggaaaccgccggcgccgccgaccaagactgcctccgctctcggcgcggctgatcacgccaacaaggcaaacacggcggcgccgaggaaggcagcgtgcaacaagcgcaaggaggcgccggcgctcgcgccggagatggacgaggcgaagctggaggcggcgaggaagaagctcagggagcgttacagagacgaagagacggccaagaagcagaggaagatacaggtgatcgacgcgccggggaaggcgagggagcgacccgccgtcgtcgagcggcgcggcgtggtccggcgcacggtggcgagtcacgctccggtggctgcttttgtccgggcgtag

SEQ ID NO: 182 - DNA, 225 bp, Oryza sativa
  Clone ID: PAT_MRT4530_100166C.1
atggcggtgctcaccggcgaacggcgcggagtgggttccggcggcgggatccaacggaagaggggtggacggggtggcccgcacgatggcgaacgcgacggcgtcgtcggcttggcggctagcggcgacgaaggggagggcgacggctctagggcgttagagggctcgggagggctcggcgagatggggaaaaagagagagggggtggcggtggtgcttaaatag

SEQ ID NO: 183 - DNA, 957 bp, Oryza sativa
  Clone ID: PAT_MRT4530_100167C.1
atggctaagcgcgggtcccacacgtcagcggcacaagggggagggcgcacggtggaccaagtccacccgtggccttgggcgcgcgtccaccacgtggacggcccagatcggcccaagcggctgaggggagcggtggccgggcacgggcacagccggggctggcccgaccgaccacagaggttggcggtgcgcagacggccggacagccggcggcgcaacgcgatgctggcacgggaggcggccgacgaaggggagaaggaggagggaggcggctcaccgagacgtgcgggcgacggagggagtggccgacggagggagacggcggcgctcctctgggtcgacgacgcgaagggactcccggcagtggatggcgagagcgaggaggcagacgaggtgcagcacacgacgacgaagccgacaaaggtgacggcaagcagcgaccgcggctatggtggtgatgattgtcggccggaggcggtgaatggatatggtggctcggtggaggtggcagcccggtggtggattgggggagtggagcggtggacggcgtgcggcgtggagcgggttggaggtggcggcggagtttcggcggtggtttggggaggagaggtggaggccgaggtgcagcgcgcgacggcgaagctattggtggcggctgcgcagtgcggcgacggcgggagcggcggtggcgcgcggctggctcggggagggagaaccgtagccgagcggggcggcaacggccggggtgcgagcgggaaggcgccggatttgacgggacgtgggtggcaaccgtcggccatggctgcttcggcctggaaggccggagggcggctgctgctggtgccgctccagtgcgggtgcctctcccactcgcccaatgcatacgcgcctatgcagtaccagatcaacactgacgacacattctggatcgtctggggaaattggaaatttgattga

SEQ ID NO: 184 - DNA, 339 bp, Oryza sativa
  Clone ID: PAT_MRT4530_100168C.1
atccaagagctctcttcctttcttaggtgcttggttcaagaaggttgtctggttggttcacacggcaaggcagatgagatgaggaggaggaggagaggaattgatccattatgatgatggattcaagtgcaagtccaaggcgctgcgttcggatctgagcttccatcggtacctcttggctgccgccatggccaacaaatcgaaatcgggatccgtgtacccttcttttttcttctcaccgttagtctcccttggtcttgccggcaccacgcccaccaccttcacactaccactagcacctgcagctgcaggctctttctccaacactaatgccacgcc

SEQ ID NO: 185 - DNA, 168 bp, Oryza sativa
  Clone ID: PAT_MRT4530_100169C.1
atgagcacgtacctctgcgtactcagccgatggcgcgacagacgggctggcggaggtcgacatcgccgcgggcggaatcttggccggagaggagatcgccttggaattgccttgcgcaccgaggggatcgccggagagagagagaagacaagagcacgaatcggctaa

SEQ ID NO: 186 - DNA, 308 bp, Oryza sativa
  unsure (1)..(308): unsure at all n locations
  Clone ID: PAT_MRT4530_10016C.1
cgcacctcacgccatggccatgcntcccccgctcttcgccgccgcctcccacgcctccctcctcctcccctctgccaccatccacagctccaccggatctcgccgccccttccgcntccccctccgctcctcccgccgcccgcncgtngcagcagcagctgcctctggcgtccccgacgagtggggcgaccgctcgccctccgcgcccgancngccctcccagcncgacccccccatcgacgacgacgagtggggccgcgangacncctccgccttcgggaantctcgcaccgtcctcgtaacgaaga

SEQ ID NO: 187 - DNA, 1238 bp, Oryza sativa
  Clone ID: PAT_MRT4530_100170C.1
tcaatcaaatttccaatttccccagacgatccagaatgtgtcgtcagtgttgatctggtactgcataggcgcgtatgcattgggcgagtgggagaggcacccgcactggagcggcaccagcagcagccgccctccggccttccaggccgaagcagccatggccgacggttgccacccacgtcccgtcaaatccggcgccttcccgctcgcaccccggccgttgccgccccgctcggctacggttctccctccccgagccagccgcgcgccaccgccgctcccgccgtcgccgcactgcgcagccgccaccaatagcttcgccgtcgcgcgctgcacctcggcctccacctctcctccccaaaccaccgccgaaactccgccgccacctccaacccgctccacgccgcacgccgtccaccgctccactcccccaatccaccaccgggctgccacctccactgccaacccgagctgccattgcctttgtgagtgccagccgccacttcccgttgccgagccaccatatccattcaccgcctccggccgacaatcatcaccaccatagccgcggtcgctgcttgccgtcacctttgtcggcttcgtcgtcgtgtgctgcacctcgtctgcctcctcgctctcgccatccactggcgggagtcccttcgcgtcgtcgcccaggggagcgccgccgtctccctccgtcgggccactccctccgtcgccgcacgtctcggtgagccgcctccctcctccttctccccttcgtcggccgcctcccgtgccagcatcgcgttgcgccgccggctgtccggccgtctgcgcaccgccaacctctgtggtcggtcgggccagccccggctgtgcccgtgcccggccaccgctcccctcagccgcttgggccgatctgggccgtccacgtggtggacgcgcgcccaaggccacgggtggacttggtccaccgtgcgccctcccccttgtgccgctgacgtgtgggacccgcctgtcggcgccggccccctctcttgctgacgtcagcggcagtccggaaagaggccatgacaggacccttcgcacaaccccctctaaccgattgcaccacacctcaaggttcgcccccgtccccagcaggcaacgggcagcccccctctcgtgccgcggtgaatccggaagccgatcaaccggacaccctggccgacccaactccatcacgcccaccctcacttgggtacgtcggctag

SEQ ID NO: 188 - DNA, 275 bp, Oryza sativa
  Clone ID: PAT_MRT4530_100171C.1
ccggaccggacattgccggcccgacccacccgttcggttactggctgaagaaaagaatgaccccatgcctgaatgagcggatactgtcgccgctgtcgaacacgatgcgaggctgcccattcctgtcatgatcttgagattggacctggagctgctcagggcttcaatgttggtgttgagatcacaactgtgaggaaagtgaaggctgagctttgcaagaatactgcaatgatcaaggctgacatgatgctactactattcggggcgccccgggc

SEQ ID NO: 189 - DNA, 202 bp, Oryza sativa
  unsure (1)..(202): unsure at all n locations
  Clone ID: PAT_MRT4530_100172C.1
tcgttgnccaactcatcggctgacccgatgcagnagctccgactccgncttaacacgaaagctcaagcaccgtagagnaaagcacaccgctccaaactcggcactaagacagatccacacagtcacagggntcttatgnctcggcagtgctttgttatcattttgtaccatgtcttttnggnctanggtgtacattactnca

SEQ ID NO: 190 - DNA, 956 bp, Oryza sativa
  Clone ID: PAT_MRT4530_100173C.1
ggttatcattatcttatataccatagaatctaacacaaacattaaagtagtcaagcaagacaaatttaacaccaagtaatagtaaaacagacacaaactatatatggaacatgtggacaatgaaactagttcgcctttccttgtttcccttttatcagaccatcttggacttgggatgtgacggcaatagctgataacaagagataagtgatgaggcgaatccgaaagcacctgtgactcggggagtgactttctttggagccaattgaagcaatccgaaagcaacaactacatccatccctgctttgatcagagccaatgacctctcgtttgatttctctacttttgcacggtattgctcattctggtgtttatccttgttccctatctctttttctaacttcttaattgatgctgacagcctaccaagctccccaacctcaaccaaggatgtgcaaaccgaagaacccatccaacagaaaagtgatatacgtccaagaatctcagcacgttctttgtccttgtaaatcccagtcctgccaagccacacaatttgatctaggaacaagaacgttgacagcaacgcgtttttagactttccgagcagaacaagcgggagtggagtccctttgggaacagggctaatgagagcatgaagatcatttacaaacttgaagagacggaaaactttcctagccaagctggtgttcttgtcgacattttgagcagtgccaggttggccatcactcaagaaattggaaccatattgaatagctcgacaaatcttgtctctcgcctccgctttattcaaatacacaactaccagaccaagctcagctcttgtggtctcaagggtactcatcgtttaagctcacaagaaacctttacgaatattctcgtacgagctcggagaagataaacagagttcgcctgaaaaacagagtaagcattattcc

SEQ ID NO: 191 - DNA, 831 bp, Oryza sativa
  Clone ID: PAT_MRT4530_100174C.1
cgggctgaggaatcggcacgaggcttccctccctcttctcgaaccttccgaccgccacgttgtcgccatcgccgccggcgccgaattccgccgcgatctcgcctgctccccccagtgatgggatttacagatgaaatagtacaagtagatgtgttagaaaggcacttgttggctggtttatcccacgcgtccgcccacgcgtccggtgaggatgagatcctctatgatgcatcatttgaggcaactgaagacaagtttgtcaagtatcagattacttggtggattctgctgtcagtattgttgatcttagcttggggagtaggactcctcatgctgctttacttgccaatttggatatatgtgtgccggaaggacttccgctcaaggaagttgtgtttgactccacatgctattgtctataaggtaactaggcctgccacttttccttgttttggtgttttgaggaatgagaagcatgttgtccttcattcagtttctgatattgttgtcgaacaaggttatctccaatcactttttggtatatattcaatcagatttgagaacattggtgtccgaaagccttctagtgatgacataaagataactggaattagtcatccacatgatttcaggaaggcatgctttgttcaggctgttcttgtccatcttttgaatacaagcaatctgaatctcagtagaaaagcttatgtacacgatgatcagcagagcacgagttctaaacctataactatgtcttcggttcctcctcttggagatttgatacttgagaagcttgacgaagttgaaatctctgtgaagaaacatgggtag

SEQ ID NO: 192 - DNA, 384 bp, Oryza sativa
  Clone ID: PAT_MRT4530_100175C.1
atggggcagcttggcaccatgtcatccgttccccaagcaacgaggttgcaccagttctccttgaaggccgcaatcctcccccagggctcagggaggagcatgttttggggcaagatccttggggtgagcggtcttgagtacaggtgcctccgagcatcagtggccctcctggcgccacaagagaatgctcgggagctgaacaagaataaggttgatctgcaccggcaagatcaacaacccacggagagggttcatcatggtgaacaccaaaccactcacaaccatcaccgagcctcctccacaatcttcacggagaggtcaccgggcaactactccaagctgttacctccaagactaacaagtaacaacctggctgggagatga

SEQ ID NO: 193 - DNA, 430 bp, Oryza sativa
  unsure (1)..(430): unsure at all n locations
  Clone ID: PAT_MRT4530_100176C.1
gggcgttcgactctggggagcgcgacgaggatggcgaggatggcgctgnccgccttcttctgcactaccacccggcggcgcccgcggcggcgctgctcgagctggcgtgctccgccgtcgcgctcgtgtcgcgctcgccggcgctgctgtgcctggcgtggccggcgcgcgccatgctcctcgtgccgcccgcgcggtcggggtggttgcgctggccgtcggctgccgccgggcccctgccggtgtcgggcctgctgtgcctcctcaaccccggggtcgtcgagctcttcgcgtggttcctcgcgctgctcgcgctggccgtgtccttgctgctcgtcttccaggcgcacgccgtgcgcgtcgtcgtccccgtccgcgtcctccgtttgcgcgcgtgcgtcccgggccgcgactccctcggttgcgtcgc

SEQ ID NO: 194 - DNA, 314 bp, Oryza sativa
  Clone ID: PAT_MRT4530_100177C.1
cattgccaggctatttgcaccatggtgcaggctatcatgcatcaagtgcagtttgatgctggctttgttggcgagccccaagctcaggcccaggcccaggtggcgtctcaatccgccctccatgtgtggagtctaccctatgtactgcagcactccatgcaaagtcgctactggtcattgggggtcttggttgtgtgtaccactcatatatatatagtgggataaataaagcgtcacacatcatctggtgtgtcctgtattaataatttgcaatatgcgtgtggctgctcgccttaattaattgaagttataac

SEQ ID NO: 195 - DNA, 2867 bp, Oryza sativa
  Clone ID: PAT_MRT4530_100178C.1
gcacgaggcctcgccggccttcctccgctccggccatggaagccttcgccgccgccgccgccgcggccggcgtcttcgcgggcgccggcgcagctgcgcgccccgtactgctccgccgcagaggtgccccccggtccggccgggtgcgcctcctccgagcgccgccgcgcgccggtggggacagaggaggggacctgcccccgctcgacgagtgggacaggatggagctggagttcgggcgcttcctcggcgaggatcccaagctcaccctcgccaagatacttctcaagaaagcagacccagatgcttcatcgctcgatgtagagaatctaattgccaacaaaaaggccaagttggatgatattttgagggagtttatggatgctaacagacaggaacagacttctgaatcaccagaggaaacaagcaagccaatggtagacaaaaattctccaagcatgtcaagacctgttcagaccaatgcaaagcaagatgagcctgctttgactctgctgcgaccagcaggaagcaaattgaagcaagatgatcctcctttgactttgcagcgaccagcagggagcaaacccaagcaagatggtccttctttggctccattacgaccggtagggagcaagccaaaggaaaataacacttctttaaccttggtgcggccaatgggaagcagaccaattgtccggggtaaaccggtgcaagatagttggcctagcaaggggagcttagctgccagaagagagtcgagcgatgttggcagcacctcaagaaagaacaatgtggatgtttccttgcggaaacccaccatacatcagagtgatgatgatgaattgaagtcgaagctgaatctgaaaccaaatattgacttgaaaatgaggaaagatatggacgaggatttggccaacatctctcttcttcaaaagccagagctttcagtagataatatgaattcaaatcaagagaagtctgatgctggacctgcctctgttgcttctggagaggataatggtgcagttgacccagaaacaaatggtcttgatgaaagagtagtgattgacagtattaatgatcgtgagtcatctgtgcttcctgatgatcttagtgcagtttctcgcatgttggccgagctaccactaatatggcaattactacattgtaggaaagacttagctgttgaaacatttccatctcaagttgatgctgagaagatgaatgccagtgagaataacatgaattatgttgatgatggaggcaatgtgttatcatcgaaattagaggacatcacagagagtgactggacaaggctggagaattatgcaagtaccggagaaaaagttgaggtggagctgataaactgcagctcgaaaggatttgttgtatcactcgattcattgataggtttcttaccgtatcgcaatcttgctacaaaatggaaattcttagcttttgagacttggttaagacaaaagggtggcgatccttcactcttcaagcagagtgtgggcatagaagaaagttttgaggtcaatgacaggaacatagaatcagtatctagctcagattcagaacttgctgtgcaggatcaaggttctatgccatctaaggaaaaatttgaagatcttcttcgaacatataacactgagaaatctaaattcttatcatcatttatcggtcaaagactccgtgtttcagttgtcctggctgacagaaaatccaagaaaatatttttctctatgaagccaaaagaaagtgaagaattgattcagaaaaagaaaagtctcatggctaagctcaatgtgggagatattgttgaatgcactatcaagcgatttgtttactttgggatatttgttgaggttgaaggagttcccgcattaattcagcagtgggaagtgtcttgggatgaaaccttggacccatcagtttcttacaaaattggtcaggttgtggatgctaaagttattcaactggactataataataaccgcatatttttgtcacttaaagatgtaaagccaaatccttcagtaggcgcattggaagctgtcattggtgaggaactatcactgggtggagctcttgaacctgcagaagcagattttgagtggcctgaagtggatgctctcatggaagagatgaaaaatattgaggaagttagggatgtttataaaggacgattcttgcgaagcccaggactagctccaacctttcaggtgtatatggcacctttggttggtcagaaatataaactccttgcacgctatggaaataatgtccaagaggtgatggtggagacatcattagacaaagaacagttgaaagaggcagttttagcgtgcacaaacaggttgaaaataccaggtgatatgtagtgctgtagtatttttccttcttttagcttgcgaagcagatggttgtacagaattgttgtggcagtccaattttgcatccttgtagcatgcttttgagtcgtttacacctgattttcttccttttcaagttgaaaataccaggtgatatgtagtcctagctcaactttgtagaggatgacaggtgtaaatcgccttgatacgttactacggaattgcaacagaattcgatttgcatctttcacggtgctagaattaatctaccatatttttgtttgaaaaaaaaaaaaaaaaaaaaaaaaaaaaaaaaaaaaaaaaaaaaaaaaaaaaaaaaaaaaaaaaaataaaaaaaaagaaaaaaataataaaatttaaaaatatataaaataaatttttaaaaaaaaaaaaaaattgggggggggcctcttaaaggtaccaaattttacttccggttgtttcaaaaataattgttttttttatggggcc

SEQ ID NO: 196 - DNA, 742 bp, Oryza sativa
  Clone ID: PAT_MRT4530_100179C.1
cccacgcgtccgcttcatgataggcattggaaatagagaaagccgtgcaaggcaagctctatcgacgatgggggcttctgtattcagcggaatcaccttgaccaaacttgttggagttattgtcctacgttttgcaaaatctgaagtttttgtggtatactatttccaaatgtacttagcacttgtcatcataggctttctgcatggccttatcttcttaccggttgttctgagtttgtgtggccccccttcaaaggtgatgaaacctctcgaacagagtcaaccttcagcttcgtccgattaaagttgacaacgggagaattcacccaattgaacatcagtacaccagatagggatacatggaaatcagccattctgaaactcgcagagcatccctgtggtcatccatctctcctggtgcgaagtagcagtgcagtgtacagtatttctagaggtgcaagccattttattctatacttagattcataggaaaaagggttgtgcattagttaaagctcagtttacaaaactagattagatagcgtctccacacggaaaagggtatgcagcggggtggcttattcgcattagtagtttgagttggttcgtccggtgcatttgtgacgacgctttattctagcatgacgctctgctttcatgtaacgagaaccaagagaacggcgaatgagttgacaatgtttgacccctttgtggattcacacaaaaaaaaaaaaaaaaaaaa

SEQ ID NO: 197 - DNA, 170 bp, Oryza sativa
  Clone ID: PAT_MRT4530_10017C.1
cccacgcgtccgcccacgcgtccggcaggatagatttttagcgtttcctgctaaacaccatgctagtgtgttgcaaattggtggaactaatctaaataacttaaccaacgcaactgaactggcaaatgcttattcttaccatcagatcaacctagactggggctgcccca

SEQ ID NO: 198 - DNA, 428 bp, Oryza sativa
  Clone ID: PAT_MRT4530_100180C.1
aaggataaagagaggcttgagaaaaatttgatggtacacagcttagtccttcggactacatggggtgctcaaagtcatatcaattgaccaaaacgctaggctcctgcttcaacaataggatcatcggcggtggtgttcttcccgaagggtacacgaatgctatcgaagaacatgctcaatacttatagcttttaaagagttcataacacaagcgcttacataatcacaccgagcccgcctaacatttgcacaaaattggaactagcgcggttactcgttatttgcgttgggggactcctcaccattgactggctatgctggtgatctgctgtagcttcacttacgaggatgtggacgtgatctactgctgcttagtgcacgagcttgaggtggcgatctgctgtagctacctctctttggagaactat

SEQ ID NO: 199 - DNA, 543 bp, Oryza sativa
  unsure (1)..(543): unsure at all n locations
  Clone ID: PAT_MRT4530_100181C.1
taatattagagatggtgcgagcatgccacaactgagagaacnggctactatcgttcancataatacggcttctgttaggggagggaacgtccctccgggagaagcaccccaggaatatgtgggatgaaccctcccatcatcccggnagaacggccacagggaaagggggccanacactggggcccccgtgggnatgattgtgtgcgtctgggactgccccacangatagatgtgccacagttggatgggatgtgtgtgcactgtgtggccgtgtgtgtgctgagatggcctgtggtgcgtgtggtgggctgtgcggcgtgtaaggtagcggagcgagcccctgcttaacttgtgggttgttgtgggtggctgtaatgtggtgctgagatgctgttgcacctgctggacaacacccgttggctggttggttaagttgcatgtgccatgtgtgtgtgaactgtgccccccatgagacccttttttacttcacaagtaaaaacagagaaaagaacccccgtcatgtaaaaaaaaaaaaaaaaaaaa

SEQ ID NO: 200 - DNA, 558 bp, Oryza sativa
  unsure (1)..(558): unsure at all n locations
  Clone ID: PAT_MRT4530_100182C.1
tgtccccctggtggcctggggaagttgtgcgcttgtgcgctgtgtgcttgctgtgcccccctagatttgggagactgaataaggggccagtgggaaatggggatttggatggtttgcatgagcttggcactcttgctgtgtgtggtgaaaagggaagttgggggatttgagatggggcaatgtgagatgattgactgattgcatgcaggatgtgtgatgcactgtgggggcgtgtnaccatgatgcactgtgatgacccatggtgangatgtgttgtgatgagtgggataatgtgaaagtgtgtgaaaaggttgccctgcaaaatgatgcgtggggactttgtgcgcacaacctgtggggcattgtgtgatgtgtttgaggtcgtgacccactgccagggctggatgaancangggccggactggtgaaaatgggatttgatngtgacaacatgcatgtgtgcttggtgatgaaagcatctaagaatgctttattgatgtttataacaggagcattccatattttggggcccttgggcntccaaaaaaaaaaaaaaaa

SEQ ID NO: 201 - DNA, 123 bp, Oryza sativa
  Clone ID: PAT_MRT4530_100183C.1
atggttgcatctgtgatcaatcccgcattgggccagcctccattgttgggctgcatcgttgctgggccgcgcacatttgatgggtcgcacgcaagctggcgggtccaacataatgcacgttag

SEQ ID NO: 202 - DNA, 182 bp, Oryza sativa
  unsure (1)..(182): unsure at all n locations
  Clone ID: PAT_MRT4530_100184C.1
ccatgagctgccacctttgtaccgcagtttttttngttagagattatgaatgtgtccactagttttcgcactccactattgtgtaatgaagcttttgttgttgtggccacctttgtgnctggttcccggttgtgtagcccggattccagggttggtgtttgtattggaattcggaccgagaa

SEQ ID NO: 203 - DNA, 318 bp, Oryza sativa
  Clone ID: PAT_MRT4530_100185C.1
gacggcagcggcaaagggcggggcggcggcggcggcggaggcggaggcgtgctgcatctgccagcgacggtgaggatcgacatcccggcgacgagccccgggcgggcggcgctcaaggtgtgggaggagctcgtgaacgtgctccgcaaggacggcgccgaccccgccgcggcgttcgtccaccggaagaagatccagcacgccgagaagaacatccgcgacgccttcatggcgctctaccgcggcctcgagctgctcaagaaattcaggcacatcttccctcttcatctttcctttttgccatatctgacaagctaa

SEQ ID NO: 204 - DNA, 462 bp, Oryza sativa
  Clone ID: PAT_MRT4530_100186C.1
atggcgctcgggctagtcgtcgtgaagctggcgctatggctgctcgcgtcgtgcgcggaggcggtggccacggcgctgctccgcggcgcggcgctcctcctcctcgccgccgcgcggctgctcacgctgccggggaaggcggccgacgcggcgctcggcgcggccaggggcgcggtcaccgcggccgtggagctcacggccggcgtcgtccgcgacgccgcggcgtccgtcgcgtcggcgctcctcgaggcgctctggggcgcggtggccggggccgcggagctcgcggcgtcggcggccgcggggctggcggaggcggcgcgggacggcggcgaggaggccgccagggccgtggcggctgcggtggagggcgcggcggaggtggcggccggggcggtggcgaaggtgtgggagagctacgtggacgctcttggcgcgcttgtcctcgaaaaccgcagctga

SEQ ID NO: 205 - DNA, 1282 bp, Oryza sativa
  Clone ID: PAT_MRT4530_100187C.1
gcaaatgcttcgtgttgggagaatttgttcaagatcttcaacccgtgctgtttcttcattcctggtgggtccaagacatttgattggtcatgaaagcccacatttcttgggctccaagtgttgttggactaaccggactggtgcaattgggttcctgaacacaaagctaaatattggtagttatggtccatgcttatcaactcttactgaaacaattctggtccaagctcatgacccatccctgctagcattggagatagagaatgcaattgatcagcagaggtttgatgatgcatggagggcttatgagaagcatattcacatggatggagtccccagaaagtctgttttgagtaagctcatcactggcttcgcagagacctgtgatgctcactggctgaaccagtcctacaatgtggttaatcatgcatttgaagagaagagcaaactgttggagaaggagccccttattttcctctctcttgcactcgcacggtcttctcttcctaatctttctataaatgttgtgaggaagttgataaagatggaagcatacccacctgttgcagcatggtcggctatcgtggcgcatatgtgccaaactgcaactggtgcatttcttgctgctgacatggtaatggagattggctaccttttccagaataatagggttgatccacggaagaagagcaaccgtccattgctattaatgaagcccaattcattgaccttcaacataattctgactgcatcccttctgtttggcactacaaaaaaggcggagcagcttcttgaattaatgcctaggatagggttgaagcctgacgtcagctcgttgattgttatggcccggatatatgaacagaatgggcacagagatgagatccagaagctgaggagacatgttaatgaggcctgtggccttagtgaatcagagctcaggcagttttatgattgcttgctctcctgccacttgaaatttggagatctggattctgcagtggatatgatattggatatgcttaaaaagggtaaaaatacgaaacgttcacttgaagcagctaaagcagttcttgaagcagttgaaaacaacaaaatttatcttccttatgagaaaaccaagcctgttaattcaggttcctcgaacaaatctgtatgtactgacagtcaaatgctaaactatatttcattcttcaaagataagagctttgcaaggcttgagttagatgcgagagaattactcaagctattatcagataagcttcaggaacaagttgggcta

SEQ ID NO: 206 - DNA, 552 bp, Oryza sativa
  Clone ID: PAT_MRT4530_100188C.1
atgccgtcagctccatcaacaaccagggatcgtgcagctcgcgtcctggcaacaggcagtagatggtcgattgcgaccatgaggattgttgatgatatacttgatgtgaccatgtcttctgacgagcttggcaagacagcggggaaggacttggcgagtgacaagacgatatacccaaaattacttgggctagagaaatcacgggggtttgcagaaaagttgctttctgatgcaagggaacaacttttttcaggatttgatcaagagaaggcagcaccacttctacacctggccaattatattacctatatcgacagaactgaggtgatggttactccattgattattgttgatttgattgttgatgatataattgatgtgaccaagtcttctgaggaggttggcaagacagcaggggaggacttggcgagtgacaagacgacatacccgaaattacttgggctggagaaatcacgggggtttgcagaaaagttgctttctgatgcaagggaacaacttttttcaggatttgatcaagagaaggcagcatga

SEQ ID NO: 207 - DNA, 114 bp, Oryza sativa
  Clone ID: PAT_MRT4530_100189C.1
atgaacacaggaccggaggacaacagcaaggataaggtgtcagtggttatcgtggctcacagtcattgccgcaaatctggtaattatgatctggacacaaacggaagtaactag

SEQ ID NO: 208 - DNA, 1198 bp, Oryza sativa
  Clone ID: PAT_MRT4530_10018C.1
ccggccggggtcgttgtagtatagtggtgagtattcccgcaccacacaggcagccacacacacaccactccatttctgagctcttctagtttgagtgagagagcagcagaagggagtagtgcaagatgccgatccgcaacatcgccgtggggagccaccaggaggtgtaccacccgggtgcactcaaggcggcgttggccgagttcatctccaccctcatcttcgtcttcgccggccagggctccggcatggccttcagcaagctgaccggcggcggagcgacgacccccgccgggctgatcgcggcggcggtggcccacgccttcgccctgttcgtggcggtgtccgtcggcgccaacatctccggcggccacgtgaacccggccgtgaccttcggcgccttcgtcggcggcaacatcaccctgttccgcggcctcctctactggatcgcccagctcctgggctccaccgtggcgtgcttcctcctccgcttctccaccggcgggctcgccaccggcaccttcggcctgaccggcgtctccgtgtgggaggccctggtgctggagatcgtcatgaccttcggcctcgtctacaccgtgtacgccaccgccgttgaccccaagaagggcagcctcggcaccatcgcccccatcgccatcggcttcatcgtcggcgcgaacatcctcgtcggcggcgcgttcgacggcgcctccatgaacccggccgtctccttcggcccggccctcgtcagctggtcctgggagtcccagtgggtgtactgggttggcccactcatcggcggtggcctcgccggcgtcatctacgaggtcctcttcatctcccacacccacgagcagctccccaccaccgactactaagctcatcgccgccgccgccgcttgtccatgatcgcctcgtctccgactccgatccaaccgtttagtttctcgcatcagtgcatcatcaaacctgtttcatttgcttggatcagttgtacgttgaacgtactgtaagtgtggacctttgggaacccgttgctttgcttctgtaaaactgtgcatgcatttgcctgagttccttcgttttttcctagtcaaattcgatcgctattcgcaaccagtaaaaaaaaaaaaaaaaaaaaaacaaaaaaaaaagaaaaaaaaaaaaaaaaaaaaaaaaaaaaactcaagggggggcc

SEQ ID NO: 209 - DNA, 288 bp, Oryza sativa
  Clone ID: PAT_MRT4530_100190C.1
atgaccaaattgtccccaggatttgattcgacgctgagcccccatcaccatgccgcctgcgtcctcctcgccttcctcgtctcgcctacgctgagtggaggcgaatcagcgcatgcccacaacctccggagccatgacgaccggcgactcggcgcgtgcccaccaccggtgaatcggcgcacgcctctcacgtatggcctccacagccactacggccggcgaatcaacgagcgccgcgacaactggcgactcaacgcgtgcccgcctcgccattgtcaatgctggtag

SEQ ID NO: 210 - DNA, 318 bp, Oryza sativa
  Clone ID: PAT_MRT4530_100191C.1
atgaccaaattgtccccaggatttgattcgacgctgagcccccatcaccatgccgcctgcgtcctcctcgccttcctcgtctcgcctacgctgagtggagacgccaattgtgcccgccacgcgacaacaggcgaatcagcgcatgcccacaacctccggagccatgacgaccggcgactcggcgcgtgcccaccaccggtgaatcggcgcacgcctctcacgtatggcctccacagccactacggccggcgaatcaacgagcgccgcgacaactggcgactcaacgcgtgcccgcctcgccattgtcaatgctggtag

SEQ ID NO: 211 - DNA, 645 bp, Oryza sativa
  Clone ID: PAT_MRT4530_100192C.1
atggtccctctagaaaacctacgcgacatgtgcggcgacatcatcgagaaggcgaccctggcgcgagatctcatggtacccatcgcaagccaactgatctccgaggacagggacaggtacaacgacctccatcgacattgtgtcctagcccaggatttcacgaacttcctccagaagctcaacaaggtgagcgcgctcgaccaggtgtgcacggacatggtgacgttcggtgccattgaagctatagccttgtgcgagaggccgagcaacgccttgattgtctttagggatgaagacagtgtagctatcacggtccataggcaggaagaggtcgaaaatgggctctatttcgcggtcccgcctctccaccttgccctcccatcctgtttcatcgaatccaaaattatcaagaatatcaataccgttgtggatgcggccgaggcatgtgattgtgcccaaccagaacctgaattacccgagtcctacgacaacggcgacgaccactcatcatggtcatggagacaaaaggtcaccatggaacaccatttttcacaccagttttacgctgtctaccgtgtcagaactctacggaccaaggctaggagcggacggtcacctgtggatggatggagccagtttcactag

SEQ ID NO: 212 - DNA, 578 bp, Oryza sativa
  unsure (1)..(578): unsure at all n locations
  Clone ID: PAT_MRT4530_100193C.1
aaggggggggttaganttaaaatccccngatcaggattttacggggggtnngtcagggtaaaagntggcnaaagtcccttgaggangtggcntttccctttcntgggttcggagatttntcacgggcaattgcaaantccnntggatttcggaagcaactcccagaagnntgncaggggccggcnttcancggntganatgctnagcanagtgnatnagatgctcggggnggctgatngagtgcncngttacgcaaaccgcctctccacgtggttttcacccttngtttnaagantanggtcgacaggtttnccgncgnncnntcgagtccagngacncagatcaaatnagtgnancngngaantggagagnnatcnctncaatancacgntttggatncggtttntatcnantntnntntgtcnngtcgtcagntagagaanantccntaccnacatnncnatgggcaatccnngatgcnnntnnacnctnaatntatgggtacgagncatngaggtcgantnaggntncggcanttaggggtctagtngntcccccggaangcaggaantngnant

SEQ ID NO: 213 - DNA, 204 bp, Oryza sativa
  unsure (1)..(204): unsure at all n locations
  Clone ID: PAT_MRT4530_100194C.1
gtatatattaatgtaatacctcccgtctctcgtctcctccgccgccattactgattcgcggctgatcaggggatggtgcgccgcattctccctctggcgatcatatcatgggatgggatgggttcntcctccctcccctccccttttcccctccccttcctggtcctttgctctggttccttgcctgtgtggggcggggccgcg

SEQ ID NO: 214 - DNA, 171 bp, Oryza sativa
  Clone ID: PAT_MRT4530_100195C.1
ccggcccggggagcaagcgtagtagcctcgctctctctcgcagccgcgcgcttggtgggagggggggattggggatgatggggagcgagtcggggagggcggtgtcgtctatgttttctcttcaactgctcttctatatcctacaccttttcattaagctcactctaaact

SEQ ID NO: 215 - DNA, 222 bp, Oryza sativa
  Clone ID: PAT_MRT4530_100196C.1
ccggccgggaataccctacccactactgtatcccccatcgccgtttcttccttatctttgccagtgctccgacaatgctttctcttctccgcgcccggcaaggccgattggcccgcataattttaacacctgcatcgagcttgcgttggctgtgtactataagtgttacgtagaacctagtttcaacataaaaccgtaggcgggtcagaagagggcaccgtc

SEQ ID NO: 216 - DNA, 3015 bp, Oryza sativa
  Clone ID: PAT_MRT4530_100197C.1
ccgggctgactgttcttccttcctcctgctgctgctcctcatcgtccgcactactagcgccgataatagaacgacaccgaacggggcggcggcggcagtaatggcggcagccacggtgggtgtgctgctgcggctgctgctcctccccgtggtggtggtggtaagcctcctcgtcggcgcgtcgcgggcggcgaacgtgacgtacgaccaccgcgcggtggtcatcgacggcgtgcgacgcgtgctcgtctccgggtccatccactacccgcggagcacccccgacatgtggccggggctgatccagaagtccaaggacggcggcctggacgtcatcgagacgtacgtcttctgggacattcacgaggccgtccggggacaggcacaacagtacgacttcgagggcaggaaggacctcgtcaggttcgtgaaggccgtcgccgacgccggcctctacgtgcacctcaggatcgggccgtacgtctgcgccgagtggaactacggagggtttccggtatggctgcacttcgtgccggggatcaagttccggacggacaacgaggcgttcaaggcggagatgcagcggttcacggagaaggtggtggacacgatgaagggcgcggggctgtacgcgtcgcagggcgggccgatcatcctgtcgcagatcgagaacgagtacggcaacatcgactcggcgtacggcgccgccgggaaggcctacatgcggtgggccgccgggatggccgtctccctcgacaccggcgtgccgtgggtcatgtgccagcagtccgacgcccccgaccccctcatcaacacgtgcaacgggttctactgcgaccagttcacgccgaactccaagagcaagcccaagatgtggacggagaactggagcgggtggttcctctccttcggcggcgccgtgccgtaccggccggccgaggacctcgccttcgccgtcgcgcgattctaccagcgcggcggcacgttccagaactattacatgtaccacggggggaccaacttcggacgaagcacgggagggccattcatcgccacgagctacgactacgatgctcctattgatgagtatgggatggtcaggcagccaaagtggggccacttaagggatgtgcacaaggcaataaagctgtgcgaaccagcactcatagcagctgagccatcatatagttctttgggtcaaaatactgaggcaaccgtatatcagactgctgacaattcaatatgcgcagcattccttgccaacgtggatgctcagtctgataaaactgtcaaattcaacggaaacacgtataagctccctgcctggtctgtaagcatccttcctgactgcaaaaatgtggtattgaacacagcccagatcaattctcaggtaacaacttcagaaatgagaagcctgggatcaagtatccaagatactgatgattcattaatcacaccggaacttgctacagctggctggagttatgccatagagcctgttggtattacaaaggagaacgccttgacgaaacctggactgatggagcagataaacaccacagccgatgccagtgatttcctgtggtactcaacaagcatcgttgtcaaaggtgatgaaccatatctaaacggcagccagtccaatctgcttgtcaactcacttggacatgttcttcagatctacatcaatggcaaactagcaggaagtgctaagggcagtgctagcagctcgctcatctcattgcagacaccagttacacttgtacctgggaagaacaaaatagatcttctgagcacaacagttgggctatcgaattatggtgcattctttgacctggttggcgctggagtcactggtccagtaaagttgagtggaccaaatggtgcccttaatctatcttctacagattggacataccagattggactcagaggagaagacttgcatctgtataatccttcagaagcctcaccagaatgggtttcagacaacgcatacccgaccaaccaaccattgatatggtacaagaccaagtttacggctcctgcaggtgatgaccctgttgccatagacttcacaggaatggggaaaggggaggcatgggtgaatggccagagcattggtcgctactggccaacaaatttggctccacaaagtggctgtgtaaactcatgcaactacagaggagcttatagttcgaacaagtgcctaaagaaatgtgggcagccatcacaaactctgtaccacgtgcccaggtcatttctccaacctggtagcaatgatctagtcctctttgagcagtttggtggtgatccaagcatgatatccttcacaacaaggcagacaagtagtatatgtgcacatgtttcagagatgcatccagcccaaatcgatagctggatctctccccaacagacgtctcagacgcagggaccagcacttcgcctggagtgccctagagaaggtcaggtcatcagcaacatcaagtttgcaagctttgggacaccgagtggcacctgtgggaactacaaccatggtgaatgcagcagctctcaggctcttgcagttgttcaagaggcctgtgttggaatgaccaattgcagtgttccagtgtcatcgaataactttggagatccatgcagtggggtcacaaaaagtctagtggtggaagctgcatgctcctgacaagtttgatagtgctcgttagtaggaaaccaaagtagtttgagggggtgaagccagaaaaccttctgtgtagaaagcaggcaacaacccacacaggaataaatgttccccaatgcacggtggaaaaggaataaataatacccaattgctttggagcccttgcaagctgttagatcgtacgtttagattgagttgtacttgttaacatggtgaatctctacaattgtacaaggcaatgaatcttttgtaattcttttgagatatactttgtatttcaatcaaatataaagcacaccttcatctgttgaaaaaaaaaaaaaaaaaaaaaa

SEQ ID NO: 217 - DNA, 592 bp, Oryza sativa
  Clone ID: PAT_MRT4530_100198C.1
ccgggctgcaggatcggcacgaggagagaactagtctcgagtttttttaagggataattaaggaacttggactatgagcgattcaagaagcaagatactagtacaacctggggcacaaattcagctgtcacttcaccaggacaaatcagatctaacagtaggttagttcgaagcatgctggtgttagtttacattcagcaactggctgatcataatttatctcctcaaagtacaaactacaaaaccatctttagctcctgctgatgtgatatcaggcaagcagcacgcagtccttcagctttccatgtctgaatcaagaactgacaggatgttcaaggcggaagaacctatgtggattcccctaactacaccgccataaccaacatttatttggtggcacagaagcaagatagcatcccacaatgccgttcttccctgaagagaaaactgcaactttttgtcccagtacagagcaaaaatcggaggactctgcttgcccacagccagtataagagcacctgggtgaataactgctggaacgccggaaatcaaagcaacatacttctctggaaacctctcttttggtggaaga

SEQ ID NO: 218 - DNA, 353 bp, Oryza sativa
  Clone ID: PAT_MRT4530_100199C.1
ccgtcgccgcgtgcaccgtcctgcgttacgtgcgtgtgaacggggatatggacggttagatcgatgtgtaccgtgttcgtcgtcgtgtcgaccagatcaaccagattcagtcgatgggaaggatcatggcgtttaagtagctagtcgtgttatctagtactagtagcttcatatgtagctagtcgtgttgtgtatctcggttgttgatgggcacggatgttgtgtgttccactgtgacgtcctttgtggttcttgcttggccactagaacatgtaaggaacttcataatatgccgtatgatgcatctctatctgaagaactacttgactaaaaaaaaaaaaaaaaaaaaaaaa

SEQ ID NO: 219 - DNA, 645 bp, Oryza sativa
  Clone ID: PAT_MRT4530_10019C.1
atggccgacaagcctccgccgccgccaaccaagcccaagcccaagccggctacggctgctcaacccgcgccggcgccggcgacggcgaggacgacgccgccgctcaagaagccaccgccgctggccccgcccacgcaggcgcgcccgctcaagccgccgccggcgcaccagtacaggcagcagcagcagcagcagccggctaatcggaagcggcagtacgggaggcaccgcggcggaggcggcgggtgctcggggcggcgggtgtgctgcctcgccacggggttcgtcctcctcgcgctctgcctcgcgctcgccgccgcgtgcctggcctacctctactaccacccgcgcccgccgtcgttccaccttcagccgctcgccgccacgcggttccgcgtcggggaactcctcggcggtgtccgccatggacgtcaccgccgccgtcagggtggtgtcgtggaaccccaacgaccgggtgtcgttcgacccaacttgaatcgtaggcaattccaaaacgcacaaatctttcgagttgttatgaagcctcaaagaaaaatattaactgcaagatttgggagtgacaaagttaatttcaagcagttgaacgtcgtgttagaaatcgtccaaaattctgatggtgtttag

SEQ ID NO: 220 - DNA, 151 bp, Oryza sativa
  unsure (1)..(151): unsure at all n locations
  Clone ID: PAT_MRT4530_1001C.1
atggcgacgtcccgatcccccacgcggcgtgatggggaagaactcctcaggcgtacgcgcattggcagcgtcgtcaccgcgaaagcgccccccaaaagagaggaaaccggctactggaaatcatggtnataccacgccaagtttgcccaag

SEQ ID NO: 221 - DNA, 2767 bp, Oryza sativa
  Clone ID: PAT_MRT4530_100200C.1
ttaccttttttttctcttttttttcgatggtgcatgaaaatactagtactatcttatactgtcgcttttcctctttctacgagtgtcagatatggtggagttcgagttcccaatgcttcagttggcccgccaaagccatccaatttgccgagacggacaccccgcgcgcgacgccacgccaccgcgcgcgaatttacgcggttgcccctcggtggagtccccttcgcctcctccgccccagcgcccggcgcctccccttctcttcaccgccggtcgtcggcgctgccgactgcgccccacgcgccacgacgactcagccccaccgcgccgcctccgactccaccccatcgcgccaccgccgactccgcaccaccgcgccgccgactccgccccaccacccgtcgcctccgctcttcgccgcgccagatccggtgggccgcgccgtcgactcctccccacggcgccgccgacgactccgcccctctccctccgcccttcgccgcctctctctccctccgcacggcctccttctgctacgccgccgccgccacggccaccgcccactcctcgtcggtccgccacggtatctacggcgccgcgctatacgccaactcgtcggtgcccgtcccgctctacaacgcgtccgccgccgccggcggcgtggcgccggggtactcctcggcattccacacctcgtcgtccttttcctccgcgccgctgcagctgtccaacctctcctcgggcccgctgttcctctcgggtcccatcgaccgcgccggccagctctccggcccgctcgaccccgccgtgcccttctctggcccgctccccgcaaagcctcccaagcccgcgtcctcctcatcgagggggttctcgaggaggttccggaagccgtccttcggcagcctgcggcggagcgtgtcggagaagaaccgcccgtgcgccgtgccgctccgccgcgacgacggcgtgcagtgggcgcacggccgcgccggggaggaccgcgtccacgtggtggtctccgaggatcagcggtggctcttcgtcggcatctacgacggcttcaacggccccgaggcccccgacttcctcgtcaccaacctctaccgcttcctcctccgcgagctccgcgggatcttctacaaggaggccgacgcggacaacaagaagctctggcagtttctcgtggacggcgacgacgacgacagcgagctcgacttctcgggctctggccggttcgcgctgtcactcgacaggctcaaggagagtcggtttcacatgtgggcgcacgccgcggccgacgagagcggcagggaatggggttccaggaggttggcaccggcgcctgcggtgagggaccatgcggcggtgctagccgctctcacccgggccctggcctcgacggaagcggcgtacttggacatgaccgaccagtcaatgggaacccatccggagttggcggtcaccggggcgtgcctgctcgtggccctcgtgagggacgacaacgtgtacgtgatgaaccttggggacagccgtgccattgtggcgcagcgtccggacgatggcgacgatggctgtgtgtttggaaccatgcggcggatggaggacgtcggggtgggcttggagatcgagacaaggcccggcggatgcgccattattgggcttaagccactgcagctgtcgactgatcacagcaccagcatcgaagaggaagttcacaggatcaaacgtgaacatcctgatgatgatcagtgtattgtaaatgatagagtgaagggtcgcctaaaagttacccgggcttttggtgcaggctatctcaaacaggcaaaattgaacaatggattgttagagatgttccgcaatgattacattggtgatacaccgtatatatcatgcacaccatcgctttgccatcacaagctcactgcaagggatcagtttttggttctttcttccgatggcttatatcagtacctgagcaacgaggaggtagttttgcatgttgagaatttcatggagaggtttccagaaggtgatcctgcacaaagtttaattgaggagcttctctctcgtgcagcaaagaaggctggtatggatttttatgagttactagatatacctcaaggggaccgaagaaaataccatgatgatgtcactgtcatggttatttctctggaagggagaatctggaagtcgtccggaacatatgtgtgatgatcagttggaacaatgtcgatgtcaatatttatggtgacgcatcaagtgatctcagctggtcagagcctctgagcaactgcatttatgctcatcaggggagaaacacccacagatggctgacagatgatgcactccatacatttgtcaaagcgattggagttggagccagcgttggtctagatcttagcttcagcacaaaacacagtccatgaatgtgctagagagttaattctcggttggaccaagattgcagagagagatgacacatatgaggaatccctttgcaaagcagagttaagaacactttcttttgtgacccgcttagttgattggttacatactcacctgtgacaattccctcacccccctcccccctagctggctagctatgctgcatagagattgacacttctttcatttttggagaaagaacgtctttggaaggcgccgttttcatgttcatgtcaggaatgggaaggaaatgtaatatgattggatattcatggtgaagaaattgaaaatgtgtccctcatgtggtgctcaaaaaaaa

SEQ ID NO: 222 - DNA, 233 bp, Oryza sativa
  Clone ID: PAT_MRT4530_100201C.1
gaaaaaggaaaaaaatataccaccacccgcacaccgacggcgccaacacacaacccgggagaaggctagcaccggaccggccaccgctaagcgtgaccgaccgctgcttgactaacaaaggaacacagacaagatcgccctctaagggatgccaaaaacgacgtcttcaagaagagaagcgacggaaaaaaccgccgccgccgtccgtcggggttcaaagaagccgagactag

SEQ ID NO: 223 - DNA, 267 bp, Oryza sativa
  Clone ID: PAT_MRT4530_100202C.1
gccggttctatccgatccgatcacgacgggagaatcaaccgggatcgcaatggcgtcgaggagagccgcggcggcggcggcgctgctgctggtcgcggcggcggtggcggcagcggcggcgggcgctggcgcggagggggaggagacgaccgctaacgccggctagctggactgctgtcgccactgcaggaaaaaccaatgaacaacgctgcgagcagtgtcccactggcccgactggacgaactcctgttcccaggcctctacgca

SEQ ID NO: 224 - DNA, 419 bp, Oryza sativa
  unsure (1)..(419): unsure at all n locations
  Clone ID: PAT_MRT4530_100203C.1
aggaacagcttatgccatgattacgccaagctcgaaattancccntcnctaaagggaacaaaagctggggccccaccgcggggcggccgctctacaacatagtggatcccccgggctgcaggaattcggcaccagctcaaaactgccaaatatgctagccaatgtgacgattggcgcgacgggaattcctgcggctgcagtttctgagaaaggcaaaaagcgcgactggcaagggcgatttgtgatttgaacataacaagacgatgaagatgacccgacgtctagtaacagtcttgggaagttgggcagtattcgcatggagtaaatagccagagtatctaggacagtcacccccatggctcgcggtattcgcatcgttgtttcaagtaacatagcttgagaaaaaaaaaaaaaaaaaa

SEQ ID NO: 225 - DNA, 2283 bp, Oryza sativa
  Clone ID: PAT_MRT4530_100204C.1
atggcgactacctatctggttgtggaggttataagcgctgatataccctcaagcagcaatacctcccagaccaactattccgtggagcttcatttcaacagtcaaagtaagagtacgaccatcaaggaaaatgttgctgtatggaatgagaggttctcttttgatatgagacagcgagaggatccttctggtaacctcattcttgaagctgctgtctactgcttcgatcagatgagcaactccaagtcattgcttggcaaggtcttgctacctgaaaaatattttcaccgccattcagctaacgtagatccgatgcaatatacattggataatacagagggcgtcaatgcaaaagtgctacttaagttgttccttactgatgctgttgataggattctgcttgaaactgaggatcgtcatactcatcaaactgagggcaatgggttaaatggcatttacaactacttgtttcaaacaaattatggttatggcaaagatcaacatgatgatccggttgtcctggagactgccggttttgatctgatggagatcaacccaaatttcgagcctggcaggttgtttgagcgaatgcagcttctctttgtgcgtgtaataaaggctcgcaagctgccggacatggatgccaatggcagccttgatccctatgtcgaggtcaaatttggtgcttacaacaggggtgtcaccagatgctttaagaggaacaagaacccagagtggaacgagacttttgctttctccttccagcatgacaagattcccagccccactgtggatatcgtagtcaacgataaggatctggtcagagatgactttgtagggaagctacacttggatctcaagaacattccaaaaaggtctctggatgatgtcccactggaaccaacatggtacccactcctcgaccaggacgggacaaaattagcacaggccagcttgctgctcgcgatttggatagggtcacaggctgatgaagcatatcgtcatgtaggtttatcagggtatatacccaaagtgtatgagaacccaaacctatggtgcttgcgggtcacagtagttgaggtccaggagccattctttgaggatgaccttgagctacatgtgattgttgcaaatcccggtaaagatgaggttgtcatcggccaacagactgtaccattgtcttctatagtaaaaggaggcgatgaacacgaccactttgatgtcatgcccagcaagtggtttgatcttaaaaaccctgataagccacagttcgacagttctgtggatgatggcaatgacaacagtagccgcatgcgaatttgcctaaagaacatgctggatggtagatatcgtatcgtgcatgattctaaaggctatatggatgacactagacccgctgacaggaaactctggagacccccagttggtagggttcatcttgggatattgcgcgctaccggcctcccacttagaatgggcaaatcaacagtgaatccgtattgtgttgcaaagtatggtgataagtgggtacggacccgcacaatcctcgatggccctgaacatgtattcaatgaacagcatacgtggagcgtctatgacattgcgaccgtactgactgcgggtgtttttgaccatttcccacacacgcgtaaagcccatcgagagattggcaaggtacagattcatttatcttgccttgagactgatcgagtatatgcacactcctaccctcttatcattctgaatcgccgtgggttcaagaaagccggtgagctgcagatagctgtgaagttgtcatcagaatcttttatcagcctattaggcatgtacgcacggtccactctgcccaagatgcactatgaacaccccctgacagtaatggaagaagataagtttcgttcagaggtagctgaggtgatggcccttcgattcagccgggtggagccgcccctaaggagtgagattgttgcatacatgtgcaacgccaccggaggcaccagctgctggagcagtgtacatccagatgagattgatgaggagtttgatagtgtcgaatcaagttgtagtattgacctgaaggttcttgtgggaatcgcaggattttacataatgaggcacccaaggtttcggaagaagaataatacaccatcgatcgttgagaatttctttcgtcgattgccagacaagcaagtttgtagagctacttccttggtccttgtatcgtggatgtgcccgtgcttgtgcgagtacttagcttcgattgtttgtggtctgaacatttaa

SEQ ID NO: 226 - DNA, 162 bp, Oryza sativa
  Clone ID: PAT_MRT4530_100205C.1
atggggccaccagaattgttgaggttagcaaagaagaaggcaactacagtagcaagatcaacgttgtcatcgctgaggaggaagaaaagagaagaagcaggaggagggggacgaggcttgggtaccgacgacaggtatgtcatccgcaccatcctcaactga

SEQ ID NO: 227 - DNA, 140 bp, Oryza sativa
  Clone ID: PAT_MRT4530_100206C.1
gaaaaagggattattgcgtcagcggactcggctcatggtggaccgggtgcacggcggcggttcacggaaacgaacggccgagatcgatctatccaaaacggacagccaagatctaacggtctacgaccggtctacgaccg

SEQ ID NO: 228 - DNA, 457 bp, Oryza sativa
  Clone ID: PAT_MRT4530_100207C.1
cctgtttttcggccaagccccaaccatctgggaacagggtgactttaagaacgccatacggtacaaagggcttgctgcccagagccgcttcctggtgccagtcatgctcagggagtgcggcaaggcggtgcttcgtgggatcgactcgttggtcgacgttggcggtgggcatggtggcgcctgcaccgacatcgccgctgtcttcccgcacctcaagtgcagcgtgcttgacctcccgcacgtcgtcggcggggctccatccgatggcaacgtgcagttcgtcgcaggcgacatgtttcagagtattccggcagcaaccgctgttttcctcaagacgggtttacatgactggggtgacgatgagtgtatcaaaatattgaagaatcgcaggcaagccatattttcatgcgatgaaaggggggaggtaataattatggacatgggagctggatttgat

SEQ ID NO: 229 - DNA, 252 bp, Oryza sativa
  Clone ID: PAT_MRT4530_100208C.1
atgccctcggtttacgatgatgtcctgatggtttatgcaaacaactccaaccagcaccagcaccaggatatcctaccggacaatatggacgacaagctgggaatcagcccatacacccaaaaagatagattatatgtcgaggacgacaagggttacgccaagcatggactcagcccatacactaccagctgctgcctacgccaagaagatgagagtttacgctgcaaaaggcaagcaagggctgcaacatga

SEQ ID NO: 230 - DNA, 357 bp, Oryza sativa
  Clone ID: PAT_MRT4530_100209C.1
atggcggttcggctcggcggcgtgacgtcgcagctgacgttggtgatagatccttcgcgtcgacggcaagacaacggcagcggcgcaaagctgcgggcgacggcagcacaaagccacggcgacggtggcggcggggaattgaaaaggatattttatggactatgggaatatttaggtggagatccaaaggaaagatcaaaggggaagtatttgatggaagataaaaatggatttggtggtagtatggtaagctctagagagattgatattttatgtgctcaagagatggttgaatgggaattgaaagggtattggttcgaggtgttcgggaatggattccaaggaaatataatttag

SEQ ID NO: 231 - DNA, 318 bp, Oryza sativa
  Clone ID: PAT_MRT4530_10020C.1
cttcctccactcatcctcttcactcctttcccgatcccctctcctcctctcaatcccctccccttacctattggtggcaggaggtggcaggcggcggtcgggcgggtggaggggaggacggtggcaggcggcggcccggaggggttgtcgcggcactgacgagcgggctgatgcagcgctgaagacgacgatgtgaggacttgtttttgtgatgtcgttgtagatgtgtggtgctgctgtggatgattaattttgtgaagtatgtgaatttgtgatatcaatgatctgtgaatttgtgttgtcaaaaaaaaaaaaaaa

SEQ ID NO: 232 - DNA, 603 bp, Oryza sativa
  Clone ID: PAT_MRT4530_100210C.1
atgtcgacccatgtcctgctctcattgttgaacactcgattgttccgttccttccaaattgtccaagcaatcagagtcgctattgtgtcgaatccccgacgatgtggtttgtggaccttctcccttgcgctgcataaccaggtatggaaggatgcttcgtttattggcaggcaatcctgcagccttatcgcgcgcagcgcccaccaccaagttgccttgattctggacaagcgaccaagatgtgatcgatggtttcttcgtgttggtcacaaagcacgcatcacagaggatgtgggagcccgcggctgcggaggcgatcggcagtccaacatctattcagcgctaccaaccaaaggaagtatcggcagcgtggtggtgcgagggaattccatatcggtgccgattggaattggatgcgaccaaagaagagggcctgataggctgatttggagtagttgccagaattctcccatctccaaagcagtgtgtccggttctgtggccgttcgatcaaccgcttggattatcgaccagagattcagatattcaaggatggcttgaatgccgaggccacctcggatatctgatatccaggttcggttga

SEQ ID NO: 233 - DNA, 2327 bp, Oryza sativa
  Clone ID: PAT_MRT4530_100211C.1
atgaagcaggagaggcggaggaagcggcagcccgggccgccgcgcctcgagctggtggtagcgcacccgcgggaggaggagatggccgggctcgacggcggcggcgacgccgaggagggggccacgcatgcccgcggcggcggcggcgcgccgccgccgtggcgggagcagctgacggcgcgcgggctggtggcgagcctggccgtgggcgccatgtacagcgtcatcgtgatgaagctgaaccttaccacgggcctcgtccccacgctcaacgtctcagccgcgctcatcgccttcgtcgtcctccgcggctggacgcaggcgctcgcccgcctcggcttcgccgcccgcccgttcacgcggcaggagaacaccgtcgtccagacctgcgccgtcgcctgctacagcatcgcagttggaggccaggaccaccccccattgcatccatcctccattcgtcgtctacctagtctaatggagatcccgactgattggttctttggatctttctgtgcaggtgggtttggttcttacttgcttgggctcaacaagaggacttacgagatggcgggcgaggacacggagggcaacgtgccggggagctacaaggagcccggcattgcgtggatgactggattccttctcgccgtcagcttcgtcggacttctcgctctcgtccctcttaggaaggtcatgataattgactacaaattaacttacccaagtgggactgcaacagctgtgcttataaatggattccacacacctcatggggatgcaatggcaaagcagcaagtaaatggattcaccaaatattttgctatgagtttcttttggagcttcttccagtggttttactctggtggagacaattgtgggttctcgcagtttccaacttttggactaaaagcttggcaacaaacattcttcttcgatttcagtctcacatatgttggggcagggatgatttgctcccaccttgttaatctgtctctcctactcggcgccattctctcatggggagtaatgtggccactgatcagtgatttgaaaggggattggtattcagcagatatacctgaaagcagcatgaaaagcctgcaagggtacaaggccttcatctgtgtagctctcatcctaggtgatggcctatacaattttgtgaagatagttgcactcactattaagaatctgtttgatagctcaaaactgaagaatgcaaagaagggggaagacatgccagtgctcgatgaacttcatcgtaatgaagtttttacaacagacaatattccttcctggctagccttctctggttatcttggattaacttttattgcagtaattgccattcccatgatgttccatgagatgaagtggtattatgttgtcatagcatacttattggcgcctgcccttggtttctgcaatgcctatggagcaggcctaactgacatcaatatggcctacaattatggaaagattgccctcttcattcttgcagcctgggctgggaaagactctggtgtagttgctggcctagtaggctgtggtttggtgaaatcgctggtgtccatatctgctgatctgatgcatgatttcaagacgggacatctaacattaacatcaccgagatcgatgattattgctcaggccattggaactgtcatgggttgtgtaatttcaccactaactttcttcttgttctacagtgcctttgacattggcaacccagaagggtactggaaagcaccatatgctctagtctaccgaaacatggcgattcttggtgttgagggcttctctgctctgccccagcattgcttgcagctctgctatgggttttttggctttgcagtggcagctaaccttacgagggacctttgcccaccgaagtatgggagatgggttcccctaccgatggcaatgggggttcctttcctggttggtgcaagctttgccatcgacatgtgtatcgggagcctgatagtcttcacctggcatataattgacaaaagcaaagcagcactaatggtgccagcagttgcatctggtttgatatgcggggatggtctttggatcttccctgcgtccttgcttgctttggccaagatcagcccaccaatgtgcatggcatttaggtctacaaactagaggagtagcagggattataattacatggcagttccatctactacaggaaagatgcagcaatgcaataatgaagtattatatgggattcctggaggtacctgtgcagtaaatattggaaaggtaccaaacattgttaccatttccatgtcaatgaagtaagacaacagattcaagat

SEQ ID NO: 234 - DNA, 2674 bp, Oryza sativa
  Clone ID: PAT_MRT4530_100212C.1
atcgcgaagcgtaagctactcaaggccgcgacggagcatgcggtgaagaaccatgacgggaccactgtcgacgcggaggcgagacgagagaatcacggtcataccgcgtacgccgccgaagaggctgcgggctctgaggagagtgtcgagcgcgagggaggaggcgatggcggcgccgagggggaggagggccgggacgctgcagccgagggaggtgaggagggcaaggaagaggaggaggaggcggacagaggtgaggagcgtggcttggaagaggaactgaagagggcttcgagggagaagggtttcgtgaaaggcacaccgaaccaggcagtgtccatctcgctcatcctggaagggactgatgtggacgcaaaggccaagactggcaccctaaagtgctttgctttccttcttaaggctgtgcctgagctatttaagtagactgccgaagggcgtatccgaaaatctgctccaaatgttttcatccttgtgccaactcgcgagttatgccagcaggttcataatgaggcatcatctctccttgaattctgtacatccaaattgaaggttgtgcaagtgaatgcgagcatgtcagacaaagatattaaagttgcattgtctggcccccctaatatacttgttacaactcctgcttgtgttgcatcatgcatatcaaagggcattatccgtggatcatctatcaaagaatcactatcaatgatgattctagacgagatatcatgtgatgctaaggataagatgctttatatccttgtactcctgaagttggagcttattcagaagaaagttctcatatttgtaaactcaattgactcggcattcaaattaaggctgtttctggagaagtttgggataagatcttcagtgctaaatgctgaattaccacaaaattcacgcctccatatcattcaggcattcaatgctaggctatttgattatctgatagcaacggatgacaataagtctaaagaggagaggcaagccaataagggaaacaaaaaggattctagggtgtcacgcaagcagttgcagcaaactttagatgctgaattcggtgttgtcagaggaattgacttcaaaaatgtattcacgttcccattcgaccttttgtttctgaaacaggtagttaattatgacatgcctccagatcctgctgggtatgttcacagagtaggaaggacagggagagcaaataaaactggtgcatccatatcgcttgtttcaccaaaggagaatggcatttttgaagatattgaaaatatgttgaaagatgttgaaaatagagacaccagttgcatttcacctttcccattacttacaaaaaatgccgttgagtctttacgctatagagctcaggatgttgccaggagtgtgacaacccgtgatataaaagaagcacgtcgccaagacataaagaatgaaatcctcaactctgagaagttgaaggctcattttgatgagaatccgagagaccttgatttgctcaaacatgataagttattgagcaacaaggaaatccctgcacacctacgtgatgtccctgagtaccttattgatcccacaacaaaagaagcaagcaatgtagtcaaactttcaagggctgctatggatatcgataagccacggaggaggaaaagaatgggattcaagggaggatctggcagaagtagtgatccccttaagactttctctgctgagttgcaaatggatgcatttttccagctacatatgaggtcctatggaaacatggcagtgcttaaatgcagtggtttagtgaaatatgcaaatggaagtgctgttcgttgttccttgaaagcgtactatttgtggggaaatcacggaggcgagggaggaaggaaagagacggagaacaggatagaagaaagaggaagaaggtggaaagctaatcttttgtgaagcgttcactgccaagtgcgcacagttttgtaggtttctggtatctcgtcctgtaactttgtagcatctccagatatagggggataacaatgtcaagctttactgaatgctgcgtgtgctatgctatgcacaccattatatagacagacgagtagagagtttgtttagtttcagttcttctagaggacgtgcatattgccattcctctatttattcgaggaatatcagcagaaaactatgtttcaagatttttgttgtataaaaaattgcataaaaaggtgatgttttcaggttaagacggctcaagtaaactctagagagaacactgaagctttgtttcgatagaatctgctcaatatcaaagctaagctcagggttgacagttgcgagtttcatcgacaaaaactcaacttgacgttgtagtgactgtacataattgattatctcatcaagcatgactgccttaccagtgatcttactgcagcctgggacaagatcttgaagcagcttcatcctctcgcttatcttttttctcctcagtctttctgcaaggctgtggctattagtggcttggcctcgctttgcccggacatgaacataatcttctttagtaccatcaccatcagaagaatcttccttgctttgcattttggagcaactcttttggttgtcctcctccattgatatcctctcttgctgagatgaaacctctgttgcttgctctactttagta

SEQ ID NO: 235 - DNA, 1628 bp, Oryza sativa
  Clone ID: PAT_MRT4530_100213C.1
tggcacgaggccccgagaaaaccctaaaccccccaaccctcgccgccggcaaccgccgccgccatgttcggcaccccggcttcgtcgcccctatttgggaccccctccaccaccccggcattcggcgccccttcctccacccctgcattcggcacgccctccaccaaccccgccttcggcaccccttcctccacgccggcgttcggcgcgccgtcgtccaccccgtccttcggcaccccctccaccgcgcccgcgttcgggaccccgtcctcgaccccggcgttcggcgcgccctcctcgacccctgccttcggggcgcccttctcgaccccggcgttcggcgtggcgccgtcgccgtcgccatcgccgttttgggttccagcagcagatgacgccgtccccgtcgccgttcgggttcgccggtgggggcggcgggcagatcaccacccagatggcccccgtcgcgccgctcccgctctcgccctccgaccgtgacatccaggctatcgtggatgcgtacaaggaggatcctggaaaccctcgttatgctttcaggcatctgttgtttagtgttacagagccttcacaacgggtgaagccagttgcggcatctgatatcatgtgggcagaagctatggggaagcttgagggcatggatagttcggatagggagaggctgtggcctcaactcgtgcagggatttaaggatctttcctaccggcttaagcttcagatggagttcttgtctcagattctgatagattgagcatgacacgcgacaatgttaaaaagttgcaaagacatttccaagctgacacatacccatggatccaacggctgaagcagcaagagtttggttatttgagagacgcctcttaaggataatgagaatagtggaggcattagagaatcggggttatcggattccactaacgaaggaggaagctgatctgtatgaacgactggctgttatagcaaagcagctaaaaggacccactggtgatctgcacaggagagtttataatcttctttcaacttctcgccttcttgctagtgctggtggcactgctggtcctatctatattcctagctcagcgaaagttgacgaacagagtgttgctgagcttcttgaggccttacaacaacagacggaagctgttgccaagttgggcaatgtgatgaaaagagatacaagagacttggaaataatactttcggaagacacggacatggcagaagacagtgttgggagaagggcattgaagatgtataactaaaccaaattcttcattcaatgcattgacataagcaggagatccttctttggtcaagggtttagagtgtcggaaagatggcagccaaacgaacgtttgaccttaaacgtctaccgttgcaaacgactaaacgagaatttgttctgtttggaagggccatagtggaattggcggtttgtgttttggtgacggcaaaaacaagtcaccagtgtgacaaaatctgatgttggctgtggcagttgtgtaaaccacagccacctgctaagccctcttaaattcgtgagttagtcagagatcgattgcctgcatgtaacacttgtataatgacattttagattatttagatgagcgtcc

SEQ ID NO: 236 - DNA, 208 bp, Oryza sativa
  Clone ID: PAT_MRT4530_100214C.1
ggatcaaagctaacaattctaagaccctcaggtttttatctatacaagaaaacatcctttccctcaccaatttatcacttaataacaacatcaccacatttccaaagcactttttccaacatacatacatatacatgatgcaaatctaaagttctaaactacacttttaaaagagaatgtcggattcaaaccaacagctgtacattca

SEQ ID NO: 237 - DNA, 116 bp, Oryza sativa
  Clone ID: PAT_MRT4530_100216C.1
tttgtatctaatcatgtaaggacacaacttacgaggtgtttaatatccctagcgttatgtttatctcgatcactctagatgggaaaatcccaagcttttaagtgcacatgtggagc

SEQ ID NO: 238 - DNA, 499 bp, Oryza sativa
  Clone ID: PAT_MRT4530_100217C.1
tgatcactgttcactttattaaagtgtggggctttttttgaacatctcagttttgtataaggatcctctacatcttacctatccagtgtttaaattcagagtgtggtgcaataatgagaactaataatgtttgaggtatatagtgtgtgcaagatgattgagtgaaacaaattttgtggagcaggcttttgttcccctgtttcaaaaggtagggcttattgtattcttgctgagccattaaattagtcaacttagatttatttaatcaataagttcttacataaatggagagacatataattggcgacaatttgttaaaaatatattgagaaaatttgttcaaaaaaaatcgattggttggtggcttcaagttgagtatagcttctaaatatctagtgaataaaagtaggaaaagtgcaaatgaaatagttgaaaaggactgtgtgaccgaacatgcgtgtctgaaatgtttcttcatcattcgtgaactcctattttg

SEQ ID NO: 239 - DNA, 2427 bp, Oryza sativa
  Clone ID: PAT_MRT4530_100218C.1
atgatttgctatattttgatgaattgcttttgaacattctttgaaaaaagaatttcttttggagcaaaccagcaggggcttagagaaggcttcggaggaatggaatgaacttgttcctcttaagaaagtaactcaaaagagaattctgtaagttcatcttcatcgccaatagaaagttcaggaccttttgtgtactacccaactccacctgccaccaaggatgatacaggactatgtgaggcattctaccactcggtaaaggatgaggcagatggttctgtagaatacaccattcacgtgaaccacttgtgtgacacagcatcagccttcgctgaaacaatgttgacagatagaatgaatattcaagaagacgggagaaatcaggaaaatggtgctaaatagcgaaaaatgtacaaattctaagaagcggtaaaggtaagggcatagtgaggcattatagacctcgttaaactttttgagtcagttatcgaagctagctgccgttctggagaactgtttgaatggaaagctcacaaagagcaaagcaggaaaggtcacaaattcatgcaacttgaacttaaccaggttagaaaagaaactccgcgctataaagaacaagaagaagttgctgtaatgaatagatctcaagtaatcattaaaaggacctagttccgaagcggaagctgcggagtaagaaatatttcttcccacgtaatgggctctcatttttccagaaaaactcgggcataaacatagcagaagatagcgcaagcccacggtcttggacagtttgatgtctctacagttactgccataagttaaattgaatgttctagaaattgggatgctaacttaagttttgatctaatttcttggtgaaaacagccgaagggcgtatagtggtatgtttataccttatttatggaatgctttagatatattcagaaaacagatgtgcattcctttgagtgtagctatgttctgtaatctcctcaagctggaaaggatctgactagtggcatatttctgttgggtaaaatagcgcatgctgcaaatcatgaagcagaagaacgtagaattggtgcagcattggagaaggaggaagattgcgttgcttgggatagagagttgcaacaggcacaagaggagcttcagcaactcaacaataagcttctgtccaaaagtgatgtgaagcagaatctagatacaaatttacgcaggctgcgtagcctcaagtcagagctggcaacttatgtacaaaatgtaattagtgaagaagctgaaggacttgtgaaagaacatgggcctgatgatgctcaacaaattagtggtccagttaaggaagctctagcttcagcacagaaggagcttgaagaggttagagcaaacatagaaaaggcaaaaaatgaggccaaattgttcaaacttgcagccacaaccctcagatcagaaatggacaatgagaaatcttcacttgttgaattgcagcagagggaaggtatggcatctattgcaatctgtgcactagaagctgagctcaataggacgaaacaagagatagaatatgtaaagtctaaagaagaagatgctcaagagaggatggtagaacttcctaggatcttgcaggaggcagctcaggaggctgaggacgcgaagatggtagctttctcagtacaagagcaggtgaggaaggcaagggaagaaaccgagaaaaccaaaacagctgcagccacagtaaataccaggttaagtgctgttctgaaagaaatagatgcatccaaagcatccaagaagctagcgtttgcggcggttcaagcattgcaagaaagtgaagaggcaggagatgatgagaattctcccagaggagtgacacttcctctgagcgagtattacacccttagcaagaaagtgcatgaagctgaacagctggcacatgagagtgtcacagaagcactggcacaggtggagtcggcaaaggcgtctgaatcaaatagcctagagagactatgtgaagcatccaagaggatgaatgagaagaaggaagctcttgaaagagcattagagagagctgagagagcaaaccaagggaaactaactgctgagcaggaactgaggaaatggagagctgatcatgagcagcgcaggaaagctcaagaagccgcgaaacgggcagttaaccctttgagtagctcacctaagagaattgttgaacagaaggattctttctacaaagagttctcaggtaatagttatgaggaccttgttccgaatcggaagctgcggaggaagaaatctttcttcccactaatgggctctcttttatccagaaagactcgggcataaacatagcagaagataacaaggtcccaggtcttgggcagttttatttctgtacattgctgtaataagttaatttaattggtcttg

SEQ ID NO: 240 - DNA, 352 bp, Oryza sativa
  unsure (1)..(352): unsure at all n locations
  Clone ID: PAT_MRT4530_100219C.1
gcagaggaggaggagtaggttgggagaggaggagaggcattgccnatgggctcggtggcggacgatgcggagatcaccggcccgctccttgtngttnncgccggggttngnancaagcccncgcggcggcgggnggtggagagggtgccgcnttgagggagcatntgacgctgcgggggatcgtggtgagcgcggtgctgggcgtgctgttctncctcatcacgaacaagttgaacctcacggtggggtgatcccntcgtnaacgtctctncgggcttctcggganttcctggtgcggtcgtgacgcgttctcggaagctaggtcgnaangcgcctcacaanagagacacgt

SEQ ID NO: 241 - DNA, 272 bp, Oryza sativa
  unsure (1)..(272): unsure at all n locations
  Clone ID: PAT_MRT4530_10021C.1
gggtgtgtccctgtctcccctctccttcctcctctcctttcccctcctctcttcccccctctcacaagagagagagcgccagactctccccaggattcagccatgaagggggcaaatccaagggcgcgcaagnccgacgcaagttgntgtaagagtaaggcgngagaagccgcgcaaggaggaaggggaggcggaagacccacaagcaaaggtcctcgtttcttcgtttatgngggtcgaagagtaagggagacccaagataatttcgtctt

SEQ ID NO: 242 - DNA, 292 bp, Oryza sativa
  Clone ID: PAT_MRT4530_100220C.1
caataaaaacactcaggttagaggatttatgcaaaccctgtaactgttccctttcatatacaggccgatcgcatcatgtagcttattgcgaaggccatgtcactaccgaacaaaatatagaaggtcaatcattccaatactgtacccaacacaaacagttttgtttgagggtcctaacttccttagcatatgaacactcacggacatcaacataccttgtctgtgtcgttactacagcctaatacgaatgcgttcacctactcagactacccatacggtccaacgaccagat

SEQ ID NO: 243 - DNA, 207 bp, Oryza sativa
  Clone ID: PAT_MRT4530_100221C.1
atggcgaccgtgacgcagggaggcctcgaggatcaatatgtagagatgttgcggcgtcacctgcgctcctgcagtggcgtttgtgctaccgacggaggcgctctggcgaggcggtatgagaggaacagggtcgagactaccctaaggacaaccccgaagaaaagacgggaaaaacccatcgaggtgaagccccatgagtccaactag

SEQ ID NO: 244 - DNA, 1615 bp, Oryza sativa
  Clone ID: PAT_MRT4530_100222C.1
ggcgccggcgccggcgtcgtgccacgggcctgcttcctcccatacctcctctcgccgaccccttttcccatctccatcctcctttctcccatccgctgtcgcgcctactcgtggctgagctgctgcacctcctccttccagtcccacgcccggaactcccgtctctcccccgccgccaccgttgcctcctcctgcgcgggcggccgccgccgccgcctgccgcggacggcccctaccgcctcccggcatgggccgcctcccgcgctcgagtccccgccgccatttcctcttccacccctctccccctacctctccaccttcccggcgaacaccaccctctcccccatccatggccttgcgcgctcaccgccctccccctcccctgtgcgcctccacaaatcccgctttctcctcctccgcatgctccatatttaaatcccccacgccctccatccagagccgccacttccccccccccccccccccccaaaaccaaaatcgccaccggggctggtccccccgccgccgccgccgccgcccgcgccagttccgccaccgcccacccccgccttcagatccgggcgggccgaggcccgccgctgccgaccatgttcgtcgcccgccccagttccgtcgccacccgcgtcgtcgtcggccgctcccgccgccgccaaccccggttccgccgccgcccgcccccgcctccagatccgggtggcccgaggcccaccgccaccggattcgggcggggggaggcccgccgccgccgaccacgtcaccgaccgctctcgccgccagatccaggtgggaggatgcccaccgcctgcgtcgccgccgaccgctcctgccgccgtcgtggaaggccagaggtcgccgacgccgcgcgcccactcaccagatccgccgcccccgctgcgcgccggtcatcgccgtagccgcagccgctccctagggcggcggatccggccctcccgaaggcggcgccgccaaatccgccgcgcgccgacgccatcgccgcccccatcgccacctcctacgcgctcatcacccaccacctcctcacctcctacgcccgttgcacgctccccgatgactccctccgtgccttactcgatctccccgcgccacccacccggccacgtggtcctcctcctcacagaatggcctccccactgccgcgttcgacgcctcccgccctcatccctgcttcgcccccgccactacccttgccgccgtgtgactgcaactccggtcgtggttcccccgcccgtccctgtcgcgcctcctcctccgcctccgccatgcgatcttcccccggagatggagtcgctgccgccaccattaaccggtccttcaccaccttcaccgacaccaagccgaccccgacgccgttcccccacttcggggccaccggggtcgggccggaccggtaccctggttgcgcgcacgggggagccccccttcttcaatccgtcctcgtctcgtcgtcacgccagtggagccgccgctcgctgtcccggcctccgccacacctttatcgccgttccccatggctctcctagctgtacactccctaccagggtgccttattgccaggcctgtgcccaccgggtgg

SEQ ID NO: 245 - DNA, 370 bp, Oryza sativa
  Clone ID: PAT_MRT4530_100223C.1
gcccgaggcctcaagaacatcaggtgagaagagctcggcgccttcactactagatgctaacaacatgcctagcgaggattatggaacgagttcgaatgcgagacctcagagtaatgtaaccgagaactagtatcggggtagagtaccatatcacaccacaagtgtgacactagcaggtgatgctgttcgatatccgtactaactacaggttacaaactacttaatatgcctactgtcagcaactacagctgcagcaagtcggtgttgtctactttgatcagactcaaactcaagctcaagctttgctggccttaaaacttgccatccatatgtggtatctatcctaactactacatttgctccgaggagc

SEQ ID NO: 246 - DNA, 651 bp, Oryza sativa
  Clone ID: PAT_MRT4530_100224C.1
atggcaattaaggaccggttcacgggaaaccctgggagacttaccgtgcttaccacaagcgggagtggcctcctttggatatatcctgcatcatacctcctcttctggtatgacttgctgagtacagtggatagtactcagccttgctctcttttcccccacaccagagctgaagatcttcctagttggagctgtcttattgagttaattacgtcggtaatacttcaatgtgtggcggaggccgggacggcgagcggcggcttcaccggcgtgacgacgagacgaggacggattgaagaagggcggctcccgtgcgcgcagccagggtaccggtccggccagaccccagtggcgcgggagtggaggaacggcgtcggcgtcggcttggtgtcggtggaggtggtggaggagcggttgatggtggcggcagcgactccatctccaagggaagatctcatggctcgccgggcagtgtcaccactgcagtccaaccgtggtaggcgcagtactgcaccccctgcacaaggatccggcgaggttcttcggcaaccggaggcggaggaggaggcgcaacagggacgggcgggggaaccacaaccggagttgcggtcacacggcggcgagggtagtagcagcggccaccaaccctag

SEQ ID NO: 247 - DNA, 764 bp, Oryza sativa
  Clone ID: PAT_MRT4530_100225C.1
ctagctgacaagctggaacacaagggtgcgatagacacttgagagaaggtcgaacgaactccaattgtagagctcatggcggtgaactgggagatgcttcatcacttttgatctaacagaaaagtgaatagaagaatcaacagagaaggtacgatgcctacctttcattggatcatggatgccgttctcggcctccctcgccatcagcacccacgccggctccgctatcttcttcgtcgaccgatgaggagcacacaccggggatcccgcggaggcagggctagggttggtggccgccgccactaccctcgccgccgtgtgacgaagcacctcgccggatccttgtgcagggggtgcagtactgtgcctaccacggatggactgcagtggtgacactgcccggcgagccatgcgatcttcccccggagatggagtcgctgccgccaccatcaaccgctcctccaccacctccaccgacaccaagccgacgccaacgccaacgccgttcccccactcccgcgccactggggtctggccggaccggtaccctggctgcgcgcacgggggagccgcccttcttcaatccgtcctcgtctcgtcgtcacgccgatgaagccgccgctcgccgtcccggcctccgccacaccttcattgccgttccccatggctttcctagccgtacactccctaacagggtgccggggaatggcgtccgggcacggccggcttccgactccgacaaggatcgggagccgtcggcctaa

SEQ ID NO: 248 - DNA, 597 bp, Oryza sativa
  Clone ID: PAT_MRT4530_100226C.1
atgtcttcctcttcctcacgtgatgagatcacctccagcatcaagcttgcatccagggtgcgcagatccagggctcatgttggtggagacaacgaggtggctgtggtaggagacagcggcggataccgcacagtaccgaagcaggaggacgaggccgaggttgtggacactgaagcagagcgtgaggtccacagctgggaacagggagttgttgacgtggaagtaggcgatgcggagcttggccacagaggtgatgggcgcggaagtgttgaagaggaaggcgaggctggtgtggagcgcgaggaagaggagctggaacatgaagaggggagaacgcgtggaggtaagggcacagcacgggtggaggcggacgaggactggggcgaaaatgagcattggtggcgcgtaggcgctaggctgtatggcgggaggagaggccggccgaggtccgtcgagggcttcttgccgtatgccaccaatccggacaccattgccagagttgcgagtgtgagacaagattgggagtggccgatccgggcaccatcaccgtgctggaaggggagagagacatatgagggagagaagagcgaaggatga

SEQ ID NO: 249 - DNA, 381 bp, Oryza sativa
  Clone ID: PAT_MRT4530_100227C.1
atggtggacgaagcaggcaggaggggcggcgggcgaagcacgttggggcggtggacaagcgcgacaggcgagctcgcggcgggcgaagcaagcatgggcggcaggcgagcgcacagcgggcgaagcaggcagaggcagtggcatcggccgagagcggcggcgggcaaagcaggcaggggcggtggcatcggccgagagcggcggcaggcgaagcaggtaggggcggctgggcgacgaggctgcatcgtgctcaaggtgctcgccggtgtcatccccttgctgccccaacgcctcctcgtcgacattgtcgtgggagaggggggagaggatgccggccgcgctcctccatcatccagctccatgttgtcgtcgtcgtcgtag

SEQ ID NO: 250 - DNA, 969 bp, Oryza sativa
  Clone ID: PAT_MRT4530_100228C.1
ctagatccactcgagcttccggatccctccatcttcgtggccgtcgtcgctgctgccgccaccgcccgccgccgccgtcgccgtcgcagccgctgctgccgcccgcggcgtgggatgggaaatgattgtgtacgggttgctcgagtcggccaggcccggtcctttcaatttagtggcctcccggaactgaacggagagattgcaaccagttgccggctgctgccgagcacgacgccgtcgcgccctaaacacaagacgacgcagccgccggcacgaccccgtcgacgcgccctccgccggatccaccctgtcggcgtcgcccctcctcatcgtcgagccgccaccgccactcctccgcctcgtcgagccgccgccgaccctcctccttgtcaagccaccaccgctcctcctcttcgtcgagccgccaccatccctcccatgccaccgccgccgcagccactcctccgcctcgtcgagccgccgccgaccgtcctcttcatctagccaccaccgcgcggcagctgttgcacaaggagggcggcgggaggaagttcctcttaggccgccgccgtcgctccctccctccacaagccggcgtcggatggggccccttaactcttgggggctcagggcggtcgccctgctggccctgccccaggacccagcctgcctggccccaaccttagaacagttactggatatcaccaaatcaatccagcccaatgttgggggaaactggatctggtgccccccaacatcagggcggtcggatctggtgcccggatcaagtgcaccaaggtcacggtggccatggaaagcggaagaagcaataggagcggagcttgggaggtggaggagaggattagccaggtgaacatggtgaggccatagctttgtcaatatggctgcctcactgtcatcgtcatcgttgccctccagccggctggagacagagcccgatgccgccat

SEQ ID NO: 251 - DNA, 170 bp, Oryza sativa
  Clone ID: PAT_MRT4530_100229C.1
gatccccgggctgcaggccgtgtcggttagaggcagatcgatcgatccagctgggggtgatttagaattgcttcgtgatgaatgagatatactactccgttttaggttataaaactttctaatattgtccacattcatatagatgttaatgaatctagacacctatatat

SEQ ID NO: 252 - DNA, 538 bp, Oryza sativa
  Clone ID: PAT_MRT4530_10022C.1
tcacccggggtcgccgacaggtggggcccagctgtcgggcccgtcgcccacctcacgcccgcgccgccgcgccaacaaccgctgccgcgcccacgtcggccacgcccgtgcatgcgccgcgtctcccgcacccacttccccctctctcccgcccgcgccctcccccactccccacgtcggcaggagaatcccgcccataccggccacatccgagttccccctccccaatttaagctccgccgccaccccccctctctttttccccatctcgccgaactcactcatgctccccatcgctcccgcgccgtgcacccatccgtcgctgccgctcccgctactccagccaccgctagccgtcgctagactcgccgccgcaccgcaccgtcgccgccgtcgggttcgcgtggccaaggtccacaccgtccacacctcctccgtcgagggcatctcggagctcgtccgcccgccgccgttgtcctcccgtggctttccgtcgacgttcgccgtcgtcctcctccgcgccggccactctcggtga

SEQ ID NO: 253 - DNA, 308 bp, Oryza sativa
  Clone ID: PAT_MRT4530_100230C.1
cgggactccgtccgacggcgcgcatggtgtccgccgcggcggcggcgtcgtcgctccgctgcttccctccctccctcgggaaccgtggccccggggccgcgaccgcgcggggtggcctcgtcaggctctcctcgcggcgggcccggtccacggccggcgtggcggcgccgtcgcgggaggcggagtcggccgtctcgctgggcgacctcacccgcggtgacttacctatccttgaccaggaatttgatggttccaaattaggttactttgacaatggtgcaacttcgcagaaaccattttgtgtaatg

SEQ ID NO: 254 - DNA, 382 bp, Oryza sativa
  Clone ID: PAT_MRT4530_100231C.1
gaaggatatcccaaatagagtcggataaaattacatggctcaagaattacaacccaggaattacattcagaatccaaaaataaaaattacatggaaggtatgatacaaacatattctaaacctctatacagaaattgaaaacacaaacgagactcacatttttacacccgatatttgggggggctattgagcaatatcttgattgacgctactgatatgcgctcaaaaatttttttaaaaaacgggcaacccgctgatggacgggggttctttaacccttaacaattagatctttttttgcatggctttttaagcaattatagttaggatatcacatagcttgtaattttcgtaaattctgtcatattaaaagcatgtacca

SEQ ID NO: 255 - DNA, 444 bp, Oryza sativa
  Clone ID: PAT_MRT4530_100232C.1
ggccgcaaattttttttttttttttttacttttttttttttttttttttttttttttttttttttttttttttttttttttttattttttttttttttttttttttttttaaaaaaaagggggaaccctttttttagggcgggaaacaaaaaaaaccccccccaggggcaatcccgggggggggttaattagacccgcccccaccccaaattcaaaaaaccagaccctgggggcctgcgtttgggaccaattcgagaccccggggaagatcggggggggaaatgaaggggggagggccccggccttttccccccaggggatttgggggctcagggctggccccctggggaagcacacccgcgttagcgtgccaaaaaacgggggagggcggaaatccggggttctccccggacagggggccgccaaaggcgcaacccttggcct

SEQ ID NO: 256 - DNA, 248 bp, Oryza sativa
  Clone ID: PAT_MRT4530_100233C.1
ctcctctcgcctcgtccgcccggcggccacagtgacccggccgatcagcccttgctcctccgatctgtcgcctcgcccttgtccgtgcgtcgcccactcgtgtacgttgttgctgctgctgttgtttgttgttgtgtttttgttgcactgccgctggatcgagacttgtaaaccttagcactttcgccacgccagagcctgttggtatggaataaggtcgatttaattgtttcttgaagaaaagaaaa

SEQ ID NO: 257 - DNA, 636 bp, Oryza sativa
  Clone ID: PAT_MRT4530_100234C.1
atgaagcggcgaaaaaccctaaatcgagcagcgtcgtcgtcttccgatgaacccggattgggcagatggacgtgttaccacggcgaggaggaggaggaggaggagaagccatggctgccaccggccgacaaatcatccgagtccataagggagtacgtcgccgaggcggcgcgacggctacccctcgaggagatcccggagatcgtcgactgcgtcggcgcggtcggatactgctttggcctcgccgaccccgtcaccaacatcatcctcaacgccgtcgcccacctcgccgccggcggagcggaggacctgccgccgccgcccaagaagaggacacgcaggacgtacagccgtggctggggccaggccaggcattacctctacctcgcctcctacgaccttctcctcgccatcgagctcgtccaccatgaccgccgccgctgtcttccccgaccatccttgcttcccgacgatggcaggatgaagatcgcactcaggatcgccgccgtccaagcagaccaccccgcgccggataaactggtgcagaccatgacagcgcagtacccgtctcatttgctctctcctatcatggacaagctgcggggatcggagctgctcaccagtcaccacccatga

SEQ ID NO: 258 - DNA, 612 bp, Oryza sativa
  Clone ID: PAT_MRT4530_100235C.1
atggaggtggccatgaacaagttgtttgtgatgtgcatgtgcagcagcgcacgcgagttggttggggtgatgtgtactgatgctggttgggaggggggagagagcctgggctgggaggggctccgctccgatttggcctttgtagcctttgtgggattgggagccatggaaatttttgttcatggatttctcagcttggtcgatctcctcggcacccggagaggtgagcgagagaagagaagccgatcccctccccttccccgccgtgcattcgtgccggccccgtcggattccggcgccctctccggccactactccgccggagctcggcgaccgccgctcggcgagccacccagcgtggcatcgtcgacacgtacaggatttgcacgatcctcccagttctcccccgtggagcaattcggtggctggtgcggtgaatcggcctcgtcaggtggttccgacgacgagtcgtacggaaccaaggaagattcgctcctgcggcagtgtgattctcacgggtcatgtgcgagtttgggtggctcgcccaacgccccaactcacgggctctgcgtctcggggtcgtggcgagaaatgatggcgatgcctctgtaa

SEQ ID NO: 259 - DNA, 708 bp, Oryza sativa
  Clone ID: PAT_MRT4530_100236C.1
atggaaggacgccacacagaggtcacagctaggagttcaacacttttggatggcagtgccgttggatctgcatgtgaagagggtcctaggatgatgtgcagcaatttcacctcatccttcaaaggtgtggacaagggtcaagatgtgcaaattatagcttgtgatggttggtttggtatagcagttagagttggacagttggtccaaagattgatgagatgcgggcgtgccagtcagtttgatcctgcaactgacaagttatccgtcggattcgatgcaggaagcagccgccgccgccgccacgcacgtagccatcgtcgctgtcggatccaccgcgggaagtcgtcagcaccgtcgtcaccgtcggatccaccgcgggaagccgtctctaccgcctcgggccacgggaagcgaccggcgccgttggtgctgccggatctacccgcaggaagccgccatactaagaggcgccaccaagaggggaggagagggggagagggagtagcagagagggggcggcagaggaggagcggcaccactggtcgggagaggggaagggagggggagaggcaccaccaggaggggtggggaggggtgcggcggaggaggagcgacgccgctggtcgggacaggggaggggaggaggagaggcgccaccggtcggggaggggccgagcggaaggtggagctcacggtcgggtgaaggtg

SEQ ID NO: 260 - DNA, 890 bp, Oryza sativa
  Clone ID: PAT_MRT4530_100237C.1
atggcgtcctcgccgacctccacggcgccacacgaccgcaagctcgatcccgccgcctcgccggcagccaggtggcggacgaggcgggagcaggagagctactcctccaagctgctcgacgcgctgcgcctggtccgcgccgccagcggcagaccatcacccgcgtcgtcgcgcgaggtgcgccacgcggccgaccgcgccctcgccgtggcggcgcgagggcggtcgcggtggagccgcgccatcctcgcctcccgcgcgcgcgcgtgcgcgctccgccgcgtgcgcctcggcgcgccgcccccgccgcccgccgcgcgtccggcgccgcgctcgcggccgccgctggcgagcaaggcgaaggtgctggggcggctagtgcccgggtgccggaagctggcgttcccggcgctcctggcggaggcgtcggactacattgctgcgctggagatgcaggtgcgcgccatggcggcgctcgcgcaggcactccagtccgtggcacccgcgccgccgccgccgccgtcgtcgtcgtgatctcacctcctcatcgtcatccagttcggatttggcctgtgtgtctgtacatgattttttttttttttggggttcgggctagcttggccattgttagtgaattgatgatgaaaatcgaaatgagtttttgggtttagtttggtcaggattatcattaatttttgtttataggtctggtgttatctcgactctgcagtgaaagcaagcaggagatttgagatttttcatacgcttttttgagtatgtatgttggcgatcgatcgatggatcgaatggaatcgcttctgcagtcaagtcatggtcagactgattgagaaatgcttttgcttcttctgacaataaaatgttctattcgc

SEQ ID NO: 261 - DNA, 234 bp, Oryza sativa
  Clone ID: PAT_MRT4530_100238C.1
atggcggtgataggaggtgccgcaggatggcgtggcatgcaagaactcgggaggcggtctacgataagctcaagagcaagcttggcctgccggctgctgcttgtgttcatacaaaaaacaaaggaagaagatgggagagaacatagaagagatcagaaagcaatggatggcgcatggtggctggctttagatgacctggatactactatcgctagtaattggctgtattattag

SEQ ID NO: 262 - DNA, 608 bp, Oryza sativa
  Clone ID: PAT_MRT4530_100239C.1
gcggccacgcgtccgcacagatatgcgaacacacagccgaacttcttgaccgttgttgacacctccactaccagcaccgacgggcgcggcgttgccttcctgctacgactgcgtcgtgctacaaccctaggccctcccggcgacggtggggagcgcccgcgcgatgctgccgcagcagcagcagcagcagaagcagcaggcggcggcgctgatgccgccgtccatagtaaatgaagccgccaacgtcgacacttcaccaccaacaccacccgttcctcgccgccgcgccgccccagcagcagatagagccaatccttactggaaatctgcctcctggctttgatacgagtacatgccgcagtgtatatgttggcaatgttcatgttcaagtcacagaggcacttctccgagaggtttttcagagtactggtttagttgaaggatgcaagcttatacgaaaagagaagtcatcttatggctttgttgactactatgaccgcagatcagctgcattatcaaatgtgacacttaatggaaagcaaaatttttgtgcagcttattaagagttaatttgggcatatgctagtgggcagagggaggacacaaca

SEQ ID NO: 263 - DNA, 726 bp, Oryza sativa
  Clone ID: PAT_MRT4530_10023C.1
ctcgtattgggggtcacttgttcttcttcttttactgaccttgttgaattgaacgcaacaattttcttggtcggaatccaggagggagaggattagagcaaggagcagcgtcctgaggcgtgaaggacccacctttgctgctgttcttggagcttccctgccgaaatggccgtaagttcttgctcgattgactggcctgtttgtgtttcctgggttgcatcgtgcttggatcggttgggtttgctcgaatcgtcttgggcgcttctcctgccatgtgggatttctcggggttgcctctgatttgcagaaatgcttgctttgtcatttctttcttctcggtgcccaatgttaggggttccttaaattgcagtatttttgtttactggtgaggagacaggttgcatcttgtggaatcattttcttgttgcctccttctggggctattttccttgggatctttttaatttcccaagaaaatgtgccaatctgaaaccgaaattgttgccatgtccttttctgctcaattatgtagttatccaatctgccaagatccagcctttctgcattcaaggatgcaatttatgctgcggattcaatgttacaagaatgtcgacatggcatgcttgcagggctgatttgctgagtaatatattaatgcaggaatctcgtgcagagaaaagatctcagcttcgtgaatgtgataattgatacagcttgtttacttgc

SEQ ID NO: 264 - DNA, 282 bp, Oryza sativa
  Clone ID: PAT_MRT4530_100240C.1
atggttgacgatctcctgcagctgcggcgggccgacgttgtgaggcaagtagagggcggcgccaaggtggtctccttcgggactgaccagctggcacatcacgctgcttccgctgctgctctcctgctgctggttctgattcgggctctccatctgaaaaatcgcaagcaagcagcggcggcggcggcggcggctggcgggagaggaggaggctcgagcggccggcggcggaggcggaggcaacaacacaacacgccacaccccacccgcggctatgattag

SEQ ID NO: 265 - DNA, 106 bp, Oryza sativa
  Clone ID: PAT_MRT4530_100241C.1
agctgtttcgaaacccaaagttgtggttgccatggccgctccactagaagagttagtatcctaatagtgtacttatcctacctattaccctgagaccccttatagg

SEQ ID NO: 266 - DNA, 534 bp, Oryza sativa
  Clone ID: PAT_MRT4530_100242C.1
gacggcgaccaacctaagcggcttggcgatcggcggcggcggcggcttggatccgggctagatcctcgtcgagtatctattccctcctccacctcccatttccctagcttctagaaccttctagaacccctgtatttcgtcatcttccacctccaaaaacagcactgttgactggatagttgttcgtggtgaaattcttgttgtttgttgatttggctgctagcacgtttccccaaattcagaaatgaagccatcagaagttaagctcgcgtttctaagtttacctctgatgctccttcccttcactagtcaggaaattattctgtacgattcaaggaacataattttacagaactgtcattatcttagcggtaacaatcttgacgaattctgtgaatgcatttcacattttttattcttgtaaactttggctacaatctacttatgcacgaaaatctgtacctgtaaattcagacttcagagtacaagtattgcagcaatggcaacaccggcagcaagcgccaccaccatgga

SEQ ID NO: 267 - DNA, 606 bp, Oryza sativa
  Clone ID: PAT_MRT4530_100243C.1
atggaaggaaaagccgcagtgacgacgtcgaccgagcacggcgacggcgaggcttcgagaacggcggcccgcaccgtggtgagcggcagcagccgcggcggagcggcgagcagagcgctgtccgtggccgacctcatcctccgcgtcgtggcggtcgtcgccatcgtcgacagcgccatcgccatgggcaccaccaaccagacgctcccgttcttcacgcagttcctccggttcaaggcgcagtacagtgacctcccgaccttaacgttgttcgtggtggcgaattcggctgttactgcgtacctggtgctgtccatcccgctgtccgtcgtgcacatcatcaggagcagggcaagttacagtaggctggtgttgatcttccttgactcggtaatgctggcgctggtggcggcggtcgcgtcggcgtcggcggcgatcgtgtacctggcgcacaagggcaacgtgagggccaactggttcgccgtctgccagcagttcgactcgttctgcgagcgcatctcaggccccctgatcggctccttcgccgccatggccgtgctcctcctccttgtgctcctctccgccgccgcgctggcccgccgctga

SEQ ID NO: 268 - DNA, 1197 bp, Oryza sativa
  Clone ID: PAT_MRT4530_100244C.1
cgggtgccggctcctctcccggagctccaccaccatccctcccaggtagctccgctccagctccacctcgccgctcgccgccccgacctgccggaacagcctcaccacctcctccttgccctcgccgccgccgttcccgtgcaccaccgccaccacctccgccgccgccagcgccccggcgtcctccgccgactgcaccatcttcgccatgaacgacacgtacgccgacacgtcgcgcgcctccgccttcgccgccgactgctcgaacgccatcaggttcagcagcagcggcgccgtccggagctccacccgcagctgcggcagccgcagcttgtcctcgtgcgccagcttcaccgccagcggcaccggccccatcaccgacgcgatgcctgtcaccgccgccgcgccgccgccgcgcggcttcttgaaccgcacccacatccgcttcaggtcgctcgccgacggcacgtcctcccgcccgtagctcgcccgccacttgctctcctccggcaggatggggtacagcagcggcaccagcagcagcagcgggagccgccgcagcagccgcgctccgtcctgcgccgtcccgagcaccgcgccgtcctggatgcgcggcggcggctcccacttggtccgcgccgcgacgatcatcgcgtggagcaggtggaggatgtgggacacgccctccgcgggcggcagcgcgtcgcccaccatgtcgcggcccttctcgccggcgaggtagtagagaaccagcttcacgatcagcaccggcggcgggtggccggtgctcgcgaactccggcaggtccaccagcatcatgatgaactcctcggcgtacatgtcgacgtcctcgctgtagaacgcgcgcgcctccctctccctcgccgcgacggcgcggatgtactcctcccggcgccgagccgccgcgcgtcgccgcggtggagcgggccgacggcgacgaaccgcggcgtgtaggcgtcggcgttggcgtcgcggaggtgcgccgggacgcgggacacccggtggctgctcgccatgatccggtgctgctcgtccgacgccgccgcctcctgcctctgcatcagcccgcgcgccatctgctccacgtgcaccgtgatgccgtcgccgtcaccgttgccgccgccgctgccgcggcgcgccatggctcgccggcgagctatggcgccgtcgaactcc

SEQ ID NO: 269 - DNA, 230 bp, Oryza sativa
  unsure (1)..(230): unsure at all n locations
  Clone ID: PAT_MRT4530_100245C.1
cgtccggatcccggtcgaccagcgtcggcagccggcggcgaagcggtcgtcgaggcgacgaagcgggaccgaccggctcgcgtgaggcagggcgtcaccgagctgagatattcaaccggcggggaggccgcggcggagggggacgtgtgctggaccgacccctacccgtagcccgccggcgacggcgaccgagctcgtngccggcgatggcggngggaccgggcgtccgg

SEQ ID NO: 270 - DNA, 123 bp, Oryza sativa
  unsure (1)..(123): unsure at all n locations
  Clone ID: PAT_MRT4530_100246C.1
tttagtttctgtaacanatacatgacacataaagcttgcagagagaagctcataacacaccaagcacgtactgagcctggattttattctgaaactttaaacagaacnctgnctagtgactca

SEQ ID NO: 271 - DNA, 3054 bp, Oryza sativa
  Clone ID: PAT_MRT4530_100247C.1
tgcaggattcggcacgagggtcatttcgagaggcacgggatttatctccatgtaccttttgaaatttaccttttatgtttccaataaagaaaccacaaaagcctagttcaagtctgtggtcagatgaccagagccttccacgactattgataaatgcaggataaccaggagaatggctagaatgcgctgcttccttttagaggagggagagaccgcagacttgaaagataccttgcaattgctgacatggacattctggaatagaacattgtttctgaatttcttatttatgcttgcattttttttaattactgtttcaggtgcttcatggggcttccttcttctgctctatgtatttgtgcaaatttctcggatattagttgttgttattttgtatccattgttgcgccactttgggtatggtttggacttgaaagaagccacaattcttgtttgggcgggactgcgaggggctgttgctctgtctctatcattatctgttaagcgtgctagtgatgcagttcagacccatctgaaaccagttgacggaacaatgtttgtgttcttcactggtggcatcgtgtttttgacattgatttttaatggttctactacacaatttttgttgcatctacttggaatggacagattagcagcaacaaagcttcgcatattgaattatacaaaatatgaaatgctaaacaaggcattggaggcttttggtgatcttagggatgatgaggaacttggtcctcctgctgattgggttactgtaaagcaaatatatcacatgcttgaatgacttggacgcatgcacctgtgcatcctcatgctgtttctgacagaaatgatcgcatgcataccatgaacttaagggacatccgtgtgcggcttctaaatggtgtcccacgtgtttactggggaatgcttgaagaaggacgaataactcaagccactgcaaatattttaatgagatcggttgatgaagctatggatcttgttcctacccaagaattatgtgactggaagggtttgcggtccaatgtccattttgcaaattactataggttccttcaaatgagcaggttgccacgaaggcttatcacttacttcacagtagaaagactggagtcaggatgttacatctgtgctgcatttctccgtgctcatagaatcgcaagacggcagctacatgactttcttggtgatagtgaggttgcaagaattgttattgatgaaagtaatgctgagggagaggaggctagaaaattcttggaagatgttcgtgttacattccctcaggtgcttcgtgtcctgaagacccgacaagtaacatattcggtattgacccacttgagtgagtatattcaaaatctccagaagactgggttgctggaagaaaaggaaatggcccatctagatgatgctttgcagacagacttgaagaagttcaagaggaatccaccattggtaaaaatgccaagagtcagtgatcttttgaacactcatccgttagttggtgcactgcctgctgcgatgcgtgatcctttattaaatagcacaaaggaaacagtaaaaggacatggcacaatcctttatagagagggctcaaggccaactggtatatggcttgtttccgattggagtagtaaagtggaccagtcagagattaagcagcaggcattcattggatccaattttatcacatggcagcactttgggcctgtatgaggtgctgattggaaaaccttatatctgtgacatgattacagattctgtggtgcactgcttcttcattgaagctgaaaagatagagcaattgcgtcaatcgtgtccttctattgagatttttctgtggcaggaaagtgctctagtcgttgccaggcttttgctccctatgatgtttgagaaaatggcaacacatgagctcagggttctcatcactgaaagatctactatgaacatctacattaagggcgaagaaattgaacttgagcagaatttcattggcatcttactggaaggatttttgaagaccaagaaccaaactttgatcacacctccagggttactgctaccaccaaatgccgacttgaacttatttggtctcgagtcatcagctataaaccgcattgactactgttatacagcacccagctatcaggtggaggctagagcaaggattttgttcgttgagatagggaggcccgaaatagaggcggatctgcaaaggagtgcgtcattgatatctcaaacccttgaactgcctcggacacaaagcaaggagcacagcggtttgctcagctggccggaaagcttcagaaaatccaggggagctcagaatggtgccagcttaactgaaatcagagaccatccagcaagcttctctgcaagagcattgcagctgagcatgtacgggagcatgatcaatgacatgaagtccggtcagggtcagggtcagaggaggcagaggcatcgtcacacgaaagcaagctctaataaagcgcacagctcgtcgtacccaagagtgccttcgaggtcgtccaacacgcagaggcccctgctgtctgtgcagtccgagggtgccaacatgacgacggcaaggcaggctgctgctgctggtgcttctctgccgccggagccggaggaggcaggacggcggcggcggcgacaacgcaaggcaatagaagaggacgaggacaactcgagcgatgagtcggccggggaagaggtgattgtcagagtcgattctcccagcatgctcaccttccgtcagccctccagcgctgctgatcgatgatcaacgtcgcaacccaagtaattgttggaccagccaatggaaatactcctcttatatttaatactaatatttgcaatgcatttgctcatttcattctgttctagcgtatacatatgcatcttatatttgcatgcttggctcgtgcgtttacctctagtacagtaataaagaagaatccctgttcgttccgatgttgagctacatgattatttatatagatatatatttttgagatgatgaaaaaaaaaaaaaaa

SEQ ID NO: 272 - DNA, 163 bp, Oryza sativa
  Clone ID: PAT_MRT4530_100248C.1
tcgtggacccttgggcgagcgctcgcgagcgccaggggcaccccacgtttatgcgcgtcttatataatgcaagaggcgcaccactgacgctccttctttgtctcttccttgttacatatttaaaacttttttatctgctgaaaccgacgcttcttcctacatt

SEQ ID NO: 273 - DNA, 1672 bp, Oryza sativa
  Clone ID: PAT_MRT4530_100249C.1
atggagacctcgccacctcaccgcaaaccacgcctgccgccgccgccgccggagggggatccgactgcgtcggcggtgggggcgagcctggaatccctcccgggggagctcctcgagaacatcgtctcccgcctctccctccgcgacgccgtccgcacctccgcgatctcccgctcctggatccaccggtgggagtccgcccccgacctccgccactactggccccgccgctcgcgccccgacgccatctgcgccgtcctggcgcgctactcccgcagcgtcggccagttctgcacctgggggatccgcgcggacgcgttcccccacatcgacgagtggctccccctcctcgccgccaagggggtccagaccctcaccctctcgttctgggactacagcgatgtcaatgtggagtactacaccctccaccccgccatcttcgcctgcggccagctcaccagcctccacctcgagcgctgcttcctccccaccgcgcccgagggcttcggagggttcccgaatctcaccttgttgagcctcgtctacgttggcctcccggagaatggggagaggaaattggaggccatgatccgcatgtccccgtcgcttgtctcgttggagcttagcaatgttgaggttactgatgacgactttgaggattggataattcaggctccgaatctcgagaggctgactattacttccgatatcgattacggatggcagatccaggatcttccatctatacaagatgctaatatcaatattgaagactactcaattgatcgcgatttcgtcaagcttctcacatctttggcccaagtcggggagctcgagttgtttataccgaaattaaggagtttaactcttcatacaaacttctacaaagcatctagcattttatctacatttggtttactcacgagagctcccaatcttttacatctggaaattgagatcacagatcatgagaatcagagcgatgaagtagatatagattttttaaatgcactgtggaccaacagtctttttgcaaatcttgattttgttagcataaagagtgccacttgctggtcaaatgagatgcgctttattgaatttgttctatccaaagcaagattacttggtgaattttatatttatcatgatgatactggttcatactcgaagcctagagaagaggcaattattgagttagcaaaatataaaagagcatcaccaaaggcaaaagtattcttcagggatatggagagcttcctactcaggttcgagaagctaacccgagtgctattaaaagcacccaaacccacaaaccagatttttgcctccccagcatctatagtggttctgctggccaaaaggatgtggaacgagaagggtgagacaactggaggatacatggctgtactcatgagaatcgagactcagagaagcactctttgcacctttgatccacaggaggttcacatgataatcatggcgtgatatagtggttctgctggccaaaggatgtggaacgagaagggtgagacaactggaggtagaggaatgtagtgattgttaggtctctgttgaggttgaggagtgccttgcgctctcatctgtatcagtactgtatcaagaaacctttttagtgtcgtctcgaaattttcccctttgcattagcacatat

SEQ ID NO: 274 - DNA, 186 bp, Oryza sativa
  unsure (1)..(186): unsure at all n locations
  Clone ID: PAT_MRT4530_10024C.1
cggaatattccacgcaggcagncangccngcatacggaaggggcacacaaagactaaacaggccatgtcacctagtacatgattncctgtgctaataccaaaccgcagacaacttcttgtaaacgatataaacttatgggaggtagctggttagcgtatctaaataagatgcatgctcacggttca

SEQ ID NO: 275 - DNA, 1409 bp, Oryza sativa
  Clone ID: PAT_MRT4530_100250C.1
gacagcttagctagcaggtagctgagagagttccttcgatctcgatctctgcacggcgacgataagataagcaatggcagtctcgtcgccggcgccgtcgtctctgcatgtgccgatggccgctgcggcactattagggatgctgatgatgatgtcgtcggcgccggagatgaaggtggaggcggccggcgggttgtccgtcgggttctacgccgaatcgtgccccaaggcggaggcgatcgtccgggacacggtgaccaaggcgttcgagaaggcgcccggcacgccggccgacctcatccgcctcttcttccacgactgcttcgtccgcggatgtgacgcatcggtgttgctggagtcgacaccagggaacaaggcggagagggacaacaaggcgaacaaccctagcttggatgggtttgacgtcgtcgatgatgccaaggacctcctcgagaaggagtgtccacacaccgtctcttgcgccgacatcctctctctcgtggctcgtgatagcgcctaccttgctggtgggctcgacttcgagatcccaacaggtcgtcgtgatggcttcgtctctaaggaggatgaggtcctctccaacgtccctcacccggagttcggtgccaaagacctcctcaaaaacttcaccgctaaaggttttacggcggaggagatggtgacgctgtcgggggcgcactctatcggcacgtctcactgctcatcgttcacaaaccggctgtacaagtactacggcacgtacggcacggacccgtcgatgccggcggcgtacgcggcggacatgaagagcaagtgcccgccggagacggcggcgcagcaggacgcgacgatggtgcagctcgacgacgtgacgccgttcaagatggacaaccagtactacaggaacgtgctcgccgggaacgtcacgttcgcctccgacgtggccctcctcgacacgccggagacggcggcgctcgtcaggctctacgccgccggcgaccccgcagcctggctcgcccgcttcgccgccgcgctggtcaaggtcagcaagctcgacgtgctcaccggcggcgagggggagatcaggctcaactgctccaggatcaactaattaactcaaattaaattcgcgtgaagtttgtgattctcatatatacaaacactactgccctgttgccatgcatgcatgaggctcatttgatttatttttccttatatgtttgtgcatgattcaatgtactactactactacaacaacttttgtttatttttattttcagtttcattttttaccttttgatgctgagtgtgccaattgggcaaaaataaattgtgcttctgaccatatatatgggtgaatttattcaaggagtaaaatgtgtgctattcatgttttaaaaaaaaaaaaaaaa

SEQ ID NO: 276 - DNA, 672 bp, Oryza sativa
  Clone ID: PAT_MRT4530_100252C.1
ctagccaattaatcccgtgtggttccggtgcaccgcggcttctgagaggagctcggggaggcatgtgtggctgctgttgtggtgccgacggcgaggggcaagttcttgtcgtctccggtgcacgggcacgacaacgaagctcgtgctcctgtgggtgccagaaccgccgagcaaggtgttcgttgcggccacctcgatcgccaatatcaacaagcagctcatcttctccatcgcgtgccaaggttgaagcgcctcgatcggtaggtggatcgctcgctgctgaaggaggatatgatggttgtgacaggccggcatgctggcggccggcaccgacgacgctggtggccacgaaggtagatgtcgactgagcaggctccttgccatcgcccttctccaattaccggctcaccggagcagtaaccacctccgccggcggcgccgacaccgacggcttcgacggggagacaccggcctccacccgtccatcctccgcttccttgtgcgttgccggcgatggagaagacggcggctgcccctgcatctgctgctgctgccgcaggaggcgccggaggtgaggcggggcgtaaaacctatcattggagctgaacacgaagcagcagcaggaggaggaggaggaggagggtgggtcggccattccctcatcgtatggtg

SEQ ID NO: 277 - DNA, 251 bp, Oryza sativa
  Clone ID: PAT_MRT4530_100253C.1
cttaaactctataacgcccccccccttttttttttttttttttttttaaaatctaaatttaaaaagctcgccgcggttttattcaaagccggtttcaccaaccctaaaaaaaaatattttcaacaaaatcccaaattttccattcatcccacccacttacccaattcacaattatcaccaacaaaaatcactcaaaacacttcctaaaataacttaaaaccaccgtcaccttatatacccttcctctttat

SEQ ID NO: 278 - DNA, 588 bp, Oryza sativa
  unsure (1)..(588): unsure at all n locations
  Clone ID: PAT_MRT4530_100254C.1
atggatggacctggcagcctcccctatggcgacgatggcaatggttgcacgtgggctgacctagcttcccccatctatggcggtggcggcgaagttgttgacgacggcatcacagttgttgacgacggcatcacatgcgactttctgctcaagctgctccgggcagggagcatggtgggcgccgacgcggctctgctacacgagctggagtccagggctgccgtggtatctctttgtcgtcttcgtgcactgggatccaagaacagggatgatgatccagatggcgtagcatcaacatctagcttggaagatgaagctgtacataatcattatcaaacaacaaaagcaggatgtatcttcttgaaaacaacgattagagaggatgttagaactgcttgtgtctatgttgaatcattgacaaaggagttagttttcactacaaaggatgtaacgcaactgttggtgaagggaattactgccaatatcatcttgttaatataatgctgatatgtttctcatatgtttgtgctgttgaatattgatcctaatttctaatanagttaaatttgtcacttgtcgctgtcagac

SEQ ID NO: 279 - DNA, 275 bp, Oryza sativa
  Clone ID: PAT_MRT4530_100255C.1
catcaatctaactataccgacattaacattgttcacgccatagtgcagcagctacaactgcagcagtttggtgatctctactttgatcggaatctggctcaagctcatgctctgttggctcttaacgtgccatatagatatggtatctaccctaggtactatggagcacccagtaccattaccacactaggcggcgacttgtaatgagttataatattatagcgcttcggaagctaaaaataagctcatatatcatcatatgcgacatgtgaaac

SEQ ID NO: 280 - DNA, 1972 bp, Oryza sativa
  unsure (1)..(1972): unsure at all n locations
  Clone ID: PAT_MRT4530_100256C.1
cccatncctacncctcgtcgttgcgcctcccacgcacctccatggccggcggcgtaagcgacggcggcgcggcccacggcgcgtcggggaggctggagagcatcctgtcggactcgtcgatgccgctcgcccgccgcgcgtgggcggcgacgaccatcgagctcggcctcctgacgcggattgcggcgccggcggtggtgatgtacatgatcaactacctcatgtccatgtccacgcagatcttctccggccacctcggcaacctcgagctcgccgccgcctccctcggcaataacggcatccagatgttcgcctacggcctcatgtgccaaattttggcaagttttgccatgattaattttggtaagctcggaatgggtagcgccgtggagacgctgtgcgggcaggcgttcggtgcacacaagtacgacatgctgggagtctacctgcagcgctccgccgtgctcctgaccatcaccggcgtcccgctcgcggtcatctacggcttctccgagccgatcctcgtcttcatggggcagtcgccggagatcgcccgcgccgcggccatcttcgtctacggcctgatcccgcagatcttcgcgtacgccatcaacttccccatccagaagtacatgcaggcgcagagcatcgtgctgcccagcgcctacatctccgccgccacgctcgcgctgcacgtgctgctgagctgggtcgtcgtctacaaggtcggcctcggcctgctcggcgcctcgctggtgctcagcatcagctggtgggtcatcgtcgcggcgcagttcgcctacatcgtcaccagcccgacgtgccggcacacctggacgggcttcacctggcaggcgttcgccggcctctgggacttcctcaagctctcggcggcgtccgccgtgatgctctgcctcgagtcgtggtacttccaggtgctcgtgctcatcgccggcctactcccgaaccctgaacttgcattggatgccctatctgtgtgcatgacgatttcaggctgggtgttcatgatctcagtaggattcaatgccgcagcaagtgtgagagtgagcaatgagcttggtgcgggcaacccgaaggctgcatatttttcagtgtgggtcgtgactatctcctgtgcgataatctctgccatccttgcggttgtgatcctctgcctccgcaactacattagctacttgttcacggagggagaagttgtgtcaaatgcggtggcagatctctgcccgctcctcgccatcacgctcattctcaatggaatccaaccagttctgtccggagtggctgttggatgtggatggcaacaatttgtagcttacgtcaacattggctgctactatatcgtcggtgttccccttggtgttcttcttgggttcgtcttcaagcttggtgtaaagggcatctggggtgggatgcttggaggaacatgcatgcagacggccattcttgtctgggtcaccttgagaactgattggaacaatgaggtcgaggaagcacagaaaaggttgaacaagtgggaggacaagaaaaaggagccacttcttacagggattagggacaacaactaagttgatgaatcaagatttcttgtcagttcaactatcccccacgtcaccagcatttgctttgatattttctaccagcatggcgcccgcagagggaaactgcaggatcaggcatatatccgagttgggagaccagtgaaagatgtgcttcattgagctcaaatctggtttacaataacattaggtcatgtggtttacttccttttgggacatctggagatgtggaacgatgcctcactgaaacctcagaaattttgcagtagaactagaatgggagcgcgagactggtccgccctcgggcatggattaaaaactgggcctctacatccaaattggatgtacaaagccnaaaacagtaaaaaaaaaaaaaaaaaaaaaaaaaaaaaaaa

SEQ ID NO: 281 - DNA, 792 bp, Oryza sativa
  Clone ID: PAT_MRT4530_100257C.1
taacgaatacgatcatgatcgaggggatgcgattggacctaacgaagtcgaggtacaggagcttcgacgaggtctacctctactgctactacgtcgccggaacggtcgggctcatgacggtgccggtcatgggcatctcgccggactcgagggccaacaccgagaccgtctacaagggggcactggctctcggcctcgccaaccagctcaccaacattctcagggacgtcggcgaggatgcaagaagaggcaggatctatctcccaatggacgagctcgagatggccggactctctgaagatgacatcttcgacggccgcgtcacggacagatggagatgttttatgagggatcagatcacgagagcgagggcgtttttcagacaggccgaagaaggcgccagcgagctcaataaggagagccgatggccggtttgggcttctctacttctgtaccgacaaatccttgacgagatcgaggccaacggttacaacaacttcaccaagagggcctacgtcccaaaggcaaagaagattgtggctctgcctaaagcttactacagatcactcatgctcccctcttcagtgaggcactgctctagcctaacatcatcatgatcgtattgtggtattgttgttacaatttatcttgtattcaagtcttgcaatgtacaaagtattgcagtatctgcaaatatatgtacactttaacattgtgtatatatagggaagtttctatgaaacagagtagtgtatatatgaccatatttcataggtcatactactcttgcat

SEQ ID NO: 282 - DNA, 1625 bp, Oryza sativa
  Clone ID: PAT_MRT4530_100258C.1
tgcaggcttgtacgcctccgcttaaaccctagcaaacgcccgcctcctctcgccgccgccaatggcgatgccggccgccccttcctgccaggcgccgcccaccggcctccccctgctcaccccacctcctgccgcccgcaccctctccttcgcccgtcgcctccgctcccatggcgccgccgccgccgcccccgtcgcctccaaaggtcacctgtttcttagtcaacgccaaccacgaacctctaatctagaagcagttggtgatgtgacagcagttcctgaggattatacagaaaacatgccctcaagcagtggatctacaaatgttgctacgagtatttcatcacatgaagataatctggcaggaagggttgccaagacaaaccagacgtctaaagaaaaccaaaaaatgattaaaatatctgacaagttaattggtgtatttatggtcgataagcctacaccaacagattggagaaagttattgtcttttagcagggaatgggataacataaggccacattttttcaaacgctgtcaggaaagagcagatgcagaatcaaaccctgagatgaagcacaatcttctcaggcttgctagaaaactgaaagagatagatgaagatgtacaaaggcataatgaactacttgaagtagtaaaatctacaccatctgatgaaattggttctgttattgctaagcgccataaagatttcacggtggaatttttcaaccacctttattatgttgcagagtcttatcatgatgaccctgaaaaacaaagagaattggcacaacttggaaatgattgtgtagatgctctacaagctcatgatgacacatctgggagtcttgaagctctgagtgctgctgaattaaagttgaaagatatactgaattcaccttccgtggatgctgcatgcagaaagatagatgacttagctgagaaaaaggaattggattctgcgttagtcttaatgctttcaaaagcttggtcagctgcaaagggtactgacatcacaaaatctgaggctaaagatataatgtttcatctatacatgactgcagtagccaatctccagagacaaatgccaaaggatatcagaatactaaagcatcttataatgattgaggatccagaagaacgcttgagtgcattgaatgacgcatttactcctgggcctgaacttcagggggataatgttgatacattatacacgagtccagaggtattacacacttgggccagtgctattgttgatgcatattataacagcagagaaggcactctccttaggcaagcaagggacttgatgaaccctaaaatcatcaaaagaattgaggagatactaaaattaatcaaggataaatacctctgactctttaagaaaatgggggtttcacattcatactttcctagtgattaggcagtataattaaagaaattggatggccttgcatactctgctttctgcgcagcatcctgctcatcgttccaatcggattctccattgctgcttgaaatggacaatggttatacttgactgattaaatgcagattgatgtagctttgtatggtgtaaaagtgattgtagcatgtgatatatcaatgcaattttcagttag

SEQ ID NO: 283 - DNA, 2436 bp, Oryza sativa
  Clone ID: PAT_MRT4530_100259C.1
atgtcggaagttagatccgtccctgggatgaaggtggaagcatccccggccgcggccgccgctgccaccgtggattccccgacatccgttctggaggatgatgagaagatttctgaatgtaagaatggggatgtcttggataccaccgaggcgattaagcaagaggaggatcatctcgatgtgcttattgaggagaaagttgatggttttgtggatgcaagttcttccctgaatgtggaacctgcggctaacaacagtgatttgtcacctctcactgtgccggtgaaggaagaaggtcagttattggagcctgtcaaggaggaaaaagctgatgattttgtggatgcagttccatctctaccgattgaccttgaggccaagaatggtgatgcatccctcatcactgatgcgatgaaggaggaggaagagaagttgcacgacgcccgggttaaggctgaagaagaagaggtagcacggaagagggaagaggctgcaagacttgcttttgatccaaatgcacgttttaacaagttggacgagctactatcacagacacaactctattcagaatttctacttgagaagatggaaacgatcgctgatgtggagggcgtccaaactcatgctgaagaggagccagtagaagagaagaagaatgggcgtggcagaaagaggaaagctacttctgcaccaaagtacaatgataaaaaagccaagaaagcagtggcagtcatgcttacaagatctcatgaagattgctcacctgaggattgtactctcacagaagaagaaaggtgggaaaaagagcaagccagacttgttcctctaatgactggcgggaagttgaagtcctaccagataaagggtgttaagtggttaatatcactttggcagaatgggcttaatgggatattggctgatcaaatgggccttgggaaaacaatacagactatcggttttcttgcccatctcaaggggaagggtcttgatggtccatacctgataattgctcccctatccactctctcaaactgggtgaacgagatctcaaggtttgttccatctatgactggtctgatttatcatggggacaaagcagcccgggcagagataaggagaaaattcatgcccaaaaccactggcccagattttccattaatcgtaacttcctatgagatggctatgtcagatgcaaagcatcttgctcactataagtggaagtatgttattgtggatgaggggcatcggctaaagaattccaagtgtttattattaagggagctaaagcgcctgccaatggataataagctccttttgactggaactcctcttcagaataatctagcagaactgtggtccctgctgaacttcattttgcctgatatattctcttcacaccaagaatttgagtcatggtttgacttttctgcgaaaggaggtgaagaagaacaagaggatagtgaagagaagagaaaagtcgatgttgtttcaaagcttcatgccatattgcgcccgttccttctaaggcggatgaaggaggatgtagagcatatgcttccacgaaagaaagagataatcatttacgctaacatgactgaccatcagaaacaaatccagaatcacttggttgaacaaacatttgatcaatacctgcatgaaaaatcagaaattggtctgtatccacctgttgagaagctcttggaacagtgcggcaaatttcagctcttgaacagattgctaagtttgctgcttgcacggaagcacaaggttctaatattttcacagtggacaaaagttttggacattatcgagtactacttggaaacaaaaggccttcaggtttgccgaattgatgggagtgttaagttggaagagaggaggaggcagatagcagaatttaatgacttgaacagcagcatgaatatctttattctaagcacacgggctggcgggcttggtatcaatcttacttcagcggatacctgtatcctatatgatagtgactggaatcctcagatggatttgcaggccatggatcgatgtcaccggattggtcaaacacgcccagttcacgtctatcggttagcaacatcacattctgttgagggccggatcatcaagaaagcatttggcaagttgaggttggagcatgtggtgatcgggaagggtcagtttgaacaagacagagccaagcctaatgccctagatgaagcggagttgctggcgctgctcagggacgagcagggcgacgaggaccggatgatccagacggacatcagcgatgaggacctcctgaaggtgatggaccggagcgaccttacaggccctcctgccaatgccgacgccgcccctctcgtccccctgaagggacccggctgggaggtggtggtgccgacgaagagcggcggcggaatgctgacgtcgctcaccagttag

SEQ ID NO: 284 - DNA, 365 bp, Oryza sativa
  Clone ID: PAT_MRT4530_10025C.1
acaaggactcgtggaggacgcgtgggccagtagagaagtgcatcacctacgcctagatggacaatagcaccgtatacgacgtgtggctcatctgatgctgcactcgtataccccgagtgcagtatgtgctacagtacttcttcaacaggacggagctttccgagagcatcaacccggacgaggccttaccgtacagggccaccaggcaggccagcatcttcacctgctagggcaaccagaaggttcaggacctgttcctactggacgaggcgccattgtcttacgtgctcgagacagccggaggcttcatgaccgggctgatcccgagtaacacaactattccgaccaagaaggaggaggtctta

SEQ ID NO: 285 - DNA, 1356 bp, Oryza sativa
  Clone ID: PAT_MRT4530_100260C.1
atggcccgccgatattcgcttggaattgtttcttcatcgtcctgcacgtgtcacttgtgcagttgtaaggcgaacaaactatcttacacctccaacctgccaggtagagggaaattagtaaatcacatcacgatgtgggaattactattttgggatctgctaggcagggaaaaaaagaaaatgaaaaagagaagagaactactcaagatcagaggcaacctaactgctgaggcaaaccacggtagatacatgtgcatggcagtggcacccctaaaacttaaagaaaatagtattgcgccgtggattatccatagaaccgatttcttgaggaaaatgcattcgcatgtgatttgtgatctacaagaggaaggccagagattggatttttatgttgaagaaaaagagcttataagtgaagtgagcgtgccagggtcagaaagcactctaaggataagcactgaagtttgcagagctgttcttttcaagataatcaaaaggttccaatccatgcactctgctggattcagtctaggtgggtttgaacacaaaattctgtttgtcacgtcagattttgaggtgaaaattggtggtattagtagagtgaaagatttcaccaagacaagaggatcgaaggattacaagagcatcggaaaaattgcccgggaagtgatattctcatcagtgacaaatttgccggttgatatcgagcaactacttgaccttttgaccgacaatcctatggagcaaacagcccttttgggcatgcactactctttattggacccattgactcaagtatctgagttcctttggtggcacaagcgcctcattcacctcaaagacataaatccagaaaagtttcaaagaatcatggaaaacatcccaactggtaacaattggatgagtcgggcggtggagaataagtacataagaaaggtttcactgggcattcctaagaggagaaagggattagtacataccaccgaggaagtgaagcctgaaacaacagcggcaagtcaaggtactggtattgagggagtaaaaccaaaaactgcagttggccaggataccaatattgaggacccaaaacctgaaactgcaacaccaaaatgcaagtactcggaagattcatgggggcagagtttgttgtgtaggaactcaatagaacacctggacagatgggcagcattgagaaggatcaaaaaaaagaaatcaggtggcaagataagaacggtaaaagttcaattcgaggaaatgggcagatgctatatcataatacaagcattctctaagttctttggagagttgcaaaaagccttggcagaagagaatgaactgccacagaagaagcagtga

SEQ ID NO: 286 - DNA, 743 bp, Oryza sativa
  unsure (1)..(743): unsure at all n locations
  Clone ID: PAT_MRT4530_100261C.1
ggccttacgagtgcctacaggtttgacttttctgcgaaaggaggtgaagaagaacaagaggatagtgaagagaagagaaaagtcgatgttgtttcaaagcttcatgccatattgcgcccgttccttctaaggcggatgaaggaggatgtagagcatatgcttccacgaaagaaagagataatcatttacgctaacatgactgaccatcagaaacaaatccagaatcacttggttgaacaaacatttgatcaatacctgcatgaaaaatcagaaattgttctgcggaaacctggcattaaggcaaagctaaataatctgttaattcagttgaggaaaaattgcaacccatcctgatcttnnctggagtctgcgtatgactcatcagngtctgtatccancctgttgagaagctcttggaacagtgcggcaaatttcagctcttgaacagattgctaagtttgctgcttgcacggaagcacaaggttctaatattttcacagtggacaaaagttttggacattatcgagtactacttggaaacaaaaggccttcaggtttgccgaattgatgggagtgttaagttggaagagaggaggaggcagatagcagaatttaatgacttgaacagcagcatgaatatctttattctaagcacacgggctggcgnggcttggtatcaatcttacttcagcggatacctgtatcctatatgatagtgactggaatcctcagatggatttgca

SEQ ID NO: 287 - DNA, 1650 bp, Oryza sativa
  Clone ID: PAT_MRT4530_100262C.1
atggactcggaagagaggtccaagaagaggctgcggctatggagcagagccgtcgtccacttctccctctgcttcgccatcggcgtcttcgccgcgctcttgccgctcgccgccaccggcgccacgtcgatcgacagcatccgcgcctcgttccggccaacggtggcggcgacgcctcccgttccggagctcgacctcttgctgatcgtcaccgtcacgcggccggacgacgacgacgacgacggcatgtcccaggaggcgtcgctgacgaggctcggccacacgctgcgtctcgtcgagccgccgctgctgtggatcgtcgtcggagccgagaacacgacggcgacggcgagggcggtcaacgcgctgcgtggcaccagagtcatgttccggcatctcacctacgccgccgagaacttcaccggccccgccggcgacgaggtagactaccagatgaacgtggcgctgtctcacatccagctgcaccggctgcccggcgtcgtgcacttcgccgccgcttccagcgtctacgaccttcgcttcttccaacagctcaggcaaactcggggcattgcagcatggccaatagctactgtgtcatcagcagatcagacagtaaaattagagggaccgacctgtaactcatctcaaatcacaggttggtactcaaaggactcaagcagcaatataacagagacaacctgggactcaagtagcaacacaacacagacaacctgggactcaagcagcaacaaaacacagacaaccactctggctgcactagataccaatgcaagcaagcaaaactcaagctctggacctcctgaaataaacatgcacgcagtcggatttaagagctcaatgctatgggattcagagaggttcacccgcagggataactcatcaacaggcataaatcaggatttaatccaagctgtacgacaaatgatgatcaatgatgaggacaagaaaaggggaatcccttctgattgttctgattcacagataatgctgtggcaccttgacatgccaaggcataccccaaaaattgaacaggcgactccagagaaggaaagtctaacgaagggtgatgaagaggaatcccatgacatgacactagacaatgttgtgccaaaaactgaagaacatgagactttagagaaggaaaatctaatgaagggtgatgaaaagggatcccatgacatgatgctagacaatgttgtggcaaaaattgaagaacaagagactccagagaaggaaaatctaacgaagggtgaggagaaggaatcccatgacatgatgctagacaatgttgtggcaaaaattgaagaacaagagactccagagaaggaaaatctaacgaagggtgacgaaaaggaatcccatgacatgatgctagacaatgttgtggcaaaaattgacgaacaggagactacagagaaggaaagtctaacaaagggtgacgaaaaggaatcccatgacatgatgctagacaacgttgtggcgaaaattgaagaacaagagactccagagaaggaaagtctaacgaagggtgatgaaaaggaaactcatgacatgatgttagacaatgttgtggcgaaaattgaagaacaggagactccagaggaaggcaagactaaggaagggtga

SEQ ID NO: 288 - DNA, 379 bp, Oryza sativa
  Clone ID: PAT_MRT4530_100263C.1
cccacgcgtccgcaacaaataaactgatagttgaattgattgaaactatcaactctagggcatcctaattagtttatttttgatattccattggatcacgcaggtaccacagtcctatgttcttgagttgagccttctatttgtgcgtagtaccacgatatggattctacaatatatttttactgcaatttgttttttctcagtcattctggaagtgtagaagatatatatgctcttgtttctttgacctaggaatttggaacagttgtgttgacctcttcaaggtgtaatattacaatgttcgctgcagatacctcattacattggagggggagatgttccctttctatatttgttgtgcttgacaaaagcattcaac

SEQ ID NO: 289 - DNA, 399 bp, Oryza sativa
  Clone ID: PAT_MRT4530_100264C.1
atgggtggggcaccggatgagctggcgtgcgagcaggatcctgaggacgacgaggcacttgagtgccacaacggcattcctggcccgctgcatgacgctggcatgtggggcccatgcgcggggtggcgcgagcagctcggcggatgggagcaggcgcagcacgccacggcggcgacgggcaacgccagcacggcggccgggagcgatagcaagcgacagcgcggtggccgggagcggtggcgggcggcggcagcgcggccacacgctcccctagcagcggtgcccctcccccgtccggatccggcggtggaggggcagtggagaccacggagagaggcaacgacgacgacgagttgtggtggtgacgatggcaacgatgatgagcggggatgcagctag

SEQ ID NO: 290 - DNA, 1483 bp, Oryza sativa
  Clone ID: PAT_MRT4530_100265C.1
cccatccccctgatcccccgggctcgtcgcctgcgtgctcccgtggtcgcacttctcgcatcgcaaagctcggcagcaaaagcaaagcaaagccaagccaagcttgaagctccccgcactgagccaagaagcctccacctcaatccgaaagagatctcgtgcgcgcacggcgatgcggtgaatcgggcatggcgccgccacaggagcgggactacatcgggctgtcgccggcggcggcggcggcgctggcaacggagctgcgccttgggctgccggggactgcggaggaggctgagtcggagggcggcggaggaggagggacggatgcggctccgctgacgctcgagctgctgcccaagggcggggccaagcgcgggttcgcggacgccatcgttgggggtcccgccggccagcggcgggaggcggccgggggcaaggcggcggcggcggcggcggaggccgaggaggaggaggagaagaagaaggcgcaggcgccggcggcgaaggcacaggtggtaggatggccaccaatccgcagctacaggaagaacaccatggcgatgagccagcctgctctgaaaggcaaagacgacggcgaggcgaagcaggctccggcatccggttgcctctatgtcaaggtgagcatggatggtgctccttacctcaggaaggtggacctcaagatgtacaagaactacaaggagctctctttggctctggagaagatgttcagctgctttaccgtcggtcatggtgaatcaaatgggaagtcagggagagatggattatctgattgccgcctgatggatcttaaaaatggaacagaacttgtgctcacttatgaggacaaggatgaagattggatgcttgttggtgatgttccgtggcgaatgttcacagacagctgtaggaggctgaggattatgaaggggtcagatgcagtgggccttgctccaagagccactgacaagagcaaaaatcggaactgagcaaaagatgaacccaatatgaatatccgacccctacaatcacatcacttttacttgggaggtcccattctctaaaccacaagggtaatggtctaagttgcgagaaaggggattacttatacctatgtgtcaccctctttttttttgtttttatttgtaccaattatgttagattttaagcgtaagttgtgtaagttcctgtaagttgtctacttaaccttgcttgtagtttcttctgtaaattgttgtgctgtatgatgcaaactatttttggtattttacttggtgcttgcaagttgcaattgtccgtgcaaaaaaaacttccaataaaaaaaaaaaaaccttctgatgatctatgaactttgcccctctctggtgctcgaagggccagattactgttccttcagggcagttaggagctgatcattctcatcactgattgagtcatcagctttctgttatgcatacaattccatcatattgtggtgataatt

SEQ ID NO: 291 - DNA, 870 bp, Oryza sativa
  Clone ID: PAT_MRT4530_100266C.1
atggatcacatgcagcagcagcagcggcagcaggtgggtggagggggaggagaggaggtggcggggaggggtggtgtgccggtgtgccggccgagcgggacgaggtggacgccgacgacggagcagatcaagatcctgcgggagctgtactacagctgcggcatcaggtcgcccaactcggagcagatccagcggatcgccgccatgctgcgccagtacggccgcatcgagggcaagaacgtcttctactggttccagaaccacaaggcccgcgagcgccagaagaagcgcctcaccacgctcgacgtcaccaccaccaccgccgccgccgccgacgccgacgccagccacctcgccgtcctctccctctcgcctacagcagctggcgcgacggctccctctttcccgggcttctacgtcggcaatggcggcgccgtgcagacggatcaggccaacgtcgtcaactgggactgcaccgccatggcagccgagaaaaccttcctgcaggactacatgggcgtgaccggcggcggcggcgccgccgcggcggccccgacgccgtgggcgaggacgacgacgactcgcgagcccgagacgcttccactcttcccagtcggcggcggcgccggcgacggcgcgcatcgtcacgccggccacgccggtttcccgtccaacttccagcgctggggttctgctgctgctaccaccaacaccattacggtccagcagcatttgcagcagcacaacttttacagcagcagcagcagccagctgcacagccaggatgggccggcagcaggcacatccctggagctcactctcagctcctactactgctcatgctcaccttaccctgcagggtccatgtga

SEQ ID NO: 292 - DNA, 256 bp, Oryza sativa
  Clone ID: PAT_MRT4530_100267C.1
gcggcggtgttagttctggcctcctcgtgcggagactgccgtcctccgctcgcgctcgtgttgtggagattgaagcctccgccggcgccgcctcttatggcagttgcaggtgcagctcgaggagcgacaaatcccatgctctctcatgcaatgagcgctctagcgtctactccggtactggctaatctcgcaccatcgcggggacggagcggtgtcggatggcacctgtggttgtggacgagactggggggcatgc

SEQ ID NO: 293 - DNA, 266 bp, Oryza sativa
  Clone ID: PAT_MRT4530_100268C.1
tttgttgtttttttttttttttttttttttttttttttatgacctcattcagagaggattcactgcatccaaagttctgaagggtactcgatacaatttaaacacacgtctctcttacttggagtatcacacacacacacagacatttattctcggtttacatagaagatgatatcccttctgtcaagacttgtagggtaacataatatataaaacagggttatagatgacagccccatgacagatacagtaagatctggagacag

SEQ ID NO: 294 - DNA, 588 bp, Oryza sativa
  Clone ID: PAT_MRT4530_100269C.1
ttttttttttttttttttttgatcatgcaaacttgttggtctcatcatatatttcattgaccggatatatccaccgatgcagaggtggattgaatttatcgaaagaaaaaaaccgaacttactactatgtacgtactggtttgatcacgcaaacttaatttgttcttctcatcataaacactgagatcttatactatacacatcacggccgatcgatcaagaacacaagcgtgtacgtacgcacgcgtcgcctacctgctgcagaagtgcacacagatcatgcattgagatgcaaagcatttcatggtgctcatttgccatggcgttttttttttttttcgatcagcaaatggcgcacgagttggggttctcctccatgctcatgttgcggacgtagtagtactgcggcggcggcccgtacgggtaggccggcggcggcgccggcgcccgcttatactgggccgccgactccgtggccatcctctttgccctcgggtgccttctccatgaagccgccgtcaccttccttcttgccttcgccctcctccttgccgtcgccgcctccagcttatcgattgttccaaggtg

SEQ ID NO: 295 - DNA, 131 bp, Oryza sativa
  Clone ID: PAT_MRT4530_10026C.1
tttttatcgaatagaaattgccaatttgttcgatgatttccaactcttgaagaatatgatcgataatttgccacaatttatgtcttatctgtctagcgacttgctactttagatcctttagctaaacaatg

SEQ ID NO: 296 - DNA, 195 bp, Oryza sativa
  Clone ID: PAT_MRT4530_100270C.1
cgtatacacaggtagccacaccacagtgtgtggctggggcggtgtgtatactgtctggattgacacagggtgccacatagctgcacacagcccctcacagctgattgtgtggcgcccctcataaacttgtgcccgcgtcacactattgccgcgtatttttataccccagggcgtatcacacccacacgtgtgctc

SEQ ID NO: 297 - DNA, 277 bp, Oryza sativa
  Clone ID: PAT_MRT4530_100271C.1
accacgcgtgcgaccgatgcgcttactccactatttaatccggtgaagctaagccatggcatgcgtgaccggcggcaccccggtcacagccctcccatcatccacggcgctaaagacgaccttactagggcaatcctccacccggctggcccgagcaccgactacgaggcggaatgctcgggcggaggccacgggagagtgaatcccgggactagctgctcctacatacattaacagtacgttgcgagacgataacaggttccaccacactggtctg

SEQ ID NO: 298 - DNA, 1148 bp, Oryza sativa
  Clone ID: PAT_MRT4530_100272C.1
atccccgggctgcaggaattcggcacgagggctactcaacaatgcaccagcaacaaagttcatgccttttcaaagttcataatttttcagtcaacaagtgacgcacacaagagccgatcgccgtagacgacgatgcagcacgggcgagcagagcggcgccaagaaggcggcggcgtgggtggtgtcgcccaacggccaagtcaagcgagaaatggcggtggaagcggcgcgcggcgagcggagctgctgcagccgccggagccggagaagaagaagaagaagtccaagccggcgggatgatcgccgcggcggtgggcgacggcttcgagggtgtggagatcagcgtgcggatcgacttggccgtgctccactgccccctctgcctcctccccctcaagcccccgacctaccagtgcgcggcggggcacttggcgtgcagcagctgccatggcgacgtcccgggcaagaagtgccacacgtgcggcggcggcggcggcggcggcgtctacgcgcgatgccccgggctggacacgttcctccgcgccgccaagatcctgtgccccaacgacctgttcggctgccggagctatgtcgcctaccacgacgtcgccgcccaccagcgcgcgtgcccgcacgcgccctgctcctgctcggagccgcgctgcgacttcctcggctcgccgccgatgctcctcgcccacctcgtcgccgaccactcgtggcccgtcagcaaggtcccctacggcgaggtcctcaccatccacgtgccggagtcggagcggcgccacctggtcgtcgcgggggccgccgggggggacgacgagcgcgtgttcgtcctgtccgtgggcgcgctcggcgtggcgagggccgtctcggtggcgtgcgtcagggcgaacgccgcggcggggccgcgctaccgctgcaagctctgggcgcacgccccgggcggcggcgccgcggacttcgtccacatggactcggcggtggcgagcagcgccgccgcgcccggtggcgaggtcgccgtcgacgaggaggccaggttcctgacggtgccgccgtgcttcctccacctgctcgacgccggaacgtccaaggagatgctcatcaggctcagcatcagcattgacattgacattgacatgtcctga

SEQ ID NO: 299 - DNA, 308 bp, Oryza sativa
  Clone ID: PAT_MRT4530_100273C.1
ttgggggtttttttttttttttttttttttttttttttttttttttttttttttttttagggaagaagattttatttagatttatatgaccctaagtttcaacaggcacccatgatgatggatgactttatttttaacataccaaccgggggggggggacaattcagtaccagacccccccaacaggggcaatgcccctgggggccctatagtagttaggggagatcccccatatgggtggcaaggtgaagggcaacagagtttgggcttggagctctgagtctgatcaaagggagacccccctaaat

SEQ ID NO: 300 - DNA, 831 bp, Oryza sativa
  Clone ID: PAT_MRT4530_100274C.1
atgggcacgggcgagggtgtaatctgcccgagaaccgaagatgccgtgggcaacagctgggtttcatttcattttttacccatgggtaacccatgcttgacccgatacatgtttggtagagagacaccgaaagattgcggccattactgtgagacacctgaagatcgtgtatttgctcgtggacactgtaaaaaagtgcccaacaagtcgatgggctccgtgagatccttgctccacgactcacgcgctagcacgtgcagcctcgccaggaagatcgccaacgccgtcaccatggacggcagagaggtccatgcaattggattgggactcactagagagggagaaatcaaagatggagctcggcggccggttgtagaagatgatgctgatctccaagatcattgcgccattggatggggtacttgggggtatatggagagaggtcaacatgaagctgatggcgtggtggtttggcttgcaacagtccactgcagccaaaacgacaacgatgtcaaggcggcgacgcgcagagtgcgctccaaggccggcgatgacacgtggcgttcccgtcgatccgctacacgagaggatggaatcaaaaggaaaatcttcggcatgataagatttgagggcgacgaagaggttgagggcatcctctctcggttcacggtggggcggcggcgggggcgcatcgccgggatcacgggatatcattatttggggttatatgctgtggatgagaggtgggccgctgatggtgacagctcagtacgggtattcctccgcacattcaggggtggtttctcgaagtaccaggagggcatcgaatag

SEQ ID NO: 301 - DNA, 615 bp, Oryza sativa
  Clone ID: PAT_MRT4530_100275C.1
tttcatttaaaatatgttcacctccaccagcaaaagtactctctccatacgctcccttaatccatgtcatgaaggtcaagccaaacaaggtgaatttaataattggttctggtggaaagacgataaaaagcataattgaggagactggcgttgatgctattgacactggagatgatggcacagtaaaaattaccgctagggacttatcaagcttagagaagtcaaaagctataattgctaaccttaccatggttccaaaagttggagaaatttacaggaactgcgagatcaaaacaattgcaccatatggagcttttgttgaaattgcaccagggcgtgagggtttatgccatatcagtgagttaagttcgagttggttggccaaggctgaggatgctttcaaagtcggcgatcgcattgatgtcaagctaattgagataaatgacaagggtcaacttcgcctaagttctcgagccttactgcctgatgcaaatcaagaatctagcagcaagcaacaagcaggtggttcaactagggagaaggcaccacagaaggataatcttgttaagatgacaacaagaagaccagacgtaagaagaagcagaggcatctaca

SEQ ID NO: 302 - DNA, 238 bp, Oryza sativa
  Clone ID: PAT_MRT4530_100276C.1
gtggcccgtcaacatgataattttattacagagggcggaagttggtccatggtcaaagaatgaccattctaataaggcggagcaagggtcccacacaaataagcacacggttgatctgagcggcaccgtgatgatgctctcaaccagagccgacgataacatgctcgcgagcatgccacgcggtggagctcaagaggatcctcgggatccgagcagtgattcgccatatacgagatcg

SEQ ID NO: 303 - DNA, 240 bp, Oryza sativa
  Clone ID: PAT_MRT4530_100277C.1
caatggggctttgatgtactatggcgatagctcaaaggataaccgctgtaagattgtacatgatagccatggaggcctggcaatagtgcaataaaaggcggcaatgcggatttccggaccccctggggatggcaagaggaaggactgatacttcaaatggcctggaaatggcctcaacccacctaactgcatcgtattttccggtgctctatccgtttctcccctttgtagatcacaact

SEQ ID NO: 304 - DNA, 236 bp, Oryza sativa
  Clone ID: PAT_MRT4530_100278C.1
ctacacggaacgtcctaccgtccagcttatgtgctacaaagaacatactcgatggagaaatgatctgtggtccaagttccatcattatgatgaacgtgattgtatcccactaccaacattatggatgaactgatggatgttgctagcgacaaagcttcaaataactcgtattgaactgaccaggtgaagtacaatccattctataagcatatgatctcctaaacaatcggggctct

SEQ ID NO: 305 - DNA, 728 bp, Oryza sativa
  Clone ID: PAT_MRT4530_100279C.1
cgcaccggctccggtctcgccagcccgcggggaagacgacccctacccccgccggcgatgtcccacccgctctcctccgaacctcatgctttggaacaaagggcagtggtagtaaccaacaagcatggggagaagctcgtgggagtgctgcatcacacgggttcaagcaagatcgtcgtattgtgtcatggttttatatctaccaagaacgacagtctcattcttgacctgatggctgcattgacaaagaaagggattagtgtctttcgctttgatttcagtggaaatgggtaagtttgctccagaaaaccatgtcttcccccagcaatttcagttcttagaagaagctatagtaatactgctttaatcttagactatgggcatggttctttttcgcatgagtatgtcttagaatggggagaatagctactgtagtccctaaagtttctatgtaggatcattttagtccctaaccttttaaatagttcaaagaaatccttaaactttgtcataaggcctagaataatccttgggtccaccaaaatcgtcatatggatatgccatgtcatcattcatgcaaaatctatgataaattgtctagtttacctttatgtatatcatagaaaaataaatgtaagggtgaattagacataaccatagggaaaaaaatacttttccttttttttcacccttttgacgtatatttttgctcttacatataccatata

SEQ ID NO: 306 - DNA, 1576 bp, Oryza sativa
  Clone ID: PAT_MRT4530_10027C.1
atggccgctctccacctccacgccctcatcgccggcggcggcggcgccaccaccgtcccccatctccggcagatccacgcccatctcctcacctccggccgcttcccctccctcggccccgtcctcctccgccgcctcatttcgctgcccaatccccacctccacctcgcccaccgtctcctcctctccctcccctccccatccctcgacctcttcaacctcctccttcccccgctcgcctcctcgccggacccctccaccgccgccgccctcttccttcgcctccgccgcgggggtctccgccccgacgcgcacacgctcccgcacgtcctcaaggcgctcgcgcgcctcgccccgggatccctccccgttgtcggatccgtgcactcggaggccgtcaaggacggcctcgcctccgcggtggtgtacgtcccgaacgcgctcatggccgcgtactcggcctgtgggcaactggagcgcgccgtgcaggtgttcgacgaaatgccgcgccggaccgtcgtgtcctggaacaccgcgctcaccgcctgcgcgggcaacggccgccacgagctgtgcgtcgagctgttcgcggagatgctagaggctggttccgtgccggacccgaccacgttcgtggtcatgctgtccgccgcggccgagctgggcaacctggcgctcggcaagtgggcgcatggacaggttgtttcccggaggctggacatgacgcttcagcttgggacggcggcagtgaacatgtactccaagtgtgccacggtgagttatgccctgcgcttgttcgagaggatgcccgcgaggaatgtctggacatggactgccatgatcgtagggtttgcgcagaatggtttggctcaggaagcgctggagctgtttgacaggatgaaactctcaaagatcatacccaattatgtcacatttcttggtctgctttgtgcatgtagccatgctggcctggttgatgaggggcgccggttcttccacgaaatgcagcatgtttatggtattgtgccgatgatgacgcactacagcgccatggttgatgtcctaggccgcaacggtcttctccaggaagcttatgactttgttgtaggaatgccagtcgaggctgacccagttgtgtggaggacattattggcagcctgccagctgcatagctccaaggactgtattgagatcattgacaaggtgcagggcaaactgctggagctagagccccggagaagcgggaactacgtcatggtttcaaacatctactgcgaaattggatcatgggacgaggcagcgaaggcaaggagggtgatgagggaaggagggatgaagaaggttgcgggagagagttgtgttgaggtgggaggacgggtgcatcggttcatcttcggggatgattcttgccctgaatttcatggggcttgtaggattctccatgaattgaatctcaacatgagaaaatgtgaacctattgacccaatcttatttactgatgatgctgactagctttcaaatttcgtgcattcttttcaaaaaaaaaaaaaaaaaaaaaaaaaaaaaaaaaaaaaaa

SEQ ID NO: 307 - DNA, 232 bp, Oryza sativa
  Clone ID: PAT_MRT4530_100280C.1
gcttcccttcttctccggcgccaacgacaccccaaactttggcaaggagcatacgggtggagggccggctttggcggcgggagaaaacaacgagactggggcactcagcaccacaaccttgggggaggcctcgccagggccattaacccggcagggtagcagcgactatgcaggaggtggagcactgctcgtcgcgtgcgtgagcgtgaagcggcagcggttggcggactaa

SEQ ID NO: 308 - DNA, 677 bp, Oryza sativa
  unsure (1)..(677): unsure at all n locations
  Clone ID: PAT_MRT4530_100281C.1
ccttccctttttttttttttttttgtttggaaactgaaaaggatatactaaactccactcaacaataatgctacatatcaggattcaggagagagagagagagagagagagagagagagagagcgacagatggtatcggattaatcatagatagatacccctgctgtagtaggtagttagtgcaaccgttgcaccatcatctcctctaaaatgctcatcggtacgactattctgttgtttagtacttggacagagtctccctgttaatgaaatgatgtcgctacactgacgtcttcattagtatagcatctcactgaagtatgtttgtcctccccacttgtaaactgaagttaatgagacacatgacaactcgaggcttgtgcaagaaaggcttctgattccttccgtcatcgttgccaaaaggaagcacagctcaggtcctagcatctcttcacatggccaacaacatgtcctgaagaattttaatgctcgtcttcatctggtttcttggttcagattagaggggnnggaagttccctgcgatcttctcggttatcaacgtaagtttcgcatgaagcaatatctgnttggttttatgctgccagtttgctgcatttcatcttctcttgctcctgcaaaatctcatttcttttggtctttcattcttggcttgcatg

SEQ ID NO: 309 - DNA, 1473 bp, Oryza sativa
  Clone ID: PAT_MRT4530_100282C.1
atgcgacaaaatgcacattcgggacatgtttacacggattggacgccccataagtcaatgaaaacccttttagaattgggccaaaacatagtgcagattattgggggcccattaagcaacctactggccaaaggagaggccgggagaagaagatcagaccagagatcggcttggctaaatggtcaaggattaagaaaaggactaagttcatttgaggtgagcgaggcggcgccctcgccgcgctccaactcggagccaccgccttcctctgcccggcctcctcccccgccctcgccgccgccgcctcagcttccaggctcctccctcaccggaccatcgcctccatcatcctcctcgccctgggtgctcagcgtcttcagggagctcaaccccaaggagatgctggccaggaacacacccaagtacacaaaatgcatgttcagtgcaattctagaatatagtgttgtgaccgcaccattggtgctcaagaatgtaaaaagagaaattaatatatcaaccactgtctgcaaaattgatgtaaaaacattgaaacattataacttcctggaagaagaaaaacatgctcttggttgcaacagtcgagtgaatggacctatcatattatgtggtttcacgaattcatggtggaagtattacatatgtcccgtgtccggaagcactttcacaatgaagtcagaggtgctgcattatcttttctcagagatggatcagcgcttcatggaatcaaagaactgtgctgtaggctgcaaccttatgaggacacatgaatggcttccaaagggctggctggtcgagattagagccggtggagacaacatggacaagatgtacaagttctatgtctacccaccacatagagttcgactgtactcaaaagatgatgtactactctacattaaagaaatgaagatttctggatttgatacagatggacaatgcaacacaagtactcaagagaatattcttgcaattctggaatttaaccctaaagggctgccacaaggatgggtgaaagaagtgcactacaccgatcccattaaaaattatgtattccgtaccatgaggtctgccgcactctacgtggaaacagggaaagtaacaatacgtgcctttgttcaaaagacaagtgtccatgaggtgtactcttttgaaaagttcacacatttgcatgaaagcttacagaaaagactaaacttaggaaggacgaaccagttgcgcacacgatcatcaaaacacgaaaagctagcactgaaagaagagatacttagcgatgagcaaggttcatctagcggggtggcagctctactagagatggattgctggtggtggtctaggcagttgtggttggagggagtttctttggtggctgtgctcgtggtggcagctgtgggtggagttggccacacggcgcttgaggcagtgcagacgacagcagttactggtagaagctag

SEQ ID NO: 310 - DNA, 807 bp, Oryza sativa
  Clone ID: PAT_MRT4530_100283C.1
atggctacgacttcgagaaacgacgtcccgccaacagttcctcccacacaagtggagaacggaacatcaacggccccaacacctggaaggaatcctcaagcggctgagttatgtccttcgcgcagaaacccagagccgacaaggatgcctatccagaatctgagatcttggtgtctcgtccataagacatccaagcatactctggaagattgcctggtgatactccatgtgaaggccgaactctacgcctgctgggagcgtgggattcaacgcacttcaccaacgggcttcacctattgcccgcgactgagcctccaccgcaagatccaccacgaggaaacggtgaaccagctaacgggaacgcagaagcggaaaaccctattggagaacgtcctccccgtgctcaatcgccacgggcagcccgagatccaactccaccgcgtcgtgagaatcgcgaccttcgcgaacatctggacgactggcggagggaaagacgagatcggaacgacactgatcgtcatcggcgtcgttctccctctcgacgagaagagaacaccgctcaccgttgacactgccaccgtctcccctcacgccaaggagggaacaatgatcgaggaggccgccctaacaaagatcgagatcggcaggcccgtagcgaccgccgagacaacaacgataacaaccatcgtgacgatggtgacaacaatcagcgagatcagggagccaatggtcaagttcagggcgacagcatcagtggcaaggcgacgacgatggacgggaacgcaattcccgatctcccgcatctag

SEQ ID NO: 311 - DNA, 1218 bp, Oryza sativa
  Clone ID: PAT_MRT4530_100284C.1
atgggcaagtcaccatctgtcgggatcttagacgacgatgatcgtgatgaagtcaaatcttctgaggaagcaacaaagaatttgcaaagtgacgacgatgatgtggatggccgaccaggttggcttccagatggctggataatggaggtctattgtgatgatgatggcaccatctaccggtattacatatgtcccttgtccggaaccactttcacaacgaagtcagaggttttggattatctattctcagagatggatcagtgtttcttggaatcaaagaaccatgctgtaggcagtaaccttacgaggacacatgaatggcttccaaagggctggctggttgagattagagctggtggagacaacatggacaagatgtacaagttctatgtgtacccaccaaatagagttcgactattctcaaaggatgatgtactaatttacattaaagaaatgaagatttctggatttgatacagatggacaatgcaacacaaatactcaagagaatattcttgcaattctggaatttaaccctgaagggctgccacaaggatgggtgaaagaagtggtctttagaaaaacaaataccggcaaaattagaagagaccgccactacaccgatcccattaaaaattatgtattccataccaagaggtcagccgctctctacgtggaaacagggaaacatgaaagcttatggaaaagactagagttaggtgggacaaaccagctgcgcacaagattgtcgaaactccgaaaactatcactgaaagaagagatacttagtgacgagcaaggttcaactagcggcgtggaactgctgctggtggtggtctggcagctgtggcttggagggggggggggtctctttggtggcagtgctggtggtggcgcggacggcagccgttactggctagcaatccatgttgtcggtgtagtaaggcagacgtttactaaccaccatcctaagctttgttcattaagcagtatctgtgttcggtcctccattcaggctgaacgtagtctgcccatgcggcatttgtcgttagcttcgcagttagtgctgctcagatttatcggggaactccgcagtaatctgttgtcgagtctgccgaagattgcaactctgacaattcagacacagcacatggggcaggacaaaacaagacatcatgatggcttcgtagatcctagaatcagacaacgggatttataa

SEQ ID NO: 312 - DNA, 241 bp, Oryza sativa
  unsure (1)..(241): unsure at all n locations
  Clone ID: PAT_MRT4530_100285C.1
gtccgatcccgtcgcccccgtcgggtgacatctccacagggattagtgtgctcagcagggaatctgttgcctctgctccccctcccctctgctgtcctgcttcgccactcctccattccatttgatgatggctcaccccacactggtcgacattttaccctggtttggcgctgagctgatccaaagccatagtgattccaatggcgtgtccttgtgcagagctggctcattccaccnatgc

SEQ ID NO: 313 - DNA, 579 bp, Oryza sativa
  Clone ID: PAT_MRT4530_100286C.1
atggcgcccgccggttgttgtctcctcttagtactacttatcgccgccggcggccgcgccgctgccaactcggcagcagcagttgctactactaacaataagccccagcagcttgtgcagtccacctgtaactccacaacctactacgatgtctgcgtcgccgctctcgccgccgacccctccatctccaccgccgccgatgtccgcggcctatgcgccatcgccgtctctgccgccgccaccaacgcctcagccgccggagcctcgttactcgccagcgcggctgcttaccaatctcagcctcaggcgccgctgctccgcgcgtgcgccgccaggtacgccgacgcgcgacaggctctcatctccgcgcaggaggccatcaaggaggaggcctacgactatgccttcgtgcacgtcagcgccgccgcccagtacccaaccatgtgccgggcgctgttccgacgagcgtcgtcccagcagcgcgcgtacccgtccgacctggccaagcgagaggagggtctgcgccgcctctgcaccgtcgtcctcgacatcatctccctcctcttgctgtcatactag

SEQ ID NO: 314 - DNA, 2194 bp, Oryza sativa
  Clone ID: PAT_MRT4530_100288C.1
ttatcatgtacaaataggagggcgcatgcaccttgtttgccattagctctcgacgtagcctagcccgcaagcagcagcagcagctagattggttggttgccaatgatcccggccatcttcccgatgatggacggcgccgcgcctctgcttcccgagacgagccccgagagccgccagcaacgtgatccggagagggggaagaggcggacgccggtcctcccggccgtcgtcgcgtccgccgtggtccttctcggcctcgcggcgctcttcctggtgtatggatttcacgacggtggagacgggagggcggccgtactcgcgcccggccgtccggaggtcgcggcctcgtcgtcccgcggcgtcgtggagggcgtctcggagaagtccaccaccccggcgctgcgcctcggcggcggcgcggtccgggactacgcctggaccaactcgatgctgtcctggcagcgcacggcgttccacttccagccccccaacaattggatgaacgatccgaacggtccactgtactacaagggatggtaccatctgttctaccaatggaacccggactcggccgtgtgggggaacatcacctggggccatgccgtgtcgcgcgatctcatccactggctgcacctgccgctcgccatggtgcccgaccactggtacgacatcaacggcgtctggaccggctcggcgacgcagctgcccgacggccggatcgtcatgctctacaccggcgccacggaggagtcggtgcaggtgcagaacctggccgagccggccgacccgaacgacccgctgctgcgggaatggagcaaggcggaggcgaacccggtgctggtgccgccgccgggcatcgggctgacggacttccgcgacccgacgacggcgtggcgcaacccggccgactcggcgtggcggatcaccatcgggtccaaggaccgcgaccacgcggggctggcgctcgtgtacaagacggaggacttcctgcactacgacctgctgcccacgctgctgcacgtcgtcaagggcaccggcatgtgggagtgcgtggacttgtacccggtgtccacctcgccggccgtcgaggacgggctcgagacgtccaccccgccggggcccggcgtgaagcacgtactcaaggccagcctcgacgacgacagaaacgactactacgccatcggcacctacgacggcgagaccgatacctggacgccggacaacgccgacatcgacgtcgggatcgggctccggtacgactacggcaagttctacgcgtccaagacgttctacgaccccgtcgggcggcgtcgcgtgctatgggggtggatcggcgagaccgacagcgagcgggctgacatactcaagggctgggcctcccttcaggtgagcatgataatttttatattaaacgcaaacgaaaacaagggtgaaaagtcaattccgaggacagttatgctggacacgaagactggcagcaacctgctccagtggccggtggtggaggtggagaacctccgtatgcgcggcaagcgacggtgtcgtcacgggaggctggagcagcagcatacagctgcggcacggacggcggtgcggttggccgtggcttgatgggcccgttcgggcttctcgtgctggccgatgatcagttgtcggagcggacggctgtcttcttctacctggtcaagggagtcgacggcaaccttacaaccttcttctgccaagacgagctcaggtcatcaaaagcaaacgatctagttaagagagtctatggcagcttggtacctgtgctagatggcgaaaacctgtcaataaggattttggttgatcactccatagttgagggcttcgctcaaggagggaggacatgcattacctcgcgtgtgtatcccaccaaagccatctacgagtcggccaaaatctttcttttcaacaatgccacaaatgttagagtcactgccaaatcgctaaagatttgggagctgaactctgcttacatccgtccatatgtagactagatcatttttaatgtaatgggaatgaatgatttgtctacatttgttagttatgtttttataggctaatttatcttttttgcttccttctttatgtcaaactacaactatgacatattactagcaactgaaataaaacataatcaatcatattgttttgccaaaaaaaaaaaaaaaaa

SEQ ID NO: 315 - DNA, 1137 bp, Oryza sativa
  Clone ID: PAT_MRT4530_100289C.1
atgtgggttgtccctcaaaggttgcttccagatggctggataatggaggtctatcttggtgatgatggcaccatctaccggtattacatatgccccgtgtccggaagaactttcacaatgaagtcagaggtgctgcattatcttttctcagagatggatcagtgcttcacggaatcaaagaaccgtgctgtaggcagcaaccttacaaggacacatgaatggcttccaaagggatggctggttgagattagggccggtggagacaacatggacaagatgtacaagttctatgtgtacccaccaaatagagttcgactgttctcaaaagatgatgtactactctacattaaagaaatgaagatttctggatttgatacagatggacaatgcaacacaagtactcaagagaatattcttgcaattctggaatttaaccctgaagggctgccacaaggatgggtgaaagaagtggtctttagaaagacacatactggtagaattagaagagaccggcactacactgatcccattaaaagttatgtattccgtaccaagaggtcagccgctttctacgtggaaacagggaaagtaacaatacgtgcctttgttcagaagacaagtgtccatgaggtgtactcttttgaaaagttcacacatttgcatgaaagcttacagaaaagactaaacttaggaaggacgaaccagctgcgtacacgatcatcgaaactccaaaagctatcactgaaagaagggatacttagtgatgaccaaagttcatctagcgtcctcgtggcgatggttgcccagtgcggcaactttagcaaggttgtggtttgcttgctggatgaccgccttgtctggtggcttggttggcggcagtggccattgttcacgagggcagcgagtctagacaagctagaaatccatgttgtcggtctagtaaggcagaagtttactaaccaccatcctacggctttcaggattaaggttggctggagatcaaagatgtctcttgactccgttgattgcagcagtatctgtgttaggtcctccattcaggttgaacgcagtctggccatgcagcctttgtcgttaggttcacagttagtactactcagatttatcggggaactgtag

SEQ ID NO: 316 - DNA, 465 bp, Oryza sativa
  Clone ID: PAT_MRT4530_10028C.1
gcggcacccccccccaccccccccccactaccaccggcgaggcggcgacggcggcggcggcggcgagctcccctgcgtattagtcatcggcgccgtcgcaagctcgtctcgcggtccatttgttcgtaagcggcggcggcagtgctcccaggcaggcccctctaaaaccctggacgccaagatgctgcgctgcgtgtacacgcagcggcggtgggcgcaccggcggggaggcttcgtcaccggcgggaccggctggtcgcagcggcgcgcccccgccgcggcggcggctgttggcgcggtcgcgggcgcggcgaagtcggcgtggtggtcggtggtcggcgagatgctcgagatcggggagggcgtgccgcgccgcgagcgcttcggcgtcccgcgcggctccctccccgtccgccggcgcctgctgttgcttcagttgttcctgcgccgcgcgcgcctcgcgct

SEQ ID NO: 317 - DNA, 362 bp, Oryza sativa
  unsure (1)..(362): unsure at all n locations
  Clone ID: PAT_MRT4530_100290C.1
accggagagagtgtgtttattggttcttggaggagagatgtccaagatggcggaggagaaggtgctggcggcgcggccaccgtngacggcgggatgcagttctccggggacctgcaggcttcgtcggcggcggcggcgcgtgtgcggcccgtngagacgctcctccgcgccggccgctggggctctgcgtngcgcatggcatcatgtccgagctcgncacaacgatacgnaccgntcctactccncctcgcgcttaagacctggtnacgcaacggctctcgngctactcgtgcgtgcgtcacatagcgtccagccgcgcgtgtccgtctggtcgtttctctcacagttcacgnctatctgaa

SEQ ID NO: 318 - DNA, 1941 bp, Oryza sativa
  Clone ID: PAT_MRT4530_100291C.1
atgggagattggtatgaacaattttcacaatcttttaaggatgctgctaaggaaatgttggcaaaaacagatattgatccaaacgttaagtgcttcacaagaaagcagatgaagcgcatttcaaacaactacagaactatccttgggaaagggggcttttctgtggtgtacaagggtaggctcaatgatggccgtgcagtggcagtcaaaaaatataattggaaaacacagaaaaaggagttcacaaaagaggtaatcatacagtctcagtttagccataagaacattgttaggctattggggtgttgtgttgaggcagatgctccaatgttggtcactgagtttgtccccaatggtaacctttccaaccttctgcacagcaacagtagccagtttcctgtttcattagggacacgcttacagattgcactggatgtagcagaagcacttgtatatatgcattcctcccaaaatcatccaatccttcatggagatgtcaagccttcaaacattcttctgggtgacaaggatgtggcaaaactctgtgactttggaatatcaaggctgttatgtatggatagtgacgaatacacgggatttgttataggaagtagaggctatgtagatcctgtgttctgccagactgggcggttaagtctaaaaagcgatgtctacagttttggggttgttcttttagaactcatcaccaaaaagaaaggaattgatgacaagaaagtgtgccttgcagaaacttttgctcgcatcagtagaaaaggtaatggacacgaactatttgacatggacgttgtaacaaatgagaatatggagtttcttcaaggaattggcaggcttgcacttgaatgtataaagtttgaagtagaggagcggccagaaatgaaagaagttttagagcgcctttggagtctcaaaagatcccgagataggagaatccgtgagatgcaggttatggtacggagcgagattgaagtactttggagaagatgtggctttggtaggtttatgatctcgaaagagagaatggacgatatgacatactacttcaaaactgttctcaaggaatgtgcatcaggcaaggcttacatagggagattttgcaacgcacaactgctggtaataaagatgtcgatttcagttttagatcaatggaaaaacatagtctggaacgaattgaatgtccaatctagaattaagcactggaatgacgccaagcttctcggttactgcttagatctttgggaaggtctagtgcttgtatacgagtatggtgcgatgagcttgtatgatgttctttttcatgatgcaaggaaggtatctcccttcatttgtggcctgcgcctgaagattgcggttggcgctgcagagggccttgctcacttgcactcacttggcattgtgcatggcaatgtcagcactgtcaatatattgctggatgatctttcggtactcaaagtgattagccgcaattacccagtaaagattgcaggctatggaacatcagggctccctgacattgacaaggcacagcacacaggattcttcatggaggattcgcttgtaaccagtcatgggaaggagcatgacgtatactgtttcggtcttgttctcctaacgctcttcacatggaagaaggtgtcactgcaagaggcggataccgtgtttgagcagctctgggacattggaccgccacatgatgtgaattccgagcctgagaaacctgggcaacagctcaaggaagccatccttagatgccgtcatcttgaggaggttaagagcctggtttcacggtgtctgacgtccgaggtgacgaagagaccatccatggtggaagtagcaaaacatctcaagaacataaatgatttacatgatagcacagcttgccatgagctggcgatttatcaatctcgaatgctttcgggctag

SEQ ID NO: 319 - DNA, 446 bp, Oryza sativa
  Clone ID: PAT_MRT4530_100292C.1
aggaattcggcacgagggaaaatgatggtacctgtattaatttcgaattagaggtaaacaaaaactaataattatcgtgcccttaggtcgagcctagttcatttggtccagctaggatagagtcctcagcccgaactttgagtgcctattaaaaagatgctctgccaatgtagtcctggttttcataattcttttggcaataatttaggaaggcgtaaatttggttgaaattggtactaaatgggtataattatttaattattaatgcgtacggatgtttttgctggaatgaccgaaggaggtcattcaatgtaattaagataggaaggatgggtggaacattgaacaagcagtacaagtatataatctgggtattgaaggttagaatattaccactgtgacgaactggggatgccaactgccaatatattcagttatattcttaa

SEQ ID NO: 320 - DNA, 509 bp, Oryza sativa
  Clone ID: PAT_MRT4530_100293C.1
aaattattttctttggttgggaaaaagacgtaccgaaagtaggagaaaaaaaatattggaagatagagaagaaaagttgtgatgctcgagccatggtcggtcgagttgtccggtagcttgaccgcgatgttgcgttttggatggatgctagctctgcactcgtcaatggtgagtcaggtcgatgaagacgacgatgttgcctaagcttaatttgtgtgtgtgatatatgttatgctagctacgtagatatctagggttttacgtcgcgtacatgcgtatgcagtacgcacgtagtgtaattggggtattcttgatgatatggggtgatgagtttttggattattacccttgtatcaagaaatttactatgtacacatgtggtctactctgtctccacatggtgatgtacacaagtggcattattgatgtatggtacggtctagttattaatcatatgaatgtgtgggtgtgcttgacaaaatattggaatatattgtgttcttggatgt

SEQ ID NO: 321 - DNA, 291 bp, Oryza sativa
  Clone ID: PAT_MRT4530_100294C.1
atggtggcaaaaatagggaaaaaggtggaggaggtcctgagggggctttttaaggtggcggtgggctcagtggaggctggggataagggcggtggcggttgcgacgggatggataaggatgccgcgtgcgaggggcgaggccggaagcggcatgggagcggcggtggctgttacggcggtggtggcgcgaggtcggggatgggcctgacagtacctcccgaggctgggcgtggcacggaagcgtcggcggctgttgcggcagtggcggcgcgaggacggggacgggcatga

SEQ ID NO: 322 - DNA, 1488 bp, Oryza sativa
  Clone ID: PAT_MRT4530_100295C.1
atgaagatgctcctcgccgccctcgtcgtcgtcgccgccgcctccttcagggcggccgaggcggcgctcccgtcgatggcggtgggcgtcaactacggcgccaacgccgacaaccttcctccgcccaaggacgtggcggccttcctcgccgcgcacaccaccatcgaccgcgtgaagctgttcgacgccaacccggccttcatctccgccttcgccaacacacccatctccctcgccaccggcctcgacaccgcccgcgcctgggtccgcgccaacctctccccctacgtccccgccaccaacgtcaccctcctcctcgccggcaacgagatcctcctctcccctgaccccaacctcgtcctctccctcctccccgccatgcgccgcctcgcccaggccctccgcctcgagggcctcaccggagtccgcgtcaccaccccgcactacctcggcatcctcgccccctccgacggcatcccatccaacgcccgcttccgcccgggctacgacaccaagctcttccctcccatgctccagttccaccgcgacacgggctcccccttcatggtcaacccctacccctacttcagctacaacaatcagacgctggactacgccctcttccgccccaaccgcggcgtttacgaccccaacaccaagctcaactacacctccatgttcgacgcccagatggacgccatctacaccgccatgaagcgcctcggctacggcgacgtcgacatcgccgtcggggaggccgggtggcccacgcaggcggacccagggcaggtgggcgtcggcgtggaggaggccagggacttcaacgaggggatgctccgcgtcgtcagcagcggcaagggcaccccgctcatgcccaaccgcaagttcgagacctacatcttctccctcttcgacgagaaccagaagcccggacccatcgccgagaagcacttcggcatcctcaacccggatttcacccccatctacgacctcggcctcctccgccaatcctccgattctggagctccaaacccttcgccgaatccatcacctaaccctagtccgaaacccgctccttctggtggagggaagtggtgtgtccctaaggctggtgcgagtgatactgacttgcagaacaacattaactatgcctgtggctatgtggactgtaagccgatacaaagtggtggcgcatgctttgatccgaacaacgtgcagtcccatgctgcatttgtgatgaatgccttctaccaggccaacgggcggcacgactacgattgcgacttcaagggcaccggcgcggtcacctccaatgaccctacagcattacacattactagactgtcaaatacacttattcagaaagaaagacctgctatgtttttgaacatggctacgggagctgcaaatacgtctcctgacgggacgcagcaagccatggcagtgcaggtgcagcggcaccaacctcgagtctacctccaggcttaa

SEQ ID NO: 323 - DNA, 487 bp, Oryza sativa
  unsure (1)..(487): unsure at all n locations
  Clone ID: PAT_MRT4530_100296C.1
ctccgcgtncgtggtcttccggtnggccgtnctgcgcggggccgggcgtgctccgtgcggctggatgcttgggcggccttgccgccgtggctgcgtngcgtntgtgctgttttggtccggtgtttgctcgctggacccccgccctcgtgcggtcgtctgccggttcccgggccccgtcgctctccggtcgggggggcgccgtgccgtcccaggcttgttgaggtgcttgcgcgctgctgcccgtgcctcgggctgtggtgctcggtctcgtgcgccgcgccgcgggcgcccctccgggcgtcccgcggtgggttggcggcgcgtgcggcgtggtctctcggtgcccggtgccctntcgtgccggtgctgccttgggtccctggtgcgtgccnttggtcccggttgccggccgctgttcgggctcgcggtggtcccgtcccgtgcctgccctttggcgtggtgctcttggttgacgtcggcccgcccg

SEQ ID NO: 324 - DNA, 1603 bp, Oryza sativa
  Clone ID: PAT_MRT4530_100297C.1
ggtgcgaggaagctactcctgcacgacaacattaactagagatgagatgaggtagcttctcccaccaatgatgaagatgctcctcgccgccctcgtcgtcgtcgccgccgcctccttcagggcggccgaggcggcgctcccgtcgatggcggtgggcgtcaactacggcgccaacgccgacaacctccctccgcccaaggacgtggcggccttcctcgccgcgcacaccaccatcgaccgcgtgaagctgttcgacgccaacccggccttcatctccgccttcgccaacacacccatctccctcgccgtctccctccccaactccgacctcccttccctcgccgacaagcagaccggcctcgacaccgcccgcgcctgggtccgagccaacctctccccctacgtccccgccaccaacgtcaccctcctcctcgccggcaacgagatcctcctctcccctgaccccaacctcgtcctctccctcctccccgccatgcgccgcctcgcccaggccctccgcctcgagggcctcaccggagtccgcgtcaccaccccgcactacctcggcatcctcgccccctccgacggcatcccatccaacgcccgcttccgcccgggctacgacaccaagctcttccctcccatgctccagttccaccgcgacacgggctcccccttcatggtcaacccctacccctacttcagctacaacaatcagacgctggactacgccctcttccgccccaaccgcggcgtttacgaccccaacaccaagctcaactacacctccatgttcgacgcccagatggacgccatctacaccgccatgaagcgcctcggctacggcgacgtcgacatcgccgtcggggaggccgggtggcccacgcaggcggacccagggcaggtgggcgtcggcgtggaggaggccagggacttcaacgaggggatgctccgcgtcgtcagcagcggcaagggcaccccgctcatgcccaaccgcaagttcgagacctacatcttctccctcttcgacgagaaccagaagcccggacccatcgccgagaagcacttcggcatcctcaacccggatttcacccccatctacgacctcggcctcctccgccaatcctccgattctggagctccaaacccttcgccgaatccatcacctaaccctagtccgaaacccgctccttctggtggagggaagtggtgtgtccctaaggctggtgcgagtgatactgacttgcagaacaacattaactatgcctgtggctatgtggactgtaagccgatacaaagtggtggcgcatgctttgatccgaacaacgtgcagtcccatgctgcatttgtgatgaatgccttctaccaggccaacgggcggcacgactacgattgcgacttcaagggcaccggcgcggtcacctccaatgaccctacagcattacacattactagactgtcaaatacacttattcagaaagaaagacctgctatgtttttgaacatggctacgggagctgcaaatacgtctcctgacgggacgcagcaagccatggcagtgcaggtgcagcggcaccaacctcgagtctacctccaggcttaa

SEQ ID NO: 325 - DNA, 1194 bp, Oryza sativa
  Clone ID: PAT_MRT4530_100298C.1
atggatggcggggtgggtaggtggcggaaatttctcacgccatggaagaagacggcgcaggacggcggtggatcattggccgatgtcacagtgccgttcccccaacagcctcatcctcaggtggcagaggcagacacgcagcaagctagcgatggcagtcgtagccacagccgtgtacaggaccgcctccatcgtctggccgccatggccgcgcgagccggcgtggcttcgtcttcggctactctctccccaagggttgcacaaggcgggtctaatattcgaggagagcaaagaggcaagaagaggaagtccccttgcccggccaagagaatgtacaaccttggatatttgaagggccatgagagaaaggaggtttcagctgaattctcggtgcctatcaggacagtacaacgtatatggaaaaaaggcaaaagctatttggatcaagatcaaaacaaaattgaccggctaaagtggtgtattgaaatgcttgacccaaggagtgtgcctcacaatcctgtcttcaaaccactatttgattacattttcatatatgagaagtggttcaacattacaaggaagacggtgcaatattacgcagctccaactgcctcgcgacgcatcaggataattcagaacaaaaacttcatcccgaaaataatgatcttaacagctctcgccagaccaaggtttgactcaaatggaaactgcatctttgatggaaaaataggatgtttcccttttgtgacatacacagctgcgaagaggtcaagtgtgaaccatcctgcagggacaatcgagatgaagcccattgagtcaatcacaaaggaggtaatccgaagcttcaagatagaaaaggtattgccagctgttcgggctaagtggcctcgtgaagacgccggcaaacctatatacatccagcaggataatgctcggcctcatattgcaccggacgacagaatgttttgtgaggctgcgaagcaagacggctttaacatcaaacttgtttgccagccggcaaattccccagatttgaatgtcttggatctgggtttcttcaactccattcagtccatccagtacaaatcagcctcaacaacaacagaagaacttgtagccgccatcgatcgagcatttgaagattatccagtgaggctatcaaacatgatttcttgtctcttcatgcatgcatga

SEQ ID NO: 326 - DNA, 108 bp, Oryza sativa
  Clone ID: PAT_MRT4530_100299C.1
tcggttttgaattcttaattcatgagctgacgggagggttgcatgtaatcacaaacagatacttaagccagagttggatttaaagcttgtgtcaaggattatacaatt

SEQ ID NO: 327 - DNA, 134 bp, Oryza sativa
  Clone ID: PAT_MRT4530_10029C.1
gttcgccgtctcctcctctccctcggccatgtcttctccaatcacggcaagccctggagctccatccccgatgtaaacagagccggccacttcttcttcctcattgctgtttcactgccgtccctgcagatcag

SEQ ID NO: 328 - DNA, 415 bp, Oryza sativa
  unsure (1)..(415): unsure at all n locations
  Clone ID: PAT_MRT4530_1002C.1
cccggttcgacccagcgttcggtaagcatatagtagaatcctacaaaaatgaagacattttcgtatttgctctccttgctattgttgcatgcaacgcttctgcacggtttgatgctcttagtcaaagttatagacaatatcaactacaatcgcatctcctgctacagcaacaagtgctcagcccatgcagtgagttggggggggggcagcatancatagtggcaacccccttctggcnaccagcttcgtttcaattgcttaacaaccaagtcatgcagcacctgtgttgcctacagctcaggctggttgcgctnctttctcactaccaggccattagtngcgttcnggcgattgtgccgcttctcctgctgctgccggtcggtgttgtcttctttgttcggtctcttgcttctgc

SEQ ID NO: 329 - DNA, 4067 bp, Oryza sativa
  Clone ID: PAT_MRT4530_100300C.1
atgacgaaggaggagggcagggtaggtagacgtcgcaaatttgtcacaccatggaagaaagcggctcaggaggtcggcgacggcggtgcagaggatcgtgtcgagcgcctcgccgccgcggcttcgtcctcaactgctctctctccaagggttacactagatgggtccaatgttggagggaaaagaggcaaaaaaaggaagtctccctgcgtggcaatgccattctttagaaccccgttgagcagaatgttactgtcccctagcatacggataaggtctccttctatacaacaacgaacatcaccttctgctacaacccatggaatttgtcaaggtcgagagcaaagaacaatggatattgatttaaatttggaaccgggagatacatatgctgccacagatcccggagaggctggatttgatcacagtgctgccacagatgctcaaggcaatggagaggctggattcgatcacagtgctgccacagatgctcaaggcaatggagaggctggatttgatcccttcgattcaaatgctgatgatgatgtcctagtcactctagaggagataggtgttgaccctggccaggagaatgtacagcctcagtttgatcctttcttcgattctgatgttgatgatgctatcctagttcctcaggagaatacacacaagaatgtcgtgcttgataatgacaaacggagagcaatctttgacgccatgcttgtaaaggcaagaaaaggatatttgaagggccatgagagcaaggaggtttcagctaaattctcggtgcctatcaggacagtacagcggatatggaaaaaaggcaaaagctgtttggatcaaggtatttcagttgatgttgcgagtggaagatctaggtgtggcagaaagaagaaggtggtggatgtgtcctgtctcgaagatatttcaatattgagccgcaccacaatacaggatgtagctactcaacttggtgttagcacgagtaaggtctacagaatgaaaaaagagggtgctataaagcgtgtatctagctcattggatccccacttgacagaccaacacaaaattgatcggctgaagtggtgtattgaaatgcttgacccaaggagtgtgcctcacaatcttgtcttcaaaccactgtttgatttcattttcatagatgagaagtggttcaacattacgaggaagactgtgcgatattacgcagctccaactgcctcgcgtcgcatcaggacaattcaaaacaaaaacttcatcccaaaaataatgatcttaacagctctcgccagaccaaggtttgactcaaatggaaactgcatctttgatggaaaaattggatgttttccttttgtgacatacacagctgcaaagaggtcaagtgtgaaccgtcctgcagggacaatcgagatgaagcccattgagtcaatcacaaaggaggtaatccgaagcttcatgatagaaaaggtattgccagctgttcgggctaagtggcctcgtgaagacgctggcaaacctatatacatccagcaggataatgctcggcctcatattgcaccggacgacagaatgttttgtgaggccgcgaagcaagacggctttaacatcaaacttgtttgccagccggcaaattccccagatttgaatgtcttggatctgggtttcttcaactccattcagtccatccagtacaaatcagcctcaacaacaacagaagaacttgtagccgccatcgatcgagcatttgaagattatccagtgaggctatcaaacaggattttcttgtctcttcacgcatgcatgagggaagtcatagaagtactcggtgacaactcctatgatcttccacacataaaaaaaggagtgcttgaaaggcaaggtcgccttcctttgcaactaaggtgtgatgctaagtcagtaaataatgctaacaattatctcagactagctatctcaatttacaagaaacagcagctgggatggcagcagccactttacaagctcgctgtcggaagaaaaaagaaaggaggagacttgtggcaatggagcttttcgaagcccggcgatctcctgcaccaacgagacgtgcaccagcaccgtcctccacgccatgtatcagcctgcgaacccgccgccgccgcgagcagcgaacgaaagaatcagggaaaagccctcgagccaaagccgaatcgagaggaggagagggcagccgtactgagggcgatgatggagaggacgaaggcgaaggcgaggagcggccggaggacggaagacgacggcgatctcccacgctgccgccgccagcgtggctcctcctccggccatggtgccgcggcggcgcttcgtcggcggaaggggactatgcgcgtgggaggcggcgccggacttgagcgccatgcgtggagggcctcgccgtggcaggggcaggaggaccgccggcggaggagctcctcctgcttctccgcgccgccgactgaggggtaaagatggaaacggtatcggccggtgtacgccgcggttgccaacgaaggcatcgtctcgagcaacggagtcctcccggtatttgtgttgaacttgaaggtgacaaggctagggaaatccatcctggtgcgatagtcgcagtagaagacgcagtatgttatgctcagatgcttcaacgatggagaccacatttccaggccaccaacgtagcaatccttcatcttgagatccaccagcgaaggacagctcgagaaatcaagaacctggtcgtttccctggacacccctcagctctagggttgtgaggctgtgggagacgaggggcgagtccgagagagggatgggcacccgggggtgggtggagacggcgaaccggagcgcccggacctggcggcgaagggcgcggcggatccaggtgtcgccctgcagctcctcgccggggaaggcgccgtcgaatctgaggtcgaagtcgcaggcgtccagcgccgcgccgccgcggcggaggcggagcaggctgtcgacgaagcgggcgagcgcgtcgaagctggcccaccccctgtcgccggcgacgcggacggcgggcacggacctccagaggtcgcgccagcggcgggcgagcgcgcaggtccgcaccgcgtcccgcgacggcaggagggagaggacgtggtggatgacgtcgtccgggaggtcgctgatgcggtccgccccgctcgccatgtggtggcggccgggctcttcctcgtcggcggggctttccgtcgaacaggtggcgtgcgccgccgcggcgagtgatgacattttatccatggcggccacgatgtcatttgcaatatttttcgcatccatggcaataccggccaatcctctcctagcaaacccagcacaatacaacccattttcacctctccaatgatttggaaaataatttttagggaaaccatcgtctttaaacatgctttcaccattcgggctacgaacaactatggaggtgtgggctccatgcgtggcaaggtcataagcgatctccatgccagaattcccggcacctaccacaagcacactcttcccggtataggctctcccggacttgtaagctgacgagtgaatggcttctccctcgaacctactgaggccaggaattggtggaatgtttgccgcactgttctcgccagcggccacaacaaggaactgtgtagcaagccttgccacaacactagtgtccatgtctcgtactagcacgacccattggttcttacctttatcatgtattgctgactcaacagcagtgtggtacctcggccgtatcccaaactggttagcatagctatctaggtactccacaaacatatccctaggaacgtacgtcggcgtgcccgccggatacgccatgtgtggcagctcgcagaactccttggcgaggtgtagcttgaggcggtcgtaggcacggtggcgccacaacgatgcggtgctggactcacgctcgacaatgatgtatggcacatgccgctgtgcaaggcacgccgccgttgctaggcctgctggccccgcaccaacgatgagaacaaccacgtcctccatagcattcat

SEQ ID NO: 330 - DNA, 2100 bp, Oryza sativa
  Clone ID: PAT_MRT4530_100301C.1
cccactcgttctgcggcggccgtgagcaccaacactcacgcattccttcctactccgcgagatctccggattcgtttcggtgttttgcgagtcgcgcccggagaagaggagaggaaatccggtcaatcgcggcgtcggcgtgccgtcgcttggggtggtgttggtggttctgaattttgattgcttcgtgcttttcgtttgggggagggcagtggtcgccatgggattggggaacgaggcgagctcgtcgtcgtcgcggctgctggatccggcgcctctgctgccgcaccacggtggagatggcgccgggaagctgtcgtcgcagcccaagaccttcgcgaacgtcttcatcgcggtggtcggcgccggcgtgctggggctgccgtacacgttctcgcggaccgggtgggcggcggggtccatcctcctgctctccgtcgcggcgctcaccttctactgcatgatgctgctcgtcgcctgccgccgccgcctcgccgacgagcacccgaagatcgcctcctttggggacttgggggacgccgtgttccgcggtccggggcgcctcgccgtggacaccatgctggtgctcagccaggccagcttctgcgtcgggtacctgatcttcatctcgaacaccatggcgcacctttaccccgtcttcgcgccctcctccaacgcgctcctctccccaaaggcgctcttcatctgggccatgctgccgttccagctcgggctcaactccatcaagacgctgacgctcctcgcgccgctcagcatcttcgccgatgtggttgacctcggcgccatgggcgtcgttctcggggaggacgtgtccgtctggctcgccaaaccaccacccgtcttcgccttcggcggcctgagcgcgatcctgtacggcatcggcgtgtccgtgtacgccttcgagggaatcggcatggtccttccgcttgaggcggaggccgccaacaagaagaagttcgggaccacgctcgggctatccatggggttcatcgccgtcatgtacggcctgttcggcgccatggggtacatcgctttcggcgacgccacgcgcgacatcatcaccaccaacctcgggaccgggtggctctcggccgccgtgcagctcgggctgtgcatcaacctcttcttcaccatgccggtgatgatgcaccccgtgtacgaggtcgccgagcggctgctccacggcaaacgctactgctggtggctgcggtggctgctcgtcctggccgtcggcctctcggccatgtacgtgcccaacttcaccgacttcctggcgctcgtcgggagcagcgtctgcgtcctgctcggcttcgtgctgccggcctcgttccacctcaaggtgttcggcgccgagatgtcctggtccggggtgctcagcgacgtcctgctcgtcctgctcggcctctcgctcgccgtcttcggcacctacacgtccctgctgcagatcttccattcctccagcgcttaatctctggagaatctttacggatagctgcgccgatgattgatttgctcatttgcttcgcgcgcgggtgtcagcctgtcaggtacgctggttgcattcttcgtgtacagagaaggtgatcggtcgatcagaggggcaatgcccaattcagcttgctgttgatttgggcatggacagcgtgcatcggccgcattctttcgattacaagtcagatggtttgtacaagttagcgtggatggcatggagaaatctgtatggttttgcaacgacagattcccatagctactcgtgtcagttaatatttatgtgtatgtcttggatgtttcagctgctgcattgcacggtggaatcgatgaaaggacatagtaagtttcagtctaagtttaagcctatttagttgataaataaagtgtctagttgaggttgcagcttgtgtgcggtactgcgggttgtgtcaattaggaaggcaagcaatcgggacgacttggcaaagtatacattctattctgttcattctgttttgtcccaagcaagtaaacttgtaatgccccaactaccaatcgaaatatcgaatcttctttcaaaaaaaaaaaaaaaaaaaaaaaaaaaaaaaa

SEQ ID NO: 331 - DNA, 1755 bp, Oryza sativa
  Clone ID: PAT_MRT4530_100302C.1
gcccacgcgtcctatcctctttccccttccaccgccactgcgccgcaattcgccttcgctgcgggcatctgcagcagcagaatcatgggctgaaatcgaaccactgcgcgacaagggtgccaaggataactttattgtgctgctgaaggaagacatcttattgacctgctagttctgtagatgatttttggagtgctataaatatcgaggcgcgagttcggactgcaagatacaacacaagagtgagaaaagaaaggctttagctgagttacaggatggaacaaggtcagggagatagatactggtgccaccactgcgaggaagtgatcgaacctgtggagcctgatatgaagtgtcctagctgtgacagcgggttcgtggaagagatggggtctgcaggctttgagccatcgaccaacttgaggtctgatcgtatctccctctgggcaccactgctgctcgggatgatgggaggctcatcgcggcgagcaaggcggctccgaaggcagatcatggaggatgatgacgacgacgatgacgatgaggatgatgaagatgattcagaccatgagcttgaagacttgtttaggaggcagaggaggggctcatctcttgtaaggctgctccagaccctccgggatgacttgaggggcttggatgacattggcagggatagtgacagagacagggaaagggagagaagggagagggagaggctgagggagcgggagagggagagggagaggatgagagagagggagagagaacggaggagagaaaggacagaaagcttgatactgatcaactccaacaatgaggccattattctccaaggaacatttggacctgatgacaaccaggatgactcgagcaatacaagttctggtgtttcacttggtgactactttcttggtcctggattagatatcctcttgcagcatttggcggaaagtgatcttaatcgttctggtacaccacctgccaagaaggaagctgtagaagcattgccaactgtgaacatccaggaagtgttaggctgttctgtctgtcttgaggatttcgaaatggggacagaagcgaaggagatgccttgtcaacataagttccactcccagtgcatacttccatggctggagctacacagttcttgcccaatctgtaggtttcagttgcctaccgaggagtcgaaaaacccatgtgaatcagccggtggaattgtgtcagtgaacgatgatggagatgatgctggtacaagtagtgacgtagatagtgctaaccaacctggtagtcctatattctctgctttgagtgcacttttctcaaatccatcatcctcatcctcatcctcatctgatgataatgcaccacactcttctgagagctgaagccagcgctgggcctgggcttgcaatatgtcaatggagttctgaaatgggactcctgagaggccggcatctttatatctcgtggtttctgtacatattttaaagtttaatccgctagacaagctattcgcgtttcctttatgaaacctgtgtggtttgtaatcagtttggtgcctgttatgtctaattatgtaaaataaaatttagcctcaagcatgtttacctactctcaaaaacttgatcggggccagagaactgctgatctggttagcagcttgaccaatgcaaggctacttcagtactatatatggggatatccaacattggcattttgcacggcgggggccctgcagcccgggaaaaaaaaaaa

SEQ ID NO: 332 - DNA, 830 bp, Oryza sativa
  Clone ID: PAT_MRT4530_100304C.1
ctcaagtggtggaggggaagaggagcacaaggagaggcagacggcgataagtcgctcgctcgccaaattcgccatgatcgggcggggctcccctaccgtacacgccccggaggaagcccaggccccgcccatgctgctgagctcgtgatcctggctcattttcttctgcttcctattccttgtaggggtttctggtccgaggcgaccatcaagatccgtgcttcttgtcctttggcccgggcggagtggtttctttcttgcacgggacgtgctcgacggaatgcctgtgaggggaattcgctcgctgtgagttgggaggggtggtagctgtgcttgcctgcttggtctggtcatggtggattgagtgcttgggggtggtgggatttggtccctgggcatggccggttcggagaggaccgtggtttggttcaggagggacctcaggatcgacgacaacccggcgttggcctccgcggcgagggacggcgctgtgctccctgtcttcatatggtgccctgcggatgaagggcagttctatcccggccggtgctccaggtggtggctcaagcagtcgctcccccacctcagccagtcactggagtcgctcgggtgcccgctcgtgctgatccgagccgagagtacccttgaggctcttcttgcggtgcattgattctgtcggcgccaccagattggtttataatcatctgtatgaccctgtttctcttgtgcgtgatgacaaaataaaaaaagagcttacggcactgggaatttccatccagagtttaaatggtgatctgctgtatgagccatgggaaatttatgatgatagt

SEQ ID NO: 333 - DNA, 407 bp, Oryza sativa
  Clone ID: PAT_MRT4530_100305C.1
gagagtaggtaaacatgcttgtggttaaattttattttacataattagacataacaggcaccaaactgtttacaaaccacacaggtttaataaaggaaacgcgaatagcttgtctagcggattaaactttaaaatatgtacagaaaccacgagatataaagatgccggcctctcaggagtgccatttcagaactccattgacatattgcaagcccaggcccagcgctggctgcaatacagataatgcaatctctgagggtgaaatcaagcattaaccaaaaagaaaaatactgttctcaccattgctccaatcaatgcggtcaaagtaatataattaccttcagctctcagaagagtgtggtgcattatcatcagaagaggatgaggatgaggatgatggatttgag

SEQ ID NO: 334 - DNA, 103 bp, Oryza sativa
  Clone ID: PAT_MRT4530_100306C.1
tgttccatagtgattgtgcatatagttatgactaagtaacgtataaaatcgtcattgacagtaatttacgatagcgttgttgggatatcttgttgcatatggg

SEQ ID NO: 335 - DNA, 147 bp, Oryza sativa
  Clone ID: PAT_MRT4530_100307C.1
atggcacataagcaaggtggatctgacatggcgattgtgatctcctggttcccggggtctcggaagacacccgatgtgtgtgagtgggcgccggcggtgttcgcggcctcatcggtccacacgccggtgttggtgacgtcgtcttga

SEQ ID NO: 336 - DNA, 5215 bp, Oryza sativa
  Clone ID: PAT_MRT4530_100308C.1
ctcctgcctcctccctcctctgcttgctccttcttcttgtttcctccctccattttcttggggtacacgtctcatgttctgattcttgaggtaacaatgatgcaatagcatcactagaatacaatctctcatctcgatcataagatcattacaaaataccatttttgacaaatactcatttgaccccactaatacagggggcatcatccatctcataattctcagctacacactgagaatttaccgctgattttcctaataaaaatggagtagtaatagtaaattgtactgctgtaattacagcagtatactggtattacgtatgaacatacgtacagcttcccgtctcacccagccaccttctttcacccctcctgcgccccccacttggttgcgccctctcccaggctcctctctccctccctaggaaggtcatccatgtcttccaacccatcggagccttctgtcacactcccctccgctcctctctccttcgtgatgtgtggctgctcagacaccggagcgttggcccacgattcagtcccccctcccatcccatcgtcactaccgccggcaatctcgggattagaagatgcaccccgacccctctgactcggtcccctctcccctcgcctctccatgtgcggtttcgacccactcttacgttggctacccgccaaacacttgtccttcccaacccccgctgtttccctgccgtcctaccacacgtgcttcttcccgtcggtgcctgactagatctccgggcccccgcgccgcgcgaccttctcggcgacggggccgtacccgccgtggagccccgcggtggcctccgcggggcgcgaccgcgggagcggcaccttcgcggacagctcgacgggctcgccgtcgaacaccctgcgcgccgcggccaggacgcggtcgccgtgcgcgaggagctccccggcgtaccacgacaggaagaagcccccgtacgcggtctcccacgagccccccggggacctgaagaaggtggagctctccggcgactcgccgtaccgcggcgcgtcgtgcggccccgacaagccccacagcggctgccccgccgccacggcgtgccgcttcagccgcgccagcatgtgcctgtcgtagcactggaattcgcccgcgccgccatagccgccggcgccgtcgctcccaggcggatacgaagggtacttgagctcgccattgggacccaagctcaccgtcacatccgtgacagtcgagcccaagaagtcatggaaggcggcggcgaagctgcggaagaaggcctcgtaggcctggagcggcgacttgccgccaagaaccgggagctcgtcgacggcgaaggagaggcacccgtcgcggcggttcccggagcggtcggcgaagaggatgtcggggtcggcggccgccgccgccgcgacccaggcggggagcgcggagccgtgggtgtcgagcgagacgcggaggcagagcccggcgtcgcggaccatggcggcgacggcgaggtaccctgcccacccgagctcgtcgccggtgggccccggctgcgtgttggccctcgtgtccgtccgctcgtcgccgagcacaacaaataaccttcggattaatccaggttaactgtacagcaagcttggtttgagcaaactacacaggttaattcacaagaggtgtgtgacactgacacacaaaccaacaacgattatcttcatgcaagtaagcacatgtacagtgaggtctcagtgaggtttcaaacacacggcaacccagaacactctagcgggacggaggtacggatggctaaacattctcacaaataaatctggccttaaccgctcgacttcgagcgaagaagaattattccagcaactgaaggcgtcacctcgaagaatacacaagtagctctacagaaaactcgtggcttgcatcatcccgtcattcacagtaaagaatcagcaggccaacgctagcatcttgcaagcagctttttttagatcttttccttggcgaagaaccgactgaaaccccggttttgtttctcgggcaattggttagaaattgaggaagatgatctcgatctatgctttgggcgcttggatccgtttggtgaaaggaaagggcttccgtccgcttcagagggggcattgtgtgtcttgtacccattcactggggattcatttcctgatgcatgcatttcctgatctgtatccagttgacctgttggcttctgtgagtattcaacaccttcggttgttccagccgcgtcctgcaggaaatcttccattcgctggtttggcgaggaacccattgattctgctggaggacgcatagattgtagttggcgaccaagaatcaatatcgtctcctggcattctgcaagtttctctgctgcagctgcgatctctttctcctgctttgctttggtatctgcatcctcatccacacacattgaattcctctcgttctcatacctttcaatcttctcctcgagatctctatatcttgttatatcctcctgatgattttgtctttcatcatcaagttcagctgtcaaaacttctattttggactgcagcacttttatttcgttttctaattcagctttccttgactcaagtgacttgtaggattcagccatacacttcaactgtgtctcagccaagctgtttgatttctcactggcaaccaacttggatgtcaactcttcaaggctcttctccaactccttaaacctaaattttgtctcttctataacttcattgcactttgataattctgcctccaaattcaacttctcagatttaagttgctcgaattcctctgatgagcatatctgcacagcagtcttgacatcacatccagagtcagtaggaccttcaatctccggatcagaagatgaacgaggaaggcaaggaccagaaatgctgtcctttagtggctcaagctgcactttattttcaagtaaagtcactttatcaacataatccaaattattattgtcagcttctttggtgttctctttcaacatcatgaacttaatctcactggttcctgacaagataagagacagcgtcataacaatgtcatttagaacattctcatttgatagagctttctctactagtgcagagaactgctgtattttgtcacataaaccatcacaatctgaagactgcccttggaacttggacacttcttggtcaagtgacttaacgaagtcttgaatctttaaaatggcattgactagttcttgatccatagcatgcttgctcccgctgcttgaatgcttcattagtgatccattgtcagctacttcaaccatgtcaccatgatgagtcttgctatcatttgatgaatctgcctcatcttcaatatcctttagaatatttctgatactatctagtatatttccagcattgttctgtggtgattcagaatcaagcaaggaagatattctagactgtagtttcaagagtggagagctgtcagacagctgcagtttattagatggagtccctggcaatgccaaaactgactgcgaatctttaacaccatctctttcagtaataccagacaaagaagcttccgtatcatcaatcttcattttttcaacagtactgacatgtccatttgcttcagatgacaaacaggctagtttctccatctctaggaagtcatccatgagttccaaccgattggagccttctgtcacactgctcttagctcctttctctttcttgatgtgtgagagctcagagaccagagcattggcccaagattcagtgcaacttccttcatcatcaacaccatcttcagacatggaggtcatactaggtgggttgcttccattttgactcagtgcaccatcaaagtggatatccatgttgggattcgaagtactcttacgttggctaccagtcaacatttgaacttccaagccacggagtttgcgtgcagtcagaaactcattctctttctgcatgtgctgtaagttttcaaatgcataatcaggaacaggggacataggggacataggacgatggaagctggaattctttgcaggcgatcgtcgcaacctgctttctccataatctctgcccaagctctccacttccattttcatttgagctaatgcagcaggccctggtaacttctttcgaacaagaccccgtaatctttggcattcagcttccagttttgatattttctttacatcctccatgtgctgtttagttgcaacatcagctgagcgcacactcatgttcttttcctcattgcggatttcaagctctttggaaacaacatgaatttcatatttcagtgaattaatttccctttcacctgactgaattgtgtttttcaagacttcgatttcagcctctgctcgagccttttcctcatcaatcttcatcaaaaggtctccccgttcctcgagtgaccttgagagtgcatcattctcagcaccagccctaatgagctcctgttcaaactcaagtaactttgcttcaaactcggcctttatcttctcccactgtttggtttttgcaaagactacatcatgtagcttctgctcaccttcttctttcacagtccttacttgcttcatgcattctttcagagcaccatccagatgggcagctctttcctcagccgctagcttagccaatgtaacagtttctagctgaagcttcagtgctgaggcctccgcttcagctttctcccaacctgatacagcttcttcagcaactttagcatgctgtttcactagggcatctttagtagtgatctcagactgtgccgcagagaggtcctcattcaaggccttcaccttttcatttaaggttttcacttgttcttctgattcagtaaggtgtgcatatgtttctggtgaaatctgcacatattttggagctttgtcatcgggaggcgagggcgcggctcggggaggctccacgcggaatgcagatccggcggggtcacggtcgccggaatccgccgcaattccggcgtgaacttgccgctcacacctcctcaaccgatcagcgccgcactgcacaccaggagctggactcgttttgcgtatcttcccaatctcctcaatccccttctcctcaaacacacccgttacacggtagatccgcccctgccgatgtagggtggccttgctttctccttggagcaaaatgcccctgtgccagttgctacccctcgccat

SEQ ID NO: 337 - DNA, 304 bp, Oryza sativa
  unsure (1)..(304): unsure at all n locations
  Clone ID: PAT_MRT4530_100309C.1
cacgacacgacgcaccaatggcgctcgtctccgcctcctcctacaccaccgccgtcgcggcgctccccggcgccgccagggcctcctgcttgctcggcggcgccggcaggagcggcaggctgctgctgaggcaggccgagtcgtcgtccgcgcgggcgtcgttcgccgtgcgcgccgggttgcccgacaggccaatctggtacctcggcagcaccccnnccgcgaggctcgacagcagcctccccggggacttcggctactaccccctgggaatcggatcggacccggagagcttgcagaggaa

SEQ ID NO: 338 - DNA, 441 bp, Oryza sativa
  unsure (1)..(441): unsure at all n locations
  Clone ID: PAT_MRT4530_10030C.1
ggcagtgncagttgggttgtaaagtctgcaaggatagtatnatcagttgttggagtggcgtggnaagcaggagnatcatggaagatgctggagaagctgtggngannngacgtggtggccgggtcctcgnaccggngtaccccggcctggagaagctccngcaagggccgctacatacccgcccccttgtcatcaacaaagatgggggcggcgaggcgagcggggcggcgtacaagcggacgcagtcgatgccgacgaccccgactacgccggtgacgccgtcgtcttcgtctccgacgacgacggcgacgacgacgccgcggggcagcntcgtgtggtggtgcgtgttccacccggggagtctcctctgccccctgagcctcgtcgccggccttttcgtccgcccgctgtccttcttttctctcgtcttccccttgtctg

SEQ ID NO: 339 - DNA, 456 bp, Oryza sativa
  Clone ID: PAT_MRT4530_100310C.1
gcggtccgctgcttaccagggcataattgcggttgttggtactgttcttattgctcttcttggaatgcaagtgatcattcacaggcgaagtctcaaaagacagcgtcttattatacagagggacgagtattttcaacaacatggaggccatcttctgtctgatatgatgaaaatcgactgcaaccttgaatttacgttgtacagacaggaagacattgaggtagcaacaaatgactttgacaagaatcaaatcattggagaaggaggacaagggacagtttacaagggatttatagaaagcattcctgttgcaataaaaagatgcaaagggatggatgaaagcaggagaatggaatttggacaggagctacttatactatgtcgcgtcaaccacgatcatgtagttaagcttcttggttgctgcctattgtttgaagtccctattctggtttatga

SEQ ID NO: 340 - DNA, 1783 bp, Oryza sativa
  Clone ID: PAT_MRT4530_100311C.1
tttttgggggacaaatactcatttgaccccactaatacagggggcatcatccatctcataattctcagctacacactgagaatttaccgctgattttcctaataaaaatggagtagtaatagtaaattgtactgctgtaattacagcagtatactggtattactactgcacatatgtacagctacgagtcgcagcgtgccagctgcgtctacactgtctgcgcctgcttcgcggtggcgtcttctgcggcgcggccgccggacggcacggcgagccggccgccgtcgccggcggcggcggggaggtcgtcctcgtgcgcctcctcggggcactccatggcgcgcaccagctgcacgaacagcggccagtggtccggcgagaagaactccgcgcccatccgctggtacgtgaagtggcacggccgcgtgcgctcggcggcgagcaggccgccccacgcgccgggggcgccgtcgccgtcgcgcgccacggcgagcgacgcgctctcgccggcgagccgcgcgccgtgctccgcgcaggcggccttgacctgggcgaggaccgccgccgccgccgcggacccgtccatgcccgaggcgatcaccgtgcacccgcgccgcgcgaacatctcggcgacggggccgtacccgccgtggagccccgcggtggcctccgcggggcgcgaccgcgggagcggcaccttcgcggacagctcgacgggctcgccgtcgaacaccctgcgcgccgcggccaggacgcggtcgccgtgcgcgaggagctccccggcgtaccacgacaggaagaagcccccgtacgcggtctcccacgagccccccggggacctgaagaaggtggagctctccggcgactcgccgtaccgcggcgcgtcgtgcggccccgacaagccccacagcggctgccccgccgccacggcgtgccgcttcagccgcgccagcatgtgcctgtcgtagcactggaattcgcccgcgccgccatagccgccggcgccgtcgctcccaggcggatacgaagggtacttgagctcgccattgggacccaagctcaccgtcacatccgtgacagtcgagcccaagaagtcatggaaggcggcggcgaagctgcggaagaaggcctcgtaggcctggagcggcgacttgccgccaagaaccgggagctcgtcgacggcgaaggagaggcacccgtcgcggcggttcccggagcggtcggcgaagaggatgtcggggtcggcggccgccgccgccgcgacccaggcggggagcgcggagccgtgggtgtcgagcgagacgcggaggcagagcccggcgtcgcggaccatggcggcgacggcgaggtaccctgcccacccgagctcgtcgccggtgggccccggctgcgtgacggcccacgagaccggcagctcgacgccgtcgacgccgaggagcttcagcgcccgcagccccgccgacacggccttgccgcggttcacggcgcggccgtcggcggtgaccacgtcggaggggagccccacgaacagcctcaccgccgcctccccctcctcctccaccaccgccgccgcctcctcgccggcctccctgctccggtcgacggcgaggtgggcccgcgcggggctcagcctcagcctcgaccaccgccgccgcgcaaatccgagccggaccaaccccggtcgccttccacccaccacctcctccccggtgcaccgccgcctcgccggccttgcaaccaccgccgccgccgccgctgcctgctgcatcagcacagcctccat

SEQ ID NO: 341 - DNA, 264 bp, Oryza sativa
  Clone ID: PAT_MRT4530_100312C.1
gtccaaaaacaaccgggggattctcatttttgggctagccttatggcagcaaaagaacccttccagacacttggccacttcacagtgaataatgggaaacaagtaattttcaaagtaactcagttgtcaaggctttggtctttgcttcttaaggaagacgaaggcattgaagtaatcgcgaagtgcaagcttttagagaagtgtatgatggagctgatcttctctacttttgggtggaactttagaagaatgatggaagcttag

SEQ ID NO: 342 - DNA, 1004 bp, Oryza sativa
  Clone ID: PAT_MRT4530_100313C.1
caacagtactgacatgtccatttgcttcagatgacaaacaggctagtttctccatctctaggaagtcatccatgagttccaaccgattggagccttctgtcacactgctcttagctcctttctctttcttgatgtgtgagagctcagagaccagagcattggcccaagattcagtgcaacttccttcatcatcaacaccatcttcagacatggaggtcatactaggtgggttgcttccattttgactcagtgcaccatcaaagtggatatccatgttgggattcgaagtactcttacgttggctaccagtcaacatttgaacttccaagccacggagtttgcctgctgtcttagcatacatgtttcttgatgtttgcagctcactattccttttggccaaggcctcttttagcattttggtttcatcttccatggataacaaacgtgcagtcagaaactcattctctttctgcatgtgctgtaagttttcaaatgcataatcaggaacaggggacataggggacataggacgatggaagctggaattctttgcaggcgatcgtcgcaacctgctttctccataatctctgcccaagctctccacttccattttcatttgagctaatgcagcaggccctggtaacttctttcgaacaagaccccgtaatctttggcattcagcttccagttttgatattttctttacatcctccatgtgctgtttagttgcaacatcagctgagcgcgcgtgcggcccagaacatctaagggcatcacagacctgttattgcctcaaacttccgtggcctaaacggccatagtccctctaagaagctagctgcggagggatggctccgcatagctagttagcaggctgaggtctcgttcgttaacggaattaaccagacaaatcgctccaccaactaagaacggccatgcaccaccacccatagaatcaagaaagagctctcagtctgtcaatccttgctatgtctggacctggt

SEQ ID NO: 343 - DNA, 757 bp, Oryza sativa
  unsure (1)..(757): unsure at all n locations
  Clone ID: PAT_MRT4530_100314C.1
cgcattatcaaaccgggagacgccgcctcgagctagtgctcgttgcagcagcaggaggaggtggtggtggtgggattccagagggaagaagaaaaggttgcgggagcaaaaggggaggagggaggcgagggccgaggggaaaaagggagaggagtgggggtgaatcatccaatccacagtccagctcctggtgtgcagtgcggcgctgatcggttgaggaggtgtgagcggcaaggtacgcgtggccgtcgtcgtctccgccgccgccgaagccaccgacacgccggccgggtcgatcggagccgcgggtcagatccagttcacgccggaattgcggcggattccggcgaccgtgaccccgccggatctgcattccgcgtggagcctccccgagccgcgccctcgcctcccatacattgtgcctgatggatcgtcgcagctggccatggaagaagaaatcatctgacaaatcatctagcgcagatgcttctcaaaattccaatcaagctgagcaggatgacaaagctccaaaatatgtgcagatttcaccagaaacatatgcacaccttactgaatcagaagaacaagtgaaaaccttanatgaaaaggtgaaggccttgaatgaggacctctctgcggcacagtctgagatcactactaaagatgccctagtgaaacagcatgctaaagttgctgaagaagctgtatcaggtttgggagaaagctgaagcggaggcctcagcactgaagcttcagc

SEQ ID NO: 344 - DNA, 369 bp, Oryza sativa
  Clone ID: PAT_MRT4530_100315C.1
cttaccaagcgagacatgatatattcctctgcttgtaatctcaccaacaaagatcggatgatgatcatacttaccagttgcttgccgacgaccaacacttcacacaagcgactcctgtattgataacatatggcataagcccatctactaacactaacatatatccttactgttaaccaacgcacctctacatcaattacttagtacacactcattatctcttgttggattcatctgacgctgggctggaatttacttgaaaccttggctttgaagacctttcaccacattttcttttggaaaactcattaagggacattgaaaagaaggagccgatgtatgacatgagccaacaccatgcttgcttga

SEQ ID NO: 345 - DNA, 290 bp, Oryza sativa
  Clone ID: PAT_MRT4530_100316C.1
gattgcgccacagccccaactacctcattctacctcaggtgcactatagaacaacctaagatcctcacagccctgccgctgatccacggatctcgcgccctcatgttggccccgatcctctgcgctgacgcagccctgactgctgcacaaaaagcctccaacgagcgtaacacgtataatcattacaacccactacagaacaactgacacccgaactaagagaccccctattgtgacacatgcagtgtctacttaccgtacgtcttgaacgacagaagaaaggatggacc

SEQ ID NO: 346 - DNA, 136 bp, Oryza sativa
  unsure (1)..(136): unsure at all n locations
  Clone ID: PAT_MRT4530_100317C.1
ccacgcgtccgggcctcagctcgccaagtgctcgagctcgccaacttcatgaagtgctgtgggagggtcctaccaagcggtcgcncggctagcttcctgcatgcagcctctgcataccttcgatctagatcgatct

SEQ ID NO: 347 - DNA, 296 bp, Oryza sativa
  Clone ID: PAT_MRT4530_100318C.1
attgtgggcagggcaacctttttgtttttaggtttttgaaacaaacaaaaattttttagcgggggccattgcccaaaaaatggaaaccggggaaccccttattaccttttgtgagggccggccccctgcaaaaaaaaaatgaacaaggctagcagggaaaaaaaaatttttaaattttgccataaataagggtctccggggggaaggacaaagctattcattcttggggcttggaacaaacatccaagggggtaagggggaagggcaccgagaccgcggcccgggggggggcccag

SEQ ID NO: 348 - DNA, 188 bp, Oryza sativa
  unsure (1)..(188): unsure at all n locations
  Clone ID: PAT_MRT4530_100319C.1
aaaagcaagcagggcaagcaacaaaangaagaaaaacttcagttcgnaacagacaaaggttcttgagatgctgatctaattctcaactataaaatagcagctaaanagcaacggtagatccttcagaacgccaactctccagggttcatagnacaggcattttaggacctcataggatcacgggtggc

SEQ ID NO: 349 - DNA, 350 bp, Oryza sativa
  Clone ID: PAT_MRT4530_10031C.1
ggaaggaaaagtttttgacaaattaaataaatggggggggcccatttttagagggagagagagagaacccacccatatgattgattatgcgggggggcgttggaaattggcggcgccctccggggggtgaaattttgggggacaaggggcaggcttggaggaggccccggcaacgggaaggtacttggggggggggacaacctctttaatggcagggcccatgggggcctcccccgggaggaacaagggggcaaaggcaagggcctggaaaaggcccttgggggggaaagccccccggaaaaaggggttccccaatttggaaaaaaatttttgtcctaaaaggggggggg

SEQ ID NO: 350 - DNA, 1187 bp, Oryza sativa
  Clone ID: PAT_MRT4530_100320C.1
atggctatcacaaaactagcatctctcggctttgttatgctattatgcattgggttagccaacgctgcaagagtggctagattctctatctcgagcgcaacgggcaccggaggaggtgagggtgccggctatgtaaacggtcatggcttagggtctggaagcggggccagctcgggcgagaacagcgtggttgaaggatctcatgcggttgcccaagggaaaggtggaggcggtggaggtgcaccatatggcggagctggatttggcggtgggtctgggtcaggctcagtgtttagtagcctcgattctgcaggatcctctaaagctggtggtaccggtggtggtgatggtgaaggacaagcaggaggcaaccctggatctaaaggttatggggcagactgggtcgaaccagacccagtcatccccatctcccccacccgagttccattccccaatcttccccaatcccgagttccattccccaatcttccccaatcggcggcggcgacagcggcggcgaggacggcagcgctggaagcatcaacgacgacggcgacgttgggtgatggagcagttatattggtaggcagcagctgggatgatgtcaccgaggaaaaatagtgcagggaagaaagcatccctgcggatgttgctgctccaagcaacaaggcagctcctgccatgtggcccgatcttctggtgaggggataactctcgcttttatcgagtgcgacgtttgcgacgtggctaccaaccagaacaagtccaggacgccgtgcaatcgctacaccacaaacgatgtcgtaccaaccgtgacgcgcggttgatgattccgcacttaatgaacatttcttaaaacgatagcgtgacttgaccatagaatctaatggtgcacaacactccccttcttgaatattgtcatcgatcttcaaaacagggttaggtaaatttatccgaatagcatcaacgttgtacgatccatttagtttctcacatttttccatatttaaaggagtattcacatcttggtccagttgaccatcagttaaattacctgaaacactctcttcacctattttaggttcttcattctcctttccttcaaaattgtttttaccttcctcttcttgatgtgaaagccaacgctttatatgttcaatcccgttctctttgtacgctcctgtcat

SEQ ID NO: 351 - DNA, 298 bp, Oryza sativa
  Clone ID: PAT_MRT4530_100321C.1
catgactgccaccgcctgacggacgcgttggcaccctatatatcgcgcgccctttttttttttttttaaaaaacttactagaaatgttataattaattgttataatattatggtgccggcgactgattatcagtcgataattaactgccaaaacctttttttcatgttacacagggtgcagaaacactgtaacagtttgtgtagacaaatacgtagatgataacttaagtactacatagatatggctacacggtacaaagtactagaactttttctcctctgaaggaaaggtggacca

SEQ ID NO: 352 - DNA, 219 bp, Oryza sativa
  Clone ID: PAT_MRT4530_100322C.1
gaaagtctaaaacactctaggatttttaagttcattagcatttagtggtcaacttagatgaacattggtcagctcctaagatttgctctatggaccatctatgtgatcctaatccatgcaagaattgggactaattaattgattgctcctgaactgatcttcagaaaatactctactgttaggtgttagattcagaaatgctctgcttttctttttgtt

SEQ ID NO: 353 - DNA, 545 bp, Oryza sativa
  Clone ID: PAT_MRT4530_100323C.1
tttttgtaaataaacagatgatactataactcgaagaaaaccaattattctcttttttagttacttgctactatgccccctggctacagagtaaggtatacatttgcgaacaagcaaaatttgtggttaacacatactgctttgtaacgacattagcatgcagcttgagttcacttgccactgaaagaaaaaaaaaagctatgggtgtatgatctggcaagtttttttgtgctctatacaactgcagaaaatatttaataaaagaatcaaaaatgaaaattgatgggagccgtgaccgtgatcatggcagcaagatgccacctcttgctcaaaatggagattccagtggctgtaccaagacagatgatgcatacaaaaaggtttcctgcacctgtcgacgagctgcgttgtcacaccccggatcctcgggctctgatcagaaacaattactggccatgtatggattggcaattttgcgcacagaacaaacatcaacttctcatcaagcttgatcctgatccattgatgaatttgtggtagatgga

SEQ ID NO: 354 - DNA, 589 bp, Oryza sativa
  unsure (1)..(589): unsure at all n locations
  Clone ID: PAT_MRT4530_100324C.1
acaggggtatcccccggtgtttcccncgggtaatttttccccccgggggtgcgaaccacaacagcggtcccgtggttgcgcaatgtcggagagcttcacanctatntaggagaagncccctatccaagaagccaccagtggtctacattctgcttgctgcattaaaaatcctggntaggagggtccaccaaaatgaggccaatatgcagctgttcccatggcaatatgccccccacaccaagggcaccacggcatgatgcctccctgtgctgggcacaccaactggcacttttgatggatatcccacggcgccataatgaagctgttggcctccctgtggtgtgtttttgtgttttattgttaagattgaacccgtgtctcccgtgaggtgctgtatcatgtgctgtaagttatgctaatgtatgaatgtatctgtgtgtttggtctgggcaccaccacggatgaaatcacctcctatggttgaaccaaatccagtaaggtagtgctggatnttcggggttgtactgtngtaaactcttttataagaaaaaaaaaatattagtccgtccaaaaaaaaaaaaaaaaaaaa

SEQ ID NO: 355 - DNA, 787 bp, Oryza sativa
  unsure (1)..(787): unsure at all n locations
  Clone ID: PAT_MRT4530_100325C.1
atggagggaaagatgcatgagtacttctggccaggcatgattcgattgggaaggaggtccttccctaatattcgcatttttggtgaccagggatgtccgcctggcctgagtttgtcccatgaagtgggaaggagtaaaacaagtaagatggattacctaagatgtggtggttcccatgctcttattgggatcaggggtccaagggaggacacagttgagcatctcattatggtaaccatgaaaagagtaatggaccttaatggtctggagtctggacatatgcagcagaaaaatatgaatagggaagggcagaagagggagggagagttcactttgagggagatgactggtggactttgtaaaacctgtttgagtggtgatattgaggtattgagtggtacaatatatataatatatccaatatgcgaggagccaactgatatcaatccatcaggtttcgcagtgttagaacattggatgaccaatcctggagtacattttgttttaaaaatttcacagtatatccttttatcctttctggaggttacagtatcttatggacagttggctttcagctctggattcttcagtttggtctactgggatcatgatggtgatgatatcctgcagggcaaccatatcaccgtggggcagcgcagaaagaaagaaacaggtagaaaggtcagaggcattgacattgaccaggaagaggattctttgttcctcctatgttgtttgatgtgattcgngctgtttatcagatgaacttgnctgtaattaacagtgg

SEQ ID NO: 356 - DNA, 798 bp, Oryza sativa
  Clone ID: PAT_MRT4530_100326C.1
atgccgttgtacggtactagtcgataccctccttactccggcgccgtcgagcgcgccggcaagcggccgccggcggacgaggatggccgaggatccttcggcccagtgctagtcgtgctcgccgtcatctccttcctcgccgtctccgcgtgcatcgccgggcggctctgcggccggagaccgtccaagtcgtcgtcgtccaggggagagcagatgcgtggcggtggaactaccgctgctcacgcggacgccgagaagggcttcggcgtgatgcagaatccggcggcggcggcggtcatgaggccagtgccgagctcacgcgccacggtgcacgacgtcgacgacgacgtgttcgagatcaagttgtgcgctccggtgaagccgcccacggccgcgggacggcagggaggatcaggcggcgacggcggcggtggcagcgcgccgcagccgcggcccccgcctgcagtgccgctcggcgtgccacggcagtacgcggcagcggcagctgcggcggcggcggcaggtttcaggagggctccaccgccgagcggcggcgccgcagtgaggctgacgcatccgcaggcgccaccaccccgcgccgagcgcctccaccccaccgccgagcgcctccaccccaccgcgccgagcaccgccgccggccactgcaccctggcgccgccgcccaggccgagcaccgccgtgcgccccacgaccgagcgcctcccccgtgctgcctcctacatgcagagcggcagacctcctcctggagcattgctgagcactatcattctcagatga

SEQ ID NO: 357 - DNA, 650 bp, Oryza sativa
  unsure (1)..(650): unsure at all n locations
  Clone ID: PAT_MRT4530_100327C.1
cggacgcgtgggttcagaaatatgcagatgatttcagtaagcagtactttaggaaagatacatcgatggattcagtaccatcagtggaagatattgaaggtgagtactggcgcatcgttgaggttcccacagaagagatagaggtgatatatggtgctgatctggagactggaactttcggcagtggttttccaaaattatctcctgagacaaaatctgatgctgaggataaatatgcacaatctggttggaatctaaataacttgcctagactacaaggttcagttctttctttcgagggcggtgacatttctggtgttctagtgccttgggtgtatgttggcatgtgtttttcatcattctgctggcatgttgaagaccatcatttatactcactaaactacatngcattggggtgccccaaagttgtgngtatggagttccaggaaaggatgctgtgaatttggaatctgcaatgaggaaacatctacctgaattatttgaggagcaacctgatttgctacacaaccttgttacccagttttcaccatcgctgctgaaatctgaaggagtacatgtatacccgttgtgttcagcatgagggcgagttttgtcttgacatttccaaaggcgtaccatgctggtttcaa

SEQ ID NO: 358 - DNA, 266 bp, Oryza sativa
  unsure (1)..(266): unsure at all n locations
  Clone ID: PAT_MRT4530_100328C.1
cctgacnagaactcacaatcaaagagtcttgagacaacaataaatttgtgatttctgtcaacnccttancacctgcttcgaacgagcttngcanctgcattagtgtantntactggaagactacanggttttaggctgtnagagtaggggnaattttgcgacctggaaagctnacgtaatgacttgagcnttagggncattgctacnnaatntanttcgtntggtgtaaaggcatagacatgaacataggtgcattnctacgnnaa

SEQ ID NO: 359 - DNA, 996 bp, Oryza sativa
  Clone ID: PAT_MRT4530_100329C.1
atggcgaacggcacggtgatcctgacgacgctgaactcggcgtgggcggagcccgggtcggtggtggacgtcttcctcgagagcttccggatcggcgacgaaacgaggtggctcctcgaccacctcgtcatggtctccctcgacctcacggcgcaccgccgctgcctgcagatccaccgccactgcttcgccctcaccaccgacgatggcttcgacttctccggcgagaagaacttcatgaccgacggctacctcaagatgatgtggcgacgcatcgatttcctcggccacgttcttgccaagggctacagcttcatcttcacggacacggacatcgtgtggttcaggaacccgctgccgcacctgcaccacgacggcgacttccagatcgcctgcgaccacttcaccggcgacccggacgacctcagcaacagccccaacggcgggttcgcgtacgtgcgctcgacctcggcgacggcggcgttctaccggtactggtacgcggcgagggagaggcacccgggtctccacgaccaggacgtgctcaacctcatcaagcgcgacgcctacgtcgcccgcctcggcgtcaggatcaggttcctcagcaccgacctcttcgccggcctctgcgagcacggccggaatctgagcacggtgtgcaccatgcacgccaactgctgcgtcggcctccgccggaaggtcgacgacctcgggctcatgctccaggactggaggaggttcatggcgacgcccgggagtgaccggcattctgtcacctggagtgtgctgggttttgcagagccaacacttgctgttgtctgtaccatagatgagatgctgactggaacaaatgaacatgcagtgctttctaagttgggaagtgacagtacaaatttagtcaagacctggagcagaatgaccgaaatgttgagagtttggtgcaataacagaaaagtttctcctaccgctgctgatgctgatgccatggacgattaa

SEQ ID NO: 360 - DNA, 312 bp, Oryza sativa
  Clone ID: PAT_MRT4530_10032C.1
ccctgtggatggtttggtaaggatccatccaagtagcagcttaagagtatagggtagagtataaatcttagcatcagtaaaccggtgtggtaccattatacttaggcctagcccccaaatctctcactgctgcaagcatctttcttcagattattaaccttgaagaggatgataggtgaaacaagtactagaggtttcaagcaccttcctactagatgtcagctccttttatccgtagctgactgtgttgtggattacaagaagtgccataggaaaaccaaatgggttacccaaaaaaaaaaaaaaaaaaaa

SEQ ID NO: 361 - DNA, 286 bp, Oryza sativa
  Clone ID: PAT_MRT4530_100330C.1
gtccagcagcagccgccgctgccggcgttctccatgcggcagttcgagctcgccatggcggcgcaggccgccgccacggggaccaccacggcgagctagcctggctcacggggcgttgtctcttccaccgtccccgagtctccccatgtgtatgtaactgcgcgtggggacgtgggcgattttttctttctttcctccgattgttttcccgtttgtttcccttgtgccgttgtacgtagccaacattttcccggggatcctttttgttccaaaaaaaaaaaaaaaa

SEQ ID NO: 362 - DNA, 452 bp, Oryza sativa
  Clone ID: PAT_MRT4530_100331C.1
ggactgtggcgagctcagtgtacattctacattggtctatgagcctgaacacaaaccgtacacaatggctggtgctactgaccaggaaggatgtttcctcacgaccaacactgaatattatggcccccgccaggacgactaccgcagtgacactactgtcttcaacgaggcccgcactgacgactacgacagtgagttcgagaacaccaacactgccgaatgttgaccaactgggagcttcctcgagatcaacaactacaactcaactggcggctagagcatatcctgcacagatcactacagcaccggcggcagctaccacacataccgcaccctccactacaccagaccgggctggtaccacaacatctgcactgacatcttctgcgacgagactgtgtaccacacatccggcaacagtgactacagtggcaacattctcagttaccaca

SEQ ID NO: 363 - DNA, 1204 bp, Oryza sativa
  Clone ID: PAT_MRT4530_100332C.1
atggaacatctagagagaagggggttggcacaaggagcatacgatggagcggatcctctggacatcggcgggttcggcgacgccaccggcgtcgacgatgcggcggaggatgtcggagacgatctcccactcctggatgaagtacctgcgcaggacgacctccttcgagtcgtgctcatcgtcgccgaccgtggcggcggcggcggcggccgaggcagtgggatcagcagaggcgtcgccatccgcagaggccgtggaggacacagagacggggatgccagatgtcgtcttcttcctcctgaactgatctctctcctttcgcgagctccgaccaccgagacctcctcgccgccgtcggccgcgatgcagcagcggcgccccgcctccggccggccatccgggacggacggctccgacttctcctaccgcatggtcgtcgactcacggtaccagagagttgcagatggcaaatcccgcctcggccgcctcatcctcgtgcaggctctgcaccaagtggccgggggtgcgctgctgttgctcgcgctgtcgaagggcgcggagatgaacaagttcgccgtgatgtccgtggctgctggactgttggccattgtgctgggagaaataggacgtaggcggacaatggctgtgctgctccggatgtacacaagcttgtcatcaattgctgttgcattctctgtggcgtgcattattcggtcagagttgttcttcaagatcacgaagcaaaatacagagtccataacaagccatgaactattggaggtggttcgtgttgctcttggtgtcctgcttcaattggtggttatagctacaacaaccagacttctgcaaaatatgtctcctcccaggagagcttcatgaaaatgttgtgacatggcacttgtgctttaccattagaaacaactactcatttttgtacttgtagattgcaacttgcaagagacttgtaatgaagcggcaattggttcacaaatccatgacaaccatgactccattctgcttcttccatttgtagaactggactggaaacttgaaagcatagattacattgcagtatcgtcatgttgtttcgcccaggctgttactgctgtccagtccagtatatggacgcgtgcctggttctaaattgctctgttcatgcaccagatcaaccattttctcacggtaaaaaaaaaaaaaaaaaaaa

SEQ ID NO: 364 - DNA, 559 bp, Oryza sativa
  Clone ID: PAT_MRT4530_100333C.1
ggtcaattgttcatatcggggattagatgcgaaagaactacagagcgtggaaaaaatgtattaaaaaagagggttttctacagttaattaagctgtataccttgactaaatttgtactgtcacttcccaacttagaaagcactaatcaagaagagtagtattgtcaacgacaattacctgcatgttcatttgttccagtcagcatctcatctatggtacagacaacagcaagtgttggctctaaactaacacattgcaattaaacaattaatctttccaatctcctaccgccccagtttcttcatactgcaaaagaacaaatcatcacaagaacaagagaactaatcagaacaaaacatgcaactaatcaaatcacaaagcgcgaacagcttcttctcggaaaatcaatcacctgcaattcctaggcacactccaggtgacagaatgccggtcactcccgggcgtcgccatgaacctcctccagtcctggagcatgagcccgaggtcgtcgacctttcggcggaggccgacgcaacagttggcgtgcatggtgcacacc

SEQ ID NO: 365 - DNA, 1020 bp, Oryza sativa
  Clone ID: PAT_MRT4530_100334C.1
atggcgaacggcacggtgatcctgacgacgctgaactcggcgtgggcggagcccgggtcggtggtggacgtcttcctcgagagcttccggatcggcgacgaaacgaggtggctcctcgaccacctcgtcatggtctccctcgacctcacggcgcaccgccgctgcctgcagatccaccgccactgcttcgccctcaccaccgacgatggcttcgacttctccggcgagaagaacttcatgaccgacggctacctcaagatgatgtggcgacgcatcgatttcctcggccacgttcttgccaagggctacagcttcatcttcacggacacggacatcgtgtggttcaggaacccgctgccgcacctgcaccacgacggcgacttccagatcgcctgcgaccacttcaccggcgacccggacgacctcagcaacagccccaacggcgggttcgcgtacgtgcgctcgacctcggcgacggcggcgttctaccggtactggtacgcggcgagggagaggcacccgggtctccacgaccaggacgtgctcaacctcatcaagcgcgacgcctacgtcgcccgcctcggcgtcaggatcaggttcctcagcaccgacctcttcgccggcctctgcgagcacggccggaatctgagcacggtgtgcaccatgcacgccaactgctgcgtcggcctccgccggaaggtcgacgacctcgggctcatgctccaggactggaggaggttcatggcgacgcccgggagtgaccggcattctgtcacctggagtgtgcctaggaattgcagtatgaagaaactggggcgtttagagccaacacttgctgttgtctgtaccatagatgagatgctgactggaacaaatgaacatgcagtgctttctaagttgggaagtgacagtacaaatttagtcaagacctggagcagaatgaccgaaatgttgagagtttggtgcaataacagaaaagtttctcctaccgctgctgatgctgatgccatggacgattaa

SEQ ID NO: 366 - DNA, 683 bp, Oryza sativa
  Clone ID: PAT_MRT4530_100335C.1
atggcgcagagccagacgcggcacggcggcggggacgacggggatgcgccggtgcagttggggaaggcggctcagctcgtcgggaactacggcgccgtggaggtctgcgacgacggcgaccaccccgtccccatgggctccatcaagcactgcgcgccgacaccgctcgattgggctgacgacgctgcagacgtgggaggagatgggtatggaccaagcggcggtgaggccgacagtgacctcgctgccggggatgacgacaagctaggcgcgggccctccaggatggcgaccccaacgccacgacggcacgcgccatccccacagcgcgctcgcccccacgagccgccatcccccgcgcactgccgtccgccgccagccacgcacgcctactcccgcgtcgccgccgccgccgccgccctcctccacggcgtcgtcggtcgcccgccgcggcggcacctccgcctccgcatcagcctcagctgcttgccgcctgccgtacggggagctccgcctccaccttagccgcccggggagctccgcctccgccaccgcccgcccgctctgcttatgcctctgctgcccgttgcccggggagctccttctccgccgctggtcgcccaccgcttggggagctccgcctccggggccgccagcgcacccccgtgcaccgctgcccaccat

SEQ ID NO: 367 - DNA, 330 bp, Oryza sativa
  Clone ID: PAT_MRT4530_100336C.1
atggcttttggtggtggggaactagggttttcagtacaattttgtagcgtgcgggactgcgggcaggagagattaagcaaggtggatgaggggaaggcagatagtgagggtggcaaccatcaatctaccggatttttgggaccgaggacgggcaacgccatcggcacgctggccttcacatgggctaccgtcgttctcctcggcggctacccctcggtgctccgacccgatgaagatttcctttatgcaaccaccataatcttcgtagaagctgcaagaaatagtcttgatataaattttttggcacaaatataccaccggtatcgctaa

SEQ ID NO: 368 - DNA, 1304 bp, Oryza sativa
  Clone ID: PAT_MRT4530_100337C.1
agggccccgcaacccaacagctatcttttcccatttctccccgcccccccaaccccacctcgaatccctctcgtcgtcgaggcgagcgcgtggcgcggtgcgcgggcggcgagatggaagggatggggcagcagaagaggcggccgctggtggtgatggcgtcggcgcaggcggcggcgcggggtggggccaacccgctcgcggagctgaccgaccgcgtcaagaccctggaggccggcctgcgggcgtggctggcgaagcagcccacgcacgtcgaggccgccgtcgccaccgccgtcggggccgtgcagggcggcgccctcggcgggctgatgggcacgctcgcgccggacggcgggtcgccgttccccgtgccgcagccgccgcccggggccgaccccaacgccctcgcctccttcaagcaggcgcaggctttggcaggtggaccactggtgcaagcccgaaactttgccgtcatgactggtgctaatgcaggaatatcttgtgttatgagaaggataagaggagtggaggatgtccagggcagtgctcatttcgatagcatggcagcagcgtttggttctggcgctttattctccattgtgagtggaatggggtctccaaatccagttgctaatgcaattacaactggtgtagcttttgcagtatttcaaggtggttttttcatgattggtcagaaattttcgcagccaccgagtgaagatatatactattcccgtgggagaaatatgttgaaacaattagggcttcagaactatgagaagaatttcaagaagggtcttcttactgatcaaacattgcccctactcaatgacagtgcacttagagatgtgaagatcccccctggtcccagacttctcatccttgatcacattcaaagagaccgtgagttagcgaaatcaacttaaatcgattgtccacagcctgttggcaccagcttttcctcaagttgcataaaatcgtgttcttggaagtacaatctagctatttcaaggatgagctctttaggcagaagtgtgattggaaaagatagctcatagacgtttttgtagtcatcaaactatgataaatttagatggatgatatgcactgaagttaccctcgaattactagcttcctgtttttagtcttgaacggttgaatcttatgctgagtggttgatatttccaattgggcaagtcaagatagaacactttccataagttgtgtatgttataagttaataatctattgggccttttccaagttaaaaaaaaaaaaaaaaaaaaaaaaaaaaaaaaaaa

SEQ ID NO: 369 - DNA, 2562 bp, Oryza sativa
  Clone ID: PAT_MRT4530_100338C.1
atggtactaatttgttctgaaagttctgatgacaaaaacaagtgcggagatgaattgataaactatattttatcatggtcatggacaacttgtattgagtccaattttgaaaacccccaagaatcagctgcatcatcatatgcaaaatcgctgttagaaccacttgtcgaggaaacggtagcagcagttcagtcagctctccagaagctgtgttttgcacctcaattcaagataattgatatccttcctgctgctggagtgaatatatcattcttggatatagatcttcaggaggttattactcacaacacggagaggggtgatatctttttactgtgcacagaacttcctagggactctagtcagctatgcaatgatgaagcagtacttgctatggcaacttgctcaaatctttatgacacatttcagagaagtttcaatgtgaagactcatcagaaagttaagagacaaaagtttaaccatgctctgttcttgtgcaatatcttgatgaatattcagatctgggaatcactgaatgcggtgattctatatgactgcccaataatcaatgatctactggcgccaccatccatggttgtgacatgctgcaatgaggagttggttgatgtgttaatgtctcaaaagattactctagatgaggtgcagttggaagctgccaaagcaatttattcagctgcacggtgtaaacatagtagaagcatccatgttatatctggagcccatggaacaggcaaaacaaaaattgttttctctgcagtggcgtcacttttgtcagtaagtgaaaaagttattgtatgtgtccccaatgctcaatcgttttcagcaatgtgttctgattttgttgaaatggctgagtctcacatggatgaggaattgggaatttgcttgggagacatattggtactatccaacgagaccgggctagaagataatgttcaacagcttacaatcattacaagagtcaaagaagtgctgcctttgatgatatggcatgatatgatgaaagcactaaggaaatcattggcagcatttaaagagaaatacgttgcagaatttaaagagaaatatgttgcttcagcaaaacataattgtcagccatcagccaaaaagttgctgacttcattatttttcgaaaaggcaggttttctgttgatatgccttgcaacctttaggaaacatttcccaaaaaatatgttttctgaacaagtaagcaagagaataaaatctctcatcaagtgtgtctccaaacttgagaatctcttgaaagacaggaatctcaaggaatatgatgtacatgttgcttttgggatattatcaggaaaaagggaaacaatttctgtgcttgccaaagatttacgccaaacaaagaatcactgtgttactgctttggatgaccttctcactagacttgacctgccgttcaacaaagattgcatttggctcaggaattacttcattagcaatgcaaaatgtgtgctatgcactccattatcaacatttgatcttcagctttcagctggttctatcgagacacttattgttgacaatgccgatcaaataagagattatgatcttattcttcctttaactctccgcgatgtcaaaaatattgtattaacaggagatccaagtaaggtgaaggaaggatcattctttcagagattgctgtcagtcggctttagtgtctttgaattgagaaggcaatacaatctgttggatgacaaagagagacatgaggcagatgggcaaaataccctttccgaagctttaaatgacaagataaaggctgaagagctgtcccttacaattggttcaccgaaacaactatattctgagttcacctggctccatcgtcctcacaatcagaagtacatcttacctcagttgtgcgaccagaaaggacatcctcactgtactgtacatgctagtttagcggctttggaattcaagtacaagtataaagccgcatcagaaaaccctcctcatgatttcagctccaaattctgtacaaagcatatgttgaatgtatatgctgctaagtacggcgaactaggaagtgagcgtgaaagtacaaggggtagcaaacgcctttcaaatgtcttggatatattgcaaaatgatggagccaagagagaagcaatgatgggcaaacaggtctataaaatctcttcatatgcgtgtacatacaaaattggaaacgatactgagtgtcttcaagaaaccatcgatcatttgaagataggcgacatttcaattggatcatttaaagtttccgaaaatctcaggttttttaagcccggagaagtgtacatttacaacccagaaaagccagtactcactccaacagcaaatcagccaagtgcccactgcgtgctggtaataggaggtggaggctgcccaagcgacagtactgcggaacctgtcttagcttgcaacatgcaattcatgatacaaaatagctatggcaaaggtttcggggaactgggaattggtagagtacgcggagattcgttcagtaccatgcatcggatcagtttgtag

SEQ ID NO: 370 - DNA, 933 bp, Oryza sativa
  Clone ID: PAT_MRT4530_100339C.1
atgccatcgttctccccatccccacctccatcatgtccatgcgccaccaggatcccgtcaaagcgctgctcgcctactccccatccccacctctacatcgcctcgccgcctgatctcgctatcgacgcaggctacgagctagccgatgctgtctccatctgcatcgccgtcctcctcgtgcccacctccatcagttgcggtggctcaactatttgcgaccggggatcaagaggatcaatacaactactttcggcgcatcaccaccctctttaccaaggtttttatttatcatcccgcggaacttggcacctgacgtggggctacatcggctttcgatatctggcgaagggccaattgatttctactggattatattattgttctattatattaccatcaaccgattgtttttatatcgttatctacattggacatatagccgatagagcaaaatcctatcgctatcggctggtaccgattttgaaaccaacacctatgccaacggacataagttcccccaaatcggaacaagttgggaaaacgacacctatgatcaagcgaattgaaggagttggcaagtcggtgagggagattgagtggcttgaccagcgggtgatgatggcgtcacccatcccccctcttggtaggggcagatctggctgtgtggagcgggttgtaggagctataggtggagaacgcaacaatacatatctagggaagatgagaagatggtcttgggaagaagatggaggagacgagaattggaaaggctacaccgagggtctcttgcttcaaatttggacttggacctgctaccccgtcagtatgaagagggagcaaaatgactaccacggcttgagggagacgacgatggcaatggagatggatgatggcgttgacaactcctctacaacgacagaggtaactccaatc

SEQ ID NO: 371 - DNA, 210 bp, Oryza sativa
  Clone ID: PAT_MRT4530_10033C.1
atggccggcgatgcccgcgcggcaggaggggcggcggcccgcggcccgcgcggggggagggcggctggacaactgcgcatgctggggcagggcataggatggtaccccctgtgccggacgggtgggattcctgctggcgggcgaggcgggtttggtgtttcccttccgaccactgctaagaggtacctcctgggtggcgtcgcggtgtga

SEQ ID NO: 372 - DNA, 204 bp, Oryza sativa
  Clone ID: PAT_MRT4530_100340C.1
atggcgacgtggatcgtcttcctgttcggcgggcgagcgatcgatggacacagcgctggcaacggagaagctaacgtggggtatagaggtgggctgactctggggcggagctacatgtttaaagggggtgcccaggaacccggggaatgtgtccaggaggatgtggggttggctgtggagaacaggggaatggcgaggccctag

SEQ ID NO: 373 - DNA, 884 bp, Oryza sativa
  Clone ID: PAT_MRT4530_100341C.1
gagatgcttccctgcccacagaccacggcggcagcggcctctttatgtgggatagtagcccgggctccaggactccgccgcacgtgagctgcattgcatatttgctttgctccccttccacgactttagccatcttggcttgcaaggtgagaagagcagatcgatcgagctgagagctggtctcaggtgtgtgttgcgtgagtgtgtttgaagacgaacgatgaagacccgccgggccgcgctgctaatgcttctcctcctggtggtggtggcggccgcctcgtggccgcagccttgcgacgctgcttcagggttctgcgggagcaagtgcgcggtgcggtgcgggagggggagggggcgggggagcgggtgcctgaggtcgtgcgggctgtgctgcgaggagtgcaactgcgtgcccacggggagtgggtcgacgcgcgacgagtgcccctgctaccgcgacatgctcaccgccggccccaggaagaggcccaagtgcccctgaatcctccccatccatctccatctcatcgattaccatcaacttcatctcattttcttgtacttgaaattagctactagtacgtggttgtgtatacgtcgcaggtgtgtatgtatgtatgtatatatatgcgtatgttgtcatgctgcgtagttatagttagtagtcctacctactccagtacgtacgtgttgatgcctgttaatatggctgtatggctagctaagctgtgtgcctgtgtcgatttgtaaagttgtactagtaggtagttgtactacttgcagcgcacgtactgtttgtttgtctgttgttaaatttcgtgttaactatgaacaggggatatgccgtatgcgctttacctgaggaaaaaaaaaaaaaaaaa

SEQ ID NO: 374 - DNA, 220 bp, Oryza sativa
  Clone ID: PAT_MRT4530_100342C.1
aaaagtagatgcattttgggatggagtcaggtatcatgcgatttctaccacgtatcgcgtgatactcgcgaggtatcatgtgaaacctgtcaggtatcagacgatttcaaccatgtatcgcgtgatactcacgaggtatcatgtgatacctgtcatgtatcatacaatttctaccacgtgtcgcgtgatactcgcgaggtatcatgtgatacttgtcaga

SEQ ID NO: 375 - DNA, 168 bp, Oryza sativa
  Clone ID: PAT_MRT4530_100343C.1
aaccattgcatctgcactacactgcagcacacacactccgcacccaccaagctcagttatcaatcactcaatggcttccgtcgcggtgaagatggccggcgtctgactgctcctcctgttcgccggttatctgatggtcttcgccgccgtcgtacgctctgacaccgc

SEQ ID NO: 376 - DNA, 258 bp, Oryza sativa
  Clone ID: PAT_MRT4530_100344C.1
atggtgggttgtgagcacatggttttgatggtcgtgctcatgacaattaaggaccggttcacgattttcagttgtgaaacattaaccgtgccaaccacaagccagcgtgggcaacgactttactttccgtatagtatggttcattgtagagcaccagactatgaagtggcggagataagcccacgggggtcgctggggagtccatgcgttgtttacaagggggtgattatgatccgggaacggtgcattgctttgaat

SEQ ID NO: 377 - DNA, 2519 bp, Oryza sativa
  Clone ID: PAT_MRT4530_100345C.1
atggccggcagacggcaggggggcaaccttgcctggggaccgcgcctcgcgccgtgcttggagacgacggtcacgtggttggtcgccgtgatgaagcgtgttatcgagttaaacccctgctccctaccggagtccaatcagtataggtggcagggccacccgtgctgcagagcggggacctagctgcacagtggtgacaatggcgatgctgctgttgttgcgttctttggagttcttggcgatcatggcggttgcatcgagcttggcaatgccggtggcggccgcggctgcggtgccacagccggagccggaggtgaagccgagcgacaccgacgcgctcaccatcttccggaacggcgccgacgcgcacggcatcctggcggcgaactgggagcacctcgaacgcctgcgccggcgggtggatcggcgtcggctgctccggcgacggccgccgcgtgacgtcgctgtcgctgccgtcgctcgacctgcgtgggccgctcgacccgctctcccacctcggcgagctccgggcgctcgacctccgcgggaaccgcctcaacggcacgctcgacacgctcctcctcggcgtccccaacctcaagctgctctacctctcccacaacgacatctccggcgccatcccggacgccatcgcgcggctcctccgcctcctccgcctcgacctcgccgacaacagcctgcgcggggccatcccggtggccgcgctcgccaacctcaccggcctcctcacgctcaagctccaggacaacctcctcaccggcttgctcccggacgtcaccgccgccctcccgcgcctcgccgagttcaacgcctccaacaaccagctctccggcagggtgcccgacgccatgcgcgccaagttcggcctcgcctcgttcgccggcaatgccggcctctgcgggctggcgccgccgctgccggcgtgctctttcatgccgcgcgagccagccccgacgtcaccctccgtcccgtcgtcgccgcagtccgtggtgccatcgaacccggcggcgtcgtcgtcgtcggttgcttcgtcctcgccggcgttggccacaccggagtcgcgcgacggacccggcaagggggggttgagcaccggcgccattgccggcatcgtcgtcggcaatgctctcttcctgttcgccatgctgtcgctgctcgtggcgtcctgctgctgcagcaccggcggcgagagcggcggcgagccacccaagaagaggaaacgaggcggccgcgtcggcctggaggatgacgacgacggcgggatgttcggccaaggcaagggcgtgcagccaggccggccaggcagcgccggcatgcgcagcgacgacggcggagacagcgacggcgcgcgcagcaagctggtgttcttcggggtggacggcggcgaggacgacgacgacgacgacggaggcggcagcgacagcagcgccggcaggagggcaaccggcggcggctggacggcggcgccgcaccagcctcacgggaggaggagcaggttcgcgctggaggagcttctccgcgcgtcggcggagatggtcggccgcggcagcctgggcaccgtgtaccgcgccgtcctcagcgacggccgcatggtcgccgtcaagcggctgcgcgacgccaacccatgcgcccgcgacgagttccaccgctacatggacctcatcggccgcctccgccacccaaacctcgtccccctccgagccttctactacgccaagcaggagaagctcctcatctacgactacctccccaatggcaacctccatgaccgcctccacgggcaccggatgtcgggggagtcgccgttggactggacgacgagggtgaggcttctcctcggcgcggcgcgcgggctggcatgcgtccaccgggagtaccgcacgtcggcgatcccccacggcaacgtcaagtccaccaacgtcctgctcgacaagaacggcgtcgcctgcgtcgccgacttcggcctggcgctcctcctcagcccggcgcacgccattgcccgcctcggaggctacatcgcgccggagcaggaggacaacaagcggctgtcgcaggaggccgacgtgtacagcttcggcgtgctcgtcctcgaggcgctcaccgggaaggtgccggcgcagtacccgcagccgtcgccggtcgtcgccgccgacgccgccgcagacgcgcagaggaaagacaagaggtgctcgacggcggtgagcctgccggagtgggtgcgatcggtggtgcgggaggagtggacggcggaggtgttcgacgtggagctgctccggtacaaggacatcgaggaggagatggtggcgatgctgcacgtcgcgctggcgtgcgtcacgccgcagccggagcagaggccatccatggccgacgtggtgcggatgatcgagagcatcccggtggatcagtcgccgttcccggaggaggacagggacatctccaccatgtcgccgtcgatcggcattaccactgacgacggagatggtcgtctcagctgctag

SEQ ID NO: 378 - DNA, 637 bp, Oryza sativa
  Clone ID: PAT_MRT4530_100346C.1
ctgactcctgcaagtacagaaatgtgatgtgatcaattttcttgggttgcattacctagagcatctgttagcatttattttaatgtgccaattaaaagaggtcccattgcattattgcatctatggaagggacttccattagctctgcattgttcagcacttttgctttccatggatacacatacagacgttcacataaacagatatcctagaccatacgtctttcttgccattgtgtcgaccatttggatatttgatacatttgtacactttgtataacatataaactatatttctaatgatttttagctcaaaagtaaaatattgctgcgtagtctctttttatcttctcccatggaaataatttttcagttgcttactgatcccttgatatgtggttttcttgagcttaggtggagcagttgtatctcgttatgccacatgagctgcattttcatatggtttatcgccttctccgagaacatattgatcaggaagtggactataaggtgattgttttctgcacaactgccatggtgactgaatttatgtatataatgcttcgagatttgaagctaaatgtccgagaaatccattcaagaaagcctcagctctatagaactcggatatcagaaga

SEQ ID NO: 379 - DNA, 604 bp, Oryza sativa
  Clone ID: PAT_MRT4530_100347C.1
atggcttcaaatggaaaagatctcgacggccgacggcagcggctcgaccccgcgacggccaagggcggtggcgcgatcccgcgaccgcgcgaccccgcgacagccgagggcggcgaattgacagcggcgcggtcaacgggcgctgcgcgtgagtgcgaaggggatgtgggggtggggggaagggtggcgccttggaggggaaaagtgggggatcggggcttagagggatggtctgggaggcggcggaccggcggtgggcggcggacaagggcgcgcggcgaggcggtagcggctcaccggagggaggagaaggggactcaccgtagggaggagggggctcgccggagtaggctgttgtcgtcgccggagggaggtcgctcgtccgcgtctcgtcttctccgtcgaagaaagctcgccggagggagaatgagggggttctctggggaagatggagcgaactcgccggtcggcagtcgccgtcgtctcgcctcgccggagtaagatcgtcggagtcgtcgtccctcgctcgcgtcaatcgcgtgaataaaatgaagacggggcgtgcggcgatcccggaccggtgcccgcgggcgtgccagcgttc

SEQ ID NO: 380 - DNA, 591 bp, Oryza sativa
  Clone ID: PAT_MRT4530_100348C.1
atggagtctcagatccggccgggcgacggtggcggtggcggtggccgcgccctccggaggggaggcggcacaccacggtggagcggcggcggccgcgccctcccctccgccagatccggcaggaggggaggcggcgcacctcggggtgttctaggggatgatgtgatccgggaggcggtgatgaagggaggagtagggctgggctcgagggagacgacgggtgtatggttgggttatcgagggccaccgactcggtgttctcctccggtcttcgcgggggccatcagcgtcgcgggagaagaggacgtagctgtcgaggatatcatcatggcgccagagatccggggacaacgggaggaaggggcaggtgaagtcgacgatgtcatgttcggcagcggagcaagggtagggcagctacacggggatgaagctgccatctatgttgaggaagccgagcagcggtggtgggtggttgacggcatggatctggcggagaaaggagagctcggtgatgatgcggcgaaagctagcgcgggtggtggcagtgcaagcgagttcaacgggggaaaggaggcgatgcggaatgggtag

SEQ ID NO: 381 - DNA, 711 bp, Oryza sativa
  Clone ID: PAT_MRT4530_100349C.1
atggagccaagagggttccaatgtgatccaaccaagccaactccgatcctgagcatgcgcgcgtgctcctctctcagatccggccgggcgacggtggcggtggcggtggccgcgccctccggaggggaggcggcacaccacggtggagcggcggcggccgcgccctcccctccgccagatccggcaggaggggaggcggcgcacctcggtgacggtagcggcggcggccgtcgacagcaggggtggagaaggacgccggtggtgggtgttctaggggatgatgtgatccgggaggcggtgatgaagggaggagtagggctgggctcgagggagacgacgggtgtatggttgggttatcgagggccaccgactcggtgttctcctccggtcttcgcgggggccatcagcgtcgcgggagaagaggacgtagctgtcgaggatatcatcatggcgccagagatccggggacaacgggaggaaggggcaggtgaagtcgacgatgtcatgttcggcagcggagcaagggtagggcagctacacggggatgaagctgccatctatgttgaggaagccgagcagcggtggtgggtggttgacggcatggatctggcggagaaaggagagctcggtgatgatgcggcgaaagctagcgcgggtggtggcagtgcaagcgagttcaacgggggaaaggaggcgatgcggaatgggtag

SEQ ID NO: 382 - DNA, 491 bp, Oryza sativa
  Clone ID: PAT_MRT4530_10034C.1
gcacgaggccgaggaagaagctcggcggcggggcgggaggatgtcggggtcggcgcgcgctacggaggcggcgtcggccggactcgtgaatggtgggcgcgacgatgatgccgcgcgtatggcgcggatgacagcgcggccactcggcggcgtcctgggcgaggccaagacgtcggtggggcatggtggagggaggcgacaaggcgacggctgattcggtcaaggcgtcgcggctgcggaggggagtgacggtgcgcggtccggctaggcgtcggccacgcaaggaggtggcgacggtgcgcacgatggtggcaccgcgccgagacggcgacaagtttgctggctgcctgtgcatgggaggcgatgtgagggtgggcagggagcagtgccaaaacgtcgacatcgccacactaccagtaccgaagcacttaataaatcagaccgtgaagacaagggaaggaaaggacgttggactgagggcgtccctttaa

SEQ ID NO: 383 - DNA, 2757 bp, Oryza sativa
  Clone ID: PAT_MRT4530_100350C.1
atggcgactccatctgacgccgcgacgatcatatggagcacggagctcgagctagctccactgatagcaatggtgaggaaccgggattatttcgccggcgctcgattccacgtcctccgtggcgcgtgcgagcacctggcgcacgtcagggactgcgtgcgcacgagggcccgcgtggcggcgcggcggggcaggaggctggcgacggcggcagcctggacagaggaggcggagatctacctcctccggttcggcgagctgcggagcgcgcacggccggatccccaggctcatcttctgggatctgctcggctgctaccgcgtcagcaaggtcgcgtcgctgatgatgccgcaggtgaagaggctgtgcgaagaagggggaaggatcgtgcgcaggagcaagctgccccaaccgatggagatctccacggggttcgcgagcagggatcgtaccctccgggccgcgatcgagagggtgaggacgatccaacccaacggcatcgtcgcgatctggggccgcgccggcttggggaagacttacctactcaagctcgttgaggagtacttctcccgagatgacaccttcgatctcgtgctgcgaatcgcctctccgagagattcctccgtagccaaggttcaaagtgaaattgccaagaaactcatgttggctaactgtgacggcatgcaacatagagcaagaattttcgacttcttgaaggagagaaatttccttttattgcttgactgtgtatggcagagactggatctagaagaagttgggattccatcacttgacttggttggaagctgctacaaccgaagagtggttttcacggcatgctctagccatgtctgtgatcaaatgaatgtggaagtggagaacagaattgaggttcactgtcttgatcatacagaatcatgggaaattttcaagcagaatgctgatcttgattacttgggccataagcatgtgtacctgccaagaaatatttccgcggaattgcttggttcacctttggagctggtaacaattggaaaggccatgcacaataagaaggatgcaatatattggcaaaatgcccttcattatctgactgaatcatgccttcgtgacactcaatggtcaggtagtgaagaggcaacatttttcagattaaaacttgcgtatgacagcttgacaggaattctgaaagattgctttaagttgtgttctttatggccagagggccatatatttaatcaacggaaattagtagacttctggatagggtcaggattaatacaaggggatgacattgaagcgtcttacaacgaaggtttctctcatattaccaccttgcaagaattttgccttttagagccagcagaagatggagaggcagtgcaaatgcaatctacaatccgtgattttgccttatgggttgtacacagtcaaggcgaggacaagaacaaatggagaatccaaaccaaagagaattggggattggcagagcaagttctattagtggggcttaaaattacagaactgcctcgtattcctagcaatcaaaaaacccttgaagtcttgatactccagcacaattatttggaagacggttctttcgggaacttcccctcgttgctttcactgcagtacctagatctctcttttaataaattgtccaatatacctgtagagatttgcatgcaggtcaacctaagatatctgaatttgtcaaataacagaataaaaacggtaccagtggagttaggctgtcttaccagactgaggcacttgcatcttcggaataatccaaatctagttattccaaatggtatactaccaaaactccagaatttggaggtgctggatgtttgctcatttaatttactgcagtgctcatcctatgaggcgccaattaatgagcttgtgcgtatggataaattgcagtcccttggaattactgttcgttcagaaacctcgtttcaagggattagtaagacaaccttaccaatacggtccctctctattgtcatttataaccatgaagatgggtatgagactcatgtatcttctgaaaattcttgtatcaatcctgaaagacaaacaaacctgtttgaacttggtatttacacaagacaaaagactattgtgcttgacagcattcattcaatgtggaatgttcagcatgttgagaaagcatacctccatggttatttcgttgataggatcatatgccagaagctgcacactggagatatttttgcaaaactcagacgtttggatatagtacggtgttcaagattgaatcatatttcatggattattcatctcccgcttctagaggatttgctgctattttcatgttcaacattgcaccagattattgctactgcacaagatggtgtcgttaagacaaatcaggaaaaggaaaatccatcagttaataatacattccccagtcttaaaaggatgacactgatcgaagctggtgcattggttaggatctgcagcccgttcttctcatttccttctctggaatgccttcagatctctgcatgccctttgttgaataaacttccctttcttaccgttccgagcaaactgaaatgtatacgcggtgagaatgaatggtgggatggtttggaatgggaagaccaagatcttgaaccttcacttgaactttactttcatggcctctctgctgaagatcaactatctgaattgtatcttttcaatagcctggaagtggaatgggctagtatctttaccccttga

SEQ ID NO: 384 - DNA, 535 bp, Oryza sativa
  Clone ID: PAT_MRT4530_100351C.1
cttttgccgaccccgactaccctatgaagccgaccagcaccggcaccttctccacctcgatggcgatggtgatgcaccgggtcagcctatgctgcgcggtcctcctcgtgctctggccgctcgtcgccgtagcgtggcggccgtggccgtcacgtaatgggagcggtaaggatgaggggatgggggcggccaacaatgtcgagggcccgcgggatgtcgtcctgctttagtaccacatgtggccccgtcgctcgccgtcgacatcttggtccacccgatctgctactgccggtggcccgtctagcagaaccgcaccatgcgcgcgttcctcaggaagctctcgccgacgggctcgggctccggctgtggctgcatccggtccactgccgtggcggggtggaggctgcccgtgcggctgtacaccggccagacctgcgcgaacgtggcctgagtggtgaggctcggtcgttggaagtgctatgcgcgcgcgtcgcggagcctgcggctgacgccgctcgacgttcatgccgtcgtg

SEQ ID NO: 385 - DNA, 561 bp, Oryza sativa
  unsure (1)..(561): unsure at all n locations
  Clone ID: PAT_MRT4530_100352C.1
tgagacatggctacagnatatcccgagagagtgggtacaacgtcattggtctgtatgcatctcttgggggaatgttatttgaatncacagacagctcatgtttttatgctgctatcttnaaagatctgggttcaatggaattttgacatttaagcaaacttanccatctggttgttatccctttggtaaaaaattccccagataaancctggaagattttgatagtcaacctgctgcaacccttacttatgcattttgggaatgtacttgaacatgcatggtccagtatgttgcatcatggccgagccagagttccatatcactttggtaatcttcatgggtctttggaaatagttaggaaattggaagagccccttctacttgaattcactcgtgaagtatgtgatcttcttggagttttagcactaccagaactaaataaagggttgacctcatttcaaaacagatctcttgttgggtatctgatcttccctgttttgttcgtgtccttttctattaagaatcaaaagaaagttttcattaaaaaaaaaaaaaaaaaaa

SEQ ID NO: 386 - DNA, 440 bp, Oryza sativa
  Clone ID: PAT_MRT4530_100353C.1
cctcaatttcgatgacacgcggtttgaccggagtagatgcgccggtctgaccgcctggaaaccgtcggtctgaccggccgagattgtttctccggtctgaccgccgagatcaactgccatcacctgaagccgccaccggtctgaccgccgcgatgccaccggtccgaccggtgatgtttcacaggttagaccctccctctctatttatacatgaggtaggcatcctaaaccaacaaaccaaactcatacaagaaaccaattttgcaaactccaatcataccaaatttggactccttccaaattcgactccgcatcccatacgcacacaatatctcactcgtatgacatatggaatcttcactaaccacgtgcatttgatctggtcggcaaccactgtccggtctgaccggaccaaatctccagcagtacctgttcatcgc

SEQ ID NO: 387 - DNA, 183 bp, Oryza sativa
  Clone ID: PAT_MRT4530_100354C.1
atggtgtcgatgtggcctagctcgtcgaccgcatcttcgctgctcgccgagacactcggagaaggagccagggcaaagcgactcgagggggacaacgataagcgggcctgcaccgctggattgttgcgcccatgtgcgaaagaaagaagaaagaacgacaataagagtgggattgacatgtag

SEQ ID NO: 388 - DNA, 1001 bp, Oryza sativa
  Clone ID: PAT_MRT4530_100355C.1
atgatccagctgctgttcctggtgctcgtggcggaggcggccgtggcggcggtgctcctcttcaagacgccgctgcggaagctcgccgtgatggggatcgaccgcctcaagcgcggccgccgcgcgcccgtcgccgtcaagaccgtcgccggcgtcgtcctcgccctgctcgcctccacgctctacagcatggccgagatcagcggccgcgccgggggagaccccgaatccggcggcggcggcggcggcgcctccctctcgcccaccgaccaggtcctcttctcgcggcacctcctcgaggcatccctcatggggtattccttatttcttgctctagttattgaccggctccaccaatacatcagagagctacgtgggctaaagaagaatgttgaggccgtaactaagcataataaaatgttggaggaagcaaaacatggaagatctgaggagacaaagaaataccaagaagagattggtgctctcaatgaggatatgaagaaactgaagctacaagtccaagaaaagacagaggaagtccacgttgctgaggacaaggctcttgctattcggaaacaatctgaaagcctgctgcttgagtatgaccgtttgctggaggacaaccagcatctccgggagcagctgcagtcaattgaccacaggctctccagtccaaaataagttcaagtgtaatattttttttcctatgggattggagaacctagtcaatatattgctgcagaaaattttccatcacagttttggaaaaaaaaaagtttacttttatcgtagaatacccagaaattcctggcggtaaaatcatttggatttaatgctcatataatatgcttttagcagtattctcccttatcagttttatcatctttgcttaattagcttttgtaatatatacccgtaggtaagttcgagccaaacacaaaaaaaaaaaaaaaaaaaaaaaaaaaaaaaaaaaaaactcgagactagttctctcctcgtgc

SEQ ID NO: 389 - DNA, 160 bp, Oryza sativa
  Clone ID: PAT_MRT4530_100356C.1
ccgagtgaaccgattgcattgctgaggaggacgggctaggaaacattacaatttggcaggaaattcctgcttcctatgaacttcctgcaaatctcctacgtccaaactaaaaagggaggcaagacaccatttttttttcatcttttttttgtaagatccg

SEQ ID NO: 390 - DNA, 1300 bp, Oryza sativa
  Clone ID: PAT_MRT4530_100357C.1
ttttttttaggaaactactgtctgcatttcatttgaccttgattatttcccagattggggccttacacatgtagcttcagaatatcagagccacaaatagttctgagataactcacagaaacatgttctaccataacaagaggtatgcctggaagtctggaacaactttcatttccatgtctaacactgaacaagtaagccttctcaggggtctataacaaagctggaagaaaacacatggggaatttctaaaatttacatcatactataggcaataagctcaatatttttgctaccgtgcagcggtgaaaaacaatcttctatattggacatgaacaaaagaatgacgtgcagagaaacgaccaccattggattgtgcagatcacacagcctggagcttctgctcatccacagattccaacggaagaactgcaggctcccatgaagagggttcatcaagatggatcttggcataatcacttacaagcccattcctctcttcccacatgatcgctttcctctcctcttcggccctgtctaccttatctttggtcatggagctcatgtcacctgccgccttggttaccatgccaaatgcgcttgttaaccaggaagcaccagctgagacatactggttattcatgatagcagagcttgcaatgctggctttctgctccgcagccgctaaagcggactttgtgagttctgacacctgataacgatcatccacctccttgaccttgctaccaacaattgcacggcccaaactgatcttttcactcacgccatactggcggtctagagatgcgacagtagctgtagcattggacagtatgttgtgacgctcgtcaaaagatcttgctacgttcagagcatccttgctgaggacaaagccctttgccaacatgctgctcacaacatcctctgccttcctgactacagattcagcagaggaagatttctctcctgcggattgtttgcgtgcatcaggaggcagttgatagttcacaactggagttatgatgacagaacggtcaacaattgttgcccctgagagaagcacagcagtatctgctccttgtgagtccttaaatgtaacataagcaagctgtgacctttcagattcactttgcatctcaacatattctatatctccagagaaagagaagaactctgtgatctccctttttgaagcattcaatgaaatgttgctaacttttactgtcctgaccagcaaggcaataaccaatggagtaacaggtacaaaaccacgttctttgatggaggaaagtaactccat

SEQ ID NO: 391 - DNA, 390 bp, Oryza sativa
  Clone ID: PAT_MRT4530_100358C.1
atggggcggcggatcctgaacgacgcgctgcggacgatggtgaacgcggagcggagggggaaggcgacggcgctgctgcagcccatctccggcgtcatggtctccttcctcaacatcatgaagcaccgagggtacattaaaaagtttgaggtcatcgatccccatagagttggaaaaatcaatgtagagcttcatggaaggattaaagattgtaaggctcttacttataggcaggatattagagccaaggaaatagaacaatacagagttcggatgcttccaacacggcagtggggctatgtcgtgatcacaactccaaatggtgtactggatcatgaggaagcaattaagcagaatgtgggcgggcaagtgcttggttattttcattga

SEQ ID NO: 392 - DNA, 1818 bp, Oryza sativa
  Clone ID: PAT_MRT4530_100359C.1
atgcagttcaggctggtgatcttggttctgctcctctcctgctcgcttcagctgcttcgcgcgtttccattccccatcccgttctttggccccttcacgagcccacaagacgttgatgcgataaacgagctgtacgcgtcgctgggctcgcctgacctccatggctgggcttcttcaggaggagacccctgcatggaagcatggcagggggtgcaatgccttggacccaacatcactgcaatggatctgagcagcaaccgcattgggggagtgattcctgagagcttaccacctgcagtaaaacaactgaatttatcttcgaatagtctcagtggcaaactcccagattcgatggcgaagctgaactcgctttcgacactgagaaacggcaaccatcttaccatccccacgatgcccggctcttctccaactccggataccatccccggctctcctccgactccggcggcagcggtggcggcgcctcgatcaggtgcttcacaccctcctatatatgtaattccggccactccacatggcgctgcacagggtgaccctccgagacacggcaagaaggtctcgccggcgaaagccgccggattcagcatcctcgccgccggctcactgaccattgccgtggtcctgatcgtcttcgccgtgtcgaaacggcggcgggagacgtctcttcatggaggatttctgagaggagttgagatgagcactccggattggagtgggaagccttcaggacaaagtgcagttgtcaaggtagacaaagaacaaagcacagttgctgaagagaaggataccaagggtagcatttcttcatatcagaagaatgttcaggagagtttacaaaaccatcctttgcaattcaagttcacaatcttcacagttgcatccttgcaacagtataccaacagtttcagtgagcagaatctgatgaggcaaaccctgttcggaaaaatctacctagcagagcagcaagacatcaagtttgcagtactgaagcttgacgaagcgatggcgagaatgccggtggacgagttcttgaggatggttcagagaatctctgaactccagcatcccaacatcgaggagcttgcaggatgctgcgtcgagcacggacagaggctgctcgtctacaagcatttcagcgatgaaactctcgacgacatgatccatctgaagaaactggcatcatcagacgatcctgctgccaagatcactcttccatgggatgcccgggtagctgtcgcactcgaagctgcgaaagctctagagtacctccacgaaggtggtcagagacaggttgtgcaccagcatttcaggcctgaacatgtgctcgtcgacggcgagatgcgtgtgcgcgtgtccggctgcggccttgctgcggctgtgaaatccggcttggatcttcagtcggaatgctggctcgacgcgctgagctacgagccaccggaggcggcggcggcgccatggacggacaagggcgacgtgtacagcttcggggtggtgatgctgcagcttctgacggggcggaggccttacgacggcgcgcggccgcggggcgagaggcggctggtggcgtgggcgagctcgcggctgcacgacctgacggcgctggagaagatggccgacccgcgcctcgggacgccggcgacggtcaggtccatgtcgcggttcgccgacgtcatcagccggtgcacgcagcaggaagcggagttccggccggccatgtcgcaggtggtgcaggatctgcggcgcgcgctgcagcctgcacgcgatgcttgcggacagcagagctgcagcaactga

SEQ ID NO: 393 - DNA, 378 bp, Oryza sativa
  Clone ID: PAT_MRT4530_10035C.1
tgtactcgtgtgttctgatccaagctactgtgtcttttctatagtgagagcttctcaccaagcgagccttctagacagagagagctacccccggggggatcgatctcgccagaggactccacccgccgggccttgcgtgcaaggagatccaaacgaccgcccgtcggtgcgaccaacggaatataaaggaggctgtctctacggcagctagactgtatagcgaacgctatggctaccgcgtaagtaccttatagccaacatatagctggtaccctgcgacatacatagacaagcctcatctggaaactggcgacaaacatattatgccaccgtatgctctgaactgtctagcatctatgcatattgaatatactatgc

SEQ ID NO: 394 - DNA, 615 bp, Oryza sativa
  unsure (1)..(615): unsure at all n locations
  Clone ID: PAT_MRT4530_100360C.1
accaataatccaatcatatgaaacctgatcgaaatgcgtaaccagaaaattagtcaattatcgctatcaccggcaccaacgcgcaatcagagaatcggcgagccaaaacacttgttgcaaggtctctctatacacaaaaattgattaagctttctatttcaaactacagacaccttttctagattactcttccgaatcttcttcaagatacaaaatcacctttttctaactgtactagacggcttgccactgcacatcaaaactgagttaattcccagtgatatttctcgagtagatgtatcatgtaaggctttttagcccaaaagcatatccaatttcatgatatattatattacatcgaccctttgtgaccctaatctgtacagacccctaaggccctccttaaaatgctgacttgtactatgtcaaaacgccatacaaacaaaatattttgggtggtggcaatcatcttcaagaattgccagtacctttcataccttcgaagatctctttgttctctttgttcgccgatctcttcaccaccaatagtttggcgctgtaggttgcttgaatggggtaaactgagtngtgcaaatgctctgatgggatgaagcc

SEQ ID NO: 395 - DNA, 2898 bp, Oryza sativa
  Clone ID: PAT_MRT4530_100361C.1
atggtcgctcgcaagccaaacccagcctccgtgacgggccctgatcctggcatgatcgatgatgacaccaccgcctatctgggggcttcgcttgttgacgaggaggagttggcgaagctggtcacctctggcgtgttggcagaaaagcaggccgctgccccgggaaaggctgtggtgccgaagcccggcgacaaccggacggtagttttcaccgtgttcttcgaggcaggccttcggtttccatgcaacgtcttgttgccggagatccttcgcctttttcaggtggagctcccccaactgagcccatcggctctcatctggatcgccatcttcgactgggcgtgccgaactgccggattctaaccaaacgccgagcttttcggcactgttttttatgctcgggagcgtgaacttcaagccgggtccgacgtggcgaaatctctccaatggcggcacagagcgatcgcgccgaacaagaagcccaaggtcgccgtcgatggcgctatggaagcccgtttcgccctgcttcgcaaggtctgctcccgccttagctgccgcgacctggtggaagagttttgcatgcttcggatcttccctctctcccagttgtggcaagtcgaggtgaactaggacgaggaggtcgatggcctaccaaaacttgtcatgctagagggggcgaatatgttaactcttgttcaggccgaggccgaagctcggaaggtgatcggcgatgtgccgatcacagaatacggccagctgcttacacggcaggcggccggccgagcgaatcgcgtgtacgacggcgatctcccctcccgggagaagccctccaaggccgatggcgacgaagggacctccaggaagtgaaaggcccctgcctccactgactctgatgccgatgatgaggacactgtcaacgaccgtgacggcgaagaggagggggaggatgagggggagatggaagttgcggccgaaacggccgcggacgagcctgctgatgaccgcaccgagacatgcggctacacccccactccaagcccggaccatgtcgaaactggggtggagtcgaacagcttccccctccgccgaaaggatttggagggggcaaaggcgctggttttgattgcagcggccaaggtggcgaatggagggtcagttaaggaaagctccaagaagaaagggctcgtggatgtcgcctgtgtcttcagcgacgacgagtcttcggatgagacccctacttcgcctgctgggcggagcctgggtctttcaaccgctcccggtgctacgaccgacacgggggaagcaggagggagtgctgcggccggtacttcagcttctgctgaccgggttttgcaggccactgtcaagctcttcggaagccttcttcgccatacaccggcttcgccgcccgccatccagaaagggaagaaggtggccgttgaggcatcggcttcggattactcgctggcggcaccccgcttcgcccctggggatttcgagacctgggcagatcttatccccttcgtcgagggggtaagtcatctcgtttctccggctgggagcccgagccagttcaccgagttgaacgagttcgacgagggctattctgccatcaagagcttagctgattgggtatcagcggctcattgttcgactgagcaaaccgtgcgggctcgtcttgacgacttcaaaaaccgtcttcgagctaaggacgacgaattgggctacaagatcctagaaatggagagcctcgctaacaccctcaaggagacgaaggctgaaaacaagcggctccaagttgagcttgagaaggggagcgaggcgaaggccgagatcgagcgtctcaaggccgaactaaaaaaagagcaagagcattccaccgccctgaccgattattataatctcaccgagccgaagatggaggcccttcgccaagagtttagcaaggcagaggcaaccgctgagagagaggcacaacggttcgcgcaggagatggcgaaagccattgagtctgccaagaccgcgtgccgtacacttcgccttgcccttactgacctgggggcgaaggtacgaggagtccctagccaagatgcttctgccttcgacttctcggagtggacccaacaggccagcggtgcggtctccgattgtgccactgcgtacggcgattgttgtgcacgtgtgtcggcggccttcaccatgggcctgctgcaacagaatgggtgcgagcacattgccgagttccctaagtttgcgaagggggattgggaggtcagctctcaggacgttttgcccgtacttcgtgcctggcgcaaacagttccgacaaaaggaggcccgatccaccaccaaggcgcgcctgctcgaacacttagcaaaggcagaggcgatggatcagggcaaggagccagcggctgaagaaggttgagcagatgcgggcgctggggcggccgacgtcggccaagatcaccccgagggtcttcgccgaaaattgtgtgtttggcctccctttggggattggcagaaaacgaatgagaaattcgttgcggttaaaggcctggcgaaagttagttatgtatgtcgcgagatgataataaacggcaatagttacaaggttttgaaagttgccggctggatgcgggcgcagcccgggcgaaccttggataactacgaccttttccatgtgttacgtcgggaggacatggcccgcttttggcgaaaccatcggaggactgatcgtcaggaagcgatcgcctagcgccgttatagtctagtttgtgtttcgcccccttctcctcttagggtagtgtataatattagtagtgatgacgaaccaagttcgccagatcacaccttagggagtggagggtatttcgggggcgaagatgtaattttgctg

SEQ ID NO: 396 - DNA, 884 bp, Oryza sativa
  Clone ID: PAT_MRT4530_100362C.1
tcagattgggttgggacgggttgggcaacatgcccgcgccgccgagccgccgaggcgaggttgaagcggagttgttgaagacgaggccacccctggttgctgttccagggacgtgagacgcgatgtcacgacggccaccgaacgacgaaggtcagcaagatcgcttttggacgccaacaaccccaagccggtgagcacgtcggacatggtgtcctgcagcttggcaacggcatccgtcggctcgagcagcggctgcttatcgaatggcgacgcagaatcgatccgagacgacggcagcgacgcggatctggcctgcggtggtggcggcggctcggatgcgacctgcggcggcgacaggggctcggatgcagtctgtggcggcggcggcgactcggtttcggtcagctgcggcggcggcctcacggatgcggctcgcggcggcggcggccacgcggatgcggcccgcggcggcggcggccatgccgttgctgccctcggcggcgacggcagcgcggatgtggcccccggcggcgaaagctgcgccgatgcaccccgcggcggcgacggctgcgccgttgcagtccgcgacggcgtcggtggtgcggatgtgtcctgcaatggcggcgtggatgcgactcggatgaatcttcacacttgatcttgatctgtttgaacacttgtgcccgtaaacccaaaaggcggcgaatcatctcagcatggtcacgcttcttgttgtatgacttgcaccagcgctcatataaggcccatacggcttgatctgactcgaggtccttggcggtggctcttcctttccaacgccggcagctcctccttcccatgcccacgagctcttcctcccgcaccggcagagctctcctccccat

SEQ ID NO: 397 - DNA, 226 bp, Oryza sativa
  Clone ID: PAT_MRT4530_100363C.1
atgagcctcgtgaagccggtggagatgggcggcttaacagtggcaggtccgcctcagggagtcaggggtggtagtgccgtgagtcgtgtgactggtggccgggaggccggagttgttttgtgcaaagcacttggagtcgacggtcacctatcgaatctgaatgtggaagttccattcaattatcgtggcaagaaggccagaggcgtccccgcatcgggggtggcgt

SEQ ID NO: 398 - DNA, 315 bp, Oryza sativa
  Clone ID: PAT_MRT4530_100364C.1
gcacgagggaagtcggcaggcgccgcattaccacctccaattcctcctcttcccaaaccacagttcgacttcgacttcgccatcagcaaccaatctgctcccttttgaagtttcgatccgatccattcccaatcccatcccatcccatcgatcgatcgatctcatgcggcagctttaccaatcgatgcgcttgagatagccgcccgattcatcgatcgatctgccgagatatatatggggattgacaagtcagccgccggatcgtcgtcgtcgccgccgcggccggttgccgccgccacggcggccgtgtgctgc

SEQ ID NO: 399 - DNA, 234 bp, Oryza sativa
  Clone ID: PAT_MRT4530_100365C.1
atggcctctgagggcgccatacaaagcgtcctgcccctgcttcccctgtcctccaacggattccctcgtggatgccggcaacctggggcggaggctgccctagcgatgactgatggtggcgtaggcgctgccgaaggcgtttgcgcggcagcggggctgcaaggtggtgctgccaccggagttggccaaggagatggtcaaccagacgtggagcaacaggggcacgttcaataa

SEQ ID NO: 400 - DNA, 528 bp, Oryza sativa
  Clone ID: PAT_MRT4530_100366C.1
atgggctgccaccaccaccaccaccagctgcgacgcctcgccgtgctcgccgcggcgctctgcgtcgtcgtcgtcgcgacggcggcgaggccgctgcaggcgaggagacacggcgaggcggtggagatggacgtgtcggcggcggcgccctccggcgatggggcggttcgagaggggaagtggctgccgctgctgccggcgggtggggggctgatgcacttcccggtggtcggcggcgtgtcgatgccgtggatggccggggcgccgccggcgatggccgggccgggggtgcagctggtgccgccgtacgtcggcgcgacgcggcaggagcagctaagcctgtgggcgtcgctgttcaacccgttccaggtcaggcccaggctgcccgccgccgccgcagagacgacgtcgccggcggtgcccgtggacatcccggccattgccggcgtgtcgccagagaagacgacggtggacgagccggccgccggcgagcccaagtggggcgtcttcttcggcaacaacaactag

SEQ ID NO: 401 - DNA, 748 bp, Oryza sativa
  Clone ID: PAT_MRT4530_100367C.1
gagggcggtgccacggctttagtgactcaccgcatggtggcggcagcaggaggcacctcggcggacgccatgatcgacgggaagcaccttgggcgcggggtggcggcgagtacctcggcggaaggcggcggccggatctgccttcgctggccccgcaacggccggatccgcaagcaccggccccgcgaccgccgacgacttcatcgggcgctcgagtagcagcgggcgtggcgggcggtgcctcgggcgcagggcagcgttgagcggctcggcggacgatggtgaccagatccgccttcgccatgcccgcgacgaccagatccgcaggcgccggcttgatccgccggcgtcggcgctgcgaccaccggacccgcatcgctgccgccgtgattataggctgggttttgttttttttattttatttttcctggatttttatttttacgtgcggatgcgctacctttacatataaatcagatttttgcagatcatttgggtcagccttccacacttaaaaataggttttgggccggctggaaattttttttttacgagtggtattacaatggatatctgcatcttcagatagttggcaccgcaagatcgaggagttgacgacagtagcctcctcgacatcaacgtgaaggtcatgtggtaacctcaataaatgagaattggttggcggcgccaaaaaaagatgcaactcgcaacaggcacagcattggggagcatgcatgcgctctgcgtc

SEQ ID NO: 402 - DNA, 513 bp, Oryza sativa
  Clone ID: PAT_MRT4530_100368C.1
cgagcgggaaaatttgaagcgaaattctttcacaagattttgcaagaggaaattggtggtgtaaaaggccattttggaccaattaacgcactggcatttaatcctgatggacggagcttctcgagtggtggtgaagatggatatgtaaggctgcaccattttgattctgactacttcaacatcaagatttaaagcaagaagttgtgaaactctgaggctgcatttgaggaaggccgaaggtaccttttggttgggaagatgtttcatctcctgtcatgtggaagagactaaggtgcagtgtttagctactgacagtgtactgcttctcagacattcttgttgcactggagatccagatttttagatgctcaagagattttgtacattcagcaatcgagggctccttatactgcaatactagcttaattctgttttcatcgttgttggtttactttgaccataaatatatatccagttttgggcaaaaaaaaaaaaaaaaaaaaaaaagggcgg

SEQ ID NO: 403 - DNA, 332 bp, Oryza sativa
  unsure (1)..(332): unsure at all n locations
  Clone ID: PAT_MRT4530_100369C.1
acatattatttttttactccatacttttgtttaatgaatctttcaaaggattttttggaaaaaaaaagttccgccaagtgcctaggatcgacattggggactagaaacggtagacggccccggattattttttttccacctggngctcttaccaatggcgagaggggaatgaccaaaattgattgcgcgacattaattacntaaacaaccggggaaactgggtacgtgtgccggacgtttaccagtggcggcggggtttctttcgaccctcaccgaaggttggcggggggctcctgatgcggttacccccattccccccactttggtggttt

SEQ ID NO: 404 - DNA, 1100 bp, Oryza sativa
  Clone ID: PAT_MRT4530_10036C.1
tttttttttttttttttttttttgcacgagggtcaacgcgtctgagtttttgctgcggtgggagtaactagtacaagcaattctcacaaagaaaacattcaaccaagtaacccgcagcaacgttaacctctagcacagaaacgagttcgtactttttacaagacgtcataggtattaagatcatcaaaatgtactgagcctcactaataaatgggttgagaaaagggctgcaaaaagaagtgatacaatacaacatagggaggattcagattcagattccacttcagagctatttcttgggctgagaaggggactcatcttgccaggttgcctgccattgcttgtcgtagaacgtcgtctcatcgatgagcttcttcactgtctctatgtcctcgtttttcctgaccagcagcacaccagccacagcaacaaacagtagggttttgcagaagaagttgcccatctggtcgacaagccccacgccggtcaagctatcaacaaagtatgccatgaagaagccaatcatggcagcacggccatttagcttctcggcttcagggagatggaaacgcttcatccatgcccaccacggtatgattgaagtatcgaagacaacggcctcgtcagggctagttgcctctggacaatcttcaagccatttccttctcctggcctcggcgtctatgacggcgtcccagtcgacggcgccgcccttctcgaactgcctgaggtcccacgtcccgttgacccacctcgagtcccggaacttgggcagcgggggcgccgccgccgccgccggcggcttctcggccttgacggcggccccgttggacgcagcgggggacggctcggcctccggcttgctcggcggcgcctcgacagtctccacgggggcctccccggcggcggcccccgccaggcggaggccggcgcggaggcgcggggaggagagggtgaggaggtcggggcccgggtggaggcggcggcgggtgagggagagctgcgaggccgggggggagaaggtggaggtcgccatggccatcggcttcccttgtcgccgccgccgctgctgctgcctctgtagagatgggggggagaga

SEQ ID NO: 405 - DNA, 1032 bp, Oryza sativa
  Clone ID: PAT_MRT4530_100370C.1
agcgcgctcagacgagttcgccatcggcgatggcctcgtcgtcatcaccaccgacagcttcatggagtagaaggtgccgaccggcgaccgcccaggtcaagcgcatcgccgaggaccccgatgaccagccggaagagtctcttctcgtgattattggggaggattaacagtgccgtgtagggcccgtcgaacaggaccatcatcagttcatcaccgaggttagcttgcattgccatatggcatgtacagactggacaatgcctgaaggagtcagacaaggaacaaggacatcagaaaacaattacttcactttccaaatcttcagattgatcgcctttccaaacaggctccttggataagtctgctaagctatgggatacaagaactcttgacactgatcaagacatgtgtcactgagcgacctatgtcacaatacctaattcctaaatacatttcctcagtggttattggaggtggtcaagatgctatgaatgtgactatgacaaactgtcttgcaggaaaatttgaaccgaagttctttcacaaggtcagttcttcgcacatagtttgtcttatgttttagtgagaacaatgacagttcttcatgtataatacggtgttaacagcttctcgagtggtggtgaaaatggatatgtaaggctgcccccttttgattttgactacttcaacatcaagatttaaagcaaaaagttgttaaactcttaggctgcattttaggaaggcccaaggtaccttttggttgggaaaatgtttcatcccctgtcatgtggaaaacactaaggtgcagtgtttagctactgacagtggactgcttctcaaacattcttgttgcactggagatccaaatttttaaatgcccaaaaaattttgtacattcagcaatcgagggctccttattttgcaaaacaaacttaattctgttttcatcgttgttggtttactttgaccataaaaatatatccagttttgggccaaaaaaaaaaaaaaaaaaaaaaaaaaaaaaaaacaaaa

SEQ ID NO: 406 - DNA, 207 bp, Oryza sativa
  Clone ID: PAT_MRT4530_100371C.1
atgcgggagctccccacctccctgggccgcaacctgggcctgggctggggaagcctccccgcgcgcgcctctacttgggccgaattcgtgcccctccccatcgtcttccgcgcggcgccctcccctccgctgcggcccagcggcggtggcaccctcccctccgccgaatctagtgggaggggaggcggcggcggcccggcggcctag

SEQ ID NO: 407 - DNA, 4622 bp, Oryza sativa
  Clone ID: PAT_MRT4530_100372C.1
ggcacgaggccagctctgtcccgagcgcccgtccgtccagggctctgccggccgtccgtccagggctccgccggccgcctatccgggggaccgccggcctgccagccgtccgtccaggggcagcgccgccggccgcccgtccagggcaccaccacctcgccatcgaccgtccatccaggtcaccccgacgacgacgtgtgctgctactgctgattcactttgaggtgcacgatagctggtggaagggaaaggccaaaagggagaagaaaacgagaaaataaaagtttcaggcgccgcttcaaaatcccgcctcaaacggtcaaaagcccctgatccccctttcccctaccgggcctctccgctgccgcctcatcctccacccccctcactttcctgtcgcgatgccacggcggcggcggcggcggcgtgcggcacccggcggccaagttcccccagagctacgcctggcttatggcgcccgcgcgctcacgctcggccgcacggttttctccctcctgccctcgcctcgacattgtgagtccccctgtcctgcgtgccggggaagagtggcctcggggtgcctcgcgtgccgccgctgggagcacctcctccgtgacggggaccccatcgcttatcgccgcctcatcacacgagccgtctgcgccattgcggccgacgatctgtccgcgcccccgccgccccggtacactccgggcaactccgggcattcacaggccaggctcgttcgggagatgatgaagtcgatcgttgcggatcagtctcatggaaccaagaacgtcctctgcaatggtttgcacgagggtggccagtctatatgtatcagtgatcttgtttcttcttcatcttggagtattcttttgcacagaatcggggatcttctcatgtgctatttgctgaggtgcacatcaatctttctgcctgttaaaaagaatgattattttcaggtctctggtgttccactcaatgtggttctgcgaaatcctatatttgcaagtactgttgcgagaaaacatcaaccccaaactacaaaagcaaagtgtcatccgtgctacctgtggaaaagtgcaaacatggcggaaaacttatctatttgtcatgacagttcaaattctggagttaattcttcgtttagcagcacttgcaaaattgttactcaacaaagctgtgaaacatgtggttccataagaagagcagaatccaaagatccaagtgaaggatgtaattgtccaaaatttccttctgatggtagatcaggagagtgttgcaactgctatacccacaacaccaggaaaagaaaaaggttatacagttggcagcgccgcagcaaaaagaaacaggtctgttctgtggatgagtcttcagcagaatggagtaaattaaatggcagtaatttcaatatgtctaatggtccatcggagaacctggctggaaaaatgaatgatcaagcacaatctgtcgagctcacagtagataatacttctttggcaaggagcaatgatgacagttcttcagaaatcaaagtaattaatgctactatcttgtcatcagaaaaatcaccttgttcagtgttcgacataaggggttcccagggtttatcttgtcattacagcctgtcagaagtccagtaccaatctacatgtccccaagttgggccctccagttacttacatctgaatagttgttccatctgcttcaattgtataatatcaaatgcatccaaacatttatcattagattccttgatatcaagaaatggtattttctataacagaaggacaacctatagtgtcttccattgcaaacacatattaagcaaaaggaaaaggccagatgctctatctcttgtaaagcacatatttggaatcaatagttgctgtgcaagcttgctgaaatacaactgccacgaatctacaatcagaaagtctaattgcttgtgctgttggctgcccaaatcaattaaaaatctcataaggaattctaaacgttgccaatataagaaattatttctgaagcattgttctgtcaagtgtaaggtggcacctgatgtgaccaagaatgatggcaaggcacattatccacctggaggaaaagcagcatattatgatcgatcattttctcgattggaagcgtatagcacccatcaacaagtagcttcttttgtttgggcagtgctgaaacgaatagtaccaaagccattgcttggaaacttttttggcaagagatctttgaggacaaatatatggaagttcataaagttacgtaggtttgaaacatttcaattaagtgattgtattggcgatctgaaggtatcacattattcttggttatcaaatattgaattctctaactgcttttgttctgcaataattgggaaacaaactgggtcatcaactagtgcagaagagcaggaacagaaaaatattttgcattgctggattagctggttattttctgatattgtgattcctgtggtccgtacatacttttatgttacagaaagagaatcaaaacgatatgatgttttttattacccaaagtcagtatggagggacttaactagcaatgccattgcttccttaaataagaaaaacttcaggattttgcgcggtgaacctaggaaagcagttaggcatttgaactgttcatcaagagtgaggtttcttccaaaagcaaaagatatgagaccattagtagacctcagagctaaatcgaaggatgccaatctcaataaatgtcatttaattatgaaaaagctaagagatgagaaaccagagatgtttggttcatcggtttttgattacaataatgttcaccaaaatctttcccaatttatttcttcaaaaagaagccagttgatgaagaagttaaaggtatatattgttgttgctgatgtatcgaaggcatttgattgtgtcagtcatgacatggttctaaaaatgatagacgatgctttcaagtgtgatgagtacacagtgaggaaatgctcaaaggtaatttgtaacaggtctaagaattccttgtaccggtttgattcaaatgcttctattggcaatggtaacagtatctatgatttatcaattcagctatcatcaggtggtggcatttttgctgatcagggtactatttgtagaatactaaaggaacagtttcatcatcttctgtatgagcaaataaaatgcaatattttgaagattgggcaaaagtattacttacaacaagtagggattgctcaaggaagcaagttatctcccaacctgtgttccctgtactatggccacctggaaaattcagtgctatcaaaatttctgcatgatagcaagcttaatgcaggagaggctttttcggaacctgaatatttgttaatgaggttcattgatgatttcatatttatctctttctcactggagcatgctcaaaaattcctcaataggatgagaagaggttttgtgttctacaattgctacatgaacgacagcaaatatggctttaatttctgtgctggaaatagtgagccttcctctaatagactctacaggggtgatgatggagtctcattcatgccatggagtggtttgctaataaattgtgaaactttggaaattcaagctgattatacgaggtatttagatatcaccattatctccaccatcactgttaagatgcattcttcaacaaagtatatccacagcaagctatgccattatatgcgtccaaaatgccatcccattttctatgactccaatatcaattcacctggtaccataagagtaaatatttatcaagccttcctgttatgtgcaatgaagttccactgttatattcgaagcgtttccgatgccaacgtaagcaaattagaactgctgcaagtaattaagagaaccttcagatacatgcatagcctaattgtcagacggatgcaagatgtggagctgcactataatgtgcgtccagttctgaagcttaggcgaaaagaaaccatttggcttggtttaactgcatacattcgtgtgcttcagcagaaacaatcacgttacaaggatatgctgactttgttgacagcagagcttgggagatattgccatttaggtcatgaatgtgataccttgcgctatgctgtggatgattctcactcgtctatgttctggaaatttaagttctagaaactagaagttgctttcctggtgtactgcagaaactactgttcttttggatattcttttgacaagtcattttgggactttacctccaatctgccgacgtgtcatcgcacgcagtaccaatgcctacctcgctaaaacatactcctggtgtgtgcaaaacaaaccggtggattcatgtcctaacctcattcaaggtgcgactgttggcccgtgttctccaatctagtgtaacgaacgagaacgagcacctcactagtcaaaggttaatggtctcctgaggtgacagtggggtgccgatcatggtttttttttaaagcattttacgactgattgctcatttctttaggatacctggtagcactcgagcagtattaactttttgtataatttattgtgggctttgatttgttttccttaggttactgcaattgaaacgattgc

SEQ ID NO: 408 - DNA, 365 bp, Oryza sativa
  Clone ID: PAT_MRT4530_100373C.1
ggtcggctgttctgtcctgggccgagtcagcgagaaggcgcacgccggtagcctggttgagcaagatcccgccgggccccgcgttcttgctcttgcgagcccggtggtcggcgcccgcgtcaatatagctctaccgcccaccccgttctcccggtctcgccggatgcagcctcgcattcccgtgcccgggcgctccgcgaagccgctggcatcgtgtcgacgccggcgtgcaaggatgcacggtggtcgcttcgggcctcggcccggcgacactcaccaccggtttatcagcgtacaggagcttgcgtctagttccagtatgacgacttgagagtggctgtatatggtaatggtataggtagcga

SEQ ID NO: 409 - DNA, 1470 bp, Oryza sativa
  Clone ID: PAT_MRT4530_100374C.1
atggcggaaaacttatctatttgtcatgacagttcaaattctggagttaattcttcgtttagcagcacttgcaaaattgttactcaacaaagctgtgaaacatgtggttccataagaagagcagaatccaaagatccaagtgaaggatatcaggagagtgttgcaactgctatacccacaacaccaggaaaagaaaaaggttatacagttggcagcgccgcagcaaaaagaaacaggtgctgttggctgcccaaatcaattaaaaatctcataaggaattctaaacgttgccaatataagaaattatttctgaagcattgttctgtcaagtgtaagatgttggtgagtttttctatagacttggtcagagttgaagaaaaaagtgacttaggaacagaggtggcacctgatgtgaccaagaatgatggcaaggcacattatccacctggaggaaaagcagcatattatgatcgatcattttctcgattggaagcgtatagcacccatcaacaagtagcttcttttgtttgggcagtgctgaaacgaatagtaccaaagccattgcttggaaactcttttggcaagagatctttgaggacaaatatatggaagttcataaagttacgtaggtttgaaacatttcaattaagtgattgtattggcgatctgaagtgttctgcaataattgggaaacaaactgggtcatcaactagtgcagaagagcagaaacagaaaaatattttgcattgctggattagctggttattttctgatattgtgattcctgtggtccgtacatacttttatgttacagaaagagaatcaaaacgatatgatgttttttattacccaaagtcagtatggagggacttaactagcaatgccattgcttccttaaataagaaaaacttcaggattttgcgcggtgaacctaggaaagcagttaggcatttgaactgttcgtcaagagtgaggtttcttccaaaagcaaaagatatgagaccattagtagacctcagagctaaatcgaaggatgccaatctcaataaatgtcatttaattatgaaaaagctaagagatgagaaaccagagatgtttggttcatcggtttttgattacaataatgttcaccaaaatctttcccaatttatttcttcaaaaagaagccagttgatgaagaagttaaaggtatatattgttgttgctgatgtatcgaaggcatttgattgtgtcagtcatgacatggttctaaaaatgatagacgatgctttcaagtgtgatgagtacacagtgaggaaatgctcaaaggtaatttgtaacaggtctaagaattccttgtaccggtttgattcaaatgcttctattggcaatggtaacagtatctatgatttatcaattcagctatcatcaggtggtggcatttttgttgatcagttgagagtaaggaacttgaaggttcacttctgttaa

SEQ ID NO: 410 - DNA, 412 bp, Oryza sativa
  Clone ID: PAT_MRT4530_100375C.1
acttcttattgcatccattatccgtcattctacctgtggtggtggcccttttcatacaaaatgggttacattagggtggccagtctatatgtatcagtgatcttgtttcttcttcatcttggagtattcttttgcacagaatcggggatcttctcatgtgctatttgctgaggtgcacatcaatctttctgcctgttaaaaagaatgattattttcaggtctctggtgttccactcaatgtggttctgcgaaatcctatatttgcaagtactgttgcgagaaaacatcaaccccaaactacaaaagcaaaatgtcatacagtaagcattttacagtatatttttatacttttgtcaattttgtcagagaaatcttcaaattgcatcgtctccataactcgtgctataagaaa

SEQ ID NO: 411 - DNA, 304 bp, Oryza sativa
  Clone ID: PAT_MRT4530_100376C.1
ctttcttaataattatactttgctgttaagcagatacatgcatagcctaattgtcagacggatgcaagatgtggagctgcactataatgtgcgtccagttctgaagcttaggcgaaaagaaaccatttggcttggtttaactgcatacattcgtgtgcttcagcagaaacaatcacgttacaaggatatgctgactttgttgacagcagagcttgggagatattgccatttaggtcatgaatgtgataccttgcgctatgctgtggatgattctcactcgtctatgttctggaaatttaagttc

SEQ ID NO: 412 - DNA, 572 bp, Oryza sativa
  Clone ID: PAT_MRT4530_100377C.1
atgccacggcggcggcggcggcggcgtgcggcacccggcggccaagttcccccagagctacgcctggcttatggcgcccgccgcgctcacgctcggccgcgcggttttctccctcctgccctcgcctcgacattgtgagtccccctgtcctgcgtgccggggaagagtggcctcggggtgcctcgcgtgccgccgctgggagcacctcctccgtgacggggaccccgtcgcttatcgccgcctcatcacacgaggccgtctgcgccattgcggccgacgatctgtccgcgcccccgccgcccccggtacactccggggcaactccggggcattcgcagggccaggctcgttcgggagatgatgaagtcgatagttgcggatcagtctccatggaaaaaaagaacgtcctctgatatatggtttgcacgagactgagatcccgttgaagtgctgccatgccagtatacatggtaaggacgtagggttttgtgaatacttggtcttcggtgccaatgacattggcgcctatcccccttcacataagtggcttagcttccacggggaggctaggg

SEQ ID NO: 413 - DNA, 306 bp, Oryza sativa
  Clone ID: PAT_MRT4530_100378C.1
gctacctactactctcatcaccttcactagactactgctcgatcaattgcagcaatggcggcgaatgcagcgctcgcgctagcggtaagcctcctgagggcgcccataacttaacacctgcacctactgccctaagcctccgacgccgaaacctaatccgtcggtgcctaggccgtcgacgcccgggagctgctctgggtcttgcccgcgccacgcgcttaaactgcacttgtgctccaacgtgcttggtcttgttaaggtcaagatcgaagcggaggtgacgtacgagctcttgtgctagctgct

SEQ ID NO: 414 - DNA, 806 bp, Oryza sativa
  Clone ID: PAT_MRT4530_100379C.1
tttttttttttttttaattcataatattagaaaatatcatggcctaatttataaaaaccgtaaaaaagagagattcctcctttctttttttttttttagtatatgtgaatggggaattcacttattattgctatcaaatttatattgattacaagattaaacattaagctcctcttctccacattgttcgttataccatctggtcgagcttgggcgacgactgcttgtgtttgcaggtatccatttcggagtaggaggaaatggtcacaggcctgtagacgaacagtaggtagaaaccggcgaccgccaccgtcgacgtcatgccccagacggcggccctcatcgccggcgccggcatgaccgccgccacgcgccacgcgaaggcgacgctcagcgccgtcgacagcgcccacacggccatcttgagccgccgccgccgccgccgcaccgtcgtcgccgctgtcccccttctgtatttcttccagcggaggcggcaggcgctcgtacatcgagaggcacaggaagaggaggcccaggtcggcgtaggcgaagagcacgaaggcgaggtcccacggctcccggcgcgcccggtacgccgcctgcgccgtgaccgccgtcgccacgagcatcgtgattgcctgaatgacccggccgccgccgccgccatggcatttctgctcctctgctttgagactgaccggattgttagtggccatgaaaccttgtaagcaatcgatcgatcgagcgaccaagaagatgtgaagtggccagtgaccgatcgagctagctagcaagccgcctcgtgc

SEQ ID NO: 415 - DNA, 1176 bp, Oryza sativa
  unsure (1)..(1176): unsure at all n locations
  Clone ID: PAT_MRT4530_10037C.1
atggacaaacataactctttacaagatgatcaacaatattgcatcaagacgcatggagtacagggaacgcaacaaataatgtcgttgaatgcatggatgagatcagatcgatcacgtgcaggccggtactacaactaccaaaaaggtcaaccgtatggtgctggtgcaaacaatgtggagatttttacccgtgtgccattaaaaaacatgatgcctgcctctgtgccactaaaaagttcgagcctctctctatgccatcggcaaactttatcgcgccctccacaccattcagtcctttttagtcctaacggtgtcaaacagcgcaaccaaatgactttgttgcccttagacttgagagcccatttggtgaagtttgttttcttctgtgccattcggagggcagccattcgggctcaggggcgcggccggtgcagcggcgaggctaggtgcggccgtcgcggtgaaggagcagatcgcgcggccgtcatggtgaaggagcgcattgcacgggccttgcggctgtacaagaagncgcggcgcggtgncgncaacggtggcgggaccgtctccctcacgcgcgtcttccccgtcggtggcgccgccgccgccgacaagcaggggcttcccgccagggcgttcgacacggggacgccggagtggacgcccaacgtgcagtgctacggcagcggcgagtacgcccgcattagctacgcgctcatctacgacatccagggcagcctcttcctccctatccttgaccccgacgacgcgagctcccccctcgccgtgcatgagctcgtcagcaccgtgctgcggctccgcggctccggagaggtgcagggattactcgccgtgaaccagatagtgaatccagatgagacccgggcggccatggccgagctcacaagctgccattggcacgcaaacatgggtgagatgcaggagcggcggaaacgacacggagaaggccgcgctgacgaccgccggcgcaccgttccacctcgccgccgccgccgccgggcaaaggaggtggtcgggcgccagttggaggggtggccggtggcgctgtccgctcggctcggcggagacggcggtgacgaggaaaggggagggcggcgtggcggcgcgggcgtccagcaactcggccacgctcggctgggtgttggctgggagtga

SEQ ID NO: 416 - DNA, 313 bp, Oryza sativa
  Clone ID: PAT_MRT4530_100380C.1
cttatatatttttaatttttttcacttgggggttttattgttaatgaggttttcaccccacactaacaccggaatcaacccaacacaacacacacccatttcctaacaaacaccaaatacatcaaatttaaaccactccctccacacaaactagtaacaaaaacaacacatattttcccacaaccaaactcatatgcacagcctatccaaaccactctcaccatatacctgagcacgcataaacccaccctgaacacaacggattgaaaccgccatataacacaccattctcaaccacatgcccaatgttaac

SEQ ID NO: 417 - DNA, 276 bp, Oryza sativa
  Clone ID: PAT_MRT4530_100381C.1
atggaggctctgttttccatgttatgcaaagcatttccaagtagcaataaagtgcctaagtcatatagtgatgcaaagaagactatgaaagatcttggattggattacacaaagatcaatgcttatttgaatgattgcatcttatatagaggggctaatgataaggctgattcttctcctgtttgtggcatttcaagatggaaaaatgaagggcataataatgtctctaaatcaaggaggagaagagtgaagaaagtcccacataaggtattttga

SEQ ID NO: 418 - DNA, 157 bp, Oryza sativa
  Clone ID: PAT_MRT4530_100382C.1
tgtcctcatcgtgttcctcattgctagcatcgtctttctgctagagatccaacaaggcatagactatgacaaaatcaagatgttgctccagaggatcaggggcatcggcgttgtgggcgacaagttggacaatatcgccactatgaaagccatgtaa

SEQ ID NO: 419 - DNA, 504 bp, Oryza sativa
  Clone ID: PAT_MRT4530_100383C.1
tgtaggccatgtcatgagcccatctggttgaaagcaatccctaatacctgtaggatcttcttatggctagcatttcgtgatagactcaacaccacggattgccttcggagtcgtggtttgtcgcacccggatcgctgtgttctttgtgatcaatgcgaggaaacgattgatcatctcttggtcgcatgcccggagtctcgacaactttggtggattgctcttagagctattgggcattccgagtgtttaccgctcaatgagccctcttttcattcttggttgtgtgacagccgtaagaagatggtcaaggaacatcgccggggattcaacatcatcgcaacactagtagcgtggacgatttggaaggaaagaaacaatcaggtcttcaactagaagagcggaacatgggcggagattgtaagggttatgacgggtgaagcagagctttggcggctggctagagccgcaatccccgttatggtaacacattatatgtagctgttc

SEQ ID NO: 420 - DNA, 506 bp, Oryza sativa
  Clone ID: PAT_MRT4530_100384C.1
tctaactgttgtcgacttggcggtttgtagtactgactcgtagtcgacaacagggtagccttcttcctcgaatccgcatccggcgagatcagagacaacgctatatctctccatctcttcattccgtattccttgtcgagatccaccaaccgttctcgagtgatcgagaaggcatagaatctgcgacgaagcctcatcaacattcatcgtactcgccttagtcgatcttggtgtagaaccatagagacatggagtcttcaacaatgttgaatagaattttccttttctcgaatagcctagccatggttggtgctatgagataggtcgtcggtcttcgttggtaggttgtgtgcaacaactctgcatttttcgagaacgttctcgataatgcggtgtactcaaccacaacctactcgagtgctcaattgttcctttgtagatacatgccggatgtatcttattgcgtactcgttcgacatcatacggtatgacatcttttggtacgc

SEQ ID NO: 421 - DNA, 210 bp, Oryza sativa
  Clone ID: PAT_MRT4530_100385C.1
atgccgtgtagcctccttgcagatgttctcatcggccgcgcgacggtgcttgatggcggcattgtcggtggcgcagcgaatgcgatgtgcggcggggcaggcagcgcggagggggaagtggagtgggggtgggagaggaggaaggagagagagtcggcgtgcgcggtggctgccatggtggtggggaaagttagggcggcggcggcgtga

SEQ ID NO: 422 - DNA, 134 bp, Oryza sativa
  Clone ID: PAT_MRT4530_100386C.1
ccagcaatcttcgcctgcgatcaagcgaagctgagcgtcgtaaccagccgacggggccaaagccagacgctacggaagagctagcacagggggccccgggcgtcgacggcgtccagagctcgacgcagggctag

SEQ ID NO: 423 - DNA, 561 bp, Oryza sativa
  Clone ID: PAT_MRT4530_100387C.1
aatctggtagtttttttcttctgtcaagctaataacacatttttttttacaaataaattctatgcctcagcaataatcacaacacattgtggcacaaatttggttctagtgtgggtaatactcatggatttgacataacattttacacaacatcactaaaagattatattggccaatggaatcaaacttgttgcctccgcaagaccaccacaacatcttctataactttgcatgatcaaactgtgcaaaccaacattaggatggtctcaattcattcacaggaacagagtatcgtgccttccatttcatccatgtaaaaaaatcaattgcactcctaggactgctatgggaatacgtgtactacatttttctctataaatggtgcatcttgttctagaaattgttacaccatgtccactttgtcagctgtgtgcttcaaaatcttaggtgtcgacactttctctggatttgccgagttcgtttcctggttaacaacaataattaggtatgatatccatgagtgttccactttgttgatcatacacttaaacccgatctgcg

SEQ ID NO: 424 - DNA, 2122 bp, Oryza sativa
  Clone ID: PAT_MRT4530_100388C.1
ttttttttttttttttaagaaaaagatagcttcaacaaaatgtcatactaaacaaattagttcaatgtttatcctataaaacgtaatctggtagtttttttcttctgtcaagctaataacacatttttttttacaaataaattctatgcctcagcaataatcacaacacattggggcacaaattgggttctagtgggggtaatactcatggatttgacataacattttacacaacatcactaaaagattatattggccaatggaatcaaacttgttgcctgcaattttcagtaatggaaatatacaattctgagcaatggaaaatccaagcaaatttaacaccttaatcaccagtaatggatacccacctccgcaagaccaccacaacatcttctataactttgcatgatcaaactgtgcaaaccaacattaggatggtctcaattcattcacaggaacagagtatcgtgccttccatttcatccatgtaaaaaaatcaattgcactcctaggactgctatgggaatacgtgtactacatttttctctataaatggtgcatcttgttctagaaattgttacaccatgtccactttgtcagctgtgtgcttcaaaatcttaggtgtcgacactttctctggatttgccgagttcgtttcctggttaacaacaataattaggtatgatatccatgagtgttccactttgttgatcatacacttaaacccgatctgcggcaaatgaaagcaggctctacctaacacttgtcagaggatgcttaaaatgtcacagaaagagcagtaattagtttagcataaatgtgtaatcaacaattaagcaaaaagaaggcatagaattaattttggtcattcaagagaaaaatatttattgtagaaaaactgaatgaggtaattatgtttctggtttgtaacaatttccaagagcttagcacctatcaatatcacttagcatgcaaaaacaacatctgcctgtgagtattaagccaacataatagcaataagcttgcaacctttctaaaatatgaactaataccaaaacgataccaacattatcaccagcttttcaatcagcaattcagcaccataaccggggatccatcaagcaattctcatgtgcatattcaattaatctacagaataaaaaactacatatgttgagaggtacggttggtacacaataatttatatatgtttgctcacataaacagagtgtgttgagatgttagtagtggagtagagtagggtaaagcattttttatagaaaaatgatttgctccgaaaaataacgaaaggaatgtgctaagtggaaattgtttgactcgcccaagagcagtcctgtccttgactgataaaaggggaccaaacccatacaaccatggaaaaatgggggggaaacagagatatggggagggacaatacatttttattactaaccatttatgttctaatcaaggagcatgagcagtttggtgatcaggaagctatgttattccgaaagataagaaaggaaaattaagccaaaataataccatttccacaagattgactaagatcaaatatttataaagcttacattgctagacatgaatcaggctggaaaaaaaatgtagctcatcccagattagctacaaatatgtaccccagctatacctttccatctagaggatagcaaaccatagttggctgagagttacctcatgcatttttttttcatggcatatgtttaagctgaagataaggatcatatcaaagcagtagacatttagagtaataataattaagggttataggatttgaaccataagtgtttgttcatagtctggattgcagttttatgtaaagcaaaaggattctaggaagcaaacgccatatatatggtagcggctattccaggattctagtcgtggctgatgtgtggggactcagcagcgtccacgccggcagcaaacagtacgggacaagtagacctgaaatgagagcagaaacaaaccaactatgcttccaccaatttctacacctataaaacaaggtaaattaatcatcaaaagatcacaaacatttagtatgcgtccgacttgaccagcacactatcacacagcccga

SEQ ID NO: 425 - DNA, 1916 bp, Oryza sativa
  Clone ID: PAT_MRT4530_100389C.1
tttttttttttttttttttttaaaagcaatgattgataggttatattcacagaaattagtatcctgaccaagtcattacaatggatggggaaagaagaaaaagaaaagctctaatatcatatagctatgatataataaaaagaatgggaggtgaaacaaaagtcctctccgtatgcagctccattcatcctatactcaggaatcagcttcagggcaggtgaagtaatcttcactgcccgcacagcatcatccatcagagatgggtgacgactcatcgaaaggcgtctccgatccatctgtcatgcgatacatgcccccaaacatgtatagtgtaccgctactcctcatggagtatgtgtgccgatggagatagtccggtagcgtgatgccaatgaagaatggtgagtaactcaaaagtccaatatggtcgaagtgaggttcatcaatggcccgagagcgctaggagcaaacttcctagcaaacagatagcagacagaagtgggcttcgagttgtaagtgcatcgtgtaccgttattcctgatagcctggatgaactcttcactgatgtttgaagcaccatatcttgctgggtgtggacctcctcttgaccaatcaacccatgtgatggtcctgttggcattcagggacccatgaaacaaatgcagataggttggtatgtaatgctcatccggataacaagatggtctgcaatgcttcctgaagattgagtagtacttgttgtctgctattatccgcaaggccagttcacggttgagctcaaaccactctgacccttttctccattgactcggcaagatgtgaggagccatccgccggttgtagcggccagcacattgaggggtgtcaatgttataggactccacgaagctgtgtgccgagtttatgagatactcatagacggttgggaagttgaacacggggatgcagctctccgagagaagaacgaaccgctcattggagaaatccaacaaggcattggccagcagccgcttctcagcatcaacaagggtgatcgatccccaggacacttcctcgctggggatctggcgggcgaagaaggcggagttcttggagacgttgagcttgtagtcggggagggtgtggacgtagacggagtagaggccgtggtggccgcggaagaagcggtcccagagcggcgcgaaggggagcgggccgcgcgtcatgaagaggaaggcgaccttggggacgcgctggaaggggaagtcgtcggcgacggggacgagggaggcgcgccagaagagctccgggtcggacatggagtgcgcgaggtgcggcgggtggacgaacgacttgaaggtcggggcgcagtcggcgcgctcgcacgcgccgaaggtgttcgacgggaagaagagctcggtgtgcgagttgtagtagtagcgggacacgttggcgctcgcggagagcccgatgaccacgcccgccatgaagatgacggccacggtgaccagcttcacgaggagccccgtcgtccaccactccttccgcggcgtcggcgggcagtagtccgcctcctcgtccccggaggcgccacccgctccccccgccgccccccctccccgcgacttcagcatcgccttcccgtccccccacatcaccgccgctgacgcgacgcgacgccacccaaatcaagatcggggtttctcctctcgcgcccagatctcgcaccacaagaaccgaacccgcacacggagcaaggaatcgagagagcgagatggatcgggggaggaaggaagggaagacacgggattttcgcttagcggcgaaggatggaggtggggggtgggaagcgcgtggaagaagaagaggagggaggaggaggtggtcggcggcgaggtcgggcgggcggcgcaagtgagaggggcttgggcgccgcc

SEQ ID NO: 426 - DNA, 1335 bp, Oryza sativa
  Clone ID: PAT_MRT4530_10038C.1
atggacaaacataactctttacaagatgatcaacaatattgcatcaagacgcatggagtacagggaacgcaacaaataatgtcgttgaatgcatggatgagatcagatcgatcacgtgcaggccggtactacaactaccaaaaaggtcaaccgtatggtgctggtgcaaacaatgtggagatttttacccgtgtgccattaaaaaacatgatgcctgcctctgtgccactaaaaagttcgagcctctctctatgccatcgtcaaactttatcgcgccctccacaccattcagtcctttttagtcctaacggtgtcaaacagcgcaaccaaatgactttgttgcccttagacttgagagcccatttggtgaagtttgttttcttctgtgccattcggagggcagccattcgggctcaggggcgcggccggtgcagcggcgaggctaggtgcggccgtcgcggtgaaggagcagatcgcgcggccgtcatggtgaaggagcgcattgcacgggccttgcggctgtacaaggaggcggcgggcggtggcggcagcggtggcgggtggatggtccaggtgtgggcgccggtgagggacggcgcccggcgcgtgctcgccacgcgggggcagccgttcgtcctggcgtcgcagtgccaccgcctgttccagtacaggaccgtctccctcacgcgcgtcttccccgtcggtggcgccgccgccgccgacaagcaggggcttcccgccagggcgttcgacacggggacgccggagtggacgcccaacgtgcagtgctacggcagcggcgagtacgcccgcattagctacgcgctcatctacgacatccagggcagcctcttcctccctatccttgaccccgacgacgcgagctcccccctcgccgtgcatgagctcgtcagcaccgtgctgcggctccgcggctccggagaggtgcagggattactcgccgtgaaccagatagtgaatcgagatgagaccggggcggccatggccgaggtatcggagctcctgaccacaacatgggtgagatgcaggagcggcggagacgacacggagaaggccgcgctaacgaccgccggcgcgccgttccacctcgccgccgtcgccgctgggcaaaggaggtggtcgggcgccagttggaggggtggccggtggcgctgtccgctcgactcggcggagacggcggtgacgagggaaggggaggccggcgtggcggcgcgggcgtccagcagctcggccacgctcggctgggtgccggctgggagtgacgcagacgcggatgccatggagagaggggaatcgagagagaagagagagtga

SEQ ID NO: 427 - DNA, 2853 bp, Oryza sativa
  Clone ID: PAT_MRT4530_100390C.1
atgggcgacgcaggcgggccccttcccggcgagcgccgcctcagccccgccgaccccgaggagccctcgccgccggcctcatcgtcggatgggactgggagcggcggcggcggcggcgaaaactccgtggaggagggcgacggggaagggcccgggtccgggtccggtacacccacggcgaagcggcagctcttcgacgctgacggctccgcgtcgaggcccacccgccgccgccgcatcgcctccgacgacgaggagcgtatccatctcagaactctagtcgcagtggaggggaagttgtggcgctgtccttccgttcttgttcctcttccagctcaacagcggggacgggcatggggaggtggactaggccgagcagccatgcgcatcaatggcaaggagattactcaggcttttacaggtgaaactacaagtgaaaacacttcctctacgaatgaaagtaatcctttcattgcagtattggatagtatgtggtctaagaagagagagcttgatgctataaaggaggccgggaaagatgagcgccatgaaaagttattgtcattacaaaaagagagattggcactagaaagacagaagttagaatacgagaggaatttattggaattcaagagaaaccagcgggatgagagaattatgaacatggaccttagtgatatgactgggcaactaagagaatactacttgaggttgcaggattctgaatcagatcgaaaaacctgcgataagatcaaggattttagaattcatcgattgcgacggatgggaatgggagcacccatgccaccagagtggaatgaaacaatcatagtgttgatccctaaagttccgaagccggagaatatcaaggacttaagaccaataagtctatgcaatgtgttgtataaaattgtatcgaaggtgctggctaaccggctaaagacgatcctgccagaggtgatctctccaacccaaagtgcatttgttccagggagacttatttcagacaatattttggtagcatatgagatgactcactacatgagaagtaaaaagaggggaaagatgggctacgcagcaatcaaattagatatgagtaaagcatatgaccgggttgagtggagctttctgcgggatatgatgctgtggctgggcttcaatgcggaatggataaacctagtcatgcactgtgttacttcggtgtcgtataaaattaaggtgaatggtgatttgtcggaggttttctctcccggattctctgctctgttgaggaaaacagaggaggaaggaaggctgcaaggtataaaagtttgccacaatgctacaagtgtttctcacctgctgtttgccgacgactctctcatcccgtgtcgcgcaaacagaggggatgcacagaatctgcaaaatattttaactttgtatgaggagttttcggggcaaatgctaaacaaggagaagttcgcgatcatgtttagttcaaacacaggaagtgagaagagaagggaagttatgcagactttacaaataaataagcaaacaatgaatgagagatatcttggtctcccggtgtttgtgggaagagataaaacgaaggtgtttgcatatctgaaggatagaatctggaaaaggattcaagggtggaaggagaagatgttatcaagagcagggaaggaaatactgattaaagccgttgcgcaggctatcccaacttttgctatggcctgctttgatatcacaaaaacaaagcaatgttggcggctgcttcaggagcctgattctctgtgtgctcagattccgaaggccaagtactatccatctggatcaattctgcaagctaaaccaagatcgggcatgtcatatacatggagcagcatactaaaagggctgcagactctgaagactgtcatgatttggcgagtgggcaatggcaattccatcggcatttgggatgatccctggatccctagagactggacgaggaaaactgtttcaaataagggcacgaacctgctaacaagagtaaatgaattgatagatccttatacgggcgattgggatgagatgctgaaagaaatggagagaagaaacagtagaaggacacctgcatcttcgtcgcggggtgcacaaagtgatcaagtatggaaaagactttggaagcttaactgtccgaacaagatgaaacacttcatgtggcgattggggcatgacgcaattgccctacggatgactctcaagagaaggggaatggatattgataccaaatgtttgatcagtaaccggatggatgaagacgggagccatttcttttttaaatgcaaagaggtcaaacacatatggggagaccttaaccttgaagaagtaagatgcaagttagcagtggtgcagtcagctttggcagttttacaggctatactggagctggaagaaaaacaaaggatacatgccattgttctgctgtactcatgttggaatgagagaaacggacgcagggagggtgaaggaagaaggggagctagtatcctggctttctccgtacagaaacaagcagatgaattcaaggatttggcgcctcaatgggggagtggtcaagcagatagatcaaatagaaaatgggctagacctacaggaaatgtcctgaaaattaatgtggatggagccttcaagccacaggaacaaaagggaggttggggttttgtgatcagggattctgaagcgcaagtaatacaggcaggagcaggtttttcgtcacggctccaggatgcctttcacgcggaagtgctagcgggagttaaggggctaaaagctgctgctagtttgggcatggctcacattcatttggagtctgatttatga

SEQ ID NO: 428 - DNA, 161 bp, Oryza sativa
  Clone ID: PAT_MRT4530_100391C.1
gttcattttcgtttccaagagtcagctgctcagagagggtgacagttttaatccaaatagccgttcgatgacggtcgggtcttccaccacgtggaatagatctgggatgcctggaaacccaagtactccccgagcttttcttggacactatcatctagagg

SEQ ID NO: 429 - DNA, 945 bp, Oryza sativa
  Clone ID: PAT_MRT4530_100392C.1
tttttttttttttttttttttttttgaatacatgcgatccaataattatataacgaattatgatagtgctagattacttgcaactgaacaacagaggtttttccaaaatggtagaaagcatgcgttagaagtagaaaatttgcactcaggcttagttcatacatcacaaatatgtccatgcatcacaggagttcatgcaataaataggtcatataacaaatagttcacacagcaagtagctcatacgacagatagttcatacgataagcaggccatcaacacaacaagtagtgcagctcaacctgatcgtcgagccatgatctcaccctgcaacctcaagtagtattctcttagttgcccagtcatatcactaaggtccatgttcataattctctcatcccgctggtttctcttgaattccaataaattcctctcgtattctaacttctgtctttctagtgccaatctctctttttgtaatgacaataacttttcatggcgctcatctttcccggcctcctttatagcatcaagctctctcttcttagaccacatactatccaatactgcaatgaaaggattactttcattcgtagaggaagtgttttcacttgtagtttcacctgtaaaagcctgagtaatctcgtcgtcggaggcgatgcggcggcggcgggtgggcctcgacgcggagccgtcagcgtcgaagagctgccgcttcgccgtgggtgtaccggacccggacccgggcccttccccgtcgccctcctccacggagttttcgccgccgccgccgccgctcccagtcccatccgacgatgaggccggcggcgagggctcctcggggtcggcggggctgaggcggcgctcgccgggaaggggcccgcctgcgtcgcccatgggggaggagcgatttgcgatgcgtgaggttttttttttttctttttg

SEQ ID NO: 430 - DNA, 3696 bp, Oryza sativa
  Clone ID: PAT_MRT4530_100393C.1
tcaactctgttcatagagttggaaaattaatatgccttgaagagatcttagcctttttagtaccatctgatctaatagcacaccataagcaaagaacaggccaaatgtgatgccaaagataaccttgtcaccgaattgatctgtggatgaagtagggctaggaagtgctcttgctgaattacagtggtgactgagcataccaccacatagctttggattaccagtgaagcttgagttgtcaaatgtatcaaactggcctccagttggaatagccccttccaggtcgttgttgtaaacattgaatgcagaaaggaagtttagcttgttcagttctaaagggattgtgcctgttagattgttgttagacaagtctagcatgaccagcttggtgaggttgcagattgcttgtggggtctccccagagaagctattgaagctcaagttgagcatatcgagtgccttcagctgactaatctctggcgggatcgcacctgtaaaaccatttttggctatgtttattgttgtgtggatatattggtattgtcggtttttgatgaatggaatgccgtaaaatctcatgtttgggacacttacatccagattggttctcttgtctgacttcagcattggaatctgcgttaatattgttggaaattcacctgtaaggttgttattggatatgtctagatagaagaggaagttgaggctgttgatccaggcaggcactgatccgcttaattgattattggataactgcagcaccttcaattttgtgagctttgatagccaaagagaaatttttccatgtaaagaagaaccacttatttctaggtactgaagattttcaaaaccatccattgtttcatctgctagcaatgtctcatggttgaagttccctccaagaagtagagtttttaagttgctaaagctcttgaggatgtaaagtgccttcgtgatattcgtaaaatcattccaaccaactgacaggcaggaaagagacctcagtctgtccattctgtgtgagaactcaccatggaatttgttccacgaaagtctcagtgcaatcaaatttgtgcaatcataaatgctttctggaattgtaccattgaagttgttcacgagaagatcaattatcattagattagataggctggaaaagttgatcttgccaaggtctccactgaggtagttgatcttgaggtcgaggattttgagatttgtgcagttgcctaaagttgatggcagctccccatacaagtagttctcacccaaatggagctccttcaatctcttgagctgacctatggacttgggtatgtttccactgaatatattctgttggagatcaaggatagacaatttgctgagctttataatgttggcatcatcaagtactccatttagatcattgtttgggaaagaaaggtgctccaatgatgaagcattgaatagttcatctgggagtggacccttgaagttgttgcggccacccttgagcactctaagcatggagcagttgcctatgtctgagggtatgctgccaccaaattgattggaagagaggtcaagtaccccgaaggatggtgagttgatgcacaaagaacttggtatctgtcctataaagctgttgttgctggcattaagagccaccagattgttcatcaccttacatgtggttgttggaaatttccctgtaaataagttgcttgagatgttcagtacctgaagaggccagatagttgattgaatgaagagctcttgcaaagctccactgaagtgattgaagctaacatcaagaacgacgatgctgctcgatgacaccaacccctccaatggaagttcaccagacagcgaattgtgtgaaagattgagctgcagcaggccggtgaggctgccaagagacggtgagatctgcccttcaagggccttagaagcgagcaaaatatcagcgatcctcatgtctgcattacaggtgatgccttcccatgtgcagcaatttgtgccgttccgccatgatgcggagaggccaccgtctcctgagaggccagcaaggaactggaggaggacactcttctcctggtctatgcaggagtcggtggaagaagctaaacacagcaccgtcagcagagcaaacccaagtaaatctgtgggtaatttgctgctgattctgctgcatggaaactgggaaggtctcatgatggatcttttttttatcagattgagtatagtctggaactctggataaatcaatatgcagtagtgggcattataaggccagaaaaatctgaaaagagctgccgtgaagtctttgctgactgcagttactggctgagtggcgcctcccacttgtgacccaaggcggcgcttctccctgtaatatgcatccatcttatagaacacatcaaactcctcaacacccggaggtgcaccgtccccaaagagatcggtgtttgggggactgttacatccgatcgatgctatagcatcagctaacttattacaatcacgcggacaaaagctaaacttgcaagtaagaaaagacgaggcgataatgttcttcgcttcaaacagaagagtccccaacggcgcaaactgaagatcttctcccttcagggcctgaataagcatcatagaatcagactccaaatgaatgtaagccatgcccaaactagtagcagctttgagccccttaactcccgccagcacttcagcatgaaaggcatcctggagccgtgacgaaaaacctgctcccgcctgtattacttgtgcttcagtatccctgatcacaaaaccccaacctcccttttgttcctgtggcttgaaggctccatccacattaattttcaggacatttccggtaggtctagcccattttctatttgatctagctgcttgaccactcccccgttgaggcgccaaatccttaaattcatctgcttgtttctgtatggagaaagccaggatattagctccccttcttccttctccctccctatgtatgtttctctcattccaccatgagtacagcagaacaatggcatgtatcctttgtttttcttccagctccagtatagcctgtaaaactgccaaagctgactgcaccgctgctaacttgcatcgtacttcttcaaggttgaggtctctccatatgtgtttgacctctttgcatttaaaaaagaaatggctcccgctaaagatcaagcatttggtatcaatatccattccccttctcttgagagtcatctggagggcaattgtgtcatgccccaatcgccacatgaagtgtttcatcttgttcggacagttaagcttccagagccttttccatacttgatcactttgtgcaccccccgacgaagatgcaggtgcacttctgctgtttcttctctcaatttctttctgcactttgtaggcagatttcatagaaaagaggcccctcttatcataatgccaccccactacatcatccctgtccacttgaaccggaattgacagaatggccttgacatcttcttcacagaaagtttgcctcaccagcatctcatcccaatcgcccgtataaggatctatcaattcatttactcttgttagcatgttcgtgcccttattagatacagtttttctcgtccagtctctagggatccaaggatcatcccaaatgccgatggaattgccattgcccactcgccaaatcat

SEQ ID NO: 431 - DNA, 277 bp, Oryza sativa
  Clone ID: PAT_MRT4530_100394C.1
cgccggcggtggccgcacggcgtcggagaacgcggaggccgtcgtcgacttcgtcgcggacaagatgaaccgggcgtggatcgggttcgggagcgcgccggaggggtcgatgaagaaccggatccacagcttcgggctgaagctgctctcgcgggtgcggccgtcggaggtgctgctcaagtcggtgaccaaggacgtctccctactcgagatcgtgcatccggcaagtataaatactcgtcttgggcgtcgacggttgcggcattttgatgcaggg

SEQ ID NO: 432 - DNA, 267 bp, Oryza sativa
  Clone ID: PAT_MRT4530_100395C.1
gaatgtcctcctagcaccatgtgaggttgaacttcatcgactatatccaggtcccaaatttcaattgcaggatccatggtgccaacagctacgaaattccctttgtcgccacccttaaggttaaaatccatccatgctgtgcacaacggaaaatcagctagaggcacctcatggtgcacaaacatatttagatcgccgtcttttgtttcttcaagtaaatttacctgcagcgaaattgacatcatcctcattatatgcacaaaacta

SEQ ID NO: 433 - DNA, 348 bp, Oryza sativa
  unsure (1)..(348): unsure at all n locations
  Clone ID: PAT_MRT4530_100396C.1
cccagcgtccgcccagcgtccgcttatgtacttagagcttttgcagtaaggaccactgtaagtgtaaactagttacataataacgcttcactaatccagacattatctgtgtatataaataaatgcctacacagctggtttcttgttgattaaaaaaaaaaaaaaaaaaaaaaaagggggggggggaaaaaaaaaaaaaaaaaaaaaaaaaaaaaaaaaaaatgataagatgttaaataagtaaaaagtaaaaaaaaaaaaaaggggtggggtgttttttggggttttgggtttttttttggttgtttgggnggttttggtttttttttgggggnttttttttttatt

SEQ ID NO: 434 - DNA, 1317 bp, Oryza sativa
  Clone ID: PAT_MRT4530_100397C.1
cccacctgtctcatcagaaaaaagggcgccgacaactccagctcctaggaaaacacctaaagcgaccgaaccctagctacccgcagggaatcagatgccgacaaggaaagtttcctacacatacagcaccttatgcttcatccataagacgtctaatcactcttttatgaactgcaaggtggtgctacaagtgaaggctgaactcgatgcatgtagagatcgagagatccagcgcacttccccgtttaagagttggtgtccaattcataaatcaaaaggacactctctttcaggctgcaaggtttttcttgatgctaccaaatctatgacccgacctccatgctgctagatccatcaacacgaaaaccaatctcaatgtgtgtcaaaggacgattgcacggaagaaccccttgatcgcttcgtgggggtcatcgacatcgacccccacgattcaacgaacccgccaccatagaagcaatccggaggacttgaagccaattcaccgatatatctcgcgaggcaaatgcacgaggaggagaaagtcgggctgctgcgattgactactcctctacatcgacgcgcgctacatcgctaacattccttcggcttcttaacacctacctccgttccacaacacgtcgagtggtaatgattcatgatctcatacgagggccagagcggcggcgggcggccgcccgtccatcggctccgtcttcaccaccgccgcgtgttcgtcttcgccgccggcgccgccttccggaagcgtcgttggcgaactcccacctgtccgggacaatattcccaaatccctgtataatccaatccattccggcgaggccgagacaaaaattagtggaggtgttcgaaatcgaacgggacaaagagaaaacaaaaacacggcggcgaggcgtacgtaggtgttgagctggcggacgaagctggagaagttattgcgcttgaagtacttgggggaggaggtcgcgggcgaactcggcggggcgccagacgacgaaggtggagccgtcgtcgttccatgagatgatgtcgtcgccggagaagaccccggcgttcgacgacaccagctcctcaccgccgccttcagaagaggaggagagcagaacaactcctcgcaaaggggacccggcccgcgcccgccctcccgccaccgtccggtggctcctctttacagagtagcgcgagcggcgatgcctcgttgtgcggtggtagacgcatctggagtcactcccggccactcctaccctcgctcccctgcaaggggtcgggtaggagacggcgagctggaaggtggcgttgggg

SEQ ID NO: 435 - DNA, 380 bp, Oryza sativa
  Clone ID: PAT_MRT4530_100398C.1
gagcagccaagccaccaacaaaccaagaagaaacaattcatgagcagccaagccaccaacccatctttgaaccaagaaacaacacaaggttacaggaggaacatgcccaagaattcctcccccgcaagcaccgccgcccaccgcttgcaacaccaatagctgccgccgccacctgtcacagtcgtcgcttggggccgagattggtggatccgttgtcttcgagagtcaccaccgccgccgccaccgttgccgcagcaggtcgcagccaccaccttcgggagcagctgccgccactgcaggtcatagccaccgccttcgggatcaaccgccgtcgcggctgctgctgcctccttgagcagccgctgcaagcccttcaccat

SEQ ID NO: 436 - DNA, 429 bp, Oryza sativa
  Clone ID: PAT_MRT4530_100399C.1
atgggagcagatcaaccgggcacgcaggatttaggacatctatcaacaaagaacgagcacgctgagggcaagaaacttggcaaatgcagagaaatttccaaggctgctgcacccagggctccaggagaccaaggtcactgcaaatgtgacctactagctaatttagaattgggactccagaagcaatgcggacacatcgaggtgccaaccggataccaagaactgagaaatgtggctgaaaaaaggagcaaggccagatataagtggccaaatgctgcacgaagacatcaaatcactccaaatggcccacatgtcagctgccgaataccccgcggcttcggcttgcacggacagcggcaacgccgcgacggcccgtaccgaagggtttcgttggagcagtgcctaaattatattccacggaaattatga

SEQ ID NO: 437 - DNA, 423 bp, Oryza sativa
  Clone ID: PAT_MRT4530_10039C.1
atgcaaagttggagccttgtgaaaactacttttcttctggctgcattcgatgacttggatgatggaaatggacgtgtcaatgtcttccttcgaaaacttgcaaagagttgcattggaatcatctcttcagagagcccccatgctcttgtacagtttgtactagaagaggctgcacttggattcatctcatctgaatgttcaattggagctgcagctgataggatatggagactgtttcctgtgttatacctaccagcgtgttccaattttatactctggcaacaacatccaactccaggacaaatgctgtttgcacttgaaggtataaaaatgccaataccatccaattcacggtatcttgaagccccaactgccgccacacgaaaacctgcactttctgtcggtatatcaaatttaccatga

SEQ ID NO: 438 - DNA, 273 bp, Oryza sativa
  Clone ID: PAT_MRT4530_1003C.1
atgacagcgaggcttcgctcagaaggtttctgccctgctagaggatgtttggtggttctggagacctcgttcattatgttgttgaagctgcttacctttgacagattgagggccgctggtgttgctttcaagccctcaagtctcagcaacggtcgtagtaagcatacagttgagaactttgtcagttatagtagcaccgtggcagaagcaaaaaccatggaaacacatgctcaagcatcaccacctgcagctgccgacaagtttgctagttag

SEQ ID NO: 439 - DNA, 986 bp, Oryza sativa
  Clone ID: PAT_MRT4530_100400C.1
cccacgcgtccgcccacgcgtccgtttttttttttttttttcagaattactccaatggagtaattaaacagtaagtatctctagaggaagaacaagttcaccaagactgaagaatactagcactgtatcagaaaatggacaataacaaggttatggcttgactgaatctgaatatatcaacttgactgaatccgcttatatcggaggaggcggggcagcggtagcatgggggagatgaccaacgatgatgcgaactctggttgaaaccggagctgaacttgtgatggttatgtctatcgccttgcttgagtgaccaatatatgtcgatgacctgtcaggactggcgcacctccatgagtaagctcagttggctcctttggatctgatagcattatgctttcagagtcaagcattgcagtaacatctgtcatggtgggccgatcggctggatcttcctgagcacaaagaagcgccacctgcgtgcatcgcattatcacggtgctttcatatccatcacacagtgctggatcaacgagctcttgcaaccttccgtctttccacatatgccatgcctgaaagagatagccaacaatatccctctgtttctccattatgaaattctttcgtccactaatagtttctagaaccacgacaccgaagctaaatacatctgtcttaagtgaataaaggccttgagatgcatactctggagctatgtaaccactggttcccacgactctctttgtacgctcttctgctacatctgaaaccagtgttaccgccgatccaaaatcaccaatctttgggttcatgtcatggtctaagaggatgttacttggtttcaagtctctatgtacaatccaacagtgcttgtgcaggtaaagaagcccctcagctagccctttaattatctgaaatcgcttggaccaatttagcaatgcccccttcgttttatccgcggcggggagggggaggcgacgaggcgg

SEQ ID NO: 440 - DNA, 1127 bp, Oryza sativa
  Clone ID: PAT_MRT4530_100401C.1
gcacgaggcactcccctcccactcctgagcgaagcgcgcagtggctactccttcatggcaccagtcgtggctactccttccttgctcttctctagcccaacccccaggaggccttcctcctgcttgcctcctcctcctccttgcagcagcagcagcagcagctacgcctcccatggtttcaagctgctgcagccgcagttgctgttcatcaatcggctaaccagcagaaacagcaacgggagtagcagaagaagcatttccattttgtcgctgaggtgctcttccagtggcactgacagcgcgtcttcttccgccacttcagaaagatgggttctcgagcctgcaggagacggcgattggcgtcatatcgggtaccgcgtcgcacgacccggcggcttccagatagcatccgaggcggcggtgacggtgggtcgcgttcctgaacaggctgacatcgtcctgtctgtcgcaacagtgggagcctgttggtaacagacctggagttctgggacgcacgcacggctggagaagaaagaggggagcttgttggtaacagacctggagagcacgaatggcacctacatcaacgagaggcgcctcaccccgggtttccccactcccatcgatcccggcagcctcctcatctttggtgacatccacctggccatgttccgtgtctccaagatgatcgtcgatgtgtccagtgacaccaatggagctgagcaggaagctgagacggctcaagtatcagcggcaactcaacaaaccaattagcaacctccctcttgccatctactgcttaatgctgaaggcaagcagctcaagaagcaccagctgttacccaatgcctgacatgaagcgcatgttacgaacgacagagtttctttgcaaataagtgcatacagatgttgtgtgataggaatgtcatctcatctgtattatctaaaaataatgaacgtcatctgtagccattaagaaaattcacgaagcaacaactctgcatatcaatagagagcacatattggtatccctacgatcaatcgaaaatgcatttattaagtaccaaagccagatgtactagaacattcaatagtttaacacatgaggggaaaaaacgctgcgcttgt

SEQ ID NO: 441 - DNA, 568 bp, Oryza sativa
  unsure (1)..(568): unsure at all n locations
  Clone ID: PAT_MRT4530_100402C.1
cacagataaaacgaagggggcattgctaaattggtccaagcgatttcagataattaaagggctagctgaggggcttctttacctgcacaagcactgttggattgtacatagagacttgaaaccaagtaacatcctcttagaccatgacatgaacccaaagattggtgattttggatcggcggtaacactggtttcagatgtagcagaagagcgtacaaagagagtcgtgggaaccaggtacggagctgaacaaaatataacgaatggtgcactgttacatatatgttccagttttctcatgccttgtgatatctatttccagtggttacatagctccagagtatgcatctcaaggcctttattcacttaagacagatgtatttagcttcggtgtcgtggttctagaaactattagtggacgaaagaatttcataatggagaaacagagggatattgttggctatctcgttcgagatgtgagtgaagatacagttcaatgatacactttttcttatggtcttcttctagcatacagnattgtgttacacacttgacagattgcaacatg

SEQ ID NO: 442 - DNA, 1212 bp, Oryza sativa
  Clone ID: PAT_MRT4530_100403C.1
atggcggcgcgcgagggggcctcctcctcctccgggagcagcagctcccaccatgaggccggcggaaggagaagccctctcgagctctccctgctgctcaccgccgccgccggcgcggcagtcgccgcggcggccaccccgcgagacgcgcacgcggcgtccggcggcgtcatgggcggccgccgctcgtcgtccccatcatcttactgcaggaggacgtcgtcgtcgtcgtcatcgtcgtcgtcctcttcgtcgtcgtcgtcgtcgccgtcgtcgcgggaggacgagtccgtcatctcggtgatagtcgcgggcgccgtggttgtggcgtacggcgtggcttgcgttggggcttacgtggcgtgcggtgtggtttacatcgccgctcacctcctccggcccaggtcggcgaccaccgtcgttaagctccaggttgcatttcgtgggctgacaaaaataatacagagggatctcaacgggattgctaggaaggtggacacttccaaccggagttgggacaagttcatgttgaccgagaccatatgctccttgaaccgtcacaaagatatctgcatctcttcaagcttatcggctgacttgcaaaagagactgcttttctggggtgattgctgggagaaacattttgataaaatttctatcgaggagaggagcaagtttgatgaagaaactctatacaacgtgcaaggaatcaagatgaagaaaaaatatttgaaacccggcctcggaaaagaaaacgagtatctggtgttaaccattcttcttgctgctgagggaaaattggagttccccatagtcagaagcgcttctgatctgaccacagtactgggaattctcaactctatacatgcaaacaaaattgagggtattcaagttttatggactccacaaaagataggtgatatccttccagaagagaggctactaaaggactatccatatcttaagcccttattgaaagaatccgattcccttggagttgccagtgtaactgaaatcgagcaatctaaccaaagatctataacggaaggccaagattcctttgcagtttctagtgtgaccgaaactatgcagtctaaccaaggatctgtaatgcaagaccaatattttattgaagttgctaatgtgactgatgttaagcagtctaaccaagaatctacaaaggaagaccaagattctaagcagtccaactaa

SEQ ID NO: 443 - DNA, 612 bp, Oryza sativa
  Clone ID: PAT_MRT4530_100404C.1
atgagaatgagcaaggccctcgccgccgtggtggccatctccgtgagcctgagcgcggccgctatgggcgtggacgcgacggtggagagcacctgcagtgacgcggccgccagcgacaagcgcgtccacttggcgatgtgcctgtcgcagctggggcaccaccgcgacgcggacgcgtgggggcttgcgaaggcggcaaccctggtgggcgtggacaaggcggacctcgccgccgatgacataaaggagctagaggccggggcaagcacggcgggcatcaagccagcgctggcggagtgcgcgaagcagtaccggggcgtgggcttcgcctttgccagcgcgcacgacgtgatcaacaatcgcgcctacgacgtcggggagaagaagctggacgaggccctgtccctgacgcagaagtgcaacgccgccttcgccaagatcggcgtcccgctgcagcagccgctggcccagctcaccgccgacaccatccagatcgccatcatagctaaggctatcacctgcctcgtcaacgtcaacaataatccagctctggttgcggctgcggctgcggctgctgcagccaaggctccccaacagagccaatacccataa

SEQ ID NO: 444 - DNA, 258 bp, Oryza sativa
  Clone ID: PAT_MRT4530_100405C.1
attattattagtactaattcaacctccccctcgccgccgttcttctgctgcttctgcgcgtgcgggcggcattctgaggcggcaggcgaggccaggcgaggcacacggctgaaatggccatcctgtacgcggtggtggcacgcgggacggtggtgctggcggagcacagcgcggcggcgaccaacgcgggcgccgtggcgcggcaagtactcgagcgcctccccggcgggggagccgacagccacgtcttctacacgc

SEQ ID NO: 445 - DNA, 444 bp, Oryza sativa
  Clone ID: PAT_MRT4530_100406C.1
gagttaccaggtgggatggactattggctatgggatcaaaaggggaacaagatcccaccattgctgggcctgttaatgtgggcccttgcagccacatggtgcgatcagatgctgaaggaaaatggcccgcccaaattgcaagaatgcttgccgccgaaccccgggttggagaatgcacagagccaggagagccactgggcactccaggggatgggcatcatccagtttgggcctgaagaccccgtggacttttggcgctggccccggtcttgcccttgcaaccgctccagctatgcgactgtgcccaccagtaagcccatggctttagccagtgaatttcgtgagttttagggccaaaatgctgcttgcgacgtggattttggccagagaagttgttattgggcttgcctgtgtgccccccgatgttccgggggatatatatca

SEQ ID NO: 446 - DNA, 856 bp, Oryza sativa
  unsure (1)..(856): unsure at all n locations
  Clone ID: PAT_MRT4530_100407C.1
tcaacgggtgggtgggaaaaatccaaattgggctcttcgggactcgttggtatctgggccgaaagcccaactgggagtccaagcccacagccgggttgccgaattttgccacctccccgtcgcggcggcgacagaggcagcgatcacccccaccggcgaccaccgccggctgcgccgccgccgctccggtgttccacccccattctctcccctcgtttgcccatctccaagggacccgccgcacaggcagagactgcgccttgacgccgcgaaacggaaccctcgctgcaagggcacgtggcctcctgctgctcggcgctctcgcgccgccgggcgattgtgggtggcgccggatttctcttcgcctcctcgtatgccggcgcgactgtgttcgggctgggtcagcgtggccgctcgtctccctcccctttgcatccccactcctctccggcctccattgccactcccaggaggatagtagatcggtcgctttggcttccgagtctcatctcgggccagccgcgctggtctcctcagcgagtgaactcccctcatgccttgcggccccaatccgaatgctctcgctgttaccggaggtggggtgcaggaggcatattgtgccgccgatcgaacaacaatgacggttgcgtactggaacaggtatgctgctacacccatcacctctttctttctttaatttgnggctgtcaatgcagcttgcaggtatttgattctcagttgggcacgaaatcagctctgaaatatgaagtactgtataggttatttggcatgagggtgtgggactttagcatctccgacattgttgcatatgggcgaaatgagaaaatgggatatc

SEQ ID NO: 447 - DNA, 505 bp, Oryza sativa
  unsure (1)..(505): unsure at all n locations
  Clone ID: PAT_MRT4530_100408C.1
ctgtcgccggggtcggcggcgaggcggcgacgccatggccgcacggcccacaggtcgccgccgccgcggcctcgccgtcgtcgtatcaagtaacatcgcgctctttgcgggcggcgacgaagccgacgatggtcccggattctccggggggagatcgaatgcttctctccgccgccgagcgccgcggcagggcggctctgaacgagggggagctcggagcccttttgattgggagtgcggaaaccctcggtggcggctcgtaactcgtagcccctggctccgaccacgtctccgcctgatggaggtggcatccagagagagaacatcgagcacgtacctgctgatgcagcctggaagttgttacccctggaatccctgacatggagaaccaaccttgttctgtagttnttatgcgatgcatagaagtcctccacagccattgagatgctggtccttgcttccttgccaactaacgatcccaggtccaggatcaccccgacgtgga

SEQ ID NO: 448 - DNA, 510 bp, Oryza sativa
  Clone ID: PAT_MRT4530_100409C.1
atgacactgggacccacacgtcagcttctactaccccttcttcctcctctttttctccctcttcctcttctcacggccctcttcccgtgcaagtgcgcgacgacgatcatgcagaggctgacggcggcggctcgcaacggcgaccttggcaatgacggcctcgacgatgacccatggaacggaggcggaggccgtgcggggccggaggccgtgcggggccggaggccgcatggaggcggcagaggtcgtgcccccaccccgaatccagtgggggcagagccgagcgaatctggcgggggcggacgccgtgcttggctagaggcctctagacttggcgacctcagtgacgatggcagcgaatggcgacgtagcagacgacgacagcgacggctggcgacggagacctcagcagcagtggtggatggcgatggcgaccttgacgacgacagtggtgatggcgctcctctgtgtgggtgcgggattggtgctgcaacggcgacgcggggatga

SEQ ID NO: 449 - DNA, 1052 bp, Oryza sativa
  Clone ID: PAT_MRT4530_10040C.1
atggccgctcaaaccacggtgacgacagtggccgcctcctgctcgcactccacgccgccggcctcgcgctccctccctgaccgcgtccgcctccgtgccgtcggccgctcctggcgcgcggtcgccgctacccgctccctcgccgtcgacaacctcgcgccgcggctgctccctgctatttttttcctcggcctccgatccctcctcgtcgccgatgccgcgggctacggccgcggccgcgtcgtgacgcggacgatcgtcgcggttcaccaggagacgacgacgagctgcaagggggatcagtgcaacggctgcagtgatgatgatgaggaggaggacgtccacgacggcgaggacgggtgctgggtggcgtacgggcgccgggggatgatgcgccggctgccgccgccgctcccgtcgctccggggcgcgatgaggcggacgtgcaccaaagacgggaggctcgtggtcaccgaagcgcccgccggcgccaggcggcgtcacgagtacatccgcgcgcgccgccggggcgggcgcgtgacaatgcagctcgtcgagagcaaggacttctacccgtgtccgtcgccggtggaagaggacgacgacgacgacgacattgtcaatgtcacgcaagcggtcagcgacacgtcgacagcggcggcaaccgtaggagaatgcgatcctggccacatgcagaaggcgccggcgacggcgccacctccgccatcgccgccatccattggatgcttcgaggacgtggtcaagtaccactcgatcgggagcacctcactgcatcagatcgctaccgacgtgggcggccaggtgcagcggcgtgctcccaggccgggaagcggtgggcacggagacgtcgtccttgtcaaacagcaggtgcacgcatgccgggcggccctgcctggagcgctagagctaggtgcagcagcatggcaccccgcgtccctgacgtagtagaacaatcttaggacggagaaagtactaccttattgcttatcttatttcatactatcaccatttggagtgagtgccatttggct

SEQ ID NO: 450 - DNA, 193 bp, Oryza sativa
  unsure (1)..(193): unsure at all n locations
  Clone ID: PAT_MRT4530_100410C.1
ggcaggtcgtgcctttacaccgttgttaagcaggtccggctgtgacgcgttgcntattaagttagtgttctcctttttatgttttctctttgttctgtgtatcagatcgcgcccaagccatagctgggcatgacaagtttttgttaataataatataatataaagatatgggctaaaaaaaaaaaaaaaaaaa

SEQ ID NO: 451 - DNA, 325 bp, Oryza sativa
  Clone ID: PAT_MRT4530_100411C.1
atgcagctcaaaccaaaagtaagaactcgtcgaaataaaactaaagcaaaaagggtggcgatgcgctgagattgtattgaacgtgactctatccatgcatggcaatcgtcttgaagcatatcaactcaacccgatgtcgcacaccaaatcgtatcgtcggaatcggctgtatcggcttacccagtctgatcggactcagccgattctgatcgtaaccgatttggactccaaccgattcttactgtgtttccgcaatgatcttcactttcgattccgcttcgattcaatcttcttctccgatactaatattaccaaactttaaaaa

SEQ ID NO: 452 - DNA, 432 bp, Oryza sativa
  Clone ID: PAT_MRT4530_100412C.1
atgcgagccccacaggtcaatggctcaaaggggagggggaaggcgccggctggtgggcccctccggccagcgtcacaaggggggaaagatggcgcctgccggtctcggctcggcttcaagtcggccggccggccatggcgagtggcggtggcgcgcacggtcgccggcaatggcaaccggtggcgggaggcggcggcggacggcgcaaaggcggcggcgcggccaaagacggcggcgcaagcggggaaggggaagaaaaggagggggagggggtcctcaccagggactcggcccggcgtgggtgaagacgacgacggacggcggcggcaagcggtggacggctgggtgcgcgggatggacgaggtggcccttgacctcgcgaggccaacggcggcaacggagcggtgcggcgacggcactagtgacggctag

SEQ ID NO: 453 - DNA, 1422 bp, Oryza sativa
  Clone ID: PAT_MRT4530_100413C.1
tggatcccccgggctgcaggctccgcccggagctccaattagtcgcacaccgatcccctcctcttcttcccccccttctcctctctcctctttttttcctcatccgtgcgcgatactgcgcttagtttgtgggtggggggagtgatcatcaccaaagccacaaagggggcgcggagagatattatatattctttgggaaagcgttggattagtttttctcgctttgggctttttatccggagttggagtgtgtgtgcgccgggagtggtggtggtgatggcggccggagaggaggtgatggatcggtcgacgtcggccgaggacgggtactgcagcgccggcacggactcgccgcgggcggagtccgtcgacgagcaaggggccgccgaggagtcgtcgccccggggagggcagaagcgggagctcccctcgccgtcggcttcgccgtcgtccccgctgccacctgccgcgaagcgcagccggaggtcagtggagaagcgggtggtgtccgtgccgatcgcggagtgcggcgaccggccgaagggcgccggggaggggccgccgccgtcggactcgtgggcctggcgcaagtacggccagaagcccatcaagggctctccctacccaagggggtactacaggtgcagtagctccaaggggtgtccggcgaggaagcaggtggagcgcagccgcgccgaccccaccgtgctgctcgtcacctactccttcgagcacaaccacccgtggccgcagcccaagagcagcagctgccacgcgagcaagtcgtctccccggtcgacggcgccaaagcctgagccggcggctgacggacagcagcccgagccagcggagaacgaatcgtcggcgtcggcggagctggaggtaccggagccggagccggagcaggaatctgagccggttgtgaagcaggaggaggagcagaaggaggaacagaaggctgtggttgagccggcggcggtcacaaccacggtggcgccggcgccggcggtcgaggaggaggatgagaacttcgacttcggatggatcgaccagtaccacccgacgtggcaccggtcgtacgcgccgctgctgccgccggaggagtgggagcgcgagctgcaaggggacgacgcgctgttcgcggggctcggcgagctcccggagtgcgccgtcgtgttcggccgccggcgcgagctcggcctggcggccaccgcgccgtgctcctgatgatcacctcctcttttctttttcctccccttttacaatttcccttttttttttttgcttttctttagttctccttggagtaatttggattggaggttagtacatagcttgggtgatcaatgggagtgagtggcttaactgttcaagagagcctcctattccaactctccaaattgcgtcgcgtgttcgtcatcc

SEQ ID NO: 454 - DNA, 471 bp, Oryza sativa
  Clone ID: PAT_MRT4530_100414C.1
gccggaggtcagtggagaagcgggtggtgtccgtgccgatcgcggagtgcggcgaccggccgaagggcgccggggaggggccgccgccgtcggactcgtgggcctggcgcaagtacggccagaagcccatcaagggctctccctacccaaggtaattaggctttatattcagtttggttgatattcttgagcctgttgattagttaccgtgctgattaatcactgcaattagatcagttaaacggttgttgaagtggcaagatttaatttgggtttgttgcttgtgtttattatgctcagggggtactacaggtgcagtagctccaaggggtgtccggcgaggaagcaggtggagcgcagtcgcgccgaccccaccgtgctgctcgtcacctactccttcgagcacaaccacccgtggccgcagcccatgagcagcagctgccacgcgagcatgtcgtctctcggtcgacg

SEQ ID NO: 455 - DNA, 328 bp, Oryza sativa
  Clone ID: PAT_MRT4530_100415C.1
gactttttcttcaagagtgcggagaatatctctttcttctttgaggaaaaggcatttggagatgatggatgcttgaaacaggcaaaggaactttcaattaataaagttgggcacggcattggtggcgaggtggtgccacaccaggataatacattcctatatacaaaccctccatcatgcacagggttgtggcttgcactcgaagatgcgacaaaaacgaatgatggtctgaaaaggcgaatgatcagagatgaaaatgatactcattttgatcatccttcgccaacctatgatctgaaagaatttgtgccattagaagtaaagtcag

SEQ ID NO: 456 - DNA, 176 bp, Oryza sativa
  Clone ID: PAT_MRT4530_100416C.1
tgttggtatttcttaacgacattactagatatataattcctagcaatggcgcagaaatactcctggtatattatggttacaaagtttatccgcaagcgcacggatataccattgtagcatttcacccaagagtattttaagggtatcgtatttattttatcccgtgggaagatcat

SEQ ID NO: 457 - DNA, 948 bp, Oryza sativa
  Clone ID: PAT_MRT4530_100417C.1
ttttttttttttttttttttttttttttttacatcaaatttattgccataaaattcatccatgaaaacagagtagcaaggtatttacactgtctgaagacgggagaagaaagcaaagctactcaacaacgtaacgcagatttattgcgacgaggataggtaatcagcatcatcaccattgcttctaggtcatcactcgtttatttgacatataggtaactgcttcaactaattttcataaagtggctgaggtgggattttcctttgtaaccagttttgcttggaccattcacatccttcggtatcaattacatgtaagctcagtgcatgtcttgacaccggagaaagattttcaaagctctggtgtataagatctccatgaataaccaccaaatcacctgactttacttctaagggcacaaattctttcagatcataggttggcgaaggatgatcaaaatgagtatcgatttcatctctgatcattcgccttttcaggccatttttatgtgatccaggaattgcccataggcaaccattcgctccaaaagagaacttttttgacacagggtcaagttcatgtaacgcgtgcccaactttattgattgaaagttcctttgcctgcttcaagcatccatcatctccaaatgccttttcctcaaagaagaaagagatattctccgcactcttgaagaaaaagtcgttcttcacctgccggtgatcctttgtggagaagacgtcgccagcgccgtcgaagccgtcgacgagctccgccatgcggtccctcatcgccctcacctcctccgcgctggagaacgaccccagcacgaggtacccattggcgtcgaagaagcggagctgctcgtcggtgaggctaccggccggcggcatggcggcggacgggaaggggagatgagaagtttgacgaaacagggggcgggtgaattac

SEQ ID NO: 458 - DNA, 706 bp, Oryza sativa
  Clone ID: PAT_MRT4530_100418C.1
acaccaaatttattgccataaaaaacatccatgaaaacagagtagcaaggtatttacattgtctgaccattgcttctaggtcatcactcgtttatttgacacataggtaactgcttgtactaattttcataaaggggctgaggtgggattttcctttgtaaccagttttgtttggaccattcacatccttcggtatcaattacatgtaagctcagtgcatgtcttgacaccagagaaagattttcaaagctctggtgtataagatctccatgaataaccaccaaatcacctgactttacttctaatggcacaaattctttcagatcataggttggcgaaggatgatcaaaatgagtatcgatttcatctctgatcattcgccttttcaggccatttttatgtgatccaggaattgcccaaaggcaaccattcgtttttgtcgcatcttcgagtgcaagccacagccctgtgcacgatggagggtctgtatataggaatgtattatcctggtgtggtaccacctcgccaccaatgcctggttgcttaaagatgtacatagattgaataactgcaggtctcttgtagcgtaaagaagagaataggctggaaacattctctccaaaagagaacttttttgacacagggtcaagttcatgtaacgcgtgcccaactttattaattgaaagttcctttgcctgtttaagca

SEQ ID NO: 459 - DNA, 2934 bp, Oryza sativa
  Clone ID: PAT_MRT4530_100419C.1
atggaggccgcattgctgccgtcttctaccttattacccaaactcgtagaactgtcctggtaccttttgctaaaggaagatattagggtcatcagatcaggaggaggacacaagattaccttggctaaacaagatctacaggaactacagaattgcatcaacaaggcttcatttttcttggctggaactggaaggatcaatgcccagagttggcaaacgtcgcgcttgcacacctggatcagtgatgccctgaaggccgcctcttgcttggaagatcagatcgccatgtacgcaatgcgtggtgtttatgtgggacatttatatgcgatgaagtcggctattgggatgttgtcaactgacaaacttgtgaaaatcatcagagaccgaaaaaacgagatgccgactgaggtgcaaaattatcatcaagaagtgatggagcggcttcctgcaatccttcctttcaccccacattctcattgtgaagaacaagatacagtaccaattggatttatggaaaaaattgaagaattgaagaatatattgttgcgagatgctgctccagtgatctttgtcagtggagagcagctctcagggaagactactctcatgaaccaggtgtataaagacatcgatgtcaggaatcatttcaaaatacgttccaaggtcgacatgtcaaaaactagatgtttgagtgacttgctgcgggctgtgctgaaacacgaagagcgtgagacaaactccatgtatcccgatgccattgatgaattgaagataattgaagagatccagcgtacctttcggactgtgggcaatcgctacttgatggtgatggatgatgtcgacgatacatcttcgctgcatgttttacgacatgtcctaggaggatgggaggggaagattgtgtgcctgaccaggaacacacgtatacagtacgaagagttgcatgccaaggttgagattcgccctcttgaactggcttaccaacagcagctactggtgcatgtagcttttcgcaatgctgatgacacccctgctcctgtggccgtcgatagaaacaatgatgggcagcaaggaggaggagaatacgatcaactggaaaaggctctcaaggggaagacagagacagataacatcgatggagatgacttgacgccaatggtggagactctgaaaggcatcttgaggaaatgcagaggcaacccgtggaacatacgggccgtgggagcgttgcttggtgctaatcgcgtcgataaatggaaggaaatcgaggaaaaccaagttgatgatttggtaataggagataagaagcgtgatccactcataccagcagagtatgcccaactgcccgctgacatccggctcggcttcttgtactgcctggcttttccagagagatcagaaatccctgagaattcattgatccctgcacggaagcttgtgcgcctctggacggcagaaggcttcccaccgaacgacagcccacttcagagccaagagcaagaggcagagaacctgctacaaagactcattgactacaaactgctcgtggtgaagaaaacaggcttggatggcgaggtgctgaaatgcaaggtcaacgagcacatgcgatccctggctctggaaatgtgtgaggcacagaaaatctgcagatttgcacgggaccccgctcacccggcaccccgaaccagacccagctcgagcttgttcagcagaaagacagcactgttgcaccgctaccgtgtactcgctgtgcatggagatggagacggcaatgaagctgtccaagaaatgtctagtgcgatgagtaaagacattcggctgcgctccctgctgtatttcagaaccgagaggaaggagcctcccaagcttgagctgtcatttggtcggacgtacaagcttctacgcacgttggatcttcagggaactcggctcacccgcttgcactccagtatcacctgcctcgtttgcctgcgctacctaggcctgcgaggaacacagctggaatatctccctgaaactctgcagagcctccgccgcttgatgtgcctcgatatcagggacactggcatcacagaggtgaacgatgtgtctgaatttaaagagatgaggcatctctatcttgcaaactccttccgcgaccagtccgtgctcatcaaggaaggcctgctgtcgctgcttcatctgcagacgctgtcaggtgcaacacacgaggtgccttctgaacgaaaaaaggcaggcatggtacctttcgagcaagaactgctatacctcaagctccttaggaagctatcagttaagaaggcatcaatctcatgcagcaaaggcatctctgatgcaatcaacaagatggacctcctacaatcgctcactataacatgtgctgctggtgagaagagggggttcaatttgagttatctaaatgtcaacaagaatctccgtaagctgaagcttgggggtcgtatgcagaaatttgaccgtctacaaccaaagcttcaatccataacatacctctacctctgggacagcaaactgccagtagaaggtaaagatccactacagcttctgcaaggccttcagcagcttctcctcctctcgttatacaacgtctacgaaggggagaagttgacttgtaccaatggctaccacaaactgaagaagctgtccatcatcgcgatgggaaagctcaatgagtgcacgtttggcaccaagaacatggcaaacctcgaggtgcttgtttttgctaaatgtgcaagactcagcagcccgccgccgaagcttgatgaactaaacttcctccgggaggtgcatttggctcaaatgcctcaaggattctatgacggcatgaagccagcaaccaagaagctcgtgcattttccagagttccagcaccacttccactcgtcaaccagagctgtcgtgcaagggggaagctaa

SEQ ID NO: 460 - DNA, 1884 bp, Oryza sativa
  Clone ID: PAT_MRT4530_10041C.1
ctgcagatggcacctggacagaaagttcggcctccaagaaactcacaaccatctaattgcccacaaactcagcatgtttctacttccaactccaagaaagtgcgtggaaagaataaatcaaaagtagagaggaggccaattggagaaaatcatgaactactttcaagggagattgggattgttactaggtaccatgcacctatcaaacgcattggttggaacaattttagtgaggctgacaaagaacctttgtatgagcttctgaagatgaaattcaacttagatctatctgaacctcatgttaaaggctgtctggagctactattttcgtcaagctataaaacatttcgccatagatgctatactcattatctcaagtctggtggtggggacagtgctcgtaacagtccatatgaaccccttcgtgacagacctggtgattggacttggctttgtgatcatttcgaaacagaagaatttcagaaaaaatcagttatagggaaagctaatcggatgaaactggcaaatgttcataaaaagggaaccaaaccatttgtggcacttcagcatgaattaagttgtgatcaaatctcattgtacaaggaatgctattgtagtgacaaaggatgggcgtcaagagatgctagacagaactatgaaacaatgttacagatgcagcatgaaaatgagcaagaaggtgcaatccagctgacagagcaacaaatttgtgagaaggtgcttgggaaggcatatggatatattagagggagatgtcatggtccgaaacctaatagaagagcttcatcaacttcagcaaacacctatcaacaaatggaagaagaattggcttatacaaaacaaactgtggcagttcaacaaaaccagcttgcagtacaacaaaatcagcttgaatctcaacaaaagcaacttgattggttgcgcagtgtcgtgtccaaacttgctggtattccacctcctgctatggatgataatgatgccttaggaccatcccacacaaccacaacttcaattgatggatccggaacaccgcaacgtaatctcccaggctacattatcttgacaatactcatcatgtgggtgaacaaatctttagtcaccaagtgcttggaagatgttggtggcaggagagatgtgccaaatgcaaaacgaaaacaaatagttaatgctttattaacaaaaagcaaaaatggaaaactagagcgccatgtgatgagggaggttgctgagttattcaatgttcacattcgatctgttcagcgcacttggaagcaaggtaaaagttatcttgatcaaggcattacggttgatgtcaatgttgataatagaagacgcaattgcggccgtagcatgccaaataacccaatgtttaaggacatgtttgatgttgtttttattgatgaaaaatggttctatcttatgaggaaatctgagagctattatttgcgtaaaaatcaagtagagcctacacttacttatgaacccgctaaaagaagtagcgttaaccggccagcagggacaatggaaatgaaacctatcgtatctattacgaaggaagttattagagatttcatgatcaacaagatattgcatgccattcgagttaagtggccacaagaagatatgaacaaacctatctatattcagcaagacaatgctcgtcctcatcttggaccaactgatcaattgtttcatgaagcttctcaacaagatggatttgatattcaacttatatgtcaaccgccaaattcaccggatttgaacatcttagatttgggcttttttcgtgctatacaatctattcagtataagaaagttacgaaaacactagcagatcatgttaaagccgttgaagaggctttctag

SEQ ID NO: 461 - DNA, 138 bp, Oryza sativa
  Clone ID: PAT_MRT4530_100420C.1
atgaagctagtgcggcacttgatcatcctcggtaagcatcccaaacttgttactcttggaggttgctacctcctagacggtttgaaggagttgctcggtgacctctccgagaaggttctggaggaggcccggtgttga

SEQ ID NO: 462 - DNA, 406 bp, Oryza sativa
  unsure (1)..(406): unsure at all n locations
  Clone ID: PAT_MRT4530_100421C.1
gggnnaaattaaaaggatncataaaaaaacacagtttaaagaaaccgggcaaagaaacccccttaagaaactaacaaaaggggggacttttggtttcacgaaaaaaaaaattgggccgcaaaaaattggagggggaagataaacaaaaaaaaggggttcaaaatgaatggcctgttgagtaaaaaaaactggtgtttgaaaaaaatgaaaaaccgcctggggggtaaaaaaattttcagggggggggggggagcatgccctttaagggggaaatgattttggttggaaaaaacaaatgccatgccctgggggatccgaaacataaaaaaagaaaccccctttgggctgaaaaaaattatgttttgtaacttgaaaaaaaaaaagaaaaacgtttccagtttttggg

SEQ ID NO: 463 - DNA, 267 bp, Oryza sativa
  Clone ID: PAT_MRT4530_100422C.1
atgggggccgccgcggtggcgcacgaggaggcggcgggtagcggcggcgtcctcccctcctccggatctggtgggagcagaggcggcgacctgtgcggcgtgggagcgacgacgtcggtgcggccgtgctgtggcacacgaggtggtggccggcaggcggaggcagcaggtgggcggcatgcggtggcggaggagggggcagcaggcggaggcggtaggcgggcggcaggcggtggtgatgcggggcggcgccgggtgaatctgtga

SEQ ID NO: 464 - DNA, 258 bp, Oryza sativa
  Clone ID: PAT_MRT4530_100423C.1
atggatctggcgttgttggcaagcggggcggcgtcagcagtggatccagcatcggtggcgtgtagtgttggtggtaagcgggatggtgtccatggtggatccggcatcggtggcatgcggggtggcattgctggtgtgcggggcaacgtcagcggcggcaggggcgatgtcaacggccattcccacaacatatcaagcatcatctgcgtcggcggcgggcgagatagtgtcggctaccgttcccgcagaggatggtga

SEQ ID NO: 465 - DNA, 1197 bp, Oryza sativa
  Clone ID: PAT_MRT4530_100424C.1
atgggtgtggtgacaagggccaagaagaggaagctggaggaggaatccagcaacccacatctggcgcccggaggaggagaagacctgataaaccgcctcccagatgatatcctcatcggcatcatcaccatcctccccggcaaggatgcggcccgcacccaggtgctctcgcggcggtggcgccccctatggcgatccgcgcctctcaatcttgaggccagggtcaatggtggcagaatagctaaggatgtggccaccatccgcagcacgctgcgaacccacaagggtcctgtctgccgattctctgtcagctggacctttgactacaaccactttccggtcgttgattccttgcttggatcgcctaggcttgacaacctccaggagtttgaacttttctatcattataattgctctcgctatcctccagttccgcggggctgtcgtcgtctccggatcagctccttgacccttcggagccttggtgtgtcaaatgatacccgaaaagatgaaaagctggaggaagtcattgttgaggatgccccactcctggaaaggcttaccccacacactatatggcagggtgactttgttattcgggttattcaggcaccgaaactgaagacattgggctatctaagccataaaattaccacacttgagcttggaaccatggttttccagaagatggtacctgttagtctgtccaatgtgatgcgcagtgtgaagattttagcccttgacaccactcctgatctggatgttgttattgacttcataaaatgctttccatgcgtagaaaagctatacattgtggcattcaatcaggggaacttaaagaatatacggcgaaatgtttcacttgagtgctttgatctacatctcaagatggtggaatttataaactatcagggaaatatgttagatttgaacttcatcaggttctttgtgttaaatgctcgagtgctagaatgtatcaagcttgtagcccgtcgtgacaaatgtgaagcaaaatggattgaaaaacaaaatcagaagctacagctttatggcagagcttcacgaagagttacatttgattttcaggctgattatggggtggatagtttggtacacatgaagcacatcagtgatttgactacagatgatccctttgatagatcattttgtagatgccgtgatgaggaaatatattag

SEQ ID NO: 466 - DNA, 483 bp, Oryza sativa
  Clone ID: PAT_MRT4530_100425C.1
atgccgccgctccgcccactgcccgctccgctccaagagacgccctcctcagagctcaagccccgcgagaccatctactttccatcaccgacaaccccacggagccaagagcggagggcaaacgtcaagggggaggatgatgccagaggggacgacgacgttgaggacatcgcaaagatggcgacagtgtggcgcgcggcgaagggcgaccccgcgactaggacactcttcatccacggcctcggttggagcatcgaagtcgatgacctccactccgtgtttttctgcttcggcttcgtcatcttccgctcccaccgctccacgttccacgccctctaccgcccacatgacaaaaagggtaagggagagaggagtagggagcggtcgccgttgcctgtccctttccgctctgccagcctgctccggccactccaccccacttcgcgctccacaccatctgccacccacatgccagagaagtga

SEQ ID NO: 467 - DNA, 492 bp, Oryza sativa
  Clone ID: PAT_MRT4530_100426C.1
ttggtttgtttattcgggggggatgctcttgtttattatccttaacaccatatcaaattcacgacgaagtattgactctcgcctctcacgttttttcccatgtgaacaacaaaaataaatgtgagaaggcattccaaaatatcattcatgtccaggtatataaatgttacacaagatgctgctactctggaataacaaggtcaaactaaccttaatcaagtctaaaaaaaatgataggatctccatatcttctcctaggattctcaaaatggagcctagtagcttcttaattctcgcccttctgatccagtataatatcaggttaattgttcatctttgatgtctcctctgaccaaaatagagggattgaacctctgttttgcacaacagaacttgcttctgtaggccaaggtctagctccatacacaatttgctcagtctcagcatcatttgctactcagcctttctcattcacccccatctttaaatatc

SEQ ID NO: 468 - DNA, 646 bp, Oryza sativa
  Clone ID: PAT_MRT4530_100427C.1
gctgcaggcaggatatcagttcagttagaaatgatgttagttactgcacaatagtagttcactgatcgctccagcacgttatttgccaaatggtgacaagcacactgatctctttattttgtagggtagtgcgaggcgcaaggaaccattaaattaacttatactactggaatgcaattctaaacatatatgggtctgatcacttagtcaaatatgatcaaggattaagtaggaagatttgtggtttctgtgttgcttatggaatatgtaaccacattctgtggttgtacgacttagctaaatccatacgaagaaatgatgctgatatatgtctcccatgtatggttcacttgtttttaaaggcagtgtggtagtaattgtacattcgtactgtcataaactcgtcatctatatttgctttcatttttttggtaccattctacaatattactacctccgtttcaggttataagactttctaggcacacatatatgtatagactcattaacatatatatataaatatgggcaataatagaaagtcttataatatgaaacggaggaagtatctatattacaaggaagagaggatatgtatggaatgagaaccgccaaatgttaagtcttcttgtgatcgatcaggtac

SEQ ID NO: 469 - DNA, 1076 bp, Oryza sativa
  Clone ID: PAT_MRT4530_100428C.1
tttgcccttttttttatttttacaactggcggaaaaggttttttttgtcaccccaattaaattaggttaaatctgggttttccccattattgagttgttattctaatagaccgcccacttttttttttttttttttatttaaattgttattttgttgtatgtaatatttaagttattttttttttttttataacggccgccccttttttttttttttttttttttttttttttttttttttttttttttttttttttttttttttttttttttttttttttttttttttttttttgaagaggaaatgaagagggttttctataatggatatacagtagtggagcgataagttggatacaatgatacaattgctgctgacagcgttttagacttgagagcatgcaccatagatccaacaagctcatatgcaatatatacatactcacatagggagaggagcaattctgtacagatgtttttattatacacatgaagacatactaatagatattatgccatccatttttgacctgtactccaacgcgttccacggacattcccaatccaaacatcaaaaccgttatcagcaaggatatacccaagtgattgctcagcagaggttatgaaccacgtctcaactccctgtaaaagccaaggttatggacaacgtgtctctgcaccttaattcttgcttatgtaatacatctgggggtccactaacatgtgcggctttactttcgcctggttggacgttgtgaagcgatacaagttaccgatcttgagggtcaacagtgtccgcggggcaggggtccccgggtggcgggagcagctgggggcggaggccctcggggccggagccgacgcggccgagggcggcggcggcgggccaggctccggggacggtgggaccgcagcccgcgacgacgagggggaacacggggagcgctccgccggggcggggcccgccatcgccatcgccagcgcccgccgcgctttgcccctggtgttgcttgcttctcgtgttgcttgcttctcttctctcctccccgctcccgagcggcgtggattctctaacg

SEQ ID NO: 470 - DNA, 415 bp, Oryza sativa
  Clone ID: PAT_MRT4530_100429C.1
tctaccataccacctcagttccattgcgtaataattcccgttctaaaggaatcattccaaggaccacatcagcacccgggttatcaacaaaaagcagtgctcttttgtatgggtggcccttcttatcagcgagcattctctttttaaacatatcaaagtcatcaatccgccaaggacgttgcatattattgcggctcatgcgataaatttctattatagttcccttgtgataaaggtgcacacaagctcgagagccccaatcaaatatgttcgcagcaaggacaccctggatgagtgcaagcaatctagcttcctgattgatactatcacgttccatcagaagatcaggtgaaacagcctgtgaagcttcattgtacctttgctaatgctatcatatgcatcgacaaactggaat

SEQ ID NO: 471 - DNA, 576 bp, Oryza sativa
  Clone ID: PAT_MRT4530_10042C.1
cacgagggagagaactagtctcgagtttttattttttttttagtgagaagcgcatcagtggatccccgggctgcaggacatcggcaagacggcacgacttttttttgtgtttttttttttttttttttttttttttttttttattcaagccattaattatattattaggaagtagtatcaatatccatatatagtacgtacagcatgcatgcatgcatgcatttatttagtgaaatacatgaatcgatcggcagcggctaggtgagagatggtcggtcgatcgatctaagaccttgggagctgggtgtcgatactttttcgcagatcttccttcttgagggtaatgaggcggtccaccaccgagtatcccttcaccagcaggaacgttggcatcgcgtccactcggagtcgacgtcctaaatccttgaacttgttgaaatctatcgtgcataacttgacgggctcctgcccgagttcgctggctagctgcctgtacggctctgccatggatttgcatggctcggaccactctgccatgaactccagcaccaccaacgtctttcccccagcatcttt

SEQ ID NO: 472 - DNA, 364 bp, Oryza sativa
  Clone ID: PAT_MRT4530_100430C.1
aaggaagggaggcaaacccccaaaattactgcccggttcttgcgggggaacaaactttccttaaagagagttgaattaaacatgggcttaagaaaggaaatagtcgcttcctgaaggaaaaagttttgcgttcaaaatcacacaaaaaaaaccaaccgaaagcataaaagggaaagccgggggggccaaaggggggagctaactaaaattaattgggttggactgactgcccgttttccaggaaaaaaaccaggcgcgccggatctattaatgaatcgcccaacccgcggggggggggggttttttttttgacccccagggttggtttttttttttatcaagtgagacggaaaaaaagttgttt

SEQ ID NO: 473 - DNA, 206 bp, Oryza sativa
  unsure (1)..(206): unsure at all n locations
  Clone ID: PAT_MRT4530_100431C.1
tattttattctttataactctctncggggcgggggcccctttcctcactctatttatttcttcataatatacttcaactcatttacactacacttcaaacccaagtcatctttcgcaactacatactacatccccccttattttcccttaatactagaccacctctccaaacacccatatttttagacccccttcctaaccctcta

SEQ ID NO: 474 - DNA, 423 bp, Oryza sativa
  Clone ID: PAT_MRT4530_100432C.1
atggatgtcgttgatattggtcgaaaaactcttgcaggcaagctaacccgaagcagcgagaaaaagctcgctagccagggagagcgaattcggctcgccatcgacgacaagcttcacgcgcgcgccgctgtaaatcagcgactccaacaattttcactctccaacgatgtttcgttatgttatcgtcgcctgcatgccttccctattcctccgcacataacacttctcgttcgcttcaccgcaatcacagtcacagatttattccgcacctttgccaaagttgaaataggccgtcggctcagcgccaacctctttagcgctgaggttgttcatatcagcgccaatgggactggcgctgacatcgcgccagcgtggcgggcgagacgcgacgtggcagggcctcagcgccaatgtatttggcgc

SEQ ID NO: 475 - DNA, 1185 bp, Oryza sativa
  Clone ID: PAT_MRT4530_100433C.1
atgggcggcccgcacaggtggacgtcagccactagagtaacggtccggcgctgggcctgtccctcggcagcggtggaggagaccaacgcgacggcacactgtggtggccgtattgctgcgctggagccatcgctgatcctgagcatgcttgacaaacgcggcagatgcagctgcgacggcgagccggacggcaacgactatggtagcatccgcaagaagctccagtggaggggcggcgtcagtgcgctagagcaggcggagcggtggtgtctccaggcgagcgtggctgcggcggcgggcaagcggcggctcgggcggtgcgtggccggagcaggcggaagcggcgacatctccgggcgcgggcggagtaaaggggcgggggacgcggggggcacggcgggcgagcggcggcgaggcgtcgcctctttcgccctctcccgccggcctcatctccccccactccgtccgctcccgccgctgcggcgcgccacctcgctgggctcctccgatgagtgcgacggcggcggcggcggcaaccagcggcgagaacgacgccgccacgctcctccttcggccacctccgccgttgcggccccttcctccgcctgccgtgctcgtccgctctgcccgcagcccgccgcgcttgccttctgctcgcccgccgccgtccaacgtcgctacgcgtgccgccgcgccgctcgcctccgttctgcccacagggcgcgctcggtggatagcgggctcaaggacgacctcgtgttcggggaccccaacgcgccgcggtttgtgctgtgggaggggaagctaaggccggtgccgtccaagcccggcgacctgccgttcttcaacctcatgagcatccccggcaagctcagggccggcctcggcgtgctcggcattcgaccaccacccccttctgatccctccgccaccggcggcaacatccccgtcggccgcaaggatcccctcccggagcaggagcccgtcccggaacctgcccccatctcccgccgtggtcgcccgcggtccgccggccatagcggctgtggtggcctcagcggtgagattagcggcaggaggcagcgcggtgtagcggggcatccccatggattctccaagctcatcctcgccttgaagtcgctagaagaaggtgttgttgatcaagtgtccgctgtgcaaggataa

SEQ ID NO: 476 - DNA, 1176 bp, Oryza sativa
  Clone ID: PAT_MRT4530_100434C.1
atgggcggcccgcacaggtggacgtcagccactagagtaacggtccggcgctgggcctgtccctcggcagcggtggaggagaccaacgcgacggcacactgtggtggccgtattgctgcgctggagccatcgctgatcctgagcatgcttgacaaacgcggcagatgcagctgcgacggcgagccggacggcaacgactatggtagcatccgcaagaagctccaaagcagaaagtccctttttactcgaaaatcaactgatgctcaggccaaggcaggggcaaacttgtggaggggcggcgtcagtgcgctagagcaggcggagcggtggtgtctccaggcgagcgtggctgcggcggcgggcaagcggcggctcgggcggtgcgtggccggagcaggcggaagcggcgacatctccgggcgcgggcggagtaaaggggcgggggacgcggggggcacggcgggcgagcggcggcgaggcgtcgcctctttcgccctctcccgccggcctcatctccccccactccgtccgctcccgccgctgcggcgcgccacctcgctgggctcctccgatgagtgcgacggcggcggcggcggcaaccagcggcgagaacgacgccgccacgctcctccttcggccacctccgccgttgcggccccttcctccgcctgccgtgctcgtccgctctgcccgcagcccgccgcgcttgccttctgctcgcccgccgccgtccaacgtcgctacgcgtgccgccgcgccgctcgcctccgttctgcccacagggcgcgctcggtggatagcgggctcaaggacgacctcgtgttcggggaccccaacgcgccgcggtttgtgctgtgggaggggaagctaaggccggtgccgtccaagcccggcgacctgccgttcttcaacctcatgagcatccccggcaagctcagggccggcctcggcgtgctcggcattcgaccaccacccccttctgatccctccgccaccggcggcaacatccccgtcggccgcaaggatcccctcccggagcaggagcccgtcccggaacctgcccccatctcccgccgtggtcgcccgcggaggccgagaggtagcggctgtggtggcctcagcggtgagattagcggcaggaggcagcgcggtgtagcggggttagcggtggcatag

SEQ ID NO: 477 - DNA, 342 bp, Oryza sativa
  Clone ID: PAT_MRT4530_100435C.1
gtgaggactctggatctgaaagtgagagagacgaagggaatggaaattctaataacgagcagatcctgcagtcacacaggctcatcgatagctcacatggaaatgaagaaacatcagcatcagactgcacagactgtctctattatgtaactgaaaaggctacatttatatctccaaaattgcctggattctttcaatcttctctccctgggaccttaaagggttgtcactgggttttgctatatagtgcagcacttggaagcatggaacatcgctaagaacacttttccgtaggagtgaaaatctccagggtccatgcctattcattgtcggagacatgcg

SEQ ID NO: 478 - DNA, 310 bp, Oryza sativa
  Clone ID: PAT_MRT4530_100436C.1
gcacgaggcaaggctggggattaccgctccattctctaaaattaatcaagagaacttccccctgaagagtcgtaggctgagctgctgattgtgctggtttcatgtgggagacacgttcaacatataaagtttatcctcgaaaaatatcgtcctgtgtgaaatcccaggctctttgatactgcctggctgcctgctgtggggatcgttttttgtttcttatgtggggattgtaggtatgaagagcactcttgttacactgtatatgaactccagagaagtaaaaataacccaattcctattatagttctct

SEQ ID NO: 479 - DNA, 405 bp, Oryza sativa
  Clone ID: PAT_MRT4530_100437C.1
atggccggcggcggcgtgaagggcttctaccggcagaagaagaaaggcggcgtcgccaagaaaccaatatccagaaagaaattaccgccacagaactgctccgaatcccaagattgcggtgatcatgatcttggcgacgaggtggaggagcagctgcagcagttcgacatggacatgacgtacggcccgtgcatcggcatgacgcgcctccgacggtgggagcgcgccgccgccatgggcctgcgaccgccgccccgtctccgggacctactcctgccacctccggcgcctcatcctctgccatcgtcttcttcgtctccggccaagattctcaccggcagcagcggcggcggcggtagcacctccgtgcagggcgagtgcctctgggaaggcaaagtgagctag

SEQ ID NO: 480 - DNA, 530 bp, Oryza sativa
  Clone ID: PAT_MRT4530_100438C.1
gaaaaataaaatgcaaacgaataacaccaattttcacaatttcccgcacatgtagggaaaattttacccagtgtgacgcactggcatttaggtaaggctttcgggttttttgtcagtcttttttccccttattttcctttttcccctttccgatgccatcctggtagttcgagaagccacccctgactgccgagttcctttggacagcccctcatgaccatacaaccggggctaaatacggaggagtaccctccccagggaatgaacttaggattttatacacgcgcggaggaatacccgcactgagctgtcaccatcagcggcccacatctcatccgcagcatataaccccaaataatgatacccagtaatctaagcaccacgcctaaactaccaaatattactctaatatcaccatcgtgacatagagtatttgcatatgcaaacattatacccgtaccaatgcatctcccagataagctagcagtataatcataatatctcggacatagtgtaaagctggtatttat

SEQ ID NO: 481 - DNA, 427 bp, Oryza sativa
  Clone ID: PAT_MRT4530_100439C.1
cggacgcgaggcgacgcgagaggagaagcgaggagacggcgcggcggcgcaccgacgtcaacggcgacggcgaccgcttcccatccgacgtccacgctctccgccgccttctcgccgcggataatcagttgatattcccaaatgtcgatggattgctaccagagggaccggaggaaggcgaagctagattgattagtgatgaagtcctgaaaagaatgtgcttaatcctgaaatatattactgttcatgcttaactagatagaaatatgcatgatgttctgaattctgatgaatgatgacagcaactgaatatggtgaagaattgtcataatgctattcagggtgttccctgtctttgcatttgggaattttggttaattaactcctgcaatatactattactgttagaaatcaaaaaaaaaaaaaa

SEQ ID NO: 482 - DNA, 4199 bp, Oryza sativa
  Clone ID: PAT_MRT4530_10043C.1
tccacgcgtccgcccacgcgttcgggacgtcaggccggccatgagcgaggtcgcctccgagctcgcccggatcagggacgccgcgcgcggcgtccgtgtcacaagcaccctccgtatcatggacaagagttggatgagattgcccgataggttctctagggagtatattgctggggtaaacgcatttattgaatttgcttgtgaacacaatggagagaacagttttatatttttcccatgcgaaaggtgtttgaatataagtcagatgggtgccaatgatgctcgaacacatttggtgttgtatggtatacaattatgactccaagaaactcacaaccatcgagttgcccacaaactcagcatgtttctacttccaactccaagaaagtgcgcggaaagaataaatcaaaaggtttggagcgcctgatcaaaaaagctggtcacccactgaacttgaatatttcagtagagaggaggccaattggagaaaatcatgaactactttcaagggagattgggattgttactaggtaccatgcacctatcaaacgcattggttggaacaattttagtgaggctgacaaagaacctttgtatgagcttctgaagatgaaattcaacttagatctatctgaacctcatgttaaaggctgtctggagctactattttcgtcaagctataaaacatttcaccatagatgctatactcattatctcaagtctggtggtgtggacagtgctcgtaacagtccatatgaaccccttctgtacagacctggttattggactatgctttgtgatcattttgtaatgaatcaagatcagaaaaaatcaagggaaagaaacgtgtacctcacgaagttttgcgatattttcctttgatccctaggttacagagactatttatgaacaaggacatagcctcagacttaagatatcatcgtgataagcgtgtaattgaggaaaatgtcttgagacatccagctgatggcgaagcttggaaggatttggatggaaaataccaatggcttgcgcacgatcctcgccatttgcgctttggacttgctacagatgggttcaacccatttggaactttgagtagctcttatagtgtgtggcctattatattagttgtatacaacctgccaccatggaagtgcatgaaggaacccttcatattaatgcccttgctgattccagggaagaaagcacctggaagggatattgatgtgtacatgaggcccttgattgaagaattgaatctactctttaacactggagtcagtacatatgatgcctttgtaggagatactttcaatctacgagcagtagtgctaggcactattagtgaccttcgtgcattagattcactatctgggtatgtggcaatgggctataaggcttgcccgatatgtttagattggactgattcgtgttcgctaagaagcaagattggttttttgggtcatagaagatacttgcctattcagtatagatggcgaagaagtaagaactttaatggcaagaatgaaacatcattgaggccaagacagctatcaggagatgaaaattttgcaatgctacaaaaattagatcatctacaaggcttcaagtatggaaagcatgatggaaataagaaaagaaagacctcagaaagggacatcccaggaaagaattttactaagatcagcattttgtatgagttgccgtactggaaggaactcaagttgccacacaacctagatgtcatgcatattgagaaaaatatttgtgagagcgtgcttggaactcttttgaacataaatggtaagactaaagacacacttaaggctcgcatggacttgcaagacataaacatccggaaagagctacacttgcaacaaaggggcagcaatgtcataaagcctcctgcttgttatacactatcccaagaggagagacaagatttttttcaatttatagaatctgtccgctttcctgatggttttggtgcaaatatatcaaaaggtctaagctataaagaggggaaaataactgggttgaagacacatgacttccatctgcttttgcagcgaatacttccaattggaattcgagggtatttgcagaatgacatttgtgatgcactattacagttagtccatttaccacaacaagcaagacttggtggacctgtacagtatagatggatgttttttattgaaaggttccttggtactttgaaaggcatggtgagcaatagggcacatccagagggttcaatcgcggaagcctatattatgaaggagtgctcaacattttgctctatgtatctcaatggaattgagacaaggttcaatagggaagagagaaactatgatggagagaggcaattcgctgatcgctactcaatatttttatctagattctgtgcttttggtcacaaggatgacgtaatcctaacacaagatcaatataattccctgtgttgtgagcatgaggacgttttagaggcacaaggcgtgggaaatatagcaaatagactgcaacaagagtttgctacatggctgcgccaaagagttatagatttgcgcaaggatggttcatcccaagtatctgattgtttatatgcccttgcaattggaccacacaaaaaagtacataaatactctggatgtattattggtggagttagatttttaacaaaggagcgggaggaaggtcgaaaaactcaaaacagtggagtatgcgttgagggtccacataaagggaaaatcataacatactatggtactctcacagacatatatgtcttggattatcctaatgatcggcaagttgcattgtttatgtgtgattggtacaatctggagagaaacaaaccagtgatcattgacaatgactttgttagtattaatataagcaaaaggtggtacacagatgacaattatgtattggctagtcaagttaagcaggtcttttatgtacctgatactaaattgaaggggaattggcaagtagtgcaaaaggttaaccatcggcacctatttgatccagaggtttggagtgctgggagtgaaagtgctttagacatcggtgctaatgaagatattgcctttcaagaagaagagggtggtgatattgttctggatgatacttttgaagctaatacattgagtcgcgatgatgtgattctagaaattctgcatatggcacctggacagaaagttcggcctccaagaaactcacaaccatctaattgcccacaaactcagcatgtttctacttccaactccaagaaagtgcgcggaaagaataaatcaaaaggtttggagcgcctgatcaaaaaagctggtcacccactgaacttgaatatttcagtagagaggaggccaattggagaaaatcatgaactactttcaagggagattgggattgttactaggtaccatgcacctatcaaacgcattggttggaacaattttagtgaggctgacaaagaacctttgtatgagcttctgaagatgaaattcaacttagatctatctgaacctcatgttaaaggctgtctggagctactattttcgtcaagctataaaacatttcaccatagatgctatactcattatctcaagtctggtggtggggacagtgctcgtaacagtccatatgaaccccttcgtgacagacctggttattggacttggctttgtgatcatttcgaaacagaagaatttcagaaaaaatcagttatagggaaagctaatcggatgaaactggcatatgttcataaaaagggaaccaaaccatttgtggcacttcagcatgaattaagttgtgatcaaatctcattgtacaaggaatgctattgtagtgacaaaggatgggcgtcaagagatgctagacagaactatgaaacaatgttacagatgcagcatgaaaatgagcaagaaggtgcaatccagctgacagagcaacaaatttgtgagaaggtgcttgggaaggcatatggatatattagagggagagtgtcgtgtccaaacttgctggtattccacctcctgctatggatgataatgatgcctcaggaccatcccacacaaccacaacttcaattgatggatccgtgggtgaacaaacctttagtcaccaagtgtctgagtcaatttctaggtgatgtcatccgtttgatcattgaggagttctatgcgttagactaa

SEQ ID NO: 483 - DNA, 195 bp, Oryza sativa
  Clone ID: PAT_MRT4530_100440C.1
atggcgctgagggctgaggctgacacgggcggcgccggcggcggcgtgagcgcgaggatgcacatgctgctgctactgctgctggttcccacggggtggaggctgtgctccgaaagattcttgcattacgttccccccaaatctcaccggacacaagcatcagtagagttcgcagaggggctcgtggagtattag

SEQ ID NO: 484 - DNA, 213 bp, Oryza sativa
  Clone ID: PAT_MRT4530_100441C.1
atggaggtcccacttgtcagggtgtcgttggtgtcactgggagatgagggaaagagagaggagcacctgctgcagtcgattgaggagcccccgcggaggggctcaccgctcatgacccgccaccttctcaacctgtcggacaacctcctccccagcgagctattccagccgccagccctcgacgggcacaaccatcgtctcaagtggtcttag

SEQ ID NO: 485 - DNA, 256 bp, Oryza sativa
  Clone ID: PAT_MRT4530_100442C.1
gctgcttgtccctcccattcctcgccgccaccggcgccgtcgcgccgaaaccctagggcggcagcgtagggttcccctcccccccccctcctccgccccgatgacgccggtgcaggcgggggcggcggacgaatcacttttccaaccgttaaaccatttggttggcaacgggcggtgcgagccccgggtactactccgacaaccggtccagtttaagcggtaagtgctcgccgaacaccatgtcgccctggaacca

SEQ ID NO: 486 - DNA, 516 bp, Oryza sativa
  Clone ID: PAT_MRT4530_100443C.1
cttctagctcctcttcttctcccccccccccccccccccttctcaccacaatcctgctagcaaggctcagtagctatgcagcatgccatggcggggcatgcaccaatgctgcgggccattcctgcctgacagctggcgcctgcctcctgctccaccatccggtggcttccactccctcgcgggagtaccgaatcccggaatggcgacgtgcggagcaatgcccatagcaccccccaagtcgcctgcgcactccctttctcccttctgccccggccatccccatagtggccccatagataccctatcccctggcgcccccccaaggggccccatcctatcccgtgctcccggtcatccctgtcccgccgccgctgcgtgcgcccccttcccaagggtccccggtcatcccatcccgccggaagggggccccgtcatcccgtcccgccgcccggtcatcctatccccacatcctccgtgtcatccatcccccccgtggtcgtgcgtcggcccccgccg

SEQ ID NO: 487 - DNA, 810 bp, Oryza sativa
  Clone ID: PAT_MRT4530_100444C.1
gcacgaatggcgacgcagctctccgccaccttcgcccctgccgcgaccaccaccgccacgcccctcccggcgccgcagcagcggctccggcacggccgccgctgctaccacgcgctgtcgctgcgccctccccgcgcggcgtccggcgatgacggcgccggcggcgaggtggagcccgctgccccggcggcgcccgccaagacggccaccgccacggacgacggcggcgacgacttcgaggagcgcgtcctgcgcatcaagtcccgcgtcgggcccaagaagcgaggcagcgccgcggcgcggaagaggaagggcggcgccggggcgtcgtccaagtccaaggctgccgtgacgctcccgcccgtgccgctgcgggaggcccggtcttccgtgggcgtgcccgttgagttcgggttcagcgcgtacagcgagaggctcaacggcgcgctcgcggcggtcggcctggcggcgctgctgctcgtggagctcggctccgggaaggcgctcgtcaagtaccaccagccggccacgctgttcctccaggtgtacaccgtcgccgcggcgggcgccgtgttcgtcaagtacgagaaggagcggatcagcgtgtggcccgggccgccggcgaccaagccgccggctaccggtgaatgattggcacatgggggtttctatttgacttttttgtaggatatgcttctttttttgtaatttacccatatacctcgttgagttactgtactttatcgacaaattgtgttgtgaaatattgaaattcggttaaccatgtgagtaaaaggaacgggtttgctg

SEQ ID NO: 488 - DNA, 233 bp, Oryza sativa
  Clone ID: PAT_MRT4530_100445C.1
gtaatctaccatgcaatttaaccttgaccatgatagctgcatgaacaacaatgatagaactattgaagcgagaacattaacacatgccgaacctattaacaccggtatgacatatgccacaatggaatgcatatgctctctttcctgtcaggcaccgagcacaggagacacatctcatggtgaaggcgggatgatctccaactatagacgtacacggacgctcatgcaccatg

SEQ ID NO: 489 - DNA, 813 bp, Oryza sativa
  Clone ID: PAT_MRT4530_100446C.1
atttttctcaccggaatgaaaaagttcaaaaaccaccaaaacatgatttttggacacattggagtatattggatacgtctgtgtcgaaaaatcactctgtgactcatgcggtgaacttttgtcaattaatgccaggcctatattggcacacgtgggtgcgatgtttttcaccagaatgaaaaacttcaaaaatcaccaaaacatgatttttggacatattggagtatgttgggtgagtctgtgtcgaaaaatcactccgtgattcgcgcggcttatttttctcaattaatgcaaatattggcacacgtgggtgcgatgtttttcaccgaaatgaaaaagttcaaaaatcaccaaaacttgatttttggacatattggagtatgttgggtgaatccgtgtcgaaaactcacaccgtgactcgcgcggtgaacttttgtcaattaatgccaatattggcctatattggcacacgtgggtgcgatgtttttcaccggaatgaaaatgttcaaaaagcacaaaaacatgatttttggacatattggagtgtattgagtgcgttcgtggcaaaaaatcactccgtgattcacgctgcgaacttttgtcaattaatgccaatattggcacacatgggtgcgatgtttttcactggaatgaaaaagttcaaaaagcataaaaaatgatttttggacatattggagtgtattgggtgcgtcttcggcaaaaaaattactatgtgattcgcgtgacgaatttgaaaagaggaataataccaaggctgagtacaaccaccatactcaccaagccacaccaatg

SEQ ID NO: 490 - DNA, 1020 bp, Oryza sativa
  Clone ID: PAT_MRT4530_100447C.1
ccggccgggaaatagttaaattcccccttaatcctcctcctcccccaggcgtcgccggcggctagattccggccggtgatggaggcgtcggcgtcggcggcggcggcggcggcgctgtgggggcacaagcacctcccgctcctggcgcgcgcgtcctccaaggagtcggtggagtacatcctgcaggcgctctggcgcacccgccgcaccggcctcgacgccgccgaccgcgccgtcgtccgcgacatgctccacctcgcctccgacgccgacctcgaccccttgctggtttgcctcagggtactgattcgcagatgcgtccatgggaacatcgggaaggacgaagtcgccaagcttttccccgaggaggtgtcgcccgagctgcagaggctgctcaccttgcttcttcagaagtttcagccggagtggcaagaggatgttgccaaggatcaggcatctgcatcacggccagaaacaaccgaatgcccttcaaatcaaaaccaagatacaacagagcagccagctgctggtgctacagagattcagaatggtgggaaatcatcagttgtggaaaaagaactgaagcttcagttaaccaaggatactttagacaaaatgctcgaggatatgtactcaaccaagggccaagcgtccaacactggcaataccaatggacatgaagagactgcaggatgcacttaggaaaatggaaaatgctgtttttgtcattttagctttagctccagggacattttgcagcagaaaaactgtaccagataacatcccgtgtctctctgcgtcttgtgatagatatttttccccttgggcagtttgatctaggctttggtcactgcatccatttaccctaaggagcaaatgtaggtttagaagctttccttgtagaagaagttagtaggtgattcatctgtaaattgaaatccattggaagtatcagtgtcaacgcatgctgaaatccttacatttccacatatgcggggaatgttaaaaaaaaaaaaaaaa

SEQ ID NO: 491 - DNA, 240 bp, Oryza sativa
  Clone ID: PAT_MRT4530_100448C.1
ttctgctttactcagacctgtgcgctatgacagacatgtaaccgtgcgctggccgtgatgtgacgcgcggaggacgtgatgtacttcttagagggcgcatgaccatgcgcaagtctgcatactaacccatgtcttgcgagtcggggagcccgtgctactgcgtctaccgtgtgctctacctcggatcttcttactgatagccgcctattatcgtgccggccttgtttcctgctatttcct

SEQ ID NO: 492 - DNA, 1530 bp, Oryza sativa
  Clone ID: PAT_MRT4530_100449C.1
agaagaatggtctgtgtcttaaaactttccccaaccgtgctattatttgtgttgtgagtttgcaacaatttggctatcagtctatactattacatggatgcactgaaatcttccccctgtttttttttttgttatttactctacagctggtggcatatcttgtattgtatgttgaaatttaaccttttaaagcaaaattggatttggtcgaaatgatgctagatggtggttatttggatttagttataaggatgctagatggtatgtttggattacagtgcgaatcaaattaggaggttgaagctaagaggtttttattcgagttaatgtttttttttataaaaaaaatctaccaaaaagatatatatttgatttgcatatatgcattgaaaattacacatttgcttggtggttataccgttagtccttctgatgtatatgatgtatgtttacctgtaggatgttttcctccgttcctctatcatcattccctatgacgaggtatggctgcttcactttctgcgtcggtcttgaatgattctgattcctaattattttggaagcttttctcataaaccaaaatggttttctaaacctttccacgagcaaataattgtttgcaatgcccttaagactagatgaatccatttttagcatctatgttgctacatcaattgaacaatcaccacctaccgatgcatttccttagtccaatgaatggtgggttcaaataaaagcgagaactattgaaattcttttaaattgcaaccttgccactgccagtgagtgatagaatcaagatgatcaattactccaaagtgatctttagaacatatgtggctctttgttcaaacttctcctaatttctctgcagtccaggtgatatcttcaataaatgtcaaaatcattaagaacaacccacagttgaataggcaggataaacggttggtgctcccatgtggcgatcgtggattaaagtaggaacaatggtttaattgggttattcacggagaagtgatattcgttggttgtcatggttgcctggaagggaattacaacatttgattttaagctttaatagcttaggcagcgtttgggctcactaaagtgcttcctttttcttatcttttagacttccactatgaattatttaacacccataaaagaactttccttgcatgattttctttattatgaaatcaacatttatattgacaaacctgcttagcttcagttggacaatgatacgctgcagtaaggcatctcattgaaggacattggtggattctgcactgctgttctattacttaacttcagtagagaatatatttgcccttttgcttgacttcatatggtgttatatttctcattttagatggacattcgtctaatttatctgtaccggatctttttctgaaaatattctctgcaaagagaggtcatctgaagcattgttaaaaaacagtaagtagcaaaaaaaatcatggtacaggcgtcaatggtacgcagtagtgaaaacatagttaggag

SEQ ID NO: 493 - DNA, 1122 bp, Oryza sativa
  Clone ID: PAT_MRT4530_10044C.1
atggatctgaatatggagccacagaatgacgacaattttactgatgagatggaatacggtgatttaaacttggatgatggacttgatttcaatttggaagatttgattgatttcaacttggaaccacacacagaagatgttgatgatgatgtcattctggatgctgaatctgatgtcaatttggaagctgagattgagtttaacatggaagttgtcagcacgttacttaagttaaacagtaccaattacctctacagttaccaagttactggccagtacttggtcactagtcacatgacaacatatagcaaccaaggcatgttccttggtactttgaaaggcatggtgagcaatagggcacatccagagggttcaatcgcggaagcctatattatgaaggagtgctcaacattttgctctatgtatctcaatggaattgagacaaggttcaatagggaagagagaaactatgatggagagaggcaattcgctgatcgctactcaatattttcatctagattccgtgcttttggtcacaaggatgacgtaatcctaacacaagatcaatataattccctgtgttgtgagcatgaggacgttttagaggcacaaggcgtgggaaatatagcaaatagacagcaacaagagtttgctacatggctgcgccaaagagttatagatttgcgcaaggatggttcatcccaagtatctgattgtttatatgcccttgcaattggaccatacaaaaaattacataaatactctggatgtattattggtggagttagatttttaacaaaggagcgggaggaaggtcgaaaaactcaaaacagtggagtatgcgttgagggtccacataaagggaaaatcataacatactatggtactctcacagacatatatgtcttggattatcctaatgatcggcaagttgcattttttatgtgtgattggtatgatctggagagaaacaaaccagtgatcattgacaatgactttgttagtattaatataagcaaaaggtggtacacagatgacaattatgtattggctagtcaagttaagcaggtcttttatgtacctgatactaaattgaaggggaattggcaagtagtgcaaaag

SEQ ID NO: 494 - DNA, 996 bp, Oryza sativa
  Clone ID: PAT_MRT4530_100450C.1
acgtgtattaaacccctgtccaggaccagccagggtacccttcacggcagcgatgaaaccaacctcttcaagacatctccaactgagaagaacttcaattctggtgtggaggaaaagagcaagactgagtactacccactgtactcagcaagtcataccagaagaggagcgttcgcccccgtccccagcaggcaacgggcagccccccgttcgtgccgcggtgaatccggaagccgatcaaccggacaccccggccgacccaactccatcacgcccaccctcgcctggggctgacgtcagcaaggggtggggcggcgccgacatgcgggccccactggtcagcagctcaagggggagggaggggtactggcaggcggggcccaccgggcggcggctcatggggaaaggaggaaggcggcctggcttggctcggcttcaagccggccggccggttagggcgagggcggcggcggcaagcggccaccgacggcggcggccggcgacgcgggcgacggtacatcgcggcgacgcgcatgcggggagcggcggcgcgcgcgggaggaagagagagggagttctcaccgggggttagagggagagagggtgcccacgacgagcgagagccatggccgacggcggcggctatggtggtactcaccggcgcgcggagagaagcgggccccgacggcgggattggatgggggatgcggcggccggggtagctttggcggcggcgaagctaatggcggcggcatgggaggagtagggacggtgggcggcgacgtgggcgcgcggcgcggagtggggcgcggaaggcgggggaggcgggcggcgtgggcggctcggcggttgccggcttggggagcggcggcgggaggtggaagaaggggccgacagtaaccgtgcactcaaacaacccataccgagtggtgaaggctgtcttgggaatatcctcttcccgaattctcaactgatgatagcctgatcgcaggtcta

SEQ ID NO: 495 - DNA, 501 bp, Oryza sativa
  Clone ID: PAT_MRT4530_100451C.1
gcaatccttgacggcagcgacggaaccaacctctctgagacggctccaactgagaagaacttcaactctggtgtgggggaaaagagcaagactgagtactacccactgtactcagcaagtcgtaccggaagaggaggtatgatgcaggatatatccaagggggctaaaggcggggcccaccgggcggcggctcatgggggaaggaggaaggcagcctggctcggctcggcttcaagccggccggccggttatggcgagggcggcggcggcaagcggccaccgacggcggcggccggcgacgcgggcgacggtgcatcgcggcgacgcgcatgtggggagcggcggcacgcgcgggaggaagagaaggggagggagttctcaccggggttcggccggcgcgggaggagacgacggcaaacggcgacggtgagcgaccggagggcgacggcgaacggcggccgagctccaggacaccctaagagaggaagtgtgagaggttag

SEQ ID NO: 496 - DNA, 923 bp, Oryza sativa
  Clone ID: PAT_MRT4530_100452C.1
atgtgtattaaacccctgtccaggaccagccaggcgggcgattccattccacaggcaacccttgacggcagcgacgaaaccaacctcttcaagacatctccaactgagaagaacttcaactctggtgtgagggaaaagagcaagactgagtactacccactgtactcagcaaggttcgcccccgtccccagcaggcaacgggcaacccccctttcgtgccgcggtgaatccggaagccgatcaaccggacaccccggccgacccaactccatcacgcccaccctcgcctggtcatgttttaacccccaagctgacaaagggacatggtacaacaatagcatggctatgacaataggactgacgtcagcaaggggtgggggtggcgccgacatgcgggccccactggtcagcggctcaaggtggagggaggggtactggcaggtggggcccaccgggcggcgactcatggggaaaggaggaaggcggcctggctcggctcggcttcaagccggccggccggttatggcgagggcggcggcggcaagcggccaccgacggcggcggccggcgacgcgggcgacggtgcatcgcggcgacggtgcatcgcggcgacgcgcatgcggggagcggcggcgcgcgcgggaggaagagaaggggagggagttctcaccggggttcggctggcgcgggaggagaagatggcaaacggcgacgctttggcggtggcgaagctaatggcggcggcggattggctcagcggcggctccagcggcggcgagcggtgcccggaggagtggaaaaggcggcggcggccggcgggcggcgtgggcggctcggcggttgccggcttggggagcggcggcggaaggtggaagaaggggccgacaggtgggccccacctgtcggtgacccggaggggttag

SEQ ID NO: 497 - DNA, 702 bp, Oryza sativa
  Clone ID: PAT_MRT4530_100453C.1
atggccaaccaccgccgccaatgggcgtcgtggcagacgttccaccccgtccacccgatggaggatctcatgcccggcggcgtccgcctccccgaccccgacgagcagccaccggaccccatctacgccttcctcgaggtgttcgaggagctctacggcgaccagttccctccccacgttctcctctacgactcgggggatcccaacggcggcgacgacatggaggagtctgatgacgacgtcgacggcggcggcgagagtctctccgccatcgtctatggcggggggagactgcacccgtcccggcgcccgtccgtgccgccgccggaggagaggccgagggggtggatgccgtgcccggttcttcctcgggcgggaggcggccatggcgatgccgacgccgcggccgccgaacaaggggtggagggagaagggccggccggacgcgtggcagcggttctacctcgaccgcggcgccggcaggcacgcggcgtcggaggcggaggccaaccgggagctctggatcgcgttcctgctcgaccgcggcgccgcgaagagcacctcgtggtggaggtcgttcgagcggcggttcgaacgtgccgaccattcgtagattttcaaaagatcctaaatcttgctttcgaggacttgggatatctgcttaactccaatgcagatcctaaatcttgctttcgagcttaa

SEQ ID NO: 498 - DNA, 1845 bp, Oryza sativa
  Clone ID: PAT_MRT4530_100454C.1
atgtcgacctccgccagtccatctgtcgcgccatcggctgagtatgcagaggtaagtatccattggctagatctctttcttttgcaacatattggttttctcctgcctcatattgttttcttcttctctattcttgtttgcatccatagcatctgtccaatctgtgcaattccaagtctgtcgcatgagaaccactatttccttggtccaattggtgattccgaccctactgaattcatcattgcagaaaccaatagaatcccctttagattagcaaaccctaatctgagccattggaagaacaccttcaaatcttggccatccctcgagaaaacctcccctgagaaaagctggactacatggtataagcgcgtatcggctagcaagcaggttcattgggatgatattggaatcggccaggcactcgccctcactatagccaattcagctaaggatgagcccctaatggctgccgccacctatttttggtccaatgccattaatgcctttttgttcaaccaagggccgatgaccccaactctgatcgacatcaccatgatcactggattagatgtgacttcatcggctaaccctatgagtttgaacactaagaaccaattcgatttcagaaccaaaagcataggtggaagaaatatacaagtttcttatgaattctaccatccgatgagctctgccagacagtttggaatgggacagctaccaattggcctgttctttgctgataaaatccaatgtcgaggagaaatttcatcaactctgatgatggatcagttactcaacatcccaggacctcccttgggcaacatcgagaacatagaactggcaaggttcaggagcaagaactttgacagatggtggggtgaatggaaaaaacatatcttccatcaaccagcttctatgtatatgacagatctgttccccgatgttattcctcagacaacagaatcctctcccactcgcaaaagtaatagtggcagagacattgaatatgctccgggtctcattcctaatggaggtggaccatctcctcctgtcatcggctataatgcccccaagacttcaactcttcttcaagggctcataagagaatcagccgatgccggaaaaaagaggaaaaccaggtcattggcagtagacccatcggctcaggctccaaagaagaaaaccaagtcacagaaaactaagccaaccgatgacctgccagccctagattcatccattgagcaagctttggatgaagaagagatcgaagaggatgttgatcaagctgcagccgaaaaaaagaagactgctgtgaggaagaaatcggctgcagcaacccttaaaccagccccaccaccacctcctcctcctgtgcagaccgaatcaagtgatcattctccatcggctgcaggtagtcacaatgttgatgaagaagaacaaccagctgctcctaccatcccagtcctagccgatttattttcttttgacatcaaggattatcttgatgaaacagaagaagatactagcagcaaggctttagctcccttatctgatgacgtaaagaaaacacttgaagatatctcgcattggctagaggcgtcgtcattagacagcttggtggttgactgtgggtcgatcaggactcggctacatgaagttcaagctctaatcccagatgagctagccgatgcccttactccagccgtctatcttgaacagcaccaatttaagctagagaaagccaagctaagactagccgaacgtcgggaacgtaaagatattgaagccacaattcagattaatcggcagcttgtacatgaagaaaagtccaagcttgattag

SEQ ID NO: 499 - DNA, 2351 bp, Oryza sativa
  Clone ID: PAT_MRT4530_100455C.1
ccggccgggactctttgcaaaagaattccgagctcgcaaggcgaagaaatctcgcaacaatctcatcagatctcgagatctcatcaggtttggtttgttcccgtcggatttttcttttccactgttcgatcttcctgttcgtgcgagatggcgaagggagagggcccggcgatcggcatcgacctcggcaccacctactcgtgcgtcggcgtgtggcagcacgaccgggtggagatcatcgccaacgaccaggggaaccgcaccacgccgtcgtatgtcgcgttcaccgactccgagcggctcatcggcgacgccgccaagaaccaggtcgccatgaaccccatcaacaccgtcttcgatgccaagcgactgataggtaggcggttctccgacccgtccgtgcagagtgacatgaagctgtggccgttcaaggtcatccctggccccggcgataagcctatgattgtggtgcagtacaagggcgaggagaagcagttctccgccgaggagatctcctccatggtgctcatcaagatgagggagatcgctgaagcctacctcggctccaacatcaagaacgccgtggtgactgtgccggcctacttcaacgactcgcagaggcaggccaccaaggacgccggtgtcattgccggcctcaacgtgatgcgcatcatcaacgagcccaccgccgcggccatcgcctacggtcttgacaagaaggccaccagctccggcgagaagaacgtgctcatcttcgatcttggcggtggcacgttcgatgtgtcgctgctcaccattgaggagggcattttcgaggtgaaggccactgctggtgacactcaccttggtggtgaggacttcgacaaccgcatggtgaaccatttcgtcctggagttcaagcgcaagaacaagaaggacatcagcggcaacccgcgtgctctgcgccggctgcgcacggcctgcgagcgcgccaagcgcacgctgtcgtcgaccgcacagaccaccattgagatcgactccctgtacgagggcatcgacttctactcgaccatcaccagggctcgcttcgaggagctcaacatggacctgttccgcaagtgcatggagccggtggagaagtgcctgcgcgacgccaagatggacaagagcagcgtgcacgacgtcgtgctcgtcggcggctccacccgcatccccaaggtgcagcagctgcttcaggacttcttcaacggcaaggagctgtgcaagagcatcaaccccgacgaggccgtggcatacggcgccgctgtccaggccgccatcctcagcggcgagggcaacgagaaggtgcaggacctgcttctgctcgacgtcacgccgctgtcgctggggctcgagacagcaggaggtgtcatgaccgtgctcatcccgaggaacaccaccatccccaccaagaaggagcaggtgttctcgacctactccgacaatcagcctggcgtcctgatccaggtgtacgagggtgagcgtgcccggaccaaggacaacaacctgctgggcaagttcgagctctccggcatccctccagctccccgcggcgtgccccagatcaccgtctgctttgacatcgacgccaatggcatcctcaacgtctctgccgaggacaagaccaccgggcagaagaacaagatcaccatcaccaacgacaagggcaggctgagcaaggaggagatcgagaagatggtgcaggaggccggagaagtacaaggcggaggacgaggagcacaagaagaaggtggacgccaagaacgcgctcgagaactacgcctacaacatgaggaacaccatcaaggacgacaagatcgcctccaagctctcggcggacgacaagaagaagatcgaggacgccatcgacggcgccatcaactggctcgacagcaaccagctcgcggaggcggacgagttcgaggacaagatgaaggagctggagagcatctgcaaccccatcatcgcgaagatgtaccagggcgccggcgcggacatgggcggcgccgctggcatggacgaggacgcgccggcgggtggcagcggtgcaggccccaagatcgaggaggtcgattaagctggtggtggtcctacgtgattccggctggaagggagtctgaaccgtgtgatgtggctggcgtcgtgtgatcccctgtgttttttagccgtcgagagtttcgtgcgatgaagcttttgtaagtgtgtatcgccgtatggttttacctgaacttgctctgaaatagtttaagctttgacctaaaaaaaaaaaaaaaaaaaaaaaactcgagactagtctctctccctcgtgccgaatcctgcagcccgggggatcc

SEQ ID NO: 500 - DNA, 699 bp, Oryza sativa
  Clone ID: PAT_MRT4530_100456C.1
tcacgagcggcggcggtagcggcactgcgaaggcagggttgagcggtcagtggcgcgcatctccgacaagcagctgcggtcgtcggcggaggagttgtcgcaggaaagtagcagctccaagccgctgcgcgcggtcgtcggcggaagccgcgcacgaccgcagagatggctaagcagggagcaaggaagaagcagctccgacacaagcgcgatatagacctagctcgtagacgccggtcgcaccgaccacagtctgatggaggcgagcccgctgctcattgagtaaagcttgagcttgcttccgccaagctcagcggatgggtgcgccaaactcgcggtggtcatggcgctcgagctcatccccgcgcatgtatcttcggcgagctccacctctccactcggagctacttcgtccctgcgcctctgccttcgctggagaacgccgcccccattgccgcctccaccaccaccgccgtaggtgctggagctcgatttggttgcggctgtcatcctctgtggcggtggaatgggcattagaggacggtgtttgcaggcggcgaatctgcagctctgtaccgtcgcagcgagtttgtcgatgggtgtgtggcggtcctcgctaggcagagggataagccatgcgcgcatgccgaaggggagagagagtatggggaggagggagaaggagaaccggactgacat

SEQ ID NO: 501 - DNA, 197 bp, Oryza sativa
  unsure (1)..(197): unsure at all n locations
  Clone ID: PAT_MRT4530_100457C.1
gctccatggcatgaggacttacgtggccaccacggaggcggagacaccaggctgcgaagtgtggactccttctggactgttgtaactccgcacacgggtgcggccatcctcaacgctgcttaccacgcaaagactcagaccgctgctggtccggggggactgcccatccttgtccctggatcattcgccttcncgtt

SEQ ID NO: 502 - DNA, 2074 bp, Oryza sativa
  Clone ID: PAT_MRT4530_100458C.1
tgctccggccatgatcacggtggcggcaccggaggcgcagccgcaggtggcggcggcggtcgatgaggcgccgccggaggcggtgacggtgttccggtccaagcttccggacatcgacatccccagccacctgcccctgcacgagtactgcttcgccagggcggccgagctccccgacgcgccgtgcctcatcgcggcggccacggggaggacgtacacgttcgccgagacgcgcctgctgtgccgcagggccgccgcggcgctgcaccggctgggcgtcggccacggcgaccgcgtcatggtgctgctccagaactgcgtggagttcgccgtggcgttcttcgccgcgtcgttcctcggcgcggtcaccaccgccgccaacccgttctgcacgccgcaggagatccacaagcagttcaaggcctccggcgtgaagctcatcctcacccagtccgtctacgtcgacaagctccggcagcacgaggcgttcccaaggatcgacgcctgcaccgtcggcgacgacacgctcaccgtgatcaccatcgacgacgacgaggcgacgccggaagcctgcctgccgttctgggacctgatcgcggacgccgacgaggggtccgtcccggaggtggccatctcgccggacgaccccgtggcgctgccgttctcgtcgggcacgacggggcttgcccaagggcgtggtgctgacgcacaggagcgtcgtgtcgggcgtggcgcaccaggtggacggcgagaacccgaacctgcacatgggtgccggcgacgtggcgctgtgcgtgctgccgctgttccacatcttctcgctcaactccgtgctgctgtgcgcgggtgcgcgccggcgccggcggtggcgctgatgcccaggttcgagatgggcgccatgctgggggccatcgagcggtggcgcgtgacggtcgcggccgtcgtgccgccgctcgtcctcgcgctcgccaagaacccgttcgtggagcgccacgacctcagctccatccgcatcgtgctctccggcgccgccccgctcggcaaggagctcgaggacgccctccgcgcccgcctgcctcaggccatcttcggacagggatacgggatgacggaggcggggccggtgctgtcgatgtgccccgcgttcgccaaggagccgacgccggcgaagtccgggtcgtgcgggacggtggtgcggaacgcggagctcaaggtggtcgacccggacacgggcttctccctcggccgcaacctccccggcgagatctgcatccgcggcccacagatcatgaaaggttacctgaacgatcccgaggcgaccgccgcgacgatcgacgtcgaggggtggctgcacaccggcgacatcggctacgtcgacgacgacgacgaggtcttcatcgtcgaccgtgtcaaggagctcatcaaattcaaggggttccaggtgccgccggccgagctggagtcgctgctcatcgctcacccgtccatccctgacgccgccgtcgtcccgcaaaaggatgacgtcgccggcgaggtcccggtcgcgttcgtggtccgcgccgccgactccgacatcacggaggagtccatcaaggaattcatatccaagcaggtggtgttctacaagaggctacacaaggtgcacttcatccatgcgatccccaagtcggcgtctgggaagatactgaggagagagctcagagccaagctcgcggcgtgctgaccatgtcaatgatggataatgatggctaggctatacatgcgttctactatgtattactctgaaaatgcagtgaagttctggttgatttgtggtcgtatttgtgacgagatttattttctgagaaaaaaaagtttattctttttgctagccagtatactgctgaatttgatgccaggcgcacatttgcgaaagaaactgcggcaaacttggcaactttttagtatatgatcaaaccaacgtgtacaatgtagcatttgtacgtgttgttgccagttggggaatacgactaccgtgtattggattcatgatttaaaaaaaaaaaaaaaaaaacaaaaaaaaaaaaaaaaaaaa

SEQ ID NO: 503 - DNA, 2098 bp, Oryza sativa
  unsure (1)..(2098): unsure at all n locations
  Clone ID: PAT_MRT4530_100459C.1
atgtctcgtccccaacctccaccgcttctccccgtcctccctgaactcggcggcctccaggcactcacctcatcctcggcttccctcgccacgtggctccgcggtggtggtcgggaggaggttgcagctatcaatctagatggcggtgatgcggtcatactggtcgttgtcccacctcacctcgccggccatggtggacaagggaggccgccccactacagcattgaacggaggaggtcacaacctcaattcgagtgccatgcgtatgtcaagggtgtaaaatatttggtattcgagttcaggggtgtaattcggctgacggcgatagctcacggagtggtaggcgacgtatttcttggcagcgaggcacctgtggtgacttcgtcaatttcaaaatatgctggtctagtcttcggaggtgctcatagggatgtgtcagccctaggagaggagaagctttctttttttggaaaatcgagtcaacaaaagagaataagcaccaatcagctctacaattctggaattccggtgactgtgccatcgcctctgcctgctataccagctaccctggatgaaaacattcccaggattccagatgggcagaatgttccgcgggagagagaattgagaagcacacctatgccacctcatcagaatcagagtactgttgctcctcttcatgggcattttcagtccagtaccgggtctgttgggcctctgcgttcgtcccaggcgataaggttctcttcagtttcaagcaatgagcaatatacaaatgccaatccttacaattctcaaccgccgagtagtgggagttcttcaacgctcaattatggatcacaatatggaggctttgaaccttccttgactgattttccaagagatgctgggccgacgtggtgtcctgatccagttgatggcttgcttggatatacagatgatgtccctgctgggaacaatttgactgaaaacagttctattgcagctggtgatgaacttgccaagcaaagtgaatggtggaatgattttatgaattatgactggaaagatattgataacacagcttgtactgaaactcaaccacaggttggaccagctgcgcaatcatctgtcgcagttcaccaatcagctgcccaacaatcagtttcatctcaatcaggagaaccttctgcagttgctataccctcgccctctggtgcctccaatacctccaactccaagacacgaatgagatggactcctgaacttcatgagcgctttgtagatgctgtcaatctacttggtggcagtgaaaaagctactcccaagggtgtgttaaagctaatgaaggcagacaatttgaccatttatcatgttaaaagtcaccttcagaaatacagaacagctcgatacagaccagaattgtctgaaggttcttcagaaaagaaggcagcctcaaaagaggacataccatcaatagatctgaaaggagggaactttgatctcactgaggcattgcgtctccagttagaactccaaaagaggcttcatgaacagcttgagatccaaagaagtttgcagctgagaattgaggagcaagggaagtgccttcagatgatgctcgagcagcagtgcatacctgggacagacaaggcggtggatgcttcaacctcagcagaaggaacaaagccatcttctgatcttccagaatcttctgccgtgaaggatgttccagagaacagtcagaacggaatagccaaacaaacaggagctagaatgtttttattggaattaaatattcaaactacagtaccccaaacacggcagcgacgattccgtgttaatgggatgatctttaggtttcagaaggcagcacaagcaaatttgcactgatgtactctttgtcaggtggtttgacttcttgctttctttgttgttagggactggatagcatggattaggaatttgattatgatgaactaattcaagaaattgccataatctttggtaccttgtgcgcctggaacatgtaaatggtaccaaacaacaatatgatatgtttaccttcatgttcaaaaaaaaaaaaaaaaaaaaaaaaaanaactcgagactagttctc

SEQ ID NO: 504 - DNA, 537 bp, Oryza sativa
  Clone ID: PAT_MRT4530_10045C.1
atgtatccatcgatagcggcgtcattaatctcaaaatatactggtctaatcttcagaggaaaggctggtgcggttgaaaacttcaattctagcccattcgcgatgttggccgctaggtcgattaggttgaaactccggattgatctattgtttgtcatggttatattttacaagatcgcagaaaccaagatttataagaccgtgtggttatcgcggttatcacgtgtgaggcccgtcaccgatgtagaatacatgtctagagttccatattctagtgctgttggttttttgatgtatgtcatggtttgctcccgtccaaatttatctcatgctatgtgtttggttagtagatacatggctaatcctggtaaagaacattggaaagctgttcagtggattttcgggtatcttagaggcacagctaatgcttacttgaagtttgacaggactgataaggggcttgttagatatgtggattcagattttgctgcagatttggataagagaaggtccactgcaacaggaacccccctctag

SEQ ID NO: 505 - DNA, 451 bp, Oryza sativa
  Clone ID: PAT_MRT4530_100460C.1
gtcagggcaacaaatgcattcattcatttggactatgcaaaaaacatgcaaatccaatgcgatcaatcgagctttacgcctcgtgagagaagacatagtggatcagatcaacgacacggttggagtagccccattcgttgtcgtaccacgaaatcaacttgacgaacgagtcattgagggcaatgccagccgaggcatcaaagatggaagagcgcgagtcgccaataaagtccgacgacaccacctcatcctcggtgtagcccatgatgcccttcagcggtccttccgaagcagccttaatcacgttcttgatttcgtcatacgtagccggacgagccaagcgcaccgtcaagtccaccacagacacgttcacggtgggaacacggaaagccataccagtcaacttgcccttcaacgaaggaatgacagcaccggcagccttagcggcgcc

SEQ ID NO: 506 - DNA, 809 bp, Oryza sativa
  Clone ID: PAT_MRT4530_100461C.1
gctcgtgtggcccaggggctggctcgtgcgggcgggggtccgcctcgcgaaaggccgcgtgccaccatttctccccacatctcatccctctctctctcctcgcttctctctctatcgcaggcgaaggcgaaggcgaaggattcgggctcagctcctccgcctccgccgatctctcgccggagatgtgtcagccctaggagaggagaagctttctttttttggaaaatcgagtcaacaaaaggtcttgccaattaacacagtgaaggataattctggcttgagtgtttgtaaatggagagaataagcaccaatcagctctacaattctggaattccggtgactgtgccatcgcctctgcctgctataccagctaccctggatgaaaacattcccaggattccagatgggcagaatgttccgcgggagagagaattgagaagcacacctatgccacctcatcagaatcagagtactgttgctcctcttcatgggcattttcagtccagtaccgggtctgttgggcctctgcgttcgtcccaggcgataaggctctcttcagtttcaagcaatgagcaatatacaaaggccaatccttacaattctcaaccgccgagtagtgggagttcttcaacgctcaattatggatcacaatatggaggctttgaaccttccttgactgattttccaagagatgctgggccgacgtggggtcctgatccaagttgatgcttgcttggatatacagacgatgtccctgctgggaacaatttgactgaaaacacgtctattgcagctggtgacgaacttgc

SEQ ID NO: 507 - DNA, 192 bp, Oryza sativa
  Clone ID: PAT_MRT4530_100462C.1
atggcagaggtggccaatgtgggaagaaagtcgtccatcaataacaatgaagacactagtcggcggcgacgaaggcggtcgacggccggcaatgaagttgtagacgcccaacaacagcggcataataggccacccgtgcaggcggtgacaccagtcggcggcgacggaagcgagccggcggtgaagccgtag

SEQ ID NO: 508 - DNA, 2583 bp, Oryza sativa
  Clone ID: PAT_MRT4530_100463C.1
atggaggcagagcacccgcaccagatcacatacaccaccaccaccaccacctccacctcatccctctgcccgcgccgcaggaagagaggagacgacgaggcggcgcaccacctcgtgttccccatggatctcgactcggccgcggcggcggctgcggcggcggcgcaccaccagcagcagcagcagcagaccacgtcccaggacaagctgaaagcattggcttatgagtacggtcatgagttccgagtattttcaagtgtaacatttgagtcaatgactagcaacttgcccgcagcagatcaggaggaagatgatgacttttatgagcttcagcctgctgactatttcaacttggtttcgaacagaataggagcactatctaaaacaatgaaactgactgcagaacaatcgaaagttttgaagactcgtaaaatgcgtgaagcagaacttgctgcccaacgagcaaagataaaaaaggcagtaatgagggtgcgattccctgatggatacatacttgaggccgattttcatccgtcagaaacagttcaaagtctgatggattttctgaagaaagtaatctctagaccagacctgccattctatctctatacagttccaccaaagaagcggataaaagacacttcactggatttctacacaattggttttgttcctggggctaatgtctacttctcttatgatctgccggaaggctcagagttaaatacagacagtgtaaaatcaggaccttatctccgtgaagaaattcggatgttggatggactaccaattgtccaagaacctgtgcaccaaccaattgattctactatgaactcttcttctgctcatcaatctgatgtgtctcaatcagattttgcaccgccagcaaacaagaaaccagctaaaccaaagtggttcaaaagggtgctagaaggtgatgatgagagatcatcgcatcgagaccaagaaaaggaggtttgcaaagcaagtctgaagtctctgatctctgaagaccgtttagactgcaaaatgtgcgctgatttcgccgtgataatttcagagatcagatcgatctttcggctcagttcgttcgacgtcacacgcaaagaagaaggcgaggagagaaagctagtaggctgcacggcgatctgtgtgctggaacctggaaatggtgaggccaggacgcaccagataagcccctgtatctgcccagcaattacgttggagtttttcacggttggtggcacagagcacgctgggtggaaaggtatattgctgaaggaagaagagcaccaacctatttatcatgtcaggaggatcttcaccaagggatttatacaatcaggtgaagtgcatatatttgggtatgcgagatcaaacctttctgatgatgggttaagggaacgcattcgtggatacctcaaaggagcctcagaagaacatctctcagactttttgcaacatataaaatatgtcagtggttcctatgacagcggagaaggatttgagaaattgaacaaggaaatttcagagtatgagaagtcaaacaaatcagaaagccctcgcaggctcttctatttggcattgcctccatctgtctacccttcagtctgcaaaatgatcagaacatattgcatgaatccatctggatggactagagtcattgttgagaagccatttggaaaggacttggactctgcagaagaattaagtgcccaacttggggagctatttgacgaaaaccaactctacagaattgatcactacttgggaaaagagttggtccaaaacctgcttgtgcttcgttttgccaaccgcttgttcttgcctctttggaaccgtgacaatattgataatatacaggttttctgtttggttgcaatggaaaagcctgtctctcttaagcctgagcacattagagatgagaaagtcaaggttctgcagtccgtgaaccctataaagcatgatgaggttgtccttggacaatacgaggggtacaaggatgaccctacagtgccagatgactcaaacaccccaacttttgcatctgtcgtgcttcgggtacacaatgaaagatgggagggtgttcctttcattcttaaagctggtaaagcactaagctcaaggaaagcagaagtccgtgtgcagttcaaagatgttcctggtgacatctttaaatgtaaaaggcaaggaagaaatgagtttgtcatacgccttcagccatcagaagccatgtacatgaaacttactgtcaaaaaacctggattggagatggccaccgagcagagtgaacttgatctgtcatacgggatgcggtaccaaaacgtcaaaattccagaggcatacgagcgtctcatattggatacgatacgaggagaccaacagcacttcgttcgccgagatgagctgaaggctgcttggcagatcttcactcccctgctgcacgacatcgacgaaggcaaggtgaagtctattccataccagcctggcagccgaggccccaaggaagccgatgaactgagcgagagggttgggtatatgcagacccacggttacatatggataccacccacccttgcatag

SEQ ID NO: 509 - DNA, 1900 bp, Oryza sativa
  unsure (1)..(1900): unsure at all n locations
  Clone ID: PAT_MRT4530_100464C.1
tcgcaggaggaggcgcagcagcactagccgcggtataaaacatccaagcgctcctccatcgtcgccaccgctccggtttgcctcccgcgcgagccctcgtcgacgccgccggtatattgctgaaggaagaagagcaccaacctatttatcatgtcaggaggatcttcaccaaggtcaagacgaagcagctttaattctttatcaagagatctcgaactcccttcagagcaaggttgtctctctgttattgtcctcggggcttctggagacctagccaagaagaaaactttcccggcactcttccatctttttgcacagggatttatacaatcaggtgaagtgcatatatttgggtatgcgagatcaaacctttctgatgatgggttaagggaacgcattcgtggatacctcaaaggagcctcagaagaacatctctcagactttttgcaacatataaaatatgtcagtggttcctatgacagcggagaaggatttgagaaattgaacaaggaaatttcagagtatgagaagtcaaacaaatcagaaagccctcgcaggctcttctatttggcattgcctccatctgtctacccttcagtctgcaaaatgatcagaacatattgcatgaatccatctggatggactagagtcattgttgagaagccatttggaaaggacttggactctgcagaagaattaagtgcccaacttggggagctatttgacgaaaaccaactctacagaattgatcactacttgggaaaagagttggtccaaaacctgcttgtgcttcgttttgccaaccgcttgttcttgcctctttggaaccgcgacaatattgataatatacagattgtattcagggaggactttgggactgacgggcgtggtggatattttgatcaatatggaatcattcgtgacatcatccagaaccatttgttacaggttttctgtttggttgcaatggaaaagcctgtctctcttaagcctgagcacattagagatgagaaagtcaaggttctgcagtccgtgaaccctataaagcatgatgaggttgtccttggacaatacgaggggtacaaggatgaccctacagtgccagatgactcaaacaccccaacttttgcatctgtcgtgtttcgggtacacaatgaaagatgggagggtgttcctttcattcttaaagctggtaaagcactaagctcaaggaaagcagaagtccgtgtgcagttcaaagatgttcctggtgacatctttaaatgtaaaaggcaaggaagaaatgagtttgtcatacgccttcagccatcagaagccatgtacatgaaacttactgtcaaaaaacctggattggagatggccaccgagcagagtgaacttgatctgtcatacgggatgcggtaccaaaacgtcaaaattccagaggcatacgagcgtctcatattggatacgatacgaggagaccaacagcacttcgttcgccgagatgagctgaaggctgcttggcagatcttcactcccctgctgcacgacatcgacgaaggcaaggtgaagtctattccataccagcctggcagccgaggccccaaggaagccgatgaactgagcgagagggttgggtatatgcagacccacggttacatatggataccacccacccttgcatagacagacagacagacagacagtagtattgtttagctaggaagagtgcctctaaactgttattattgcggatatattcgtttcatattttcacgataacgcctgactagtgactacctggcgttgtaataatgtgttgcttcgtaagtataactgctattgtgaaataaaagtgcatgtttcgatcgaaaaaaaaaaaaaaaaaaaataaaaaaaanaaaanaaataaaaaaaa

SEQ ID NO: 510 - DNA, 1156 bp, Oryza sativa
  Clone ID: PAT_MRT4530_100465C.1
cccacgcgtccgcccacgcgtccgcccacgcgtccgcaccagatcacatacaccaccaccaccaccacctccacctcatccctctgcccgcgccgcaggaagagaggagacgacgaggcggcgcaccacctcgtgttccccatggatctcgactcggccgcggcggcggctgcggcggcggcgcaccaccagcagcagcagcagcagaccacgtcccaggacaagctgaaagcattggcttatgagtacggtcatgagttccgagtattttcaagtgtaacatttgagtcaatgactagcaacttgcccgcagcagatcaggaggaagatgatgacttttatgagcttcagcctgctgactatttcaacttggtttcgaacagaataggagaacaatcgaaagttttgaagactcgtaaaatgcgtgaagcagaacttgctgcccaacgagcaaagataaaaaaggcagtaatgagggtgcgattccctgatggatacatacttgaggccgattttcatccgtcagaaacagttcaaagtctgatggattttctgaagaaagtaatctctagaccagacctgccattctatctctatacagttccaccaaagaagcggataaaagacacttcactggatttctacacaattggttttgttcctggggctaatgtctacttctcttatgatctgccggaaggctcagagttaaatacagacagtgtaaaatcagggccttatctccgtgaagaaattcggatgttggatggactaccaattgtccaagaacctgtgcaccaaccaattgattttactatgaactctttttctgctcatcaatctgatgtgtctcaatcagattttgccccgccagcaaacaagaaaccagctaaaccaaagtggttcaaaaggtgatgatgaggtgagacagtcagggcgccaagaatgcaccaccagaggacgactttaatgtagggggatagagagtgaaagcatgacaataatggggtgctgttggctttcttgatggatggatacacattgtaaaatgaaactttccaaagaaatttcacgagtgctgcagaatgattttttgggtttgatagcactgcattacactgtacactccgttgctaacaaagcctcccttttcctg

SEQ ID NO: 511 - DNA, 477 bp, Oryza sativa
  Clone ID: PAT_MRT4530_100466C.1
atgaactatcgcaacgacaccgacacctgcaccccgcggccgtcgccggcgcgggccagcgccatctggccgtcgtggttcatcctcgccggcaccgtccatctcggcttcccccacccaaagctaaagaaatcccacaaggccagcgggtcatccgccatcctccggatctcctcctggatcgccgacgcggcggccgccagtgcgccgtcgccgtggaggaggtcgcgcgctgggagcgccacgaagcacccggtgaggcacgtgccgaagtacctggcgtcgacgggagggtcgagccgctcgcggaagtcggcgaagaagaagaggaacgcctcggcgtcgtccgcggcggatgtcttggacttggaccggacgaggagcgtccagaccgtcgcgacgagggcgacgaagctggacggtggccgacgcggtggtgcgccgtgggcttcgccgtctcggacgatgcgttcactg

SEQ ID NO: 512 - DNA, 164 bp, Oryza sativa
  Clone ID: PAT_MRT4530_100467C.1
gtatggggagtatggtcgaagaccggaaactccaaggacattgacttgaccactaagtttacactaacatgaaacaatggcccaggtgaccactctatctactgagtgttcatccagactaaggtgcactaacgtgtactgtggtacctatgaacgaggccaag

SEQ ID NO: 513 - DNA, 378 bp, Oryza sativa
  unsure (1)..(378): unsure at all n locations
  Clone ID: PAT_MRT4530_100468C.1
tttatntnaatgnnaanatgtatgaaattannaaaaaaaaatgtnntattttaatggaanttnaanatganattnntntgtnaaggantganaaaataaataaagatgaaanatttttatttaacaangtaaagaaggaggnnnagaaaattgggaantgtttggggttaatnannagtaatnatacagatttatnatgnnaagtntnatgtttgtggaaaatgagttggtttttttttgatgatatagtaaaatatttnttgaaatggaagttatntnaanatgntgntagtaatnntangaaatggaattttattgnnnaataaggtgatggttttaatatntggaaaaataaattttttttttgaaaagggtatt

SEQ ID NO: 514 - DNA, 908 bp, Oryza sativa
  Clone ID: PAT_MRT4530_10046C.1
gtgatcttgcaaatactaacatctgaattctatcttttgcagatgaaattcaacttagatttatctgaacctcatgttaaaggctgtctggagctactattttcatcaagctataaaacatttcaccatagatgctatactcattatctcaagtctggtggtggggacagtactcgtaacagtccatatgaaccccttcgtgacagacctggtgattggacttggctttgtgatcatttcgaaacagaagaatttcataaaaaatcagttatagggaaagctaatcggatgaaactgtcatatgttcataaaaagggaaccaaaccatttgtggcacttcagcatgaattaagttgtgatcaaatctcattgtacaaggaatgctattgtagtgacaaaggatgggcgtcaagagatgctagacagaactatgaaacaatgttacagatgcagcatgaaaatgagcaagaaggtgcaatccagctgacagagcaacaaatttgtgagaaggtgcttgggaaggcatatggatatattagagggagaggtcatggtccgaaacctaatagaagagcttcatcaacttcagcaaacacctatcaacaaatggaagaagaattggcttctacaaaacaaactgcggcagttcaacaaaaccagcttgcagtacaacaaaatcagcttgaatctcaacaaaagcaacttgattggttgcgcagtgtcgtgtccaaacttgctggtattccacctcctgctatggatgataatgatgcctcaggaccatcccacacaaccacaacttcaattgatggatccgctatgcaacatttttttcttctaaaagaaaaacagaatatagtgttataatacatagaaatgccaattaacttttgttaaatttatttgat

SEQ ID NO: 515 - DNA, 1722 bp, Oryza sativa
  Clone ID: PAT_MRT4530_100470C.1
atgggcaacgcatgcggcggttcccttagatccaagtacctgagcttcaagcagaccgcgtcgcagcgccacgacaccgacgacaacaacaacgccgccgcggccgactcgccgaagaagccctcccgccctccagcagccgccaagacggacgaccacccagtctccgcgtcggcgccggccgccgccatgaggcgcggccaggcgcccgccgacctcggctcggtgctcggccaccccacccccaacctccgcgacctctacgccatgggcaggaagctcgggcaggggcagttcggcaccacctacctctgcaccgagctgtccactggggtggactacgcctgcaagtccatttccaagcgcaagctcatcaccaaggaggacactcgaagaagttcgccgcgagaaccagatcatgcaccatctctcgggccacaaagaacgtcgtcgccatcaagggcgcctacgaggaccagctataccgtgcacatcgtcatggagctctgcgccggcggcgagctcttcgatcgcatcatacagcgcggccactacagcgagcggaaggccgccgagctcacgcggatcatcgttggggtcgtcgaggcctgccactcgctcggggtcatgcaccgggacctcaagccagaaaacttcctgcttgccaacaaggacgatgacctctcgctcaaggccatagattttggtctctcagtcttcttcaagcccggtcaaacttttaccgatgttgtcggaagcccatattacgtagctccagaagtgttgttgaaacactatggaccagaagctgatgtatggactgcaggtgtcattctctacattttactaagtggtgtacccccattctgggcagagacacaacaaggaatatttgatgctgtactaaaaggtttcattgattttgattctgatccttggcctgtgatctctgagagcgcaaaggatcttataacaaaaatgctcaatcctcgcccaaaggaacgcttaacagcacatgaagttctatgccatccatggattcgtgatcacggagttgctccagatcggcctcttgatccagctgtcctatctcgcatcaagcagttctctgcaatgaataagttgaagaagatggctttgcgggtaatagctgagagtctctcagaggaggaaatcgctgggttgaaggaaatgtttcagactatggatgctgataacagtggtgcgatcacatatgatgagcttaaagaaggcttgagaaaatatggctcaacacttaaggacaccgagattcgtgatcttatggatgcagctgataacttcagcctcatgattgtctttctactgcaaacatttcaaaaacaggttaacatggcagatatagacaacagcggaacaattgattatatcgaattcattgctgcaacattgcatctcaataaactggagcgagaggaacatcttgtggcagctttttcatattttgacaaagatggaagtggttacatcacagtggatgaactgcagcaagcttgcaaagagcataacatgcccgatgcttttcttgatgatgtcatcaatgaagctgatcaggacaatgatgggcgcattgactatggagaatttgttgccatgatgaccaagggcaatatgggagtcggacgaagaacaatgagaaacagcttgaatatcagcatgagggacgcacctggtgcactctag

SEQ ID NO: 516 - DNA, 889 bp, Oryza sativa
  Clone ID: PAT_MRT4530_100471C.1
ttttttttttttttttttttctttttttttttttttttttttatatatggcacgtggtacagaagctccagtttgcaatgcaatggttagttctccaaccccaatgcatgcacacgtacgcttgagtacacagtgttcttagaaattaaacattacaaggaactagtacacaaacttccatagctagcccaagatcagaccagcaaacacaagaacatacacaccagtattacaatatgtatatatctctctatatatactataaaaacgaagtgttaagcgactggtggtaattaattaacacacagcaaaataccataatactgctcttcttaatcacacttaccagtgctaatcctgaagaaaacacgcagcttaagctcagtaatgcatggtacattcgctagcttaattagctagtagccgccgcagtggtaggtgtacttgcagctgtcgccgaccttgacggtgtacttgtgctgcggcttcacgaggaatggcggaaggcggagcagccgtcgcacacgcacgccggctccacctccttcagccaccggcagcagtctctgttcgcgcggtggtcgtcgtcgtcgtcgttgtcgtcgtcgtcgtcttcgtcctcctcgtcgtcgtcgtcgtcgtcgtcgtcatcgtcgtcgtcgtcgtcgtcgtggtcgtcgtcgtcgtcgccccccgtggtatctcacatgatggctcggggcccccccggaaaggggccttttttcgcttcccccataagctgcgcaggaaaagggcccaaagccaatcccaaggaacagtaaagcttcatagggtcttctgtcagggcaggagtccgatctcacagacatgtctattcaccgagtctctctccgagcccacgcgtccg

SEQ ID NO: 517 - DNA, 616 bp, Oryza sativa
  Clone ID: PAT_MRT4530_100472C.1
tttttctccaccgcgcctgcgcaggagacgtcagcctcgccgtcgtcgtcgtcgacaccaaccccttgttctgggccaccgccgccctccccttcgccgacttcttcgcccatctgatccactacgtgaactcgctcttgcttctgaaccacctcaaccatgtggtcgtcatcgccgcggggcttagctcttgcacctacatcttcgactcgagcgatgctagtgcctctggtgctgcagacgtcgcggccaccttcgcaaaggcgagccgcaagatggatgagttcattgcagaagacgcccgtgccactagcagcaatggttccgttgctgatggcaatgcagcctctcttctctcaggcgcactgtcccttgctctgtgctgtatcctatgactggtactgatttcttattgttagtgcattttccatttgtgcttgtatttcttaacatggaggatgcttagatatacagagggtttttcggtctggtactcgacatccacaacctcggattttatgcctgcagggttctccagatggacctgaacagtacgcacattcatcgatttgattgtgtaggatatattgtctggaacatgttctaactcaatgag

SEQ ID NO: 518 - DNA, 119 bp, Oryza sativa
  Clone ID: PAT_MRT4530_100473C.1
gcaaatagaacttcatacaatattatcttccactattcgtatcatatcccgcaacctgctgggtcaggccgtggtgcggaaatatatcccgtcccgttttttcaccccttaaatttcat

SEQ ID NO: 519 - DNA, 273 bp, Oryza sativa
  Clone ID: PAT_MRT4530_100474C.1
atgatgagatttagttcaatggatatgaaggatagaagaaataaagtattttctactactctacccactcgtagcttgacaattcctccccaaccagtggtgcaacctgctcctcctgctgatctgaaagggatcttcgtattgcaagttttgatgcacccgagccaaatcttactttttttagtaaagccttatgatgttttcaatttattaagggaaggggcttctttgcaaagaaaagggatagcgctaggaatatcaatagcgtatgga

SEQ ID NO: 520 - DNA, 162 bp, Oryza sativa
  Clone ID: PAT_MRT4530_100475C.1
ctaatttatcacacgtgactggatcagtggccacgaccaccatggcgctgtccaccgcggtgatggtccgcgcggtgccacttatctcctccgcgctattgggcgaggggcggatcaccatgcgcaagaccggatctaatcccaagccgacgtagtcgtttt

SEQ ID NO: 521 - DNA, 213 bp, Oryza sativa
  Clone ID: PAT_MRT4530_100476C.1
ttgatacaagccggcatccgcaagcacaagaagttttgtctgctctttcaagaggacagctccttctatatgcaccactggagagagggtatactctcgatcacattgctgctattgaccacgagctctgggcaaagaggaccacggcgctgcatatagactacacgctagaaataatgtaccaggtagataacggaaagtatgagaaggaag

SEQ ID NO: 522 - DNA, 258 bp, Oryza sativa
  unsure (1)..(258): unsure at all n locations
  Clone ID: PAT_MRT4530_100477C.1
acatcaatcagatgaagacncattagnaactgctaatagatatggaaactaccattttatctcgtagtactatatactttagngctatgctatcatgccaggaatatatggaccaactattaaatccaagcacaaacccatggcatagtgcctcgcgccggaagttttagggagcggaggtccgatagactacaggcatcagagccactacgaaaagcaaggccagaagctgcggtgagcgagaacttggaggagaag

SEQ ID NO: 523 - DNA, 711 bp, Oryza sativa
  Clone ID: PAT_MRT4530_100478C.1
atggcaacggggaattcactgtcgggggttacgtctgcgtccccgtccccacggcgacagcatgaagaaggctggaggcagcgtgctcatcaatggctggaggcggcgggcggcgtgacgacggttggaggcagcaagccacgcgacaacgggtcgacgactggaggtggccggcggcgtgacggcgtctggaggcggccagcgatgcgacgagggctggagacggcgcgctcgtcgatggttggaggcgaccggcggcacggcgtcggccaaaggcgtcgggaccccgcccacgcaaggggacgcggtggcgcacggcacgcgcgtctagagcagcggcagcgtcagcggcggcgctgtggagtggaggactctaatgtaaatgctggtcacctcgggggatggggacgccaaaccctagcaccgtgcaatcctcactccacggcgccgcgcaatcctctacgtcgcctccatgtcctccttgccggcgctggcggcagcgcgggatcacgccacgtgagagctcaagcggtgccgccgcacgtcacttcggcagcgctgggggggaaggatggggacgccggaggtgacggcgacggagcgaggcggctggtgaacatggatgcccagaagcagatcaggatgggtgattcgctaccaattgtgccgtcggtggcattcatcagggttcatccgcaggctgagcagtga

SEQ ID NO: 524 - DNA, 357 bp, Oryza sativa
  Clone ID: PAT_MRT4530_100479C.1
agttgacatgcaaaaaacgaggggatgtctacacgggggattacaatccctttttgttttgccaggcttgctgattttgtcagcaaaattaaaaaagggggggttcatactaaaatcaaattgggggtacatcctaaagttcaaaaaaagcccttacttttaaaaaaaaagaggtggcataaattttaagacattacatcattcccagtcccaattatacccccctgaaacttgggttttaaaacatagccagatcaaaggggggcaatgagaatggaaggagtaagaactgatttttttgcccagaattgggtaactccccttgtaactgggacaacctgtgtttggttcactaaa

SEQ ID NO: 525 - DNA, 1143 bp, Oryza sativa
  Clone ID: PAT_MRT4530_10047C.1
atgcgcaactccacctcctccgccgccgcccagcccgcgccggcctccgccgccatgtacggctcctacgcctcaccctcctcgggagcaggagggtacgccaagatccccacctacccgccccctccctccgcctaccccgccgccccgcctcctccggtgatgggccagcccgtgccgccgccgcccgcgcagctgcatgacccgacggcgccgccgtccccgatcgccaaggcggcggagctggtgacgaggttccgggagcaggggcaggcgctcatcgcggcgaggcggccgtggggggaggtgttccgggcgccggccttctccaggccgcccagcgtcggggaggcggtggccagggcgcggcggaacgcggcctacttccgggccaactacgcgctcgccgtgctcgccgtcgtcgcggcctcgctgctctggcaccccgggacgctcttcgcgctcctcgccctctgcgccgcctggttcttcctctacttcgcgcgccccgcgtcgtcggcggggcagccgctccgcctcctcgggatggagttcgaggacggcaccgtcctcgccgcgctcaccggggtcaccgtcatcgcgctgctcttcaccaacgtcggctggaacgtcatcggctcggtcatgatcggcgccgccctcgtcgccgcgcacgccacgctccgctccaccgacgacctcttcttgaccgagcaggaggccgccggcgacggcctggtggccgccggcatgagcgccgccggaccaatcttgcccacctacgttcgcatcgcttgatctactcggcttggtatgatgatatccccccaagatgcatcaatctctttatccaacactcgtagctaattgatgttcttgccttgcaaattagctatgaatgattgtgtgtgtctcctggctggaatttatactgtgtaattatcaaacctagcagttgatttgatctttgatgatatatatggtacggtgtttgttgattcttttgttagcgtgtacaaatactagctttgcgtgtgatcatactatgaacatattgagtcgcaactgaattgagtaaattagtatggtggtggtgttaatttgcaaatatgctatacatgttgggcagtggccattgaatct

SEQ ID NO: 526 - DNA, 282 bp, Oryza sativa
  Clone ID: PAT_MRT4530_100480C.1
atggagcggatcactgcagtgcatggggagattggggatgaggagcggcgaggatggatgggccagagagcgcagtgcgcagaccgggggaggacgtcagcggtgagaagctcccccaccggcgccgatttcccgccgccgccgttcgaaatccggccgcgccctcgcatccgcgcgcgcgcgctcgtgcgtggccgaccgcccggttgccaccgcgtcagccctgacgccgcctgtccccgcgcctgcgccgcgcagccgcccggccccgctcgcctttag

SEQ ID NO: 527 - DNA, 422 bp, Oryza sativa
  Clone ID: PAT_MRT4530_100481C.1
tttttggttttttttttttttttttttttttttttttttttttttttttttttttttttttttttttaacccggccaaaacaaagccttattgggtggggaacaaaggaacaggggggggggaacaaggaacaaaatccgatcaggcgggcccacgggaccaccctgggggggccaaacgcaagggctccggggaaaggaaaaaaccccttacatccatcaccggggatatgcataggggggctaagaggggcgggaagcccccctggcttccctggggggcagggtttaaggactgggcaccgggctttaatacggccgggcacaacttggccgggttggccgggacgtaccggaaccccgggggggggcccaagggctcattcccccgggggccaaggggaaggggtgtaaagggagggg

SEQ ID NO: 528 - DNA, 532 bp, Oryza sativa
  Clone ID: PAT_MRT4530_100482C.1
gttggttcggtccgcgggtagcgtgattcggccagatctggcgtctgtgtgtgtggagaattcgagggttttgtttgggtttgtggggggagtaaatccggacgaatctgtggtggtttgggggggaattcggtgtgtgtttgagttgatttgagttcgtggatgattccgttggatattgataggtcctagttctgatccagaagtggcgcctacgcctttgctgtagcctcaccgatccgccgccgccgccgccatgaagttccgctctgattcgtcaggcggcgacgagccccgcgctccggctgccggcgacggcggcggcggcggcgacgagccggccaagaggcagcggaccgatccgtcctccagttcgagccagggcgaggcctcctcttcctcgcagccgccaccgcagcagcagcaggaggagcagcctccggaggatgcgggagagggcgagcagccgagggttccggatctcggggaggacctggtgttcgaggtgctgcggcgagcggaggcgcggacg

SEQ ID NO: 529 - DNA, 447 bp, Oryza sativa
  Clone ID: PAT_MRT4530_100483C.1
atgggcgccacacacttgcacgtggcgtctgcgccctcccacaccctcgctcccctgctgctgctgctgcgtcgtcaaactgatgcccacctgagcagatcgacgagaggtgcgcgcgtctcgggcggagccgacgccgacgccgacgacgaggagcaagtgaacaagcgcatgtgtgtgtggacggtggatcgggtgattctcctgctgcgccaccatcgcatcgtgagtcgggaaacatggagttttggacggtgcgccgtatccattctccggcttctcgccgtgtccgagaactccagtacacgcaggcagaccgtcgtgcgatcggcctacctaatcctgcttcctgttcttcaggctttcagctggacggaccacgcatcacatactccatacctggccttaattgctactaccagtagagtacatatggtttggttgatc

SEQ ID NO: 530 - DNA, 1074 bp, Oryza sativa
  Clone ID: PAT_MRT4530_100484C.1
atggcgatctcccacctctcccgccgcctcctgagccccgccgccgagacggccaggcttctccctaagccgcatcccctcctcttcctccacccgcaccgccacttctccgctccctcgcaacccgatggcggcggcggccccgctccggtgtccccggagtcgatgaagcaccaggagatcgaggggcccacggtggagcgcgacacctcgccgctcgcggacgagacgcggagggagctcgacgcgctccgcgccgccgtgcagcggatcagcggctccctcgcgctcctcggcggggcgcacctcgccgcgggcgcgtggatcgcatcgggcgcggcgcccgtcggcgtggggtcggccgcggccgtgcagggggtggtggcgttcgcgttccccttcacggccgccctggtgctgcgccgcgccatcaagcccatcgccttcttccagaagatggaggccaacgggcggctgcaggtgctcacgctgtgcctccaggccacgaagaatgtgaacctcatgctgctccgaacgcgggtggtcgccatctcgtgcgctctcggggtgtctgtcggagattactcttcctatgaccactatgttaatggaagtcaaagcaatgttacaaaataccttgcagagctaaaccgcaaaagatactttctttatgagaccttcaatatattcaacaaatggtatggccatataggccttgcaaatcctgctaggggaaatttaggtatcctccttgggctgagatcaagcctatgccaccattatcattttcctcttgcacaagggtgggaaaatccttatgttattggttataatgttcttgaccttgcaaggccaagattaatcttctgtttccttgatgagttgcgagtttgcgacattcctgtcaagctgatacatttgtcatggttaacgagaaagaacatatatggtgtatttgtttctgaatcctgcgcatggcagcatgcttctttgtctattgttatcattgatatgacttatgaatcaattgtggtggtcattctgaatcacatgctctacactctcactaagtaa

SEQ ID NO: 531 - DNA, 349 bp, Oryza sativa
  Clone ID: PAT_MRT4530_100485C.1
atgatgtttggttgtaaaaccactcggttcttgactacatgtttaagcggcacaatacagacatcttcaaacaattcagacccatctgtgtcctcaatgactgttttaagtttctgagtaaagtggtcacgctcagactcacagaggtggctaatgacatgatttctatcacccagacagcttttatcctaggtagattcatcctagagggttgtgttatccttcatgagatcttgcatgagttgaaatccaaaaaacagagatgtattatttggaagattgactttgaaaagcatatgacaaagtgagctggtcctttgtttttgaaatcttgaaacttaagggtttt

SEQ ID NO: 532 - DNA, 1115 bp, Oryza sativa
  Clone ID: PAT_MRT4530_100486C.1
tggcagaacagcacaatgcgggtccccccggcgcctcaacagaccaaaagaaaagaacaattaaacgttgaagcactcacagaaattcaggtatctgatatatttgtttttacatccctgatacagatagtatggaaaaggtgctgttcaagatgtaaacaaaactaacatgctgaggctaatccatctactataaatgtgttttgtttatgttaagagaggttttgagtaaccgatatagaaatagacaaatagctgggaacctataattcaactgtaagttctgcacattaacgtagagcagaactagaacctaacccagcaacgggtgcactgcgccatgcagtcccctcggcagtccacattgtaccccaaaacttttggattccttaaaagaagactccggagtgtttttccatttattccccagtcactgtccagcttgcctacattcagtttcacctcgctgtcaagatcacatccaagtacttctgggaatttcttcagcaatttgcgaaggtcatcatcggagagcccaagagttctaatgtagttcagtactccactaaccacctcagcatttggaacctccttctttctctcttcactccagtatggtgaatgaatccatccaaatgccttcttcagcattttgtcggcgtcttcaatggagtaatccagtgatgttagtatctgtttggcttcttcccatgttttgttgtcaccagcatcgacaacggtagcttgagcttgatcagcggagaatgtcctccattttctctgagtcctactattttgagtttttccaaattcaatgtttggctggatagttaatcttcctccatatttcttcttggaaaatctcgcatttggtgaactaaagagatcacagcttggagagaggctgatcgcagcagtttcagtagcagttaagaaaggcaatgatggggatttcgccaacatcgcacgcacaggagggaggaaccgcgcgcgaatctggccgcctcctgattcctgaaggctttgctcttgctccgctagccggttgctagctcctcgaggagaagacgagttgtgtctgtgtggctgaacccacgcgtccgcccacgcgtccg

SEQ ID NO: 533 - DNA, 450 bp, Oryza sativa
  unsure (1)..(450): unsure at all n locations
  Clone ID: PAT_MRT4530_100487C.1
cggacgttggtangaatttaaggagggtattatggggactctaataatatatnaggaggtaggaggtctatanaccccccgcccccacgctgtctccgcccctgtaccaagccttcattgatttactcatcagttaccaaccgagtagtagcaagtnttgacagtccagtgaatgatgcattgactgtnttggtgcttgcctatgacaactgtaaccgatggtgtgcaataaaagtgcccaatcctgtagtgagcgaagaaaagttgctttttattaattgaaaaaaaaatatcacatgaatttaaagtttgtgggtctttgctagtggatatcgaaagttaaatggaaacaagctttaggaacacccntaaaaaaattaantaaattttatttaaaanggccatcggtcatnaatttatttttanttattttttnagggcccaaagggg

SEQ ID NO: 534 - DNA, 246 bp, Oryza sativa
  Clone ID: PAT_MRT4530_100488C.1
atggctgacaggagcagcgggggcatcctcccgtgccgctcttcggcaaggtctcatggcacaactcgacgtcaaggagttggaggaagacgatgggtcccatgtagatctggaggtgacgcggcttccattcgcccgagcagtgacaacaacgtagctgagggctggcaacgatggggtgatgaagctctgggagagtggttattgcttgcttcaatggagataaaagggtccgcagtgtcctag

SEQ ID NO: 535 - DNA, 582 bp, Oryza sativa
  Clone ID: PAT_MRT4530_100489C.1
aaaggaaaaaaaaaggctttatcctcattagccaaaaaacgggacagtccatagcaacaaaacaattgcttgcaattaatttatttaattattctttacccccaaccccccctaaaaggattctgccccattaaaaaccccttggaacctcttgtattggatgggagggaatgcccccaacccatcccctttattatgctggaccccctgaccctttttttttgaaaagcgaaatgcatttgctaaaacatcatttgggaaaccccggaaaagggaactctttcctgcaagggggcttaccaaaaagttaggattggccttgaatgcaatggaaccccatccttttttttgggccttctttacaacggcataggggtgggggaaaaaaaagcaactgcccccgggaaaactcgccggaaaacactggctttccatgtgggggggacaacttgaacccgggcacggccttgagaaaaaaacaccaccctgggagcggttgatgttccaaaagggggaaaggagggcattctggaataaatttactttgactgccctcatctgtacaaaactaaaaagggggaa

SEQ ID NO: 536 - DNA, 481 bp, Oryza sativa
  Clone ID: PAT_MRT4530_10048C.1
ttcgaagctgacaaccaattctatccgcttttggaagagttcttcggtgattcgttccttctcacactcttcttgttgtaactcggtctcggtttggaagtaccactggtacactgctggatacgtctatacgagtgtgccaaacgtttcgatgaaagtctgctctccttcgattccgaggtgttgtacttcgacctacgattcgggatcgtgttaactttgcactctaggaaggttgtctacagagtacaagtagatatcctaacgcacagggatgattaggttaattaaaacataacactttatcgacagacttgacaatttttattcttgaaacatgtcatcaccattacaacgaaaataaacgaagttttttgtgatcaaccatttcaaatatgatggatatagacacactacacaccacagacaagtcttacgatcttgatacataacattaccgacttaaatacttttttttttt

SEQ ID NO: 537 - DNA, 1332 bp, Oryza sativa
  Clone ID: PAT_MRT4530_100490C.1
gcacgcggcggcgtgcgccgcgccaatatgcagccgcgctgtacgctcatccacgccgtcgccgtcgtcgcggcggcggcggcggccgcgctgctgcttcctccgctcgccgccggccagccgtggccgacgtgcgacaccagcgccggcacgtacaaggccgggagcgcctacgagtccaacctccgtgacctcgccgccgcgctccgcgcgggcgccgccgcctcgccgtcggcgctcttcgccacgggcatccgcggcggcgcgcccgacgccgtctacggcctcctcctctgccgcggcgacctcagcgtctccgactgcttcgactgcggcacccgcgtcctcgccgacgtcggccgcgtctgcggcggccgccacggccgcgccaaggacgtggccctcgtgtacaaccagtgctacgcccgattctccaacaagggcgacttcctcgccgccaccgacaacgccggcggcgagacgctgctcatcagcggcaccaacatcaccggaggcgccggcgtcgtggcggcgtacgaccgcgcggtgaccgagctgctcgcggccaccgtgcggtacgcggtggaggagaacccggcgaggctgttcgccacggggcagcgcgtgggggacgacgcccgcgacccggggttccgcaacatctactccatggcgcagtgctcgccggacctgccgccggcgtcgtgccgcaggtgcctcgacggcgtcttggcgcggtggtggcaggtgttcccgctcaacggcgagggcgcgagggtcgccggcgcgaggtgctacctgaggtctgagctgggcgtcggcccgttctacaccggagctcccatggtggtgctgcgggcggacaaggtctagccagcgtcgtcgccattggcacccgatggaagctgcggtagctacagcctacagttctacgcaccaaaatggtggaggtgcaccctacctatggccgacaaagtgcaagcaaatctctacacgtatacctatactattattaggacattccgacaaaatgtccacgttcacccgagaaattttagtgaataaatctggacatcgatccagttaaaaccaaatttacaacggttcaataactaaaataatcgacatgcagctcttcgccaacttcaggtagaggttcacaaataaaattcagtagttgtgggagctttatcttgtgttggtgtgtattagtttgtgcttacttaatattttgttggtgcgcttctaaactcactgtgtaagattgcttttgtgtgaattctgtaataattggatatagctcattaagcaaaaatcgagatgttttattcc

SEQ ID NO: 538 - DNA, 189 bp, Oryza sativa
  Clone ID: PAT_MRT4530_100491C.1
atggtcgttgctgaggagttccgaacccagccgatgcattcatcaaaccttgctgctgaatcagctgaactacctattgcctcggtggcgtttgctgaattggctgcacaacctgctgccttggtggcgtttgctgaatcggctgttgctggattgggtgcaagagctgatactggtgctgtcggctga

SEQ ID NO: 539 - DNA, 297 bp, Oryza sativa
  Clone ID: PAT_MRT4530_100492C.1
atggcgaagcgaggtgaccaggcgctgtacaacgggttcggggccgccggaatgcatggtgacgccgtcatgcagccgccgacattcgggcaggtacgcggccaagaactcctgtgggttcaacttatcccccgattcattctgcttctttaccagcgttggaaacaactgcctgccgccgcgctcgcctacccccaccgctcctgcctgcttcgcctgccgccgccgcgctttcccgctgtcgccccgcccgtctcggtccgtcgaagaagacgacagaagagaagaaaatcttaa

SEQ ID NO: 540 - DNA, 2259 bp, Oryza sativa
  Clone ID: PAT_MRT4530_100493C.1
atggcagaggagagagaaagcttcgagagtcaatgggctccctccgatgtaacggaggaaaacttgaaagagatggtggcgcacggtgttcttctgacaaaggagatcatcggctggcgtccagcgtatggcgaagcattcccgaccccggacacgcacgaggtcgttgtattctcccatttcttttatggtggtttttctcttccaacttcgaaattctttagggagattctggagttttatggaatcagcttgcatcatctgaaccccaattccatagttcatattgccaactttatccatgcctgcaaagcttttctggggattaggccacattttgccctattccgccgcattttcttcctgaagccccagccaaacaaaagtaagccgtgcgttgttgggggagccggttttcagctaaggggcaccctgagccagaaatatttcttcatgcccttcaaaacatcaaacaagggttggcacgcaaactggttctatgtgcagaatcctgaactggcgcttcccgagtactcttgccttcctccagtatatcaagacacctggaactcgcttccaatgggagatgaagctgttcaagcgcttaccctgatggagcgcatgctgaaacttaaagagcaaggtctgcaaggggagcaaatcactcggcacttcatcaagagccgactggcgcctatcaaagaaagatcccgcaccgcctttgagtttgatggcaaaaatgaccccaaccgtgaagatccggagtccctcgaatttaagatcatgaaggagaggatgtataaaattttcttaaccggtattgtggtcagctattcgcacctactgccagtggtgccatataacgccttcaaccctcctccaccggaattttctctaatgaaatctgatcctccaaccgctcaatgccgctctcctcgccgacaaactggtcaggccagtggcagtccaaaattccagccaactgttcaaccgagcagcccaaagccgactaaccagtcgggctctcagaagagaaaattagtcttgagcgatgacgagggtgacaatgctgaaaaaactttaagcaaagaggtgactggaaagcagccaaaacaggctaacccgaagaagaaaacatccagccgtccgatacccaaaatcaggaagtcatccaggaagccatctgacattgctctatctggaaaagaccctgaatcaactgacaaggagactggatctacgaccaccaaagaaaccgggccgactgacgaaaatcacccgactggtgatcagccggcgaccgacaatgtaaagactggggatgaacccccgactggaaaccagtcggctgaagctgaggccgatgctaatcaggagcccccgactagagaccagtcgggtatggaacataataaggatatcccggaaacagatgcacaagcaagcagccctcccccaaaagataccgacaccggcccgaaatccagttcatctgataagagaatccatcttcggaacgaagcaaaaacaacaacccttgagaaactggtccctcatctcgggactctagaagcaactagaacccaactccatgaaaccagggagctagccagaaagacagaacatgatctcagggatcgaattgctgagcttcaagattccaatttcgagctgagtggttcatccaaaggatgtatcacagtacaagctgccaagatcaccgagctagaaaagcgaatcaaagctctggaaaaagacaagggtgaactaaccaagcgaagagactcagctctcaaggacgttgaagatcgcaaaattaaatctcaggctcaattcgaagtcttggtcaacaagattaagaagctagaaggagctagggatgaaggcacaaatgccgctacaccactcatccaagctatgttttttaataacaatggtccgagtacattcgacgttgttgaaatctttgacaagctgagaactactccggatacatactttaagaacatcaaagaagctggatgcatgggagcgagcatggcattggcgatgaccaagtccttgtatccgaagatcgatattgacgccatcgactgctttgcggatgggacaagtgaagaagatgcccttgacctcatcaacaatgcacagaaggctgccgacaagattgctgctgatgttgttgagagatttcaagacaacaatcttggtccgactgggtctgatgaatctgacgatgagaaaactgaatctaattga

SEQ ID NO: 541 - DNA, 2268 bp, Oryza sativa
  Clone ID: PAT_MRT4530_100494C.1
atggacctcgacaagtccacttctaccagcgtgtcgctggagaagttgcaggaggaaggcgctctccctggtcgcgggaccatggagagggaaccaggaggtactgaacctgaacctgtcctgggtcgcatggttgcggtcgaggattacattctttgtggttttgttcctcctccatccgagtttcttcttttagtcttgaatttctacggtctctctttgctccatttgaatcccaattctatcgccttcctcagtatcttttcccatatttgtgaggcctacattggggtagagctgtttcttgacctcttccgcttctactatgagttgcgttggatggaatccaacaggatagaaaactcggacccagtctttgttgttcttgaggaacaaccagacaagatttcgtcttggaccgtcaaacccgccttaaccccctcccttcaatccttcatcgatatcgtcgatgacctccgagtgcgagagttgtcgggatatgaagtcgctgccgacttcattggtctgaacagcgagaccgtagggcgccgcatcggtcaagtgatgatcagcggccctacaacagcgagcaatgtccctgttcctctctgcgagaattgggcagccgaacgtgaagctgcaatcaatgtcgtcccggaccccgtccgccgcttgtcgacttccctctgtcgagtctcgccgccgttcaccgtcgtctccctccacgccggtcggacctcttcgtgggcagatttagtttcaatgggtgtgggtacggggagtggaaacccgtcgggtccatacccgttgccatctctagtcgggccactcgtggaccatcaggcagcggcgtcgctgaaggaggacgtcgccaaggaggcgtctgatgccgctgctgctgtggccacaacgagcggcgtcaacgttccaaaaaaggggaggaaattctcctccgtgctcgggaatcgtcggaagacacccaccccctcggcctcagatgcatctcccccgcctccgcgacggcaacggcttgtaacgcttggcgagaaggcggcgcgggctaaggcggcgcaggacagatctggagggaactccagcgcgtctcccgtggtggcctcgacggatgtcgtggtcatgaccaggagccgtgaggcgacgcccaacggccctgtcggcgatcttgtgcctactcaaggctctcctgctgacatccttacctgggaggagctccaagtcgagatggggcgcatcctccaggccggagctcgcggcataagacatgagattgcggaggcaagggcggcggcggcatcgtcggcgaacgagcgcgccgacaagctggcgcgtgacttggcggaggttcgagaggacctccagaaaatgagggagctggtggccggcaacgagcggcaacggcaggggctcaagaaccgcatgtcagaactcgagaacaatctgtcggagatccgcggttcgctgcggttggcgcaccctgaacttgatctccagaagatcttgtatcagggggcggctagcaatgcgcgcaaggatgtgatggaagaaatcggcgacatgggggaatccattctcccactttttgaagaagatgtcgatgtcgaggatgtccagcagcgcgggcagcccaaattgccggtagtcgttccggcacttgagctcgagccgtatgtgccgcgggacggcatagaccaggatctgcccgaggagacggacgtggcgtcgactcctttagacctcgacagtgcgcttgttgatcgcgaccgtcgcatccagtactggaggacgaagttcgaggtcgccgaacctgagaggactatattggaagtgaagagggaccgggctgtggaggcgctccgaggtcgcgaggtatggttcaactcgtacctcaggagttgctgcacaaccatggccattatctgcagagagctccgagtacctcacggggatcccgaggagttagcggctggctacatctcgtggttgaacggggcttgtgctcaccttgaaggcatcagggggcgtatcgacgaggccctgaagcaggagtgtcgtcgatcgagccgatacgccggagggcacgtgctggcgtgtatacgggatcatcgtccgcagttgcacctcgagttccttcacgaagggttttcccgttctcggaggaatcctgcggagatagacaacctagcaaagtcgatggctccgctagcggagaagatcatccagtcaatggattggcgttggccttcctggtag

SEQ ID NO: 542 - DNA, 375 bp, Oryza sativa
  Clone ID: PAT_MRT4530_100495C.1
atggagattgatttgcgaattttgcatctccaccacgtcgaagccgtcgaggaggccatccggcagctgctgctcctgattaagaaactgctgcaacgacgacgacgacgtctccaagggttcttgccacaatgtgagatctccatggaaccggcgcggcccgtccacgccgctcgacccacggcgtcgtcgtcagctccctctgccattcacggcgccgccgggaggacggagcctgtcctcacctccaccggcacaacgccctcactgggggacgagctccctcacggcaccgccgctactcccgaccgccggacgccgccgccgtccccactgccgctccgtggtgaagagaaaggctgggggagagaatga

SEQ ID NO: 543 - DNA, 371 bp, Oryza sativa
  Clone ID: PAT_MRT4530_100496C.1
taccaacaaagtcggcagcgacttcatacccaattgtctgtagagagctccaagtacctcgcggggatcccgaggagtcagcggctggctacatctcgtggctgaacggggcttgtgctcagcttgaaggcatcggcgggcgtatcgacgaggccctgaaacaggaggagtgtcgttgatcgagccgatacgccggagggcacgtgctggcgtgtatacgagatcatcatccacagttgcacctcgagttccttcacgaagggttttcccgttctcggaggagtcctgcggagatagacaacctagcaaagtcgatggctccgctagcggagaaaatctttcggtcaatggactggcgttggccttcctgg

SEQ ID NO: 544 - DNA, 489 bp, Oryza sativa
  Clone ID: PAT_MRT4530_100497C.1
tccagcatccgccacctttctaccgatccaatcaggagcaggaggacaagggtatgttaacagtgaaatttggtaatcccaaaattaccatcggtttagagtcagtatcggcttcaaagttctagaatcagccgatgggagaatttcgatctccagcgaaggggtaagtcctacgttctgtcgggtcctggtgaatctatcggctacgttggtgttcttgtggatcttatgacatcggacctccagccgatgtgtgctttaaccttcggatcaatatttgttctactatttcatattgttagccgattggtttctactggattatattgctatattatattatcatcagccgattgcctttatatcattatccacattggacatatagccgattgcttaaaccctatcgctatcggctggtatcggtatcggctattatcggctatcggctggaactactccatcggcttgtcagccgatcggctgttt

SEQ ID NO: 545 - DNA, 573 bp, Oryza sativa
  Clone ID: PAT_MRT4530_100498C.1
atggaggcggacaagagcggggagggggagaaggccggcggcaagacgatctccttcaggtgctcggacggacaggccttccacatgccggtggccgcggcgatgctaagcacggccatccgcaaaatgttcgacaagtaccccagcatcgaccacggcggcgtgatcgagctcccccaccaaatctcctccggtatcttccccaaggtcaaggaatactgcaccaagcacgccaaggtcgacgacaagggcaaccccaccgtctccaccaacaccggcgcggcggcggcggcgtcaagcagcagcaccgacgacgaggaggaggacctcaagaactgggacaaggagtttgtcaacatggaggtgaagcccctccacgacctcctcctcgtcgcccacctactcgacatcaaaggcctcttccacatcacctgccgcaaggtcgccgacatgctcaagggcaagacctccgaggagatgcgccagatcctcaacatccgcaacgacttcaccgaggaagaagacaaggcaatcaaggagcagaacccctgggtcttcccggatccggagtag

SEQ ID NO: 546 - DNA, 455 bp, Oryza sativa
  Clone ID: PAT_MRT4530_10049C.1
attggtattctattgtttctttttgcatgtttttttttttttttactttgtttttgggcaataccaattacttctgttttttttttcaccctaacgaagtacagactaccacagggacaggcatggcttccttcccagattttgtacaggagacaggcctaacaaaaggagggtgggggggcaaaaaaaaaaaattgatttctggggatgcaccgtgggagagggggtcgataaggaccgcacacttttgcaaggcttcgtggaactcggactttttgacggttcccaggaccaaagttggtccgtaagagacccccaccgaggggggtaagattgcaggccccggagggagcagggggctgttttcaatcccgcctgtgaaggggccataaaggaaatcggtaaaagggtttttaccagtgagcgggtcccaaatttcaatttccaaggggaaa

SEQ ID NO: 547 - DNA, 562 bp, Oryza sativa
  Clone ID: PAT_MRT4530_1004C.1
aattcggaagcaaaactggaattaatagggccaggggaaacagggaaccacatcctttcaagccttatccctagatttaattaaaaattacacccggggaggggcggattaaatcataaccccttcaatgaaaaaaaaaggggggtcggaatacctttaaaaacctaaacaaaatatttttaagccatcctttcatacataaagtttggatgccccaaccctgttcaaaaacccaaaggaaagcaaacctaaaaaaacccgaactctaaataattggctgaccccttttgggtggcagccggggcaaccttttcaataactggggctggctttggggggccctcaaactcaactgggttgggtatttcaggagggcttgcccattgtatgagcccccaattcaccccctcaaagaaggggggctggtttatttccggcgccccacccttgtaggcaaaacggggctgggggtccttgaccaacaatccttttatcagggccctgggtgaaaagctcaccattggggattccgggaaccgcgggggctggccaacaacattga

SEQ ID NO: 548 - DNA, 972 bp, Oryza sativa
  Clone ID: PAT_MRT4530_100500C.1
atggggattattaactggatgcagaatcgactcagtactgctaaacaagacaagagacgaactgaagctgctgctgtggcctcgtcagctcgcagacgaggaggagggggaggagagagttgccgccaagaagaagctcgcgacgagatcaagatcgccggagatcacctcctctccatcggcacgctcgggaacgagtcgccgccgcgaccgccggcggcggcggcggcgacggcggcagaggaggtggcggacttcaccatcgaggaggtgaagaagctgcaggaggcgctgaacaagctgctccggcgagccaagtccaccaagtccggcagccgccgcggctcgacggcggcggagcacgacgccgacgagcgctcctcctcctcctcctcctccggcagccagctgctgctgccgctcgacaggttcctcaactgcccctccagcctcgaggtcgaccggcgcgtggcggcggccgacggcgagttctcgccggacacgcagatcatcctcagcaaggcgcgcgacctcctcgtcaacaccaatggcggcggcgccatcaagcagaaatccttcaggttcctcctcaagaagatgttcgtctgccgcggcggcttctcgccgtcgccggcgccgccgcccaccttgaaggatccagtcgaatcaagaatcgaaaagttgttcaggacgatgcttcacaagaggatgaacgctcgaccgagtaatgctgcggcgtcgtcgtcgaggaaatactatcttgaggataagccgagggagaagatgcaaagggagcatctccatgatgatgaagatgatgatgagaatgcagaagatatctttaaatgggacaaaactgattcagattgtaatcattgttctggagatgtagaccgagacgcacgattcaatgcgatcattattgtttgcacaatgatttcagatacagttggtgtacgtttcaccatatag

SEQ ID NO: 549 - DNA, 144 bp, Oryza sativa
  Clone ID: PAT_MRT4530_100501C.1
ccgtctgaggcggggtccacttgttactgtctatacctagctttaatgccatggatgatggtaatttgaaccctatgtctgaacatttggattgatcaatggaccccccccgttcttatggtgtaaaaaaaaaaaaaaaaaaaa

SEQ ID NO: 550 - DNA, 729 bp, Oryza sativa
  Clone ID: PAT_MRT4530_100502C.1
cgaatcgagtgcacggggcggaggcggcagttgtcgtcgtcgtcgtcgtctggtggccggagcggtagatccggggcagaggcaaccgacggcgagcgcgcacggggcggagacggcagtcgtcgtcatcgtccggtggctggaggcggcagatctggccgctctctccctctccctctctctcccgtggaaggtggcggcggcgaccccggaggcggcagatccggcgccgccgtggatacctggtcaaattgcccggatacctttggtctgactagtcacccagtgccaactgcactgttcaccgaccgaaaacactattcattattttctcaacaaacatttacctttgacaattattcatcacatcgattaaatcatcacatgatttcacaaaatcatgctctctggtcccaattcctgatcaaactatcagtcatcattttgtttgtacaagaatttcttccaggcttctcgtcggtcccagtggcaccactttattgttccgaacccctatcccatccactaagagcacccgcaatgctatttggtaaactaggaactgaacttttaagtaatgtgattcgatcaatatcacctcacaagatgttgctgtttttgctacagtggaagacgttggtgccggggaagatggtggagcaaatggaaaactgcagaggcttgctcgatgcaagaattcgtctacttcaatcagaggacgggattgga

SEQ ID NO: 551 - DNA, 154 bp, Oryza sativa
  Clone ID: PAT_MRT4530_100503C.1
aagatgttaaacaggagcatgcgaaggccgaggattctaagccaaccgccatacctagagctgttgggagctgaatgtgcttcatttgccttagattctggactcagtggaagccaagtgaagtgtgacatgctagcatgatggacgaagaacc

SEQ ID NO: 552 - DNA, 2490 bp, Oryza sativa
  Clone ID: PAT_MRT4530_100504C.1
ggtaagagagctctctcctgaatcacctctcttccccgcgatctctcctacttttcctctccggagaaagctacgtgcgccacccccaccaccccgccccgccgtcgtcgaggcgctggcgccgtcgggctggacatggccggagcgccgtgcctcctgcgcgtgctagccgtctcctcctgcctctgcctcctcgccgacgccgcgcgcctcctggcggcggcgccggcggaggaagccgacgcgctgctcaagctcaaggccggcatcgtggacggcggcggcgcgctggacacctgggccgccggcacgagcccctgcgatggcggcacctcggcgtgggccggcgtggtgtgcagcaagggcagcgtgctcggcctgcagctggagaaggagggcctgtccggcgagctcgacctcgccccgctcaagagcctcaccggcctccgcacgctcagcttcatggacaacgagttcgccggcgccatgcccgacgtgaagggcctcggcgggctccgcgccatcttcctgtccgggaacaagttctccggcgagatccccgccgacgcgttcgccgggatgggctggctcaagaaggtgtccctgtcgcggaacggcttcaccggcgccatcccggcctcgctcgccgccgtgccgaggctcctcgacctccagctcaacgacaacaagttcacgggcaagatccccgacttcccccagaaggatctcaaggtgttcgacgtctccaacaacgagctggatggggagatcccggcgagcctcaaatcaatcgatccacagatgttcgagggcaacaagaagctctgcggcgcgccagtcgacgcgaaatgcgaggcgccatccccagcggcaacgacgtcgccgccggcggcgacatccggcaagatcgggacctcgccgtctcccacggccgccgccgagacaaccacaacgggcacagtgccagccgaggaggggacgcagggcgcgacgaagcccaccaagggatcgacgtcgttcggcgtcctcgccgcgttcctcggcacgctggccatcatcggcttcgcggtggtcgagctccagaggcggcgagagtacaacacccagaacttcggccctgcagcttcaaccaagcccacattgccatcagctcccgcgtcaccagcaaccaagcccacgcacgccgccgccgccgccaccgccgcagccgccaccaccggaggaggcggcgcgcgaagcagcagcgtgagcgggagcacggcgaggggcggcggcgggaaggcgggggagcaagggcggctgacgttcgtgcgggacgacgacagggggaggttcttcgagctgcaggacctgctgaaggcgtcggcggaggtgctcggcgccgccaacctcggcgtgtgctaccgcgctacgctcaccggcggccactccgtggtggtgaagcggttcaaggagatgaaccgcgtggggaaggaggacttcgaggagcacatgcggcggctcggccgcctctcccaccccaacctcctcccgctcatctcctactactaccgcaaggaggagaagctcctcatccacgactacgtccccaacagtcggcttgctcacctcctccacggtgagggtcggagggtgaagaagctggtgcactggccggcgaggctgaagctggtgaagggggtggcgcgagcgctccaatacctgtacgacgagctgccgatgctgacggtgccgcacggccacctcaagtcgtccaacatcctcctcaacgaccgcttcgaaccgctgctcaccgactactcgctggtcccggtgatgaaccagtcgcactcggcgcagctcatggtggccttcaagtcgccggagcggaggcagttcggccgctcctccaagaagagcgacgtctggtgcctcggcatcctcatcctcgagatcctcaccggccggccgccgtcctacgacccgccgccgcagccggaggcggcgacggcgaacggcgacctcgtcggagcggtggcgtcgacgccggagggggagtggctggagaaggtggtggacgcggacatgatcaggaagtgggaggacgaggagagcaagggggagatggtgaagctgatcaagatcgggatggcgtgctgcgaggccgccgtggacagccggtgggagctcaagacggcggtggagagcatcgaggagctcaagggggggaaggaggaggacgccaacgacgagcactccttctactcctcgatcgacggcgacgaattcgccagcgtcgccatcaactaactcggaaatcaacccacattagcgcgcgcatcggttgtaattaagcagcatcaaatgatatgttaaaaagctcattatgtaaagtatacagaaatgatgcctaacacactaaatctgaactagcattctgtaaatcaaaaaaaactttttcgatttttttttcgttagcatttgactcatttcatttctcttttttttttt

SEQ ID NO: 553 - DNA, 1611 bp, Oryza sativa
  Clone ID: PAT_MRT4530_100505C.1
gggggggggggaaacgtaaacacttaatattcataccaaatgggctaatgtaaaccaaaaatttttggagaaatgccccccattgacacatggagcaacctattctgctgaacatgctcgtggcctcgggcccacctccgcgcggggctcctattcgcttaccctgtctattcacactactcgcgcgcacggggccctaccacagctagcaatggagacctcgtgcttccttacctccaatgcctcgccggtgaagagcatggtgatgccgtcgccggccggcgtcgtgaaggccaggccgcacgtgctcttcggcggccggcgagcggcgagctcgtcggtgaccacctgctgcagctacaacggcgagggcgcggcgccggcgatcgacccggactggcggtcgttcagggcgcagctctacttcaacgagcagtacgcgaagagcgtgaacccggcggtggcggcggtgagggcgacggcgacgacgccggagccggtgaagatcggcgacaagtgggcgcacccgctagtggagccggagaaggggtgcctgctgatcgcgacggagaagctggacgggtcgcacatcttcgagcgcacggtggtcctcctcctgtccgccggcgtgctgggccccgtgggcgtgatcctgaaccggccgtcgctgatgtcgatcaaggaggcgcaggcggtgttcgcggagacggacatcgcgggggcgttctcggggcggccgctcttcttcggtggcccgctggaggagtgcttcttcctgctggggccgcgggcggcggcggcgggggacgtggtggggaggacggggctgttcgacgaagtgatgcccggggtgcactacgggacgcgggagagcgtggggtgcgcggcggagctggtgaagcgcggcgtggtcggggtgagggacttccgcttcttcgacggcttctgcgggtgggagagggagcagctgcgcgacgaggtgcgcgcgggcttgtggcgcgtggcggcgtgcagccccgccgtgctgggcctcgccaccgtcgtcaagggcggactctgggaggaggtgcagggcctcgtcggagagaggagggtgtggtgactgattacttctcaagggtgaccattatgtaattaattaattaattaatctcttaattaactcgcaagtaaagtatttactcctttcagattaatgattttaggcttttagtcatcacggtaggtttaaagagggttgtatttgtatactctgtatcttgtactcttatcgttttgcccaccactacgcgaacacacctcgacgcccttctcgtctccaaaaaatacactcctgctttcttttttttttttgccggtgagttcattgggggctccattcttatgcaacaccccagttaagcccaaacagaaggaaattttaacttatttttacaaaccatccactaacaactcactacaccacttttcaagggggagtgagcaaccaaaaaaaaaaaacttagccctaccctactacacaatacattcaagcattgccaatccccagaggggaaaacccaaccaaaagaaattttcaagggggggaatttgaatttgagggttgatttg

SEQ ID NO: 554 - DNA, 806 bp, Oryza sativa
  Clone ID: PAT_MRT4530_100506C.1
ccggccgggagttgctttaacccaaacttcatcttcacgcctgtatgaataccagtcatagtgctcaaaatgtcggaccgtgttagtcaactcacaggccacctcaactaccccaaaggtctacttgcaggtcaagtagccatcattactggaagcggacaggggatcggcgcagaagcagcaaagttgttcgccaaagagggcgcaaaggttattgttgcagacatcgacgcagaaaaatgcaaggctgtcgctgaaagtatcaacaaggacggcggccaagccaaggccgtgcctggcgatattctcaaagcagactatgtcgagactctaattaagagtgctgctgactttggtgacggcaagattaacatcatcgtcaacaatgccggctacacttgggatggggttattcataaaatgacagacaagcagtgggataccattttagctcttcattgcactgctccatttactcttgtccgggctgcagcaccgtactttcgtgtgcgcgatggggctcctcgttgcattgttaacatctcttctacgtctggcgtgcacggaaacgcgggtcagctcaactatgccttggccaaggcgggtgtcactggcttcaccaaaacgattgcaaaggagtggggcccttcttttggtgtaagggcgaacactgttcgcgtttggacatatcctcacaagattgactgcggccaaggaagagggtgccttcgtaaagggtccagatggtgagaacatcgcgttaggtatccctgcgaaacagaagcaagctgcgggcgaggctgctt

SEQ ID NO: 555 - DNA, 799 bp, Oryza sativa
  unsure (1)..(799): unsure at all n locations
  Clone ID: PAT_MRT4530_100507C.1
gttttcgttaatttcccccttgccaagtttggttttgaagcccttttgggccaaaaaaaaagatttcccttcaaaaagtcttaaaccaaaagttgtaaaaaacgtgtagatctatctcctgcccaaatggcatatttttatatcaagtggtttaggaggtatcaatttctgaagttggctgtctgaaatgtcaaatgcatttatctgtagtcaaggttcaaagggattttaaaggatcttaatgatggaatccgagaatcttgtatttacagaagttgtagcatatgttgtgatctacctcctacataaaaattgttagcttttatcttgtagttngttgtcagtgctctcttgaatggttgttgcacagttttctgggcagatgcacttctctgttttgtgccatgttttaggccagctaaatggaagaattcaattttgttatctaaatgaaagttgtaattcttgttctgtagatgtcagaaatgacatatttttctgtgttatgtgatgtagaattggaggtatcgaattgttaatctatgctacttttataggaagattatcagtgatttgctttatgttgtttggggtgggatcccagcgtaggaagcgtatgtgtgattcttgaatgattatgcatgttgtttgagtctgagccggtgtttatttaggtgatgccacttcggaatgcaactagagttcatctcatcatcggtgaaggcaagtaaacgtagcggtggtttgctacagccttgacttgttatttgattctacctccacgttgaaattatatatc

SEQ ID NO: 556 - DNA, 835 bp, Oryza sativa
  Clone ID: PAT_MRT4530_100508C.1
tcgtttttctagatttctattctgtacttatttgggatgatttttttgttacttggaccaactagactctagagcgctgtgtgtgtcttttgatcaatgctgaacagtgcttataaaataagtgttgtaaacacagtgctgctttgatcatgtatttgagcctaacaatctctagatgcaccatgcaaaagtagttttttgttttgcccttatagctgttagacataagaatttccttactgttcgactaaaaagttctctttctacttcgataaaagaaaaacttgatgtgaccaggcaaacatgtcatcagtgcttcatataatagttgattctatgaatttttttttagtttcaggtataaaaacgacttggacttctatttcatggagtcatggttaggaataaggaatattctatgaatattccttattcccaaatttgaggactctagcatggacatcctaggagttcctacactggtgggtcgttctcaagaattcttcaagccgagttgtttctttctttttttttatctgatccttatctcacatggaaccatttatttccaggatattaactacatcattcagattccacagtaagctaattatgcattcttttatggctttcttttctcaggtaccgcccaacgatctaacacaattcttttctcagctaattatgcattcttttctcaagaagagctgcattcctggttctgctgtaactgagggttgatctgcctgatgttgatggagctactgcctgacgttgatgtgctgttcagctgttgctgttatgaagtgggaagctctattaccaaatgatacct

SEQ ID NO: 557 - DNA, 143 bp, Oryza sativa
  Clone ID: PAT_MRT4530_100509C.1
ggccatcaagggcggtgtgcgaggttagtgcccgcacagggcctccaatcggcgagagcaaccagcctgacatcatgttctgcgtactggagcagtacgggcccaacggcgagttggcatgctgcagcctccgtagtcgatcg

SEQ ID NO: 558 - DNA, 315 bp, Oryza sativa
  Clone ID: PAT_MRT4530_10050C.1
ccgaggcgtccggcgagctgacctacctcgtgcacaagcgctagaactgcctcgagaacggcgtcgagctctacgccaagaaggtcgtcaaccgcagcctctacgccatctcccatggctagacccttcgctacaagcttcttggacgcatggccggccacagggctcgctatggtgttcttcactgtgttatcgagagtggcgccaacgtttgcgaggtcatggtaagtggcaagctcacgccccacagagccaagtacgtgaagtacatggacggatacatgatctcatgtggtcagtcagtcaacgagtaca

SEQ ID NO: 559 - DNA, 363 bp, Oryza sativa
  Clone ID: PAT_MRT4530_100510C.1
atgggggaggcgcggcggagaagggcggcggtgttgcgcgcgatgggggaggcgctggggagaggagcggcatcgtcgcgcgctaggcggacaggcaggagggcgcggcgcggcgtgcgcacgcgcagggaggcgcggcagccccgcggccagtgcgcaggagggcgcggagcagcgggcgcacgcgcagggatcaaaacttttgtaattcagggggaggaggacacctgcagcttcgtcttcctccgtcagtgccttcgctaccgcctcctattcgcagaggtcgccgtcatcaccggcggcgccagcggcatcggcagggcgacggcggaggagtttattgtcccaaataatgtgttctaa

SEQ ID NO: 560 - DNA, 135 bp, Oryza sativa
  Clone ID: PAT_MRT4530_100511C.1
actacagtatcgtcttaagagaaacgcgctcattttgttgtagtgcgcacgatcaaatcaaacacacattcattatcatttgcagcattcaaaccattcgcttttcagtatcaaaacccctaattccgctactac

SEQ ID NO: 561 - DNA, 1484 bp, Oryza sativa
  Clone ID: PAT_MRT4530_100512C.1
gcttcttcctccatggacgaccttactgcccggcctttgcttgactctgtggtcgtctctaccactggggagatagagaggcgcagggagcgtttctctgcctgctccttagtagcttggcaagtcggggctttgggtgataaggtagaactcaatgtctttgctgatgacgtccgttctgccttccacattagacgtgctgacatccaatttaccaaattccaccccgaagacttctttgtgacttgctccaatcagagtgatcgggatgccattctccgccaaccaagacttgctacagcctctggtcgggtctttctctttcgtccttgggatgaaagtctccacggtgtccaagtccgctaccgctatcgcgcccgtctatgtatcgagggcgtccccatgcatggtcgtattgacgagacgatgacaaaggtgatcggtcgcaagtgtgctatccactatgtggaagagtactcccgtcgtggcaactacaatcgcacctacgacttgtggatgtggacagatgagccgagggctatccctcggggtggctccttctccatcaccgctgctaatgaggaggtgctaggggctttccactgatatccctcttccggaactagagccgcaccgcaaccctcctcttctgcccaacctgtctctcattcggatcaatatgctaaagctcctcctcttgtctccccctctgttgcggccacaccttgcaagtttccgtcccctctccctatgggtggcgacctccaacccatcctctcctgcagtaggcaaggtgtcacagatcgacaatttcatcaacaacatcgcaacaccaatccaatctcccctccttccggctcctgatgttaaagcgtggaaaccttcccgtgcaaaggtgaagatccgtgccattacctcagcccaacaccatagtgagcgtttgctctgtaagtgccatgcgggcgcaaagctagagaatttaggtcaggaaatactttcaaaaaatttcggtctcattgatgattatgcatccttcgatgataatattaaaaagttgtatttatagcgctacaagaagccgctctccccggcttctctgaagaccattgctgatctggttgaaaagggaggatgcaagacaatccgtctgaagaccttgaagaaaaaagcggctataaatgtgtacctgttcaactggaatgtaaggggtttgaatgccaaagctaaacaagattctgtcaaattctgcattcaacaacatggggcttcaattgtttgtctccaggaaacaaaagttgcggcgatatgtctgaccaacacatccttaatactcttggccaacgttttgtacatcaatatgcatatctgccagcagatggttccaagggcagggtgattttggcctgtgatgaaaacttcttctccctctctgatgttcacctgggtcaattaccgccgccgtcaccattccaaaccaggagcta

SEQ ID NO: 562 - DNA, 640 bp, Oryza sativa
  unsure (1)..(640): unsure at all n locations
  Clone ID: PAT_MRT4530_100513C.1
tttttntttnttntttttttttttttnntttntttttntttttttntttggaaaggaaatatcagtaaactttctccaagatatacatcgntagatgtaaaattaaaaaaatgattattacactgaaatgcacattaaatcacaacgaagctgcacagaagtgataattttacagacacatcaccacaacaattcaagaataaaaaaaattaacacacattccagcattcagtaagcagcgactgtggcagcagagaaatggggatgtggcgaccggcagtgttcggtgagcgacggtgtccatatggtctctgatagtatcagaatcaccatcagctattccgttcagataacagccctgaaaaattgaagaacaattcacaatctatcacatagataacaccagaaatttactaatgaaaatgaggaatgaaacacaatgtactattaagtgtcgtgcaaaaaaggatgcttaccgtgatattaccacctaacgacactcttcacaagtgccatgaacagctgtaaatttgattggggtatgtatagtcagagagcaaaggccactcaggaataccttgttgttaagcaacaacaatacgtttagcgcaaaggaacatttaggcacaattgttagaga

SEQ ID NO: 563 - DNA, 300 bp, Oryza sativa
  Clone ID: PAT_MRT4530_100514C.1
ctatcgagcatgatctgatgcaccacgccggcgtgatgcttgcagcggcggcgccgtcgccgcgcgcaggcacagcaccaccatgggagcagtaggcgtgggctccaacagcggcgaggcttcccggcagggcgcggaagagagccgctcacgcggcggcgggtgccctcgatcttcgccggcgccgccgccgtccgcccctgctgcggcggcggggcgggccaccacctcgtcctgcttgtgctcggccgtggcgtccagccggcagagcgcatccctcttctgctcgcctacagccag

SEQ ID NO: 564 - DNA, 156 bp, Oryza sativa
  Clone ID: PAT_MRT4530_100515C.1
atgtcggcgcactgtaacgtgtcgtggggctgtgtctcgtgggtacaattgtacatctctgatcagagtaaaactattcgaatagttgtgcccgcggttatgggcggcttcgtccatgccgtcgaggatgcctgtggagtggtgttcccgctgtag

SEQ ID NO: 565 - DNA, 363 bp, Oryza sativa
  Clone ID: PAT_MRT4530_100516C.1
tttctcaaatgtcattcgatatcaacaaatggccggaaattaacaaaaaaattggcgttaaaacccatgaaattgctaaggaatttaaaaatatccaacttcaccccttgcacttgattttggctctcttgctggatgaagaaggatttacttcaaatattatttccaaagccaatggaaattcaaaggattttgaacgcgctattaaaaaacgtgttactaaattaccttgtcaagatcctgctcctcctgagttgactttgcattcgtattgctagtgaggttttacagaacgctcaggaaattagtaaaaatgctggagattcacttattgctgctgataatttattacttgcttgtgct

SEQ ID NO: 566 - DNA, 550 bp, Oryza sativa
  unsure (1)..(550): unsure at all n locations
  Clone ID: PAT_MRT4530_100517C.1
nggacaaaactcccgcatcgcctcaacagctgctgcttcaactctctctctctctctctctttctccggcgagatcaccggcggcggcaggccacgcgacccgcggagatgactacttcaaggcgccttgctgacaggaagactgcaaagttccagaagaatatcaccaagaggggttcagtgcctgaaactactgtgaagaaggggaacgactatccagttggacctcttgtgcttggattcttcatatttgtggtcattggatcatctttgtttcagataatcaggacagcaactagcggcgggatggcctaaaaacagagctgattcaagagatttgtgatacattgcatccaatgcaagtggcagcggcagctaaaatgtttggtgttgtcagtgttttgtatgcatttacatttctgaagcatcgagttgaagtacaatgtaacagaattacctgtcttacaatgttgaatggattagtataatattataccgttcatctccagttaaaaaaaaaaaaaaaaaaaagagactagtcctcgtgccg

SEQ ID NO: 567 - DNA, 719 bp, Oryza sativa
  unsure (1)..(719): unsure at all n locations
  Clone ID: PAT_MRT4530_100518C.1
ccggccgggaacctttcagactcagactcagactcttaacaaactcgctcctataccctcacctcacacaacatcaatcatgtcgtggcaagcatacgtcgactcaagccttgttggcaccggtcacatcgataagggcgccatcatcagcgccgctggagacagcgcctgggctgcctctgccgacctccagctcaagcctgaggagatgaaggccatctctgccattgttagcggtgacgaaaaggccaaggacaaggcttttgccgaaggtctctacatcgccggtgagcgatatgtcatggcccgagctgacggccgaagtatctacgctcgatcgggtcgttccggcgtcgctgtcgcaaagaccacccaggccatcgtcgtcggccaccacggcgaggcccagatcgccggtaacgccaccaccaccgtcgagagtcttgccgactacctcatcaagtcgagctactagatattcgttggtgtgcaaggcaaggcgaagaaggggttttgggcggaattatctgtgagaagcgtcataaaaaacgctgtatgtccgtagaccggatagtcaacgcagctgtaacgagcttatgccaggaggagcgcctttgtttttagaacactggagttgggcttcgagcttgagtgtatgtgtgtacttggaggacatttncccggccagagatcggtcaacagaatttgtttctactacc

SEQ ID NO: 568 - DNA, 1383 bp, Oryza sativa
  Clone ID: PAT_MRT4530_100519C.1
atggctgtcgctcgcccgccgcgccccctgcccctatgctccgcgtccccgctttgctctgcccgcgccaggagcagccgtcgacgacaaggccgagcggcgtggagtcgtcggcgcccgcctctccccatccgcagccgtgctcgcctgccgctgccgccgctctcgcctgctgacgccgcctctccgcagccgtgctcacccaccgacgccgccgctccgccaccgcgctcgctgccgacgccgccgcttcgcctgctctggccgcccttctggtgcggcggcggctccttccccagcggcgacggtggccgattgaacagcgagctcggcccgtcgcggttctccgtggcgtccgtgcaccgcgtcggcatcctcgacgtatgcctcctcaacatcgaccgacacgccgacaacatcctcgtcaagaagtcgccggagagcaagtgcgccagcggcgacagcacgccgacgccgctggacttcctctacggcagcggcatcgccaagagcaagtacggcaggtacgacgccgagaagctccacggctccggcgtcgccggcgaggaccccttcgcgcgcctctacgcctcggtcgacgctgacctcaacgaatgcctcgagaaagcggaggcggcgaagcaggagaagaaccgcgccacggtggtcgcgctgaacgcggagatccgcggaacgaaggccaagctcctcgaggaggatctgcccaagctgcagcggctcgccctgaagaaggttaaagggctttcaaaagaagaacttgcaatccgtggtgatctggttactgccttacctgataggattcagtcaataccagatggaagtgctacatcatcaaagaaaactggattatggggatcttctggatctcgtgcaggaacagggattaagtttgactcaacatatgatctggagtggaagcttatatatgttggatcggctgaggatgaaaattatgatcagctgcttgagagtgtgcttgttggccctgtgaatgttgggacataccgttttgttctccaggctgatcctcctgacccgtcaaagatccgtaaggaagacataattggtgttattgtgctgctattaacttgttcctacatgggtcaagagttcatcagagtaggttactatgtgaacaatgacaacgatgatgagcagcttcgggaggagcctcctgcgaagctgctgattgaccgggtgcagaggaacatattggcagacaagcccagcgtcaccaagttccccatcaatttccatcctgaaaccagtgcaggcgcaggacaagagcagcagcagcaacagcaatctggttcacctgaaaatcacccaaaccaaggtagcaagcccaaccctgatcaatga

SEQ ID NO: 569 - DNA, 264 bp, Oryza sativa
  Clone ID: PAT_MRT4530_10051C.1
atgccgcgggtttccgccgcgctcctccggcgtcggccacctccgcccgccggccacagctgttgcgcccctcgcctcaaccgtccgtcgtcgcagtggaccgttgccggccagatccgcgcctgggtgggcaagattcaccaccgagctcgagtgacgttggcgaagagcggtggaccggacaagcccaaggtgagggtgatggagccaatgctggcgtgggaggaagcagagccgtgggagtcgaggctgtggcagcgatga

SEQ ID NO: 570 - DNA, 1813 bp, Oryza sativa
  Clone ID: PAT_MRT4530_100520C.1
ggcatactgaagagctggagaagaagagaagaaaaggcggccacggaatcgtcggccgccgccacctccgccgccggcgcagagctccgccggtatcggccaggtggctcttctcctctctcggaatcgaaggcgagcgcgcgctttaatttcttcatctccctccatcttcttcattggcggcggcggcggcggttttgcggcggcgcgtgcaggccagcaagaacgaagctaaggacagggaacaatgactgcttgttgaactaagctacaacaatcatgggcctcctggagctctttattacagcatgtgtgccggttctgaacatgcttctggttactggtgttggatcattcctggcaactgattttgttggcatactgaacaaagatgcacggaaatatctaaacaatatagtattttatgtatttaatccatctcttgttgcgacctatttagcacaaacaatcacattggaaggcttggctaaattgtggttcatgcctgtgaatattcttcttgcttgtacctttgggttaatccttggatggatcgtggtacatgtcaccagagcaccggctaggctaagaggcctcattttgggttgctgttctgctggcaattggggcaatatttttctcatcatcattcctgctctttgcaaagagaaaggaagcccgtttggagcacctgatgtttgtcacacttatggattagcgtattcttcactctcaatggctaacaccggtgtcacaatcgtcagtgatttgctgcagcttggtgctgtctttctgtggactgtcgcgtataacattatgcgagccacttcaaaagtggctgatgaagagagagcgaagcgatttgtatcatcaatgttcggagcaattgacttcaagaagatctttgctccttcaaccattgctgtgattattgggtttataattggaggaacgcctctaattagaaatgctattatcggagaaaacgctcctcttcgtgtcattcatgagtcagctgatctaataggtggaggagcaattccatctgtcacactgataatgggagggaacctcctcaatggattacgaggagaagcaagcgtccagccttcagtgatagcgagcgtaatcgtcgtcagatacattcttctcccttcgctaggcaccttgctcgtcaaatcggcggttcacctgggcctcatccaccctgatcccctctaccagttcatcctattgcttcagtacgccgtgccgccggcgatgaacattgggaccatcacgcagctgttcggcgtgggggagagcgagtgctccgtcatcttcgtgtgggtgtacgccctcgcctccgtcgcggtgacggtgtggtcggcgttcttcatgtggacgctgtcgtgatagatcgatcgatcgatcggacgccgcgtgccggcgtgaggaggtttcagggggttcagagacgacgacggcgagacgtacggtgcgttcctccggcgagacaggatgaagcgaccgggcaagatgacgccggcgaaagggcggcgcggctgctgctgcatcgcatttgcgtcgctggagaagatgcaacgcgacatctagctaaggcaattcatggcgttcgtgttcgttgtctcattccgagcaaataatgttgtgatttgtattactatctgtaattcggcgtgtgtgtttgccgccacattttggctaaattaatcgatatttgggccgggccgggatggcccaggatccagcgtgaatgtggacgtgtggagcatatgtgtactgtggttcatgaaataaacatgacagctct

SEQ ID NO: 571 - DNA, 288 bp, Oryza sativa
  Clone ID: PAT_MRT4530_100521C.1
atgattgttactgatataaaatatgtactcctccaagaggggaacaaaggagagggcaaattcaaagaccaatcaaccttcaacattgaagtatttgaatggctgcacaataacttatgtcttgctgagaggacaaagacggtcgaggaagaggtggcctgcaacttgaaattacaagatcatggtgttaacaatagaatttggcatcagactcgaataaggaggaaggagatcgagatggatttggtgttgaaacaagttaaactcgggatcggactgtgcatcggc

SEQ ID NO: 572 - DNA, 2174 bp, Oryza sativa
  Clone ID: PAT_MRT4530_100522C.1
gcgcgctatggactccggcggcggcggcggcggcggggcgctgaggccgtcggcgctggacctggtggcggcgctgctcacggggcggggacgaccggaggaggaggggtggccgccctcgctcgccgagaaccgccacctcatcgtcctgctcaccacctccctcgccgtcctcgtcggctgcggcgtcgcgctgctcgtccgccgctcctccatctccgcgcccgccgtgagggcgcaggagccgcagccgcgggcccccgcccccgcgaagaggaagcaggaggccgagcctgaccccgacgacggcaggcagagggtcgccgtcttcttcggcacgcagaccggcaccgccgagggcttcgccaaggcgcttgcggaggaggccaagtcgaggtacgacaaggccgtcttcaaggtgctcgatctggatgagtatgctgcggatgatgaggagtatgagcagaagcttaagaaggagatcatcgccttgttcttcgtggcaacgtatggggatggggaaccaactgacaatgcggcgaggttctataaatggtttggagaggggaatgagagaggtgaatggttgagtaatcttcggtttggggtctttggcctcggaaataggcagtacgagcattttaacaaggttggaaaggtggttgaccaactcctcgctgaacaaggtggaaaacgcattgttcctcttggtcttggagatgatgatcaatgcattgaggatgacttcaatgcatggaaggaacttctatggccagaattggataaattgctccgtgttgaagatgataaatcggcagcaccaactccctacacagctgcttttcatgaatatagagttgtattggttaagcgagaggaagcccggcatgtatcaataaatttaatgctcagtaatgatcatgataaatctgacatacagcatccctgcagagcaaatatggctgtgtggagggagcttctcatgccggcttcttacccctcgtgtattcactaagagtttgatatttcaaggactggtcttacatatgacactcaggatcctggtggtgtatatgcagataactgcacagagactgacgaggagggtgctaattggtttggcttccaccttgaatctgatctctccttcaatggatacaacgaggaagttactccactcgctggtgtctttgttgcaacctgattgcatactgcgatgactgtaacaagtgcgctagtgtatgggcaaacccctactggaaggatccataaaggagtttgttctacttggatgaagaactcgattcccttggaagagagccaagaatgtagctgggctccaatttttgttaggcagtcaaacttcaaactgcctactgatcctactgtgcctattataatgataggtcctggaactggtcttgcaccttttaggggcttcttacaggaaagattagctctaaaagagactggtgtggaactaggccatgccgtcctattctttgggtgcagaaatcgaaagatggacttcatatatgaggatgagctcaacaattttgttgagaccggtgcgctgtctgaattgattgtagccttttctcgtgagggtccttcaaaggagtatcgttcagcacaaaatgtcagagaaagctcccgagatctggaacatgatttcccagggtggttacatttatgtctgtggtgatgccaaaggcatggccagagatgtacatagagttctccacaccattgtacaggaacagggatcacttgacagctctaaggctgagagctttgtgaagagcctccaaacggagggtaggtatctgagagatgtgtggtaagaggtgattttcagcacaccaaaaacgcctgtattcatgaggcacaacattcgttcatatatagtagtacagaagttccttcaaggagcaatattgctggaagaatattgacacatgaccaagatgaaatgcttttagtagctcagcatttttttttcttctctcttttctttttttttccctttcttttatctttcttgagttccataagaggttttttcgactgtgtattatagtatgatttatatgtataatatgaggacaattttggcaataagcctgtgatagtgtgatgctaataattatttatatatatattcatattcatat

SEQ ID NO: 573 - DNA, 200 bp, Oryza sativa
  unsure (1)..(200): unsure at all n locations
  Clone ID: PAT_MRT4530_100523C.1
tatcgtcggcgaagtggcaccagaagcgagcgagggcacggtcgaagggtcggaggggaggaggggcaggctctccaggccaggcgtcgtcgaggtactggaggatgatgacgactcggcgagcggcgccgctctagagtatccctcgaggggcccaagcttacgcgtacccagctttcntgtacaaagtggtccctata

SEQ ID NO: 574 - DNA, 459 bp, Oryza sativa
  Clone ID: PAT_MRT4530_100524C.1
cagacgcgtgggcggcgacccggcactgtgtcctcgctcctctctccgcggtgatggtgctcatcgtcctgctccgctactgtctccatcaggtagatgctctccccgtcacatgtcgccctcccgcgaccccaagctcgaacgggaggtgcaagcggtattgactgcagacggacctgcgatcgttggcagacatcccgggcaaggactgtagatggcgcaggggatattacactcaccatgataacggatagtttcatgtcccgacagaggaagcacacatggctcaggctgccatgttcctaccatccaaacatgaccatgggcatgatgactaccaacctctctatgatagtgactcagacacttacatttgcagtggatgaacttcttctttttgccctttgttgcatctcagattcccttgacattgactccgctgatgtcatgggacatgct

SEQ ID NO: 575 - DNA, 1219 bp, Oryza sativa
  Clone ID: PAT_MRT4530_100525C.1
actcgttctcaccatgccgctcctcctccgctgctcgccggcggcgtcaccgcctctgctcccgcgccgccgcagcggctccctcctctccgctgcgccgccggggcgccggccgctgctccccgccgccgcaggccgcgtcgtgctgggttgcgggctggtgacgctggactacctcgccacggtggacgcgtacccgcggcccgacgacaagatccgcagcggcgagctgcaggtgtctggaggtggcaacgccgggaacgcgctgacaggagccgcccgcctgggcctcaacacgaggctcatctccaaggtggcaaacgatgaaattggaggaaccgttctttcggagcttaaggaagctgggattgatatatctcatgttatagctgatcagatgaagattcctattttggttgatgccgaaccagaaagaacaagggaagaattgggagaaatccttctgcaatatcctcgtgcatgcttcgcagttgtaacccttggagaaaatggatgcatgatgcttgagaggggcaaagatggtgaaaattatgaaactgagccagtagatatagagaatgtcgctgagtccttaaggctgaaagtagataaagatgatatcctgccaacttgtgtatcatctaagccagctggcagccggtcaacgtggctgaccaagcgccacctgcaggctgcggccgacatgtcctctgccaccgccgccgccggcggccgctgccgacatgtcgaggtgcggtccacgacagcagcaagtcgtcggaaagtatgctactatgtcttgtttccggcaagagattgcaacttctccgagagacctggcgaatccaaaccactgcatcgtccattgtccatggcttcgagctcgtcgccgccgccgccgtgcacggtggccgccggcggcggcatcgccgtcgagaggagcccgccggagtctcgcctgtcagagctcggcgccaggtggggcggtggtccggggaggatggcgctgagctacggcgcgcggcagacgtgctacatcgtgagagggaaggtgacggcgacggcgacggcggcggcgtcggcggcggagggctcgccggagaatgggcggcgcgtcgagttcggcgccggcgacatcgtcgtcttccccaagggcacacggtgcacctggcacatcgccgccgccgtggacatgcactacgccttcgacccttcctga

SEQ ID NO: 576 - DNA, 761 bp, Oryza sativa
  Clone ID: PAT_MRT4530_100526C.1
cgctgcgctcgcttctcctctgcccccatgcgcgtgcgagagagatgcgccgcgggcccacctcgcttctccttctccctcgcgcgcgcgcgccagctgcgccgctgtcccgccagccggcgcactcgcttctcctccccgcgtcgcactgcctcccgccttcccccatcccccacgcgccagccatgccgcggagctgcctccggcctctcccaattcttccagcggcggcggctggacgtgcgagcccatcgccatggcgggcgggaagatccagaagaagcggcacggcggcggcggcggaggaggaggaggaggaggaggaggaggaggaggaggcgggggtgatggcgcacggctgcagggagggatcccgttcgacaagtccaaggggtcctgcggaacccgtcgctggtggactccatcgttgagaaggccggcctcaagcccaccgacaccgtcctcgagatcggcccggcacggggaacctcaccaagcgcctcctccaggccggcgtcaaggccgtcgtcgctatcccacatggttctcgagctcaaccgccccatggttccagttctttaatcgttttctaaaagtatattacaagcctaactaatactaccattcttaggtcccgctaattttacattaccttttttgctccagcatagtgagattagaaattatcagtatacaattctgtgagttgtttcttcgttcttacatatagggtgaggattataatcatttggttaattcct

SEQ ID NO: 577 - DNA, 1045 bp, Oryza sativa
  Clone ID: PAT_MRT4530_100527C.1
gggccgcccctgaataaccggctctatatcatcctcctctccgacacagcccgccgccgcgtccagtgcccagtacgacccgcacctccacaccattagccatcaacgaccagcatctcggctttgctcgccttctcgaagcttctgctgccatggcggaccagctctccgaagagcagattgtagagttcagggaggccttcagcctcttcgacaaggacggcgacggttctatcaccaccaaggagctaggaaccgtgatgcgaagtctggggcagaacccaaccggaggcggagctgcaggacatgatcagcgaggtggacgcggacagcaacggcaacatcgaattcaaggagttcctgggcctgatggcgcgcaagctgagggacaaggactccgaggaggagctgaaggaggcgttccgcgtcttcgacaaggaccagaacggcttcatctccgccgccgagctccgccacgtgatggccaacatcggggagcggctcaccgacgaggaggtcggcgagatgatcagcgaggccgacgtcgacggcgacgggcagatcaactacgaggagttcgtcaagtgcatgatggccaagaagaggaggaagaggatagaggagaagagggagcacgacggcggcagcaggacgaagagtgcagggccctccgccgcgccggcgagcaagcgtggccagaagtgcgtgatcctgtaataattgagccagcactgagattctcatgagtcaatgagctacacgaatgatgtgtgttgttgtaaaatggcaaaacaattgtgtgggcgtgtagtatgatgctccactgaaagatcgagaaataacactggccagtgcaagttcacagccgtagtccgtagtccgtacgctgtgggcccgtgccggcccatgggcaacagaccaaaacttactctttctatcctcgtgtttcctaaatttggcagtgctaaatttcatagcaatactaaaatcaaatttaaaaaaaaaaaaaaaaaaaaaaaaaaaaaaaaaaaaaaagggcggccgc

SEQ ID NO: 578 - DNA, 432 bp, Oryza sativa
  Clone ID: PAT_MRT4530_100528C.1
attttgttttttcttttctttgttttctttatttgttttgtttttttctttttctttttttttttctttttttttctttttttttttttttttttttaaattaaaataaattttttttttttttattattaaaaaaaaaaaaaaaactttttttttatttaaataacccaaagtttcaaagggaaaaaaagaggaaatcggaagttattttaaaattccgaaccacaatacggggaaaacccattacaaaaaacccccaaaggggggaaaggcccggggggccccaaagaaccgaggggggaacccatatctaaaggggcccttaaaaaccaaaaaaactggagcttgggccaaattcccgccaaaggagagaaccccaaaccgggggaaagtgaaacctggggggctttgggccgaaaaaaggggaaaggc

SEQ ID NO: 579 - DNA, 621 bp, Oryza sativa
  Clone ID: PAT_MRT4530_100529C.1
atggcagagggaaaggaggagaccttggatgttacagcggcggctgaggaggacgtcgaggaagttcgcccagagatcggcgccagcgccagcggcctccgtttttctctctccgccgccgtggcggtggcggtgaagtgggagtcacaggtgttgaatgtgccgtttggcttggagcagcggcggtggacttgccactcaaccactaactccacagaggtagcgctggccgcacgacagcgacggtgggttgcccgaggaggagatcttcgcgtctacgatgccggtgaggaggatgcgatattcctggcgccggcagggatgacccatggcgatgcgcagcatggagggctgcccacagcgatggggacgacggacagagggttggcgttccgatctggacagcgtcaccggggcggcggactggacgacagagatcgcgatcggtgtacgggcggcgtggaggcggcgaaccagcgaggacgggaagatccaaaggggagagggaaagtgggagtaaaacgtagacactcacaacacacgcacactcacccttatgaaggcacgcacgcataccctacccctatgagcatcttcgaagactgggccggcaaatactag

SEQ ID NO: 580 - DNA, 3443 bp, Oryza sativa
  Clone ID: PAT_MRT4530_10052C.1
ttaaccttctctcagttagctcggctattgatcaactcaagtgcattgttgtatttgatgagaattcttgtctgttccaggagaagaggactgggaggaggattgggactggagtcaggcgtgatgggttgtggtacatcaatcatgaggaactgggactagctgcggtggttggagatgttgagaaggagatcagtttgcttcactgtcagttaggacatccatcttttgagattttgagtaagttgtatctagacctctttagtagagtggataagcatagattggtgtgtgatgcttgtgagcttggcaaacatactcgctctacatatgttggaatcggtcttcgtaactgtgagcccttaatattaatacattctgatgtttggggaccatgcccagttacttctgtgagtggtttcaagtggtttgtcacctttattgattgtcacactcgtatgacttggatttatatgcttaaacacaaaagtgaggtccttcgttgcttccaagactttcataaattagtgacaactcagtttgatgcaaaagttaagattattcggactgataatggaacagaatatatcaataatgaatttgtgtcatatgtctcagatgaggggattattcaccagactacttgtcctggcacccctcctcaaaatggtgtagctgagagaaagaatcggcatttgctagaagtggcaagatctctgatgttccagatgaatgtaccaaagtatctatggagtgaggctgtgatgacagcagcatatcttatcaatcgcatgccttccagaatacttggtatgaagtctcctgccgaacagttattgggtaagcgagagttcaaggttccccaaagtcagaaggggtataaatgttgggatcccattgggagaagactgtttgtgagtatggatgtgacatttcgtgagtttgagccctattataaaagtaaaggagatcttgaccaatttcttgaggaattctcgactgtcatggaggttgatagtcgagagggggagagagagagaggtgacatacatgaaaaaaatgttggtgacaagaatggagaggcagtagtgattggatcaataccatgctctattgatgatgcgagtaaagtagtggaagtcattgaagatacacaagatgaggatagagaaatggtccctcatgaagaggatggagaagaaggagaagtagttgttgggacaattccatgtcctatggagggagccgaaagggtgaaacaaaaggatgtgctggtttaccaaaggaggcggtttgatagtcagggggagaaaagaaaagggttagtgcaaagtcaaattgaagagttaccacacccaaaatgtccagtccctgaatcctcccagagtctctctcctccagcctccttggcttctcttgagacaattggtaatacttctccaactcttgaacatgtagaattacctcttgcacaacgtagagagactagatccaatgctggtagacctcctatacgtcttggttttgagcatcttagttctatgcatgacattgcaaactatatcacatattctcatgtttcaccagcatacaaaacatttattgcatcattacagacaatgcctataccaaaggattggaagtgtgcaaagcaggatccaaagtggaaagatgcaatgaaagaagagttgaatgaccttgtgaagaataagacttgggagcttgtaaaacttccaccagaaaaaagggcagtgggatgtaagtgggtctttacagtgaagcaaacccctgaagggaaggtggataggtataaagcaaggttagtcgcaaaaggctacagtcaaacatatggaattgactatgatgagacatttgcaccggtggcaaaaatgggtacagtgagagctttggtatcttgtgcggtgaactttgggtggccccttcatcagcttgatgtgaaaaatgcatttctccatggtgatttacatgaggaggtctacatggagatccctccaggatttgggaatagccagacagttggaaaagtatgtaaactcaagaaatccttgtatgggttgaagcagtctccacgtgcatggtttgataggttcaggcatgcagtgtgtgatatggggtattctcagtgtaatggagatcacactgtcttttacaaacatagggggacacacatcaccatcttggctgtgtatgttgatgatatagtgatcactggtgatgatgtagaagaaatcaggtgtctaaaggaaaggctgggaaaggcatttgaggtgaaggatcttggtcctcttcgctacttccttggaattgaaattgctcgttcatcaaaggggattgttctatctcagaggaagtatgttttggatctattgacagatacaggaatgcttgggtgtcgtgcaagtactacgcctattgataggaatcaccaattgtgtgctcaatcaggtgatcccgttgataaggaagcataccaaagactggtgggacgcttgatctatctttgccatacaagacctgatatttcctatgcggttagtgttgtgagtaggtatatgcatgatcctcgaactggtcacttggatgttgttcataagattctcagatatctgaaagggactcctggaaagggattgtggtttaggaagaatgagcatctaaatgtggaaggatattgtgatgctgattgggcgagtagtatggatgatagaagatctacatcaggttattgtgtgtttgttggtggtaatcttgtttcttggcgaagcaaaaagcaggcagtggtggctcggtctaccgcagaagcagaatacagagctatggctttgagcttgagtgagatgttgtggatgaggagcttgttgactgaattgcgagtgctaagaagtgacattgtgatgcttcattgtgacaataaatcagccatcagcattgcaaacaaccctgttcagcatgatcgcactaaacatgtggagattgataggttcttcattaaggagaagattgatagcggggtgcttagtttggagtatattaagtcatgtgaacaactagctgattgtctaacaaaggggcaaatcgtatacagctccggtggccggattaagcacacggcagctgttccaatttgtggctacacagaccagatcgaggtgtgtgcacaacaccttgtggccaaccgggattcctatcgtcttaagcacattgcctaccaaatccatgatatgaacatgtgcctcgtcgtctctaaatgtggccaagaggagcggctgtctgtggtgagctgcgtgtgccttgatgaaaaggggatcggaggtcagggaccgccatgcctggcagataacacggaggcagcagagctccttggctgggagccgcaccaggacgtcgaacagcacgtccaaagggaggatgccagaatttga

SEQ ID NO: 581 - DNA, 3026 bp, Oryza sativa
  Clone ID: PAT_MRT4530_100530C.1
ggaaaggcctggcttggttgaatgatggcgggcgcctcctcctacttctcgttgcggaggctactcctcctgctgctgccgctggtaccgttgctcggcgccaccaccgccgccgcagcgggcgccaactcgagcgtcacgtatgaccaccgctccctcatcatctccggccgccgccgcctcctcatctccacctccatccactacccccgcagagtccccgagatgtggccgaagctggtggccgaggccaaggacggcggcgccgactgcgtcgagacctacgtgttctggaacggccacaagcccgcccagggccagtactacttcgaggagcggttcgatttggtgcgattcgcgaagatcgtcaaggacgccgggctgtacatgatcctgcgcattgggccgatcgtcgccgcagaatggaccttcgggggcgtgccggtgtggctcgcattacgcgcccgggacggtgttccggacgaacaatggagccgggtcaagtctcacatgacgtagattcacgtaccatctccttgtcagacgagggatttggagaagatttatgccctggggtcaccaaaacactctagctcaggttgaaaatgaatacggagatatggaacaagcgtacggagctggtgccaagccatatgcaatgtgggcagctagtatggctctggctcagaatactggtgtcccttggatcatgtgccagcagtatgatgcgcctgatccagtgataaacacttgcaattcattctactgtgatcaattcaagccaaattcaccaaccaagccaaaattttggactgagaattggccaggatggttccagacctttggcgaaagtaatccccacaggccccctgaagatgttgcattttctgttgcacgtttttttgggaaaggtggcagccttcagaattactatgtgtaccatggtggaacaaatttcggtcgcactactggagggccattcattactactagctatgactatgatgcaccgatcgatgaatatggccttaggagacttccgaaatgggctcatctaagggaccttcacaaatctatcaaattgggcgagcataccctgttgtatggtaattcgtcatttgtttctctggggcctcaacaagaggctgatgtttacactgatcaatcaggaggatgtgttgcattcctttctaatgttgattcagaaaaggacaaagttgttactttccagagccggtcgtatgatcttcctgcttggtcggtcagtatcctgcctgactgcaagaatgtggcgttcaacactgcaaaggtgcgatctcaaactctgatgatggatatggtccctgcaaatttggaatcatcaaaagttgatgggtggagcattttcagagagaaatatgggatttggggtaatatcgacttagtccgaaatggatttgtagaccatattaatacaacaaaagactctactgactacctatggtacacaacaagttttgacgtagatggaagtcatctggcaggtggcaaccatgttcttcatattgaatccaaaggccatgctgttcaggctttcctgaacaatgagcttataggtagtgcatatggtaatggctcaaaatcaaatttcagcgtggaaatgcccgtcaatttgagggctgggaagaacaaactttccctattgagtatgactgttggtttgcaaaatggaggacccatgtacgaatgggcaggagccggcattacaagtgtgaagatctcaggaatggaaaacagaataattgacttgtcttccaataaatgggaatacaagattggattggaaggggaatattatagtttgttcaaggctgataaggggaaggacataaggtggatgccacagtctgagccaccaaaaaatcaaccaatgacatggtacaaggtaaacgttgatgttccccaaggagatgatccagttggattagatatgcagtctatggggaaaggcctggcttggttgaatggaaatgccattgggaggtattggcccaggataagtcctgtcagtgacaggtgtacttccagttgtgactatagaggaacgttttctccaaataagtgcaggagaggatgtgggcagccaactcaaagatggtaccatgtcccacggtcatggtttcatccatcaggaaacacccttgtgatttttgaggagaagggaggggatcctacaaagatcacattctcaagaagaactgtggcaagtgtgtgctccttcgtgtcagagcactacccttccattgacttggaatcctgggataggaatacccaaaatgatggtagagacgcagcaaaagtacagttgtcttgccccaagggtaaaagtatctcttctgttaagtttgtgagttttggaaaccccagtggaacctgcagatcttaccaacaaggaagctgccaccatccgaactcaatatctgttgttgagaagggaacactgggttgggcacataggagggcctgtctgaacatgaatggctgtaccgtctccttgtcagacgagggatttggagaagatttatgccctggggtcaccaaaacacttgcgattgaggcagactgctcttaaggagtttaactcagcaatgagatccatcgctacagattcgctcatcaacttgaagcttatagtgcttggtacccttgacgggtcgccattgtggatgctaaccatccacccgagcaaaggaattaattgcactgcattcccaggtttgcaatggactactgtatgattcagaaacatgaaggcatgaacgagcttctatgagcccaaaaggaatgggatataatataatatgatatattgagatgcccatgaaacatttcataattgtcattttcttcgataaatagacttgctgatatgtagacaccagatcgcactggagaaagttcttggattgctctcttcatgttgtgtcgcgtcatgatatttctggattaacctgtgaatgaatctatggttgaggcagcaggtggtc

SEQ ID NO: 582 - DNA, 714 bp, Oryza sativa
  Clone ID: PAT_MRT4530_100531C.1
aggccgaaagggtgtggaatatcttcaaatcgaaggcatgcaagagcaaagttttgatccagccaattagggccggccggcttctccactaattgagatgcatgagggattgtggatactcaatcatgtaaacgttgatcgatcattcttctttctgtgcaagcaactcttaccacctaatgtgcatgggctcttctaattatccaatttgaatactgataaaactattcccttcgtacctcctaagtgcaaaatcttcacctgattattaatacggaacaggatatggactgtggatcgattacagaagagaggatgggtgaatcagtggatctgcccactatgctacaccactcagaaaacatcgacgcatcttctcgcgcactgcaggttctccaagcgaatctggcaggagatccaacgctggattggtctagacctcgacatgtagaactggggcaaccgcacgtccgtagaggattggtggtatcacctcatgctgaggttgccgagaccgaccaagacgctgaagtcgttaatcatcctcattgcttgggagttttggtgcgaacgtaatgcaaagattttccaacacgttgacaccataccaccaaggcaccaaccattattgcaaagatcaagaaagaagcggttacatgggtgagggcaggggcaaccccactagcagagttcatattctaggaaacgcggact

SEQ ID NO: 583 - DNA, 669 bp, Oryza sativa
  unsure (1)..(669): unsure at all n locations
  Clone ID: PAT_MRT4530_100532C.1
accgagcgcacgggaaccttatctaagactctgaggaagggccaaggatactaaaggctattggtgcaactgactagcctgtggccgtcgactgctgatggagcaagagtatggaactcactttgaagccccactgcatgtcgctggcgcagaggatattgatgcatatgcaaagctttgctcacatgagcaatgctatgagatatgttgcagggactgcgaactgtgctcagaccattagcaccagattgatctacaacccctgaagaagcacccataggatgcatagagctataagcataggtgaagaatacttatcaaagattctcagatactgcaccagcaccgaagatatggaatactgttgcccctgaagttggacgatcgatatgatggcgagagaggactagaaccgaaagccaagcctgaagaactgtgcaatatgtcaaaagctgcaccgtaccggaacatctacacagaacgagctacctggtgttcatgccagagcacgaaatctgatgtggtgcatgtacctggcaccattgctgtacagacacatagcgtgctatctagaggatgtgactgcacctgtaaatgagccatgcatacatgctatgtctcncgaaggtgcaaactgtctgggcatttcttcaacattctcttcaacct

SEQ ID NO: 584 - DNA, 183 bp, Oryza sativa
  Clone ID: PAT_MRT4530_100533C.1
acaatatggtgaagtgccggttgttgccatatatgtcactgatataacaacagtgctaaccaactgaccctcgacagagatttcttgttagctggaaataagagaaaccctcaagcatacggcgtgaagttcgaggagtggtcacaaacatattgtggcttagcactgaactgcttgcgaggc

SEQ ID NO: 585 - DNA, 680 bp, Oryza sativa
  Clone ID: PAT_MRT4530_100534C.1
ctattgaaggatggatactactggtctctggagtcaaagaagacgcggaagaagatgatctgtacaacactttcagtgattttggtcatgttaaggacctacatttaaatctggaacgccgcactggatatgccaagcttctggcagtgagggcttcccatattcagttaattaatctgaagggcatgagaaatgtctattttcatattaagtcaagaatatgcactagtttggttctgccagaatgctatattctgggatatgcattagttgaatatgaaagttttgaggaagcacaaactgcaatcaaagcaatgaatgggactcagctgttaacaaggactgtctatgttgactgggcattcagcagaggtcctatacagaaactcaccagtacaagttccgtgattatgagtaaaccgcaaatgataattcactgtttcaataaccagtctgaggccattacatcggcgatctcggactccacctcgcaggcttgctgccttgacatgttgactgggagctactatgtccgcaatcctgaatgttctcggtctgtgttttttgatagatggcttcatttgcaaggtgcaaccacgtcagtttgcctggttataactgatgctattgttagattcaattgtgcaaaccattaccgtttccttgcactgcgagcctaa

SEQ ID NO: 586 - DNA, 1479 bp, Oryza sativa
  Clone ID: PAT_MRT4530_100535C.1
atggggtggtggccgccggctgcgtgccggcggtggggggtggtggtcgtcgtcgtggcggcgttgatggcggtgtcggcgacggcggcggtgaaggaggagttggaagggagggagagtggagtcgtggcagcggcggcgcaggggcggtggccgaggcaccggcacgcgtacgcggcgatgatgtacatggggacgccgagggactacgagttctacgtcgccgtgcgcgtcatgatgcgctccctcgccaggatcggcgccgacgccgaccgcgtcctcatcgcctccgccgacgtccccgccgactgggtccgcgcaatgagggaagaggatggcatgagagtggtgctggtggagaatatgaagaatccttatgagagcaaccttggagggatcaacaggaggtttaagctgacgctgaacaagctctatgcgtggaccctggttgactatgagcgcgtcgtcatgatcgactccgataacatcttccttcagaagaccgatgagctcttccagtgtggacagttctgtgccgttttcatcaacccttgctacttccacactggtcttttcgtgctccagccttctatggatgtcttcaaaggcatgcttcatgacctagagattggccgtgccaactctgatggtgctgaccaagggtttcttgtcggctgctacccagacttgcttgatagaccaatgttccaccctcctgagaatggcagcaagctcaacgggacatatcgccttcctcttggttatcagatggatgcatcctactactatctcaagttgcattggcatgtcccttgtgggcccaacagcgttatcacattccccagcgccccttggtttaaaccttggtattggtggtcatggccaatcttgccactgggcctttcctggcacaagcaacggtgggatgatcttgggtatgccgctgaaatgccagtgatcctgatggagatattgatgtacgcagtcattataaccattaccaggttggcaaagcctgggatgacaaaactgtgctataaccggcggcccgagaagcaaaatgccatggtgcaggggctgatcaagatgtctgcaatcgtggccatgctaattgcatatgccatcccgttctttataatcccacgcacggttcacccattcatgggctggtccatgtacctgtttggtgcattggcattgggagtgctcgtgagcaatgccttcttgcttccattgcttgctgtgctcacgccctggttagctattattggcatgttcttcgtcatggcattcccgtggtaccatggtggtatcgtgagggttctggcaatcttcgggtacgcattttgttctgcgccgttcttgtgggcgtctctggtgagggtgatggactcgttgcagactatgctcgagagggaaccgttcttccctcggcttggtgaaccggcccaggaaaccgaattcagcaagctgttttga

SEQ ID NO: 587 - DNA, 2066 bp, Oryza sativa
  Clone ID: PAT_MRT4530_100536C.1
ttttttttttttttttttttaattaaagctgtccacatctctcttattgcaacagataaaacgataaatcttcaccaaagtgtacacttgacgggcacatctctatgtgtagtgtataaagtaatcatacaaatgaaaggagcttaattagatcgcgcaaacactcaaaagtgcagccatttctcacgagctcagccgtgccactcccgcagccgccgcggcgtcgccgcctaactccgtcgcggcgccgccggcaatggcacggccggcggcaggcgatcccttcgcgcagacctcgtcggcgtggtcggagacgacgccgtagccctggctggccacgtcccggtagtagcacccgtccgtcgcctcgtacctgtacgtctgcgccgcgcgccacgacgtcccgacggcgtccccttcctgcacgcggacgtccacggcggagtcctgcgcgttgctcagcgaccgggaccagaaccccggccggccggcggcgaccctctcctcctcgaaccgcagctgcacgctcgtctcctcggtgaacgagtcgttcgacgtctggttcacctggccctggtagatgtagagcgggaagctctgctccgcctcctgcgagtacgccacgccggcgtggtcggtgacgtggacgccggagtacgcgtcggtggtctggttcaccgtctgctccgtgtcctcacgcacctggttcgtgttcacgaagctgaaccgctgcgtccatgtcgcggtgatcttgccgtacgacgacgtttgcacccacccggcggcggagatgcgccggaacgccgtcgtctggtagtactcgttgccgggacccctggacgcgacggcggtgaccttctccagcggcggcgcgtcgtagctgatgatgccggccgtcgtcgccgcgctcctggggtccagccagaggtggaggttgccgtcgacgtaccaaaagtcctgggcgtcggtcacggcgaacccgagctcgtgctcctcgccgtccagcaaccagcccaagaacggcgtgagctcgatgtcgtacgacgggaggttgaacgagccgatgccgctgatcggcctccagaggaaggggctgatgcctccggtgtagatcaccgggaacggccagacggcgccgacgacgtccccgtcgatccgaacggtgacctcgcggaacgggccattgccgttgaacgggttcccgtaagtgtaccagaactcgtcggagccgtggtaggagaggtacacctcgaggacggcgcggtaggcgttcgccggcacggcgaggctcgcggactcaacgtcctcgttgttgttgatctggaaccactgcccgccgttcaacggcaagctctgcgagatggggacgatgacgtcggcggggcccaaccccggctgcggcggctgcggcgggtggcggaagtagaggtggagcgtgacattggcgtggtagacgccggtgtactggtcgttgacgaggttggcgaggtagacggcgagggtggaggagttgcgggcggcgaggagggacgcgtatttggtgacgtccttggacacggaccagacgacgcccttgggcctcggctccgccgtgcagctgcggaggagctcgacgccgccgagccagacgccgaagatgcggtcgaactggacgccgcggcaggtggcgcgccactcgaggacggcgagggagatcgccgacgcacggccccccgcggcggcgaggcagggcggcggggagtacggtgccgtgacgggggggagcgtgtaggtgaaaccgaaggagtgggagaggagcagcgtggagcacgggccgaagctgcccggcggcgggcggtgcggccggtccacctcgaagtaggtcgtcggcgtgtcgggcgggggcggcggcggcggcggcggcgcgtgcgcctcaagcgcggcgacctcggaggcagatagccgaagcttgagaggtgaagcaatggagatcggaaggggcgtgacgacgaggaggaggaggaagaggacgcgcacgtagcacgactccgccatggctgtggaatgagaagtggaaggaagaagag

SEQ ID NO: 588 - DNA, 1014 bp, Oryza sativa
  Clone ID: PAT_MRT4530_100537C.1
gccacgaggcttctcctccccctcccggttcggttcgggtccggttcgatttcggttttttcttcggttcgggggttggtgggaaagcatggcggcgccggatgttgagtaccgctgcttcgtcggcggactcgactgggccaccgacgaccgatccctcgaagccgtctttttcactctacggagagatccttgagtccaagatcattaacgatcggtagacggtgaggatattcgcttctgcctcattcaccccttctcgcgttcctccacacctttatttattttagtcgtcactctcttgtttctaatcttacattataattatacttaatcgatattttatctcatttaaccgtactctaatcatctcatacacacccctctaccttcaccctctccaccatcctcttctttctcaatctcctctcactctctcctatcctactttctgctactatcctcccactttcctttctcatctattctcttcccctattctctcttatcccaccacttacccacatcccataaacaatttatatttaaattattcacctctcccccccccacttcttcttaatccctacctccttctcctctcttcttctcttcttccgtttccctttaccccaccccacccccctctcctttctccctccctccctcctctccctacccacccacctacccctactccccatctcccgtcctattctctatctcttacttttattacccccctcgcacttataatcatatacatctccctctcttaacccactccccctcttcctatccttttacctcctttcttatttttttatataacccactctctctcactctgtctcctcttttcactctttatctactctgtcccccaatcataccccctttcacttccctttattgttaattaataatttatcttactatcatcttacatctatcttcctacacacttcggattactcctcttccactctccttcttacatccccgtatcctatt

SEQ ID NO: 589 - DNA, 555 bp, Oryza sativa
  Clone ID: PAT_MRT4530_100538C.1
atggtatgtcctcagcgacgacgagcaggattgggctcaggagtcaggacgaggtcggagttcaaccgaacgcgaggaattactaccggtgctcggcggcggggtgcgcggcgtcaagaagcgggtggagcgcgacggcgacgacccgcgctctacgtcgtcaccaactacgacggcgtccaccgccgcccgctccgcttcgtgaaccccggggtcacgggggatgcggccgtgggttggtggtggggcgtctgcggcggagccgatcgaggattacgtcaagacctccgccgatggctagacgtggtacctctacctcgacaacaaaagaccggcggcgtcgggttccagacgaaggacaggtacatgttcggtggttgcagatgtgctcctacgtggacacggcgccgcagcgcgacgagctggacttcgagttcctgggcaaccggacggcgtcgcgttaatgccatgtgcgacgaatacctagtcaaaggagccacgtcagctaaaaccgagtgcaatactgccaaggaacctcatttgcattggttgtaa

SEQ ID NO: 590 - DNA, 382 bp, Oryza sativa
  Clone ID: PAT_MRT4530_100539C.1
gcgcgctcactggtcgtcgctttacaacaaactgatcctcttactccagaatatatccaatatcatgtgcacccacatctcatactgcatcaacacatgctaaccccatcaccagatttccaaatacactacttcatcaaagtggcaacccccttcttccaatcacccatacttcaactgaaaaactgccaacccatccaacaacactgcctccaacaactcattattatccccccaacagtctcactaccaacacattaccaaccctcatcccattgcgccccatctacagctacaacagtctccctttcactctacattccatccccaatcaacctcaaccccaacgtattcctccccctaaacttcacccccaaaatac

SEQ ID NO: 591 - DNA, 260 bp, Oryza sativa
  Clone ID: PAT_MRT4530_10053C.1
caccaacaaacagaagacggaaaaaaacatatacactgctagtgattgtctgattgaccatgaatggctagcaaggtcggcttcttcgcggcggcgctcatggcggacatggagggcatgtccggcgcgcacatgagcgagtcggctatgaggctcacggacaggcattgccaccggaaggtgcaagacagccacgtggacgcgtgccggcacgagctagaccgtcagctcaccggacggcagaggttccagccgatgtt

SEQ ID NO: 592 - DNA, 558 bp, Oryza sativa
  Clone ID: PAT_MRT4530_100540C.1
cacgaggtgcagatatgcgcaaaatggcatgtcaaatgaagccatttccttgttccacaacatgaagaaagcaggcgtatgtccagataagataacattggctggagtcctctcggcctgctctgctgttggagctctggagctaggttctgaactggacggttacgcctcatgcagaggtctctaaaaaaaatggtttatgtcgggacagcctgagtggacatgtacgctaagtgtggagatcttgacaaagccatagaagtgtttaggaagatgagatgcaagaatgtagcctcttggaatgcccttatctgtggccttgcctttaacgggcaaggtgatgaagccattcagcattttgaactgatgaggaacgaggatgggctcaagccagatgatatcactttcataggtgtcctttctgcttgtgtacatgctgggttagtgaaagatggcaagcgctggttcaattccttgacatctgagtttcagattattcctaagattgagcactactcatgtatggttgatctattggcgcggagtggacatttggag

SEQ ID NO: 593 - DNA, 381 bp, Oryza sativa
  Clone ID: PAT_MRT4530_100541C.1
ctaagtaccaactttcatttatacttatatcaatatagttctgtagctagcctaccagataggtgcaatggtgtgggtttagtgtccgattactcggttgctctatgtcatctcgggggatatagagtagtatttaataatatagacgtggtgtctagattattaagtatcattatctgggcatatatgctgcgggacagtagaggtgagccactgatagtgacaactcagtacgggtattcctccacgttagtataaattcataagacaaattcctggggagggtactactccatatttaaccccgttggaaggccatgacaggttgtcgtaaggaacttgacaacccagggtggtctctcaaaacaccaggagggcact

SEQ ID NO: 594 - DNA, 709 bp, Oryza sativa
  Clone ID: PAT_MRT4530_100542C.1
atgggatctagccgatgagcacttacttctgcgtactcagccgatggcgtggtagacgggctggcggaagtcgacatcgccgcgggcggaaacttggccggggaggagatcgccttgaaatcgccttgcgcaccgagggaatcgccggagagagggaagatgagtttggcttaagcggtgaaaacggaagtaacagtgtgaagtttctcggggacaacggttagtatttaaagcagagtgataacggtcggaaaaacggcaagtgcgatattttctcggagatgaaatatcgcaaatccgaaacaatatcatatattccggacttggggggaatgtgttaacaaccaaatttggtaatccaagtgtcagagatgaagataagatcgaagcagaatccaagatcaagatcgtttcagaaacatagtaagaatcggctaagtccgaatcttctatgatcttaatcagtagagtttgagtcagacaaggttagccgattgagccgattccgacaatacgatatgtttgggcaaaagtctaccgcaaagacttatggtatcttagagtttgttagagataagagtcgtgtccaacacggacatactttgatcaaatcagctgcacactcacgaacctaaaggcaagcttttggacctgcactggagttaagcagatctcccaagcctcgtgttttcgcatcaacaatcgtata

SEQ ID NO: 595 - DNA, 1221 bp, Oryza sativa
  Clone ID: PAT_MRT4530_100543C.1
atggtttctttgccactgcagtggaaaccagcacttgccacccacgtggacaggaacaagagcagccccctacatttcgcttcatctgatggggattgttccatcgtccaagcaatcttagcatgctctccgccgagcgctccatacatgcaggataacgagggattctcacctatacatgctgcagcgttgatgggacacacagctacagttcgcctcttgttgcagttctcccctgcctctgcagatatttgtgacaatcgtggccaaagctttgtacatacagcagccacaaaaggccactcttccattatctcgtatgctataggtagcagcatgctcgagcatcttctgaacgcacaagacagggaaggtaacacgccactccatttagctgtggatgcagggaaatgcaagattgtttctaagctattatcaagtgaaatagtgcaagcacacatcatgaacaatgaaggccacacaccatcggacctcgtacaaaattgtaaaggtttctactcaatggtaagcttagtggtgaagatgtatgcctcaggagcacagttccagccacagaggcaagatcatatagagaagtggaatgctcaggacatcatgaaatggcgagatactacatcaaaatatcttgctattgtttcgacacttgtggcaacggtcgccttttctgcagctttcaacattcctgggtcatatggagatgatggaaaagcgaatctagcagggaattgcatgtatgacacttttctgatccttgacaccatctcattagtcacttcagtcgtggcgataatgctactggtatttggtagagccttcagttctcatcactcatggttgagcttcatgatctcaacgcactttctatggctgtcaataaacaccatggtattaggcttcttggcagctatatctgcagtgatgagcaagaagaagggcttaaacattacaatggccatcctgatttatttcgggatgtggatattaacgatgctgcttacaagcttaacgacagtagggtcatttacaggcattctgaagttcctattcggaggtcgcatggaaagacagcggcgagcgaagaggcgcatcagccggcagtatccctacgcgatcttttacactttcaacatggttttgttctttgtcatagctaatatagcattggctggatttgacacttttaaatctctcagttattga

SEQ ID NO: 596 - DNA, 1524 bp, Oryza sativa
  unsure (1)..(1524): unsure at all n locations
  Clone ID: PAT_MRT4530_100544C.1
atggagtggcgtggttcaaccacacaaggaaggaggggtggcatgcggtgtgacgaggaggaaggaaagccaggaagaagggttcggttcgatattttatttgtggttatttttgctgtccctataagcatgcaagtaaaaacaagatgctgccacggcgatgagcaacagcagcaggaagaggatatgttggagggcgagcgaggcgccgaggccatgttgatgggcgttgagtggagtgaggaggaatccaggaatcactggccccgtgcgccgtgggctgatcgggagcaggagataaaaataaaaacagcaacaataacgcagtcttgcgtcttgccttggcaacgtcaattccgatggcgacaagagcagcgttgtgttggcgccacgtcgccgtgttcgctgccgcgctgctcgcggcggcggccgtggtggtggccggcgacccgggcaagatcggcatttgccacggccgcgtcggcagcaaccttccacctccggcggccgcggcggcgttgctgaggcagaacgggatcaccaaggcgcggctcttcctccccgacccggcggtgctcccggcgttcgccgccgccgggatcgacctcatggtcggcgtgcccaacgagaacctcaccttcctctccgccgcggggcccgacggcgcgctccggtggctgcagtccgccgtgctcgcccacgcccccgctgaccgcgtccgctacctcgccgtcggcaacgaggtgctgtacaacaaccagttctacgcgccgcacctggtgcccgccatgcacaacctgcacgccgcgctcgtctccctcggcctcggcgacaaggtcaaggtctcgtccgcgcacgcctcgtcggtgctcgcctcgtcgtacccgccatccgccggcgcgttcgacgccgcctccctcgacgtcctccgccccatgctgcgcttcctcgccgacaccggcgcgcccttcatggtgaacacctacccgttcatcagctacgtcaacgaccccgtcaacgtgcagctcggctacgcgctgttcggcgcgggcgcgccggcggtgagcgacggcgcgctcgtctacaccaacatgttcgacgcgacggtggacgcgctggcggccgcgctcgacagggaggggttcggcgccgtgccgatcgcggtgacggagaccgggtggccgacggcggggcacccggcggcgacaccgcagaacgccgccgcctacaacgccaagatcgtggagcgggtggcgcgcggcgccggcacgccgcggcggccaggcgtgcccgtggaggtgttcctgttcgacctgtacgacgaggacggcaagcccggcgccgagttcgagaggcacttcggcatcttcagggcggacgggagcaaggcttataacatcaactttgcttagaacttgcctgtatttgtaatggtgttgatttgcgaatcaacttgctaaaaaaaaaaaaaaaaaaaaaaaaaaaaaaaaaaanaaaaaaaaaaaaaaaaaaaaaaaaaaaaaa

SEQ ID NO: 597 - DNA, 392 bp, Oryza sativa
  Clone ID: PAT_MRT4530_100545C.1
atttgagagtgcgaatacaaggaggtattttgtgtttgggaaagtccgaagaaaaaaaggattttgaatcctccttgtccgttttcccttagaaaaataactcaatcaaatccattatctactctacaagaacgaaacgcttgttatgcctaatatacttagtttaacctgtatttgttttaattctgttatttatccgactagttttttcttcgccaaattgcccgaagcttatgccattttcaacccaatcgtggattttatgcctgtcatacctgtactcttttttctattagcctttgtttggcaagctgctgtaagttttcgatgaaatctttactactctgtctgccaattgaatcatgtattcattctaaaaaaaaaaaaaaaaa

SEQ ID NO: 598 - DNA, 467 bp, Oryza sativa
  Clone ID: PAT_MRT4530_100546C.1
cggccgccctttttttttttttttttttttttttttttttttttttttttttttttacggacaaaacatgtacactgcgggatgttactaaaggtctttttttatatgtacagaggcagagtatagttcacttgaagcatgtacaaactatgatatagctaaatagctaattactagctttatgtgcgtgcagtacatcacaggcgaccgaaaaacagggatcgatcggcgttaccacttcaggggtagatgaaaaaggccaagaatcctgcgggcgagggtgccccggggagggcccaaacgacgggcgccacgggggggggagtgagcgccgggaccttccacgcaaacatggtgggtgacatagcgtcgaaagggcccacaccaggcgtttgagggggccccttgggggggacccgggcggcgcgcgctcgaaggcggagaggcaggagaagagggggaacagg

SEQ ID NO: 599 - DNA, 700 bp, Oryza sativa
  unsure (1)..(700): unsure at all n locations
  Clone ID: PAT_MRT4530_100547C.1
aattggtttggggggccacctttnaanccttaaaccccaanatttnanccattttccccccaaaanccaaagggaaaggaaaaattgggttttngggttttnttntntcccgggttttccccctttgggtttttttttttcccccattgggttggcccctttttcccaaaaattttaaataaatttnaatgggccaaaccttggggggaatttggggggtngaaaaactttccaaattaaaacccatttttttaagccaaaaaatcccataattgnaattaaactcctttaaaaaaatggcctttaaacgnaaaatttcctcctcctctgggaangggaaaaataatattgttccgtttccagaacaaatttggaaacttgaacccgcctttttaaggaacaaattttggcttggtcggaaatgaacaaattaatattggaccttaagggattaattattaaggaaattgtactatcctttaaccgaaaggagttttgcctcttataaccaaaaatcttatttttttttggcacccccattcccgttttaacttntcccccgggaaataataaaaattgnccccttacccaanaaaattccnnaccatatcctggaatttaaatttaagnaccaaggggatgaaataccntncctgnttttaaaacanccgggcngaattcccttacctncaagggtccc

SEQ ID NO: 600 - DNA, 559 bp, Oryza sativa
  unsure (1)..(559): unsure at all n locations
  Clone ID: PAT_MRT4530_100548C.1
ggtgcangatgccgtttgagnaaggacagcatcaagacccgttgacctgnatattgctgcatttgttcgtttcaaaaatggcaataaaagtggcgttgaggcactcagcaaatttctcggcaactacgataaagccccctttatgttgttacaaaaagatctgcgtggaggtgacgataaagatggcgaatggctctttatcaatggcagtcaatggcaggaaatcgatgaagtcctgatctacagcttcatctacggaggcaccgataactggcagggcaccgatgctacgatcactctctacgttccaggtcagccccctatcagctccacgctggtgaatggaagtgaactcnataatgtcgcggctattgcccggttaaagaatgttgatggggacatcaaagttgancggcttaacagcttttttcgcaaccggcaatccctggataancattatggctggggctttgantggaantctggtgccagcaaaaattaccacattcatttaacgggcattaattacaccccaccaggtttaaacaatgcgaaattc

SEQ ID NO: 601 - DNA, 1973 bp, Oryza sativa
  Clone ID: PAT_MRT4530_100549C.1
gccccccctcgagtttttttttttttttttttagcatgaaaaatctattgattgcttcagcatgacaacacaattttgaaagttgtcgttggctgatgcatctaaaaagacagtcatcgtctcaacaagttcaaacaacactcaaagaaaacgtataatgaaatcctaatatcaacaaacttcccttgccatacaagaattccaaattcacatggcagttcatcgattttataacagggatgactgcgatgcaaatttgccaccacatgaaggagcactctgagttgtccagatcgaaggagggaaagaatatgtgaaattacacctgaaacacgtgtattacaaattctgttgggattggatcagaaacaatgtcagaagctccatttttctcacagaagagaagatcatgtggtttttccaatgcctgatgcattggatctgcagacatcaccacgacaaagtggacaaaccctgtgtatctctttcaaccatttatctacgcatgttagatgaaattcatgattgcatggaagaatacggacacagtctccctcggcatattcaacaaggcaaatgtagcattgtgcagcctcctcagtttggtgttttaatgatctcctgtatacttttacaggaagacgctcgacaacctcctttggagcaggaacggacccaattgaagaaaacgatggccttgaggataaggcagcagactgttggtggatctcatccagaacctcaaaaagtgcttctgctaacataacgattcttgatatgctagctcttgtgtttgtttcttcatcagaatttcctggtcgactgctcgttctgctgcccaatctttggagagctcggacctgagatcgtatcctcctcctctcaagaaaagctgatctgcgctccagtagatcccgattattggcctctcttagagttgcagagtcggttgaagaatccaattgcagttcagaatttctctctgaattagtcctttgcatgattgctgaattttgcctggcactagcatttcctgatggccatattgccctatcgtaaagaagtgaaggggtgaataacccatctgagaatggagtcctcctaagaactctgtcacgaagacgtccaacactcaacgttcggctgaatcgaacactgccttcaaaaggttcctgaggtcccatccttctgttggaatatctcaagttagcattgtcggattctagcaaatttctcctagcctgatgggctgctctagcttgtgcggttacactatctctaagcatatccagagtcgaatcaatcccagcagttgatgcaccaccttgctgggagatgtttgcatcagaagaattgtccacatttccatggcctccatcaggattagctgaagtggagaggtccgatgagagaatggagcaggctaccgatgatcccaagctgacagctctactcaacccgaagttgacaccaaaacgtggccgtgaactgtcagaatgatttggtgactggttgacctccaccctgttgttgacggcagtggcattctgcaatacatcaacatcctgatccctgtttatatgtgatgaaggcaatgttgccccttcacctggatgagatttagggattgtgggagcatcctcttctgatttgtccatttgagcgattgaaggcaggcttccattctcctctcccttgctagactcgaacggccgccgcggcggccgtggcggtggcggtggcgaagacgccgaggaagcgtcgtcgcgcgacggcgtgccgtggccgcggaagcaggaggaggaggagctcggcagccgctgcagcaggcctctccccctccccctccccctccgctgccccttcccattccccttactcgcctcgtcgccgccggacgccgacgccgacgccgacgccgacgacgaagatgacgccgacgaggcgccggccttgctgcttccagatcccat

SEQ ID NO: 602 - DNA, 2815 bp, Oryza sativa
  Clone ID: PAT_MRT4530_10054C.1
atgacgcgctgcgccgtcgtcgccgccgtcgcggccgtgctcctcgtcgccggcgcggcggcggcggggggtggggaggaggaggaggccccgtcgacctgcgcgcggaggggcccgggtttcgtcgacgcgctcgcgtcgcgctgcccctgcatccggatcgagccatccccgcctgtagaggtgagaggagaggctattgctaaagagttgaaccttcgccacagaggtgttacgtactccgttctcttctatgctgcttggtgtccattttcaagcaagttccggccaatatttgaagctctcagcactatgttccctcagatatatcactttactgttgaagaatcatctgcaatgcctagtttgttttcaagatatggtgtccgtggattcccggccattcttcttgtaaatgagactacaatggtacgatactggggcccaaaagatctcagctctctggtggacttctataaagaaactacaggcttcgatccaattgcatattttgatgtcgatcatcaagacagtactggagatttcagaccagtcacaccaggggaccgatctctgcgtaaaattgcaaaagatgagccatttgtgttgcttgcggtgctttttatcatcctgaaggttgcagcgcatttcgtccccatcgtcgtctcccatctgaaaacgttcttggtcgtgcgtgttcagaacttgaacttagggatccgtaggggatcaagccaactgttggaacgagcgctgaatgtacttgatgtgaagaggctttgtagcaagcttagactgagcaataagacaagggaccttaggaaaggcgcaagcaatgctcgagcttgggcttcctcgtttacttctgtttcactgggcatgtgggaacctcatggtcatgtaaattctgagggcctcaccttgttgtggcaccctaatccttcgacagctactgtcaagatatttaatgaaggtttgtctgccgtccagtttgacatgagcagaggtactgcttccatggatgcaatcagcctagatgagtgggagctcctgcctgacaacaagagttcctacttcatggaggagttcaccagtgaccatggcactgttgttggtaaggatgatcagttcttgtttggtgccagtttgatcatgatcaacatggaccatttcacccctgcatctcacccttctccctatgattgtatcctagatgatgagaccaagaatatatttctgcctatccatctatcagaagaggtctatgtgggtgatcctgtcatcaagttcaaggacatcgatgtcgtgaagattgaatcgtaccgagaagagttcgtgcctaaggtgactgagatatttgatgcagaagaggaggcagagatgatcaagagtcccgtcagtgcagaggaagttgatgtcgacgatgatgatgaggtgatggctatggttgcacctgatcaatgtgttgaagaggaagaaggtgcccagaaagacaaggaacacaatggtttcagtgtggggaagctgagagtgaatggtgttggggcactctgctcatttggggttgcggctgccaccttgtgcatctttctgcttggtggcaggcagcagcagctgcacaagacgcagaatcagaagaccccgttccagatgtatgctgataatgaggcaggcatgcagctggagcataatcttcagcctagtactgatgagagaaaaagggcattggaggataagtgcagatcaagcaaagctctggtcgtcttcgtcctgctcctcctgcattgcatgagtttgcatgatgaggacgaagtggaagacggtgtggaggcgaccgctgggactcgcgaggtggcggcgcgacctacggcgacagctgctgagcggcgtgccggggtggtcggccggtcgcgcgaccgtggcgtgggggcgacggcgcaggagtggtggcggagctgcgaccaggagagcccaactgatgttgagagcaaaaggggtggatcattttttactagagagttgatgatagaagctatccagaatgctgcagttgtatggaagacgctgagcaacatgtattcaggagagggaaatgtaatgatgatggttgaggctcagaacaaagtggagaatttgaagcaagaggggagaacagtccaagagtacgctagcgagctgcaacagttatgggcagattttgatcactatgatcccctaccattgaaacatgaggatgacattgtgattggaaataaatggctgcagaggcgaagagtcattcatttcttgaaggggttgaacaaggagtttgaggataggagagcagctatgttccaccaagctacattgcccactatggaagaggccatttcagcaatggtgcaagaagagatgagattgaggttgatgagaggggatcgattcgaggagggcatggtggaactcgtggtggatttagaggagaccgtggtgtttttgggggaaatcgtggtggtagaggaggtgatcgtggaggtcgtgttggaggtcgtgaagaacaagaccaatgagagctctaacaccaccactcactttggtaacttcgccaactacgcccaagtgggcgaagttaaccttctctcaattagctcggctattgatcaactcaagtgcattgttgtatttgatgagaattcttgtctgttccaggagaaggggactgggaggaggattgggactggagtcaggcgtgatgggttgtggtacatcaatcatgaggaactgggactagctgcggtggttggagatgttgagaaggagatcagtttgcttcact

SEQ ID NO: 603 - DNA, 356 bp, Oryza sativa
  unsure (1)..(356): unsure at all n locations
  Clone ID: PAT_MRT4530_100550C.1
cggaacccgtggcgctctcggctctgtgttggatgtagcttgccatctgccaccaccaatgccggcgggtgtcttcggagatttgatctagcgcgttcgcggcgtgctcgatcggcggatggcggcggcggcggtggcggcaccacccgtgagggggtactgccccgcggcggcgtcgtcgtcgtcggtggcgagggtgcggctgccggcgtcgttcgtgagcgcgccgcgggggctttcggcgcggctccgcgcgtcggcggcggccgtggtgccccgagggctgctgctccgtccgncggcggagcggtctttgttgttcttcggccgcgtgtcttgctggcgtggaggacgtg

SEQ ID NO: 604 - DNA, 401 bp, Oryza sativa
  Clone ID: PAT_MRT4530_100551C.1
ggccgcattaatttcattttgtggaaaggaagttcagggccaaccccatttttttgcccaacacatgtagtactgttttcaccctgggctggacatttaaaggggggaacccaatcatttggactgaaaaagggttcccctccggggtcaaaacaaaaaaaaatcgttgcgacaacctttgcaaggggaaaaaatgccaagtcactccttttttttgccggggacccctgcaacaacattttttaacgcaggggggggaacttgttttgctgtctcccaaaaatccaacattgggttgacaactggtggaaaaaaaaaacccaatcccgcgataagggaggagggggggacaaagggctcctttaccggaaaaaatttgagcttttccatccctcgggccc

SEQ ID NO: 605 - DNA, 300 bp, Oryza sativa
  Clone ID: PAT_MRT4530_100552C.1
atgtgcggatgtggagttggcgggatgacggcttgtgctggcgtgaagcaggaatggggcttgacgtggcgtttcgagggtggccaagggcccgccattgctgttgattacgatcaaggtatgactgctcgtgagacgtcatggactattctgcggccatcgatgtgggggaagtggctcctcgctggcttggctgatgtctattgttggacgtcggagccgcttttcgctttggcgactttcgtcttcagtattgttgcggttgtgaagtcggcgctgctgagtcgctggggcggctag

SEQ ID NO: 606 - DNA, 395 bp, Oryza sativa
  Clone ID: PAT_MRT4530_100553C.1
gcacgaggctgagctgctgcatctgcatcctgcgcgcgcggcctttggatgtctgtcgtctcctcttcctgctgccttctttcctttccccttttgtgccttccacatgacacaagccatggcttttgcagcgcggcgcagcgcagccctgccccttgtttctcccctctctcggtatgctcgccgttcatgcatgggcactggaaagagaatagcccatgcatagtggggagggaggaaagagaaatggattcggagagagatcatcaactgatgcaatgcaaggaccactcagtcacgggagggagcgtatacggtgatgctagcttctctacctctcacactcatcttttaccctcaatctctctcactcgcacacacaagaacacacacga

SEQ ID NO: 607 - DNA, 810 bp, Oryza sativa
  Clone ID: PAT_MRT4530_100554C.1
tttttttgagcaggacatcaacatattttcagagttgcttaaaaagcagtatcacatacagcagcgaaatagcgtatggttcaaatgattgttactgctgctgaattgtcttcgtgggtaaccgagtggcgtggttcagctaagtcgctaccttatagttacaacttaggtatgttcaaaactcaaccacatagaacaaaaaacgtccctactacaagcggttcaaaattacttggccccacggccacgggcccttccaccagctttgacgcctttcttctggctcatgtatgcctttcccatcttccctttaccttcagcacccagagcggaggcctggtccctcctggccaccagaggatcgtcgaaatacccaacggagggcatggggtagacgatgaatgcgaaaccggacttagtcccgacgagcgctcctttgcggtagcgcgtgaacttgttctcgaacatgacctcctctgtgtcctcctccttggtggccatggcttccctgcaagtatcaaaaaagaaaaatcaaatcaaatcagtactaaaatgcatgagatccaaatccacgcccaccaaaacgcaatagcatacgaaaaatcggcaagcaagagatccaaattcgcaccaaccaaagcaacatatccgcacgagaaacaaacaaatcgggaagcaagagatccaaattcgcacccaccataagcaacaaattcgcacgagatacagcatatcggcgagcaaaagactagggagatccaagtcgcgaataccacttaaaactcacagggaaaacggttctgcaataac

SEQ ID NO: 608 - DNA, 730 bp, Oryza sativa
  Clone ID: PAT_MRT4530_100555C.1
ctgtagtaattgattcttttagaaaatttgaatcgatcttgtcgtaaaattatcgtgacacatacataatctccaacaccatcttgcaaatgaaactcatttgcgctataaatttcacttcctgatcatatcatacaagcaacactcaatggcgccatggtcttcagcaaagacgacttgagaccatcatcatcgtaagaaggcaaaaatttctgtaccaaagcttccattcagaaacagatcgtcactagctgcaaatcctgcaaatgtctgaaaatgtttgtaatttctcctcttgtccaattgcaagaactgcctaagaatcccagatcacctcctcctcagccgctggcaggtggtgccgcatctgcagcagcagcatttgccgtcgcaccctcctcgagctggacgagtcgggccacgatctcctgcttcttggccttgaggtcgtcgatcttggcgtccagcttctccagcttggctcgccggacggccacgtccgtcgtctcctccaccttctccttcttctctttcttctccttcttctccttggccggtttcgccgcctcttcgccgttcttctctttcttctccttcttctccttctccggtttcgcctctttggcgtgttccttgtcctttttctcctccttgtgatgttccttggctacatctgcagcttccatctttctcaagaaactaacaagattatctgtggtgagatttctga

SEQ ID NO: 609 - DNA, 561 bp, Oryza sativa
  Clone ID: PAT_MRT4530_100556C.1
ttttttttttttttttttttttttggtttggtttttttttttttagccggcaacaacaactcaagattgaatcatacgtaagggcttgctgatacaatatcaacatgggggggacattgccggttccatttgaacaaacataaaaaccccgaaaccccatatggccattatgccgatcctagcctagcttggggaggacattgccaagagcagatttggtcaacgggtagtacttttccgccttttcggggctcttgatcttggctgcatgggcaagctgcacaaatcacaaagggggattcttgtcaacaactcagctgagcaacagtaatactttttccgtttcatttcatattataaattgtttgtctattttcttaatcaaagtttttagctttgactaagtttatagaaaaaaatagtaacatatgggatataaattaattttattaaatttaacattgaatatattttaataatatgtttattttgtattgaaaatattagtatatttttaaaaaaacttgataaaacttgaagaagtttgaccggacgcgtggg

SEQ ID NO: 610 - DNA, 687 bp, Oryza sativa
  Clone ID: PAT_MRT4530_100557C.1
atggcgtccatgaccgggctgtcgcagggcgtgcagctgccggccgggcccaggcgcgccggcggcaggtccaggctcgccgtcgtcagggccgacgccgccgccgccgacgtccagaccggccgccgcgccgtgctcggcctcgtcgccaccgggatcgccggcggcgccctcgcgcaggcggcgctcgccgaggccgccaagcccatcaagctcggccccccgccaccgccctccggtggactccgtaagtgtagtattattaacttgagcaattttgaaagagtcatgagctgggacgctgaactcggaccaggcgagggacacggacctgccgctgagggaaaggttctacctgcagccgctgccgccggcggaggcggcggcgagggcgaaggagtcggcccaggacatcatcaactcaagccgctcatcgagaagaagcagtggccgttcgtcagggacgacctccgcctcagggcctcctacctgcgctacgacctcaaaaccgtcatcaactccaagcccaaggacgagaagaagggcctcaaggacctcaccggcaagctcttcgccaccattgacgggcttgaccatgcagccaagatcaagagccccgaagaggcggagaagtactacacgttgaccaaatctgctcttggcgatgtcctcgccaagctaggctag

SEQ ID NO: 611 - DNA, 234 bp, Oryza sativa
  Clone ID: PAT_MRT4530_100558C.1
atggtcacgttcttcctaagctgtatgcaaaggtgcatcactgcgtttcatggaatgcaattcatgctcacattgtcagtgttcgctcttgcgagaacaggaggaattgtgagcttccgcagcatttcagaactgtacggatctgtcttttcgctgatcattgtggatgacatatttcagattgcactggaaaatatagttctgcaagctgtatctgagttgtccgagagctga

SEQ ID NO: 612 - DNA, 1643 bp, Oryza sativa
  Clone ID: PAT_MRT4530_100559C.1
accaaaaaaggggaacataaactttcacagaagaaagaaaagcagcaaagaaggtttcaacacatcatatcgatcaggctttagaacattagaacacagatgtgcataagcgtcagaaggtatttaattaattattagcaagccatattgtcactgagccacatactagagtaccaaatcatagaggaaggatgggagcagcaactgagcaaagctccatcctgcttagatacattcgagaggctttttttaggcttttaaccagccaagcgcaagcacttcagttaaagcctaaacagagttccagcatgatcagatcatgcgcattacttccacttcttgaacttgccaccaccgaacatgccgtgcccatgcttgccatgcttgaacttgccatggtggccgtgcttgccatgcttgaacttgccgccgtggtgaccgccgtagccatggccgtaaccaccaaagcctccatggcctccatagcccatgtgtccaccatggccatgagaagagatcttgtgtgccccataggctgcagcagccgcagcggcgcctccagccagcattgctcccatgtgtcctccaccgctactcccatggccgcctgcaacattacattagaaaactctctaaggatagaacgctgagaacagagtcacaccattttgctgaaacagttcaatgatgggaacaaaaattttttttttttgcataagcgtcagaaggtatttaattaattattagcaagccatattgtcactgagccacatactagagtaccaaatcatagaggaaggatgggagcagcaactgagcaaagctccatcctgcttagatacattcgagaggctttttttaggcttttaaccagccaagcgcaagcacttcagttaaagcctaaacagagttccagcatgatcagatcatgcgcattacttccacttcttgaacttgccaccaccgaacatgccgtgcccatgcttgccatgcttgaacttgccatggtggccgtgcttgccatgcttgaacttgccgccgtggtgaccgccgtagccatggccgtaaccaccaaagcctccatggcctccatagcccatgtgtccaccatggccatgagaagagatcttgtgtgccccataggctgcagcagccgcagcggcgcctccagccagcattgctcccatgtgtcctccaccgctactcccatgtccgccctggtgcccagatgatccggggtagcccgcaggagggtagccaccatgttgggggtaaccaccaggtggagggtagccaccaggctgagggtacccatgctgtggagggtatgccccaggtggtggagggtaagccccagtaggagcgggataagcccccggaggagacgggtacgctcccgccggcggcgggtagccctgaggagggtatccctggtgaggaggatacccatggccgccggcaatctcgtgtatcatgttagagaagagcgccttgtcgctctcgagactgttgtccctgccggcgcgcctgtggtcccggccggccagatcgcacgtcatgtgtcagaccggtcatggaggccattgcctgtgccatctctcaacctcagctcagacctcacctgactataagctgagaatttc

SEQ ID NO: 613 - DNA, 2832 bp, Oryza sativa
  Clone ID: PAT_MRT4530_10055C.1
atgtcttcaggggttggaaaggaggttgtagatgcctcctcggtggttactaagggtgatatgaaagatttgctagagaatttgttgaagatgggcatgataggtccgaagagtgtagcagggggattcgaactgaaactagaattgatgccaaatgagttgaggttggaatggagcaaaaattatttgagttggtgtaggagagcccaattaatgttgagagcaaagggggtggatcattttttgcaagagagttgtgaagagccttctgataaggagagccaagcatggagaatgtggaatacaacaaattccaccgtggtatcttggttgatgacctcggtggctccttctattagtaggatgatagagactattcagaatgcagcaattgtgtggaagacattgagcaacatgtattcaggagagggaaatgtaatgatgatggttgaggctcagaacaaaatgcagaggcaaagagtcattcatttcttaaaggggctgatcaaggagtttgaggacagaagagcggctatgctctaccaggctacattgcccactatggaagaggctatttctgctatggtgcaggaggagatgaggttgaaactgatgagaggtacaaatcctacaagatcagcatacactgtggctgataatagagaatgctacaactgtggacaagtgggtcatgtgagctacaattgtcccactcctcggaacattggcggtagggggttgattcgaggagggtatggtggatttggtggaacccgtggtggatttggaggagaccgtggtgactttggggggaaccacagtggtagaggaggtcgtggtggagatcgtggtggtggaggtcgtggtaggggcgaggagaaggggactgggaggaggattgggactagagtcaggtgtgatgggttgtggtacatcaatcatgaggaactggggctagctgcggtggttggaaatgttgagaaggagatcagtttgcttcattgtcagttaggacatccatcttttgagattttgagtaagttgtatctagatctctttagtaaagtggataagcatagattggtgtgtgatgcttgtgagcttggaaaacatactcggtctacatatgttgggattggtcttcgtaactgtgagcctttcatattaatacattctgatgtttggggaccatgcccagttacttctgtgagtggttttaagtggtttgtcacctttattgattgccacactcgtatgacttggatttatatgcttaagcacaatagtgaggtccttcgttgctttcaggactttcataaattagtgacaactcagtttgatgcaaaagttaagattattcggactgataatggaacagaatatatcaataatgaatttgtgtcatatatctcagatgaggggattattcaccagactagtacccctcctcaaaatggtgtagctgagagaaagaatcgacatttgctagaagtggcaagatctttaatgttccagatgaatgtgccaaagtacctatggagtgaggctgtgatgacagctgcatatcttatcaatcgcatgccttctagaatacttggtatgaagtcccctgttgaacttttattgggtaagcgagagttcaaggtccctccaaaggtgtttggttgtgtttgctttgtgcgagatcatcgaccttctattggcaagttggatcctcatgcagtaaagtgtgtgtttgttggctatgcttcaagtcagaaggggtataaatgttgggatcccattgggagaagactgtttgtgagtatggatgtgacatttcgtgagtttgagccctattataaaagtaaaggagatcttgaccaatttcttgaggaattctcgactgtcatggaggttgatagtcgagagggggagatagagagaggtgacacacataggaaaaatgttagtgacaagaatggggagacagtggtggttggatcaataccatgctctattgacaatgcaagtaaagaagcagtggaagttattggagatacacaagacaaggatagagaaatggttcttcatgaggaggatggagaagatggagaagatgaagaagtggttgttgggacaattccatgtcctatggagcgagccgaaaagacagtgcccataccaaaggattggaagtgtgcaaaacaagatccaaggtggaaagatgcaatgagagaagagttgaatgcccttatgaagaataagacttgggagcttgtaaaacttccaccaggaaaaaaggcagtgggatgtaagtgggtttttacagtgaagcaaactcctgaagggaaggtggataggtataaagcaagattagtcgcaaaaggctacagtcaaacatatggaattgactatgatgagacatttgcaccggtggcaaaaatgggtacagtgagaactttagtatcttgtgcagtgaactttgggtggcccctccatcagcttgatgtgaaaaatgcatttcttcatggtgatttatatgaggaggtctacatggagattcctccaggatttgggaatagccagacagttggaaaaatatgtaaactcaagaaatccttgtatgggttgaagcagtttccacgtgcgtggtttgaaagattcaggtgcgcagtgtgtgatatggggtattctcagtgtaatggagatcacacggtattctacaaacatagggggacatacatcaccatcttggctgtgtatgttgatgatatagtgatcaccggtgatgatgtagaagaaatcaggtgcctgaaggaatggacacctaaatgtagaaggatattgtga

SEQ ID NO: 614 - DNA, 2156 bp, Oryza sativa
  unsure (1)..(2156): unsure at all n locations
  Clone ID: PAT_MRT4530_100560C.1
tttttaaaaatatactaatattttcaatacaaaataaacatattattaaaatatattcaatgttaaatttaataaaattaatttatatcccatatgttactatttttttctataaacttagtcaaagctaaaaactttgattaagaaaatagacaacaatttattaatatgaaatgaaacggaaaaagtattactgttgctcagntgagttgttgacaagaatccccctttgtgatttgtgcagcttcgacaactggactccacgcggtggcggccgctctaaatagtggatcccccgggctgccgggccgcagagcaccaatcaatccttcctcccagccaagatctttcttcctcctcctcgtcttcaggactcaattcgtcttctgatagcttagcttgattggggtgggtgacaatgggaggtggcaaggacaagcatgacgagagcgacaaggggctcttctctaacatgatgcacggcgttgccggcggccatgggtatcctcctcaccagggataccctcctcagggctacccgccgccgccgggagcgtacccgcctcctccgggggcttatccccctcctcctggggcttaccctccaccacctggggcataccctccacagcatgggtaccctcagcctggtggctaccctccacctggtggttacccccaacatggtggctaccctcctgcgggctaccccggatcatctgggcaccagggcggccatgggagtagcggtggaggacacatgggagcaatgctggctggaggcgccgctgcggctgctgcagcctatggggcacacaagatctcttctcatggccatggtggacacatgggctatggaggccatggaggctttggtggttacggccatggctacggcggtcaccacggcggcaagttcaagcatggcaagcacggccaccatggcaagttcaagcatggcaagcatgggcacggagtaatcctcagcttatagtcaggtgaggtctgagctgaggttgagagatggcacaggcaatggcgtccatgaccgggctgtcgcagggcgtgcagctgccggccgggcccaggcgcgccggcggcaggtccaggctcgccgtcgtcagggccgacgccgccgccgccgacgtccagaccggccgccgcgccgtgctcggcctcgtcgccaccgggatcgccggcggcgccctcgcgcaggcggcgctcgccgaggccgccaagcccatcaagctcggccccccgccaccgccctccggtggactccctgggacgctgaactcggaccaggcgagggacacggacctgccgctgagggagaggttctacctgcagccgctgccgccggcggaggcggcggcgagggcgaaggagtcggcccaggacatcatcaacctcaagccgctcatcgagaagaagcagtggccgttcgtcagggacgacctccgcctcagggcctcctacctgcgctacgacctcaaaaccgtcatcaactccaagcccaaggacgagaagaagggcctcaaggacctcaccggcaagctcttcgccaccattgacgggcttgaccatgcagccaagatcaagagccccgaagaggcggagaagtactacacgttgaccaaatctgctcttggcgatgtcctcgccaagctaggctaggatcggcataatggccatatggggtttcggtgtttttatgtttgttcatatggaaccggcaatgtaccctccatgttgatattgtatcagcaagcacttacgtatgattcaatcttgagttgttgttgacggctaaaagaaaaaaatttaaatgtataattagctagggcgaattattgtgatactaaatttcgccttagggattatcctatgttggagatcagaaaacaagaatatagatgatagcggtatgaaattcagcagtgggttttattccaaacgcaataagaaaaaaataggtaccttaaacccaaaagaaaaaaagaaaaaaaaaaaaaacctgtatatggggcgagcaggatgcagctttgccagttggctgctcccatcctcttcctctatgatttggtactctagtatgtggctcagtgacaatatggcttgctaataattaattaaataccttctgacgcttatgc

SEQ ID NO: 615 - DNA, 1092 bp, Oryza sativa
  Clone ID: PAT_MRT4530_100561C.1
atgccggctgttttcaccctcgccgctgccgcgcgtcgtgctcggattggcgccaacacgtcgccagccgattccaaccgcggtcaagtcaatccttcgccggaggcaactatagccgcgaagggcaatttctaccattaccatgtacaggaattctgcgcgaagcacaagaaggacatggccgacgagcaccccgtcatctcgtcagactccatgttcctcaaagccatccttccgacgctcaatgtctcaccgtgcaaccccctaaccatcaccggcggcgccggttcaagcactgtcaccgcggcggccttcgctggcggaagctcttcacctgcaccacttcaagttctggttttccagcagcaatccactggcaacggcaacgtggaaattagcttcaacagcaatgcttcgcctatggccatgtggtgtccagcagctggatgctccctagcagaaggggccttctcctaccaaggccctttgccaccttccatgcgcaaccacatcaacctgcttctaacggccttgccactgcagattgggatagccatggacaaaggcaaggctcctttgatcgagcttccatacggtatacccatggatgacttcctcgtcggacaaactgcatatggcggtgccggaccatccatcgaagcccctgacgccaccgccgctgcgtacccctacatagatgcattgaacaataacgttgcagctggctctctcatggcgtcaccaatggagccaacgttcagcatcaccgagccaaccgtgttgacccagggtgagggatcagagacgaatgcggtagcaacaacacgtaacaacgccgcaccattaatggtacctgatcaagttactgctgatgctgcaatggatgctgaagaagacatcatgttttcactggagtctctccttgggctggactacgacatgctgcctatggaagacagcagcgccgccgaagccgctgccgctgatgattcagctggcatggacattggctgggacctcgacctgcatgatatcttggtggagaatgccaatgacttcgtgttcctggacagcattgccgggagcgagtag

SEQ ID NO: 616 - DNA, 1462 bp, Oryza sativa
  Clone ID: PAT_MRT4530_100562C.1
tgtgttcgtatatccgatatgacacgcccaaactttaccgcctataaaaataccaacaatgttgggctccgaagaggattattcaataaaggaatacgaaggttgtggttggttcaattccttgttgtgtgggtgatcctgttcaagaaaaggagtagagaaagccttgtgaagaagagaatctacaggtttacacacagagaagtagacttccagtaatacaacaagtcgagcggctatgatctcaagatgctgaggttgatgagcaaatgttagatcatataaagcccatacaggtgtatagtgagttagggcaaggagaagaggaatctgaagaagggggaggagaatctgaattacctattgccataagaaaggggacaagaagcgcggcgggaaaaccaccacaaagatatggctttgaaagtgaagatgaaggtggtgataataacaacatagctaactatgtcttgtactctttattgtcacctacttacaaggccttgtggcatcattgaattcagtggcaatcccgaaagattggttagaagccaagatccaagattgtgagaagctatgatagaggagttagaagctcttgagaaaaacaggacatgggatcatgtaccctacccagacaagaagaaagtggtcgattgcaagtaggtatacaccgtgaagcaaaacctagatggaaaaattgagaggtataaggcaagacttgtggataaatgatacagtcaaacttatggaattgattatgatgaaacatttgcacctattacaaagatgagcacggtgagaaccttgatcacttgtgcggccaaccttgattggccattctactagttggatgttaagaatgcatttctatgtagagaccttcaggaagaagtttatatggaaattccaccagggtttgctacattacaaactagagcaaaggtgttgagactcaaaaagtctttgtatggtcttaaacaatcgccaagggcatggtttgatcatttcaagcgtgcaattagtggtatggggtatatatagtgtaatggagatcacacggtattctatcgccataatggatgccatataactatgcttgctgtgtatgttgatgacatgatcatcaggtgatgattctatggagataactagattgaaggaaaacttaagtaaggaatttgaagtcaaggatctaggccaactaaaatactttctaggcatctagattgcaagatatcctagagggatagtcttgtcacaacggaagtatgcattggatttactttatgacaccggtatgctcgattctcggctggcttctacaccaattgagcaaaatcataagctatgtgctgaatccggtgatcaggtgaacaaggagaggtatcaaagacttgtgggatggttgatctatttatgtcacacaaggcctgatataacttatgcagtgagcgttgtt

SEQ ID NO: 617 - DNA, 514 bp, Oryza sativa
  Clone ID: PAT_MRT4530_100563C.1
atggacggcagcgacgacgagtgctgctactactacgacgccgtcgacagcgatggggacgaggaggaggaggaggagataataatgctggacgaggacgacgtaggcttgctcgacggcgccgcgctgccgccgccggaggaggaggtggagcaccgcgcgatttgctgggccattacaaaagaatcccttgcagctgcgcaggagcaagacctgtccatggtgatgaacctggtgaacgttgagcggcacaacgcgcgcgccctcctcgcccaccaccggtggaagatggagcgcatctacgaccgcctcgacatgatgggccgggacgccttgctcagggacgccggcgtcgttgtgctgccggagaagagcagcagcagcggcagcagcatggccatggcgaagacgaaccccccgggaagcgtggctgtcacctgcaacgtctgctttgaggagtacccactcggctctgtctccgccatggattgtggccactgcttctgcaatgact

SEQ ID NO: 618 - DNA, 258 bp, Oryza sativa
  Clone ID: PAT_MRT4530_100564C.1
atggcgcgcgcgtccacgaagccagcgcttgacacgctgtggcgcatgcggttcgccaccgcgcccagagaaaaacgctcgcggaaaccacacgcgcgccgcggcagccgctcacgggcgggtgggagactgggagcggagctgaggcgcccggtgcggtgcggtgggcgcgagatttttgtcccggcggtggcgcagcgcggcgagcccgcgactgacgccgccgccggcacggcgtggacggtggacgtgacatga

SEQ ID NO: 619 - DNA, 952 bp, Oryza sativa
  unsure (1)..(952): unsure at all n locations
  Clone ID: PAT_MRT4530_100565C.1
cattacccagtgaaaggagatctgggaccctttgtgaaagggagggttttgcttggtgccctccaagccaattcaacgttcccttgtaacccacccntttgggaagggcccacccttggggaaaataacgggtgggaggaggggaagaattttttggcctgggggaacccacgccttgtgtttgtcaacgcctaaattgttttggaacaccaaangaaggggtgcctatagcccccggagtgtgccaatttaatgtcaacgtgtgggagggaaattgtgaacgcccacaaccgggaaattgtaatattgtctgttgggctgccaccacacctgcctangtgtgacttgccaccatttgccggtgtgccaaacggacctgngggattgccacgaataattggcctcggatgggcgccacaggcctgataacctgtttgccttgccggggtttttgaccccacaaattgtgtgtgttgacccactggggtgtgtgccacccacatataaaggggggnctgccacatatgacccataggacgcgccactgtgatacggccggattgtgtgcgccacatatacggataaaaataggtgatgtgtctgtgtgtgctgctgtgcctagatgtgtgtgaaacgccccgctgcaccctgatggtggaccccctgggattgtggatgggtgtgtgtgcccccccctncctgggctgccctgatgccccctgcctggggtgcaaaatgatgggatgccatgtaatgtgctgtggtgtgcgtggatggctggtgcggctgggtgtggtgcatgccatgagtgttttttggtgaggaggaaataaccatgggtgaaaagatcttttgtaatggaatcgaatggataatgtttgttcaagaaataatagtggtcatggttggttctttttgcccccagtaaccccccaaaaaaaaaaaaaaaaaa

SEQ ID NO: 620 - DNA, 396 bp, Oryza sativa
  unsure (1)..(396): unsure at all n locations
  Clone ID: PAT_MRT4530_100566C.1
gacaaacaaaaagatgacattttaatatgaattgccaactaggcgttggagtcaactaatatacacaaaaagatgtaaagtttagcacagcgtgcagagaagagcatcttccaaactccaaggaaataccaataagacaattctcacagtgcaggaaacttgaggataaaaagctaggcaatctaaaactagaatgtagcaataaggatcatctgtttaagtacatatatacacgatttctttaccagcaatccacttgagaagccacatggcgattattgctagtagaacgaacaatttgacagctgcaggtaatctagctacacggattacgcatgccatgtaacgaatgtcgaacgtcgcagngtctgccatagtgtacttgatgcctgcact

SEQ ID NO: 621 - DNA, 741 bp, Oryza sativa
  Clone ID: PAT_MRT4530_100567C.1
atgtatgatactgtagctgacaaaaccatcgattcagtgcggaatctggagcggcggcggcggcagggtgagggccggcacgaaggaaggaacttgagcgggtcgagcggcggcttcggcggcgacggccttagctcgccggagaaggcgggggcgtccggccagtggcctcccccacgatggtgccgcgctaggctggggcgaacgagagggctaatgcagaaggcaaagcctgagacgccgctggccccagccgtgcctcccgctctgcgccggcagggggaccagcagctgcaggacgaatccgtcctaccagcgtggtctacccgagtcctacagatcttgaggtcgtggactgtggcgcactcaaacggccacaccacggcggccatgtccatgggcgggctgataaacaagatgaccgggcgcatcggcgactcgccgttgatcgggtcgggggaaggcaaggccatcatacgctccacgctggcgcgtgacatcgccgccgtgatggagtacaggggcgccgggctgcaggaggccatcgactactgcgtcaaggaacggctggacgaagggttcatcgggctcatcgcggtgtccggcaccggcgaggtggcgcacgggttcaactgcaccggcatgttcagcggtgtagctctggaggactcggtggcagcggtcctcggggaggatctcggcaacaacactccacatggaggactccgatggtggcggtga

SEQ ID NO: 622 - DNA, 390 bp, Oryza sativa
  Clone ID: PAT_MRT4530_100568C.1
ttattcctcccccctctccctcccttctctctcttttctcctgcagccgcactcgctgaacatgccggtgcagttgaacccgtgcgccacctcgccggtgccgaacaccgcgatgagcccgatgaaccctttgtccagccgttccttgacgcagtagtcgatggcctccaagatgctgttagcctccttggcgagcttcaacatgccgacgttgtcctcggtaatgaagtagctattgtctacgacctgaagaccttgcaaacagtgaccacaaagaataaaatcagaccagtccacgacctcaagatctgcaggactcaggtggaccacgctggtaggacggattcgtcctgcagctactggtcctgccaaaattcgactggattccat

SEQ ID NO: 623 - DNA, 950 bp, Oryza sativa
  Clone ID: PAT_MRT4530_100569C.1
gacccgggaggcaggcgttggcgctagggctgggagccttgacgcgcgaacctcgggtctgattctcgccgttccagccgccggcgccggaagtccaggatccctggccctggttgagttggctcctttcttgccgctgccgcctgctactactctgcccaagtgtgtgtttagggcagagtgagcacgatatcttctatctgatagacaagggcgatgccttcgatggctgggagccttgacgcgcgtgaccgccgcgccgccgccgaacctcgggtctgattctcgccgttccagccgccggcgccggaagtccaggatccctggccctggttgagttggctcctttcttgccgctgccgcctgctactactctgcccaagtgtgtgtttagggcagagtgagcacgatatcttctatctgatagacaagggcgatgccttcgattacatgtgataaggttgttctggataatttatatggagaaatagccaagtctgtggtgacgattaaaagatacaaccgaactgggcttgttaactttgccaccgggtttatcatctatgcaacaaggtctgaagttctagtatgcacagatcacacagtacttaaacagggggaagacacatatgtatattacagtgatggtactgctcgtcaagcatttgaattcattaaacgcacaccatgtggacatgcaattttattagtatctgtacaacctggcgaacgccgccagtatccggtctcattcagtacagtacaagcaaaaagagaggagatttgtatgattgcacgggtcaatcatgacggagatcctggatttatgtccggcattgtagtggccccgagcggcaaaataatgcttgcgatcaggaagagttatcacttagtcatgaggaagaagtttgcttttacttgttcacatggaagaacagggaatgtggttg

SEQ ID NO: 624 - DNA, 220 bp, Oryza sativa
  Clone ID: PAT_MRT4530_10056C.1
gtaatgcccaggttcctcgtcaactaagggtgggcctttaagggccagaccgctgctaacccgctagaccaacttctagaaaaggaccctgctcttatggagcgaaggcagaaatgcctcaacaggcgtgagtcctacaaggctgccagggccgagaagaatgcctgcgcacggcagcgctaaagggaacatcctgccttcatcgcaacttgacctgcat

SEQ ID NO: 625 - DNA, 387 bp, Oryza sativa
  Clone ID: PAT_MRT4530_100570C.1
atgaaaagagatgagcaagaccgccgcggtgggcacacgacctcggccgcctgcccaaccgagccggggaaaatcgagcgatccatccggcccgcccgcgcccgatcgagcaagcgtggtatggttgtgggttgctcacccgcgcgcaccacgcaggcgcagcagcgggcgatcgagccggcggccaaattaaccaatcgagtcgtcatcagtcgccagtcggcaagcgtccgcgcgtctcgcctcgccgccgttgccgcgtgcgtttcttgtgcggtgctaccagacgactacacgagagaaaaggggacggcggcatcgatcggcatatatcacaatcaaccagcaccgtccatcgctgatgcgccgatgcatctgccgtctgcc

SEQ ID NO: 626 - DNA, 363 bp, Oryza sativa
  Clone ID: PAT_MRT4530_100571C.1
atggaggaaatgcctcggttggctatgggcgccgcgatgctcatcatgctgctcacggtttggagttcaccggagatggcaatggcggcgtcggcggcggcgacggtggcgcaccgcttgggcctaaacggcaatggggtcgctggcacgcaccccgtcggcccgggttcgacccttatcgagcacgctcaccagggaaatatttacctctcctttcttaaaaccattgacaccaagttcttccttgaaaccgggaggataaatgttggagtgaggagaaacctcaagattgctgtgccactgaaacatggttttagcgcttttgtgaatgtatctgaccaaggtgttaggcgctggccctaa

SEQ ID NO: 627 - DNA, 576 bp, Oryza sativa
  Clone ID: PAT_MRT4530_100572C.1
atggcgccgcactcgctgaacatgccggtgcagttgaacccgtgcgccacctcgccgcccggcgccccttacttcatcacggcggcgacgtcgcgcgccagcgtggagcgtatgatggccttgccgatgcgcccggtcatcttgttcatcagcccgcccatggacatggccgccgcggtgtggccgtttgagtgcaccactgcgcaacccaccgtctccggcgcgggatacggcagtcaaactgcttctattgtctacgacctgaagaccttgcaaacagtgaccacaaagaataaaatcagaccagtccacgacctcaagatctgcaggactcaggtggaccacgctggtaggacggattcgtcctgcagctactggtcctgccaaaattcgactggattccatggcggccgcgccttgctaccccacaccggcgctgcacttgcatctgctaggcaacgctatgcacatgcatgttcttcgggcagaaagaaacagaggcggcaccccctgccggcgcagaccaagaggcacggctggggccagcggcgtctcaggcttcgccgtctacattag

SEQ ID NO: 628 - DNA, 728 bp, Oryza sativa
  Clone ID: PAT_MRT4530_100573C.1
atggaatccagtcgaattttggcaggaccagcagctgtaggacgaatccgtcctaccagcgtggtccacctgagtcctgcagatcttgaggtcgtggactggtctgatttttttctttgtggtcactgtttgcaaggtcttgaggtcgtggacaatagctacttcatcaccgaggacaacgttggcatgctgaagctcaccaaggaggccaacggcatcttgacggtgggttgcgcagtggtgcactcaaacggccacaccgcggcagccatgtccacgggcgggctgatgaacaagatgaccgggtgcatcggcgactcgccgttgatcgggtcgggggaaggcaaggccatcatacgctccacgctggcgcgcgacgtcgccgccgtgatggagttcaggggtgccgggctgcaggaggccatcgactactgcgtcaaggaacggctggacgaagggttcatcgggctcatcgcggtgtccggcaccggcgaggtggcgcacgggttcaactgcaccggcatgttcagcgggtgcggctgcaagagaaaagagagagaagggagagagagggggaggaagaagggttggagagagaaaggatgacatcgcgcttgcgtgcgggggcgctgcgagtgctagctaacttgggaccgaaacgccagttcgactcggcagctcgccgccctgctgacgccgacgtctctgtgcttggtaagtacgtacac

SEQ ID NO: 629 - DNA, 155 bp, Oryza sativa
  unsure (1)..(155): unsure at all n locations
  Clone ID: PAT_MRT4530_100574C.1
attagagatcccgaggatagctnaggacccggaggaagaggagctctccataggtcctgaatatgctcgccagntgctgagtatggtgctgcgtcaccacatgaccattggggtgacaccacaccatggggtggagaggtccacgcctcctgccc

SEQ ID NO: 630 - DNA, 327 bp, Oryza sativa
  Clone ID: PAT_MRT4530_100575C.1
atgcggcgggcgtgggcggcggctggtgcgcggctgtgggcgacgttgtcaccgagctcaaccggtcgcacgacagagaggagctgggcgtggaagaccggtgcggcgggcacgggcggcggccggctggggaggagctgggtggtggcgctcaggcacgagcggcgatgtcaccaagctcgaccggccgtccccatcttctcgatgatggggcatggggagaagggccggcaggccggtgcgcgcggcgtcgtcaccgagctcgaccagccatccccattttctcaccaaggaacacgcaagaggggcggtcattgtcgccggtga

SEQ ID NO: 631 - DNA, 947 bp, Oryza sativa
  Clone ID: PAT_MRT4530_100576C.1
atgaagcttacattacttggcaactgtatccatcaccctgttcttcttctagtgatcctcgcctgcgccggcattgcaccggcgagcggcgccggcgggaggtgggacgtcctccagcgcagcatcggcgtgtcggcgatgcacatgcagctgctgcacaacgaccgcgtgatcatcttcgaccgcaccgacttcggcctgtccaacctctccctccccgacggccggggccgccgcaacccgcgggagcgcgtgaccggcgggtggaacgacggctaccgcaacgtgcgcacgatggccgcgtgcgaggcgggcgacgacacctgcgactgggacgagacgcaggacgcgctcgccgcgaacaggtggtacgccaccaaccagatcctccccgacggccgcgccttcatcgtcggcggccggaggcagttcacctacgagttctacccaacggccgattcttccggtggctctgctatctcactgccattcttggttcagactaaggatcccgaggagaacaacctgtatccctttgtccacctcaacatagatggcaacctgttcatctttgccaagaatcgcgccattcttttcgactacaagaagaacaaggtcgtcaggacgtaccctgagttggctggcggcgacccgaggaactatcccagctcgggctcgtcggttttactccccttgaagccgtccccaacagaggccgaggtgctggtgtgcggcggcgctcccgccggctcctacacctcaaccaaggacggcaccttctcctcggcgctcgtgacgtgcgggcggatcaagatcaccgacacggcgccggcgtgggtcatcgagacaatgccgtcgccgagggtgatgggggacatgatcttgctgccgaacggcgcggaggtggtgatcatcaacggcgccatggacggcaccgccggctggga

SEQ ID NO: 632 - DNA, 222 bp, Oryza sativa
  Clone ID: PAT_MRT4530_100577C.1
gcggtttactattaatctagtatactgctgtcgccgccaccgccatggggatggctccggtcgcgacctacccgtcctcctcctccggctccaccctcgcgcgggctgcgtgtgcagttgccaagcggacgttccgcggcatgccatgcaatagttttggtattgggtaacgtaacttaaattcactggccgggcctttacaacagcagcgactggaaaaac

SEQ ID NO: 633 - DNA, 459 bp, Oryza sativa
  Clone ID: PAT_MRT4530_100578C.1
atggcgacagcctctacggcggagaactcgccgcgcccgccgccgatgaggccgctctccggcctcttctaccacaccgcctccaccgtgcctcttcttggggaggggaaggaagcgaggcggcgccgccaccacgacgacgagccggcaaccacaacgacgagcaggaaaccactggtgccagcgcctcccgaggacgcctcccgctcgctcgacagcgaggcgaggcacacggcggcggcgtcccgggcgtccgccgcgagggaggagagcacgacgaagagggaggagaaggcgaaggggaggagaagtgagcagcgcaggcagcacggtcgacggcgaggcgaggcgcacggcggcggcatccccggcgtgctgctgcggcgtgggaggcgaggaggcgcggcggcgtgggaggaaaggaggaggcgcggcggcgaggaccgtgctgaagggtag

SEQ ID NO: 634 - DNA, 477 bp, Oryza sativa
  Clone ID: PAT_MRT4530_100579C.1
atgaggcttcagccgtcgttgccaatcattggcatgacactagggcacacatggcctttgggccacatcgagctcccagtcaccttcggcgactccaccaacttccgcactaagcggatcgacttcgacatggcaaatctcaatttgccctacaacgcggtcctgggaaggcccgcgctggtcaagttcaaggccgccacccactacgcttacctccagatgaagatgccgggccccaacagccccatcaccatctctggcgacgtcaagattgccttggcgtgtgcggagcagcgcgccgatagcttggcggcggccaccgagccggtggaggccggtggatccccggaggcctccgcatcccacgcctccaagaagcgcattacctcgggcgatgaggtacccgtcaaggacatcacccttggcgatgatccgtccaagaccgccaagattggcggcaacttggatgccaaatag

SEQ ID NO: 635 - DNA, 2646 bp, Oryza sativa
  Clone ID: PAT_MRT4530_10057C.1
atgaaattgaggttgatgagaggtacaaatcctataagatcagcatacattgcagctgataatagggaatgctacaattgtgggcaagtgggtcatgtgagctacaattgtcccacttcccggaacattggtggtaggggatcgattcgaggagggcatggtggaactcgtggtggatttagaggagaccgtggtgtttttgggggaaatcgtggtggtagaggaggtgatcgtggaggtcgtgttggaggtcgtggtaggggcagaggtgttcctcaggccaatgcagttaaggaggatgggaaagctgttaccctaataggtgaacaagtgacacaatgggaggaatggcagaagaacaagaccaatgagagctctaacaccaccactcactttggtaacttcgccaactacgcccaagtgggcgaaggtactcaggcacaggcacttgcatctacatatagacatcctatagattggatcatagactcaggagcatcaaagcatgtcacaggattgcataatactttcacatcatacaccccttatatccactctgaaactatccaaatcgctgatggtacatccaagcctattcatggtatagggtcggtagagtgcacatcatcaatgaacttgtcttctgttctgcatgttccttcctttccagttaaccttctctcaattagctcggctattgatcaactcaagtgcattgttgtatttgatgagaattcttgtctgttccaggagaaggggactgggaggaggattgggactggagtcacgcgtgatgggttgtggtacatcaatcatgaggaactgggactacctgcggtggttggagatgttgagaaggagatcagtttgcttcactatgaggggattattcaccagactacttgtcctggcacccctcctcaaaatggtgtagctgagagaaagaatcggcatttgctagaagtggcaagatctctgatgttccagatgaatgtaccaaagtatctatggagtgaggctgtgatgacagcagcatatcttatcaatcgcatgccttccagaatacttggtatgaagtctcctgccgaactgttattgggtaagcgagagttcaaggttcctccaaaggtgtttggctgtgtttgttttgtgcgagatcaccgaccttctgttggcaagttagatcctcatgcagtaaagtgtgtgtttgttggctatgcttcgagtcagaaggggtataaatgttgggatcccattgggagaagactgtttgtgagtatggatgtgacatttcgtgagtttgagccctattataaaagtaaaggagatcttgatcaatttcttgaggaattctcgactgtcatggaggttgatagtcgagagggggagagagagagaggtgacatacatgaaaaaaatgttggtgacaagaatggagaggcagtagtgattggatcaataccatgctctattgatgatgcgagtaaagtagtggaagtcattgaagatacacaagatgaggatagagaaatggtccctcatgaagaggatggagaagaaggagaagtagttgttgggacaattccatgtcctatggagggagccgaaagggtgaaacaaaaggatgtgctggtttaccaaaggaggcggtttgatagtcagggggagaaaagaaaagggttagtgcaaagtcaaattgaagagttaccacacccaaaatgtccagtccctgaatcctcccagagtctctctcctccagcctccttggcttctcttgagacaattggtaatacttctccaactcttgaacatgtagaattacctcttgtacaacgtagagagactagatccaatgctggtagacctcctatacgtcttggttttgagcatcttagttttatgcatgacattgcaaactatatcacatattctcatgtttcaccagcatacaaaacatttattgcatcattacagacaatgcctataccaaaggattggaagtgtgcaaagcaggatccaaagtggaaagatgcaatgaaagaagagttgaatgcccttgtgaagaataagacttgggagcttgtaaaacttccaccagaaaaaagggcagtgggatgtaagtgggtctttacagtgaagcaaacccctgaagggaaggtggataggtataaagcaaggttagtcgcaaaaggctatagtcaaacatatggaattgactatgatgagacatttgcaccggtggcaaaaatgggtacagtgagagctttggtatcttgtgcggtgaactttgggtggccccttcatcagcttgatgtgaaaaatgcatttctccatggtgatttacatgaggaggtctacatggagatccctccaggatttgggaatagccagacagttggaaaagtatgtaaactcaagaaatccttgtatgggttgaagcagtctccacgtgcatggtttgataggttcaggcatgcagtgtgtgatatggggtattctcagtgtaatggagatcacactgtcttttacaaacatagggggacacacatcaccatcttggctgtgtatgttgatgatatagtgatcactggtgatgatgtagaagaaatcaggtgtctaaaggaaaggctgggaaaggcatttgag

SEQ ID NO: 636 - DNA, 358 bp, Oryza sativa
  Clone ID: PAT_MRT4530_100580C.1
ggaaaacaacaaagggaaaaggaaatatatttggaaaccaatacaaaccctttgttttgaaaaaagcaggggtggggccaaggacaaagccagaggaacaaaatttcaaaaaaaccaaaatgggttccttgggaaaaactttttaccttaacagggccattttaaggggccccagggggaaacaggccaaaacttttttaaggctttggggacggggggaaaaggccaccacctttttcctttacattaaaaactttggggcaggggaacaacatagaaccccgacctaaagaaaaacccctaaaacagggggggggggaaaacaaatttgattggggcccttaacgggaggggcatt

SEQ ID NO: 637 - DNA, 362 bp, Oryza sativa
  Clone ID: PAT_MRT4530_100581C.1
caagtagcttggtggcgtactgatggtgttggtcttggcggccagtggagacgctgcacccggtggaggagatgcggcgaccggcggtggccgcctcgggcatggatgcggcgatggggaggacgtggcccgtgggaactgcatcagggattggagcaatagcaagcggcgcggcgacggattggatcggcgcttcgtcttccatggatgggttcgggcgtatcaggagcgacgggaggggaccaattccatcggggaaaagcaccatggcgtgcactgcacacctgggctgcccggcaaaacagtccaacactgtggcgactacagcatttttgctcgaccttgccggggacacggcctaa

SEQ ID NO: 638 - DNA, 1964 bp, Oryza sativa
  Clone ID: PAT_MRT4530_100582C.1
aatagagatagccaatacatgacatcaattgatcaatacaccaaatttttttagtacaggctcaccttagagctcccatgtctggtcgctagtactactaatgaatctgcaaagtgcagccgcatagccacgctagcagtagcagtacgtacgagtgctagagatgcactgccacttccaaaactcattggatttaggagaggagagaacacttagcactaagatgagatggggaaacacgcaagaaatgcagatcgagacttcaatgggaaagaaccaagtagcttggtggcgtactgatggtgttggtcttggcggccagtggagatgctgcacccggtggaggagatgaggcgaccggcggtggccctgcgcagctgcgctcaggggcggcgacgcgcgaggcgctcgagctcgattgcgggctggttgggaccctgcggcttggttggcgatgcggcggcggaacccgacagctagcggaggactcacgcctcgggcatggatgcggcgatggggaggacgtggcccgtgggaactgcatcagggattggagcaatagcaggcggcacggcgacggattggatcggcgcttcgtcttccatggatgggtttgggcgtatcaggagcgacccgaggggacgtatcaacgaatccaccgtcgcatcgtcgagaccctgctgcacctaaggccagtggcgcagatccgctactcccgaggtaactgccatcagatccacgagggagaggtccgctaccaccagacctccacattgctggcaacgccggacggcctgctcactaagccgttccgctgccgcgcgctgctccgctcgaggctggccgcgggcatcaccgtcggccactggccgcgcctctctgcccgtccagcgcgccgctggctgcgcctcttcgcctgccccgcgcgccgctccccacgcttctccagcgcgccgctagatccgccgctgccagcgcccgccaaaccgctgccccacgctccggcaattgccggggaaaatctgaaagcatccttacttaaatcagcgtacttgatggagttcgcctacttcgtggtcatcgacttggaggcgacgtgcgagagggggaggaggatatacccgcaggagatcatcgagttcgcctccgtcgtcgtcgacggcgccaccggcgagcagctggcggaggcgttccgggcgtacgtccggccgttgcaccaccgggagctcaccgattactgccgggagctcaccggcatcgcgcaggccgacgtcgacgccggcgtggacctccgcgaggcgctgcgcgcgcacgacgcgtggctggacgcgaggggcgtcaagaacgccgccggcggcggcggcggcggaggagggttcgccgtggtgacgtggggcgactgggactgccgcaccatgctggagggggagtgccggttcaaggggatcatcggcgacggcaagccggagtacttcgaccggtggatcaacctcaaggtccccttccggcaggtgttcgaccgcggcggcgcccgccggatcggactggaggaggcgctcgccgtggccgggctggcgttcgaggggcggccgcacagcggcctcgacgacgcgcgcaacacggcgcgcctcctcgcgctcctgatgcgccggcgaggaggggtcaggctcgccatcaccggctcgctgccgccgccgccgcggccgccgtcgcagctggtcgccattggcgccagcgcggccgcgacgccggcggccgccgcgccgggagtcggcggcggtggcgcgcgcgtgcactactgccagtgcggcgtggcgagcagggtgggggtggcgcggaggccggggccgacgcaggggcggcgcttcttcgggtgcggcaggtggacgccggcgagaggggcggtgtgctcctactttgtgtgggaggacgttgatatgtctcgagcaaatccacggccatag

SEQ ID NO: 639 - DNA, 1640 bp, Oryza sativa
  Clone ID: PAT_MRT4530_100583C.1
tttgatctcttatatacccctgagtttttatggccggataattcaggcccttctacgaattgggccgcaaagttgggcttaggttgcgaagcagacttccacggcaagcagccgcgcgcttcgtcttctcgcaacgcaagtcgcaggagtcttgcaagacaagccatctatcgctcccggatctccgcggcttccagaagcaaaatcgaatcaaaccaacgttagtttcccagcatttaaagcgtcgtcttcctcgtcgagtcgtcgtcgtctccccgtctcgtcccccattcgccgcagaatcccctagcctccacgacccgaagaaaccctaaacctctccaccacgatcccctcgctcccgtctccgataatcaatggctgatcagcctccgcggcgatgggcggcggcgaacgacgacgtcctgctcgagatcgtccgccgcatcccgtgcgggatcgatcgccgcaacatgggccgcgcctgccactcctggcgcgtggcgctcgcgaagctcgagccaccggcgccgtctccgccgctcccgtggctcctcctcccgagagccgacgggccgcctaccttctcctgtgtcctcagcggctgccgctcccaccgcttcttcatcccgcccggcgcggtgcaacgcgcgcgctacttcggctcgtacgacggcggatggctcttcctcgccatcggcggccaaggccaagctcagcgccaccttctcctcaggcacaaccccttccggctcctcgtcctccccaacgtgacccacttccccgacatggtgtacccgccggtactgggagtggtgaaacgggaccatcagatcagcatcgtcgccgccaccctctcgtgcaagccaaccgaggaaggatgcatcgtcgccggaatcatcgatttcgctcactcccccggccgcgccgtgcggcagatcgcgttgtggcgcatgggcgatcaggtggtcttgccgccgtactgggagcaggtgccgaaccagccgatgattgaagcagtaccggtggacctcatacaccacgatggagccttccatttcctcatccgattggagcacatcatcgtgtgtgaagaacccccggagttccaagaagaagccgtgcatctggtcccggtttacatgtacttccagccgcgcggcggcgacaacggcgacgagacggtccttgctcgctacctcgtggagtctcgcaagaagctgctcatggtcgtcaggtattccagtgggcgtcagcacttgccgacgtcggcgttccgggtgttccagatgaagaagttcaacaatggcgaagaagacgagccgctcaacaatggcgggtttcagtactactggagcgagctggacaagctcgaaggccggatgctgttcgtcggacgaggctgctccagatcctacgaggcgggtgacagctaccccgcgggcatggagggcgtctacttcctggatgaccggagcttcgccgaggcggccatggctttcggtgaaggtgcaaacaagctgccgtaccgctgcagcgacaacggcaaatggtcgggagcaccagctgattcccgggtcgatcgctgcttcccgtcgcgaggcccgtcgatctactcacctccggtttggcttctccct

SEQ ID NO: 640 - DNA, 414 bp, Oryza sativa
  Clone ID: PAT_MRT4530_100584C.1
atggccgagctccaatgtcagggctactggtccttcgccctctccacgctccacgacggcaccaccgctgccgtggatgcgcttgtggaggcgttcctagaggagaaggagcaaggcaacggggtcgtggaggggggaggaggacatgtacaactggtgcgcacgctggtggtgagggcgaagacgcgcgcggggcggagtgtgtacgaggtggcggtgaggatgggaggctgcaaggtggacaagtacatgtacatggtgatggtgatgggaatggagcggttgggcttcgaggcggacttccgggagtggaaggccaagatcttgccgttggccagagagatgctcgatgaaatgcgcgagagagaagagcaacacaacaacggcttaactatgaatttgattatcatttag

SEQ ID NO: 641 - DNA, 294 bp, Oryza sativa
  Clone ID: PAT_MRT4530_100585C.1
atggccgccggccgcctgccagccgctgccgctcggcacggccgctgcccgcctacagcctgcttggcgccggccgcctgcccgccgccggatgggagtagaggggaggaggaaggggagaaggggaggaggggaggagaggctggatcggatctgagggagggagttggagaggagctatatcttagggggagttggagaggcgcgatcttatctctaaatatatttagtctgggacttagccgatcagagatgggagaaaaatatttactcccgggtataaaccgggactaa

SEQ ID NO: 642 - DNA, 345 bp, Oryza sativa
  Clone ID: PAT_MRT4530_100586C.1
attcccacacccctctaatcgttatgcaattgctggttgtaaattgattggtttatgcctattcgttgcggagttcaattatgtttagtttgtgtttaatattgatattgatgtgtgagtgcttatgaattgttgtgtaaaccgtgtgaaatctatattgccagtgaggtttgttggcccaatttggtggtttggtctgaaaatgcttctagtctaaaccaagtctaaatcagtagtagactgtcactgttgttgatttgagagtatttatatttgctgttgatttccttttatgtaattaacttgaaattgaaattgcattcagggttgagttcaaaaaaaaaa

SEQ ID NO: 643 - DNA, 1663 bp, Oryza sativa
  Clone ID: PAT_MRT4530_100587C.1
atggccgcggccgcgagggaggagcagccgctgctgctgcggcgggaggagggggaggaggagggtgaggaggttgggtggaggaggaggtgggggagcgaggccgggaagctggcgtacctggcgctgccgatggtggcgattggaatggcaagtgcactggaaactctctgtggccaagcttatggggcaaaacaataccatactctgggagtgcacacctacagagccatactcactcttctggtggtgtgcattcctctatcacttctatgggttttcatgggcaaaatcctggtactcattggtcaagatcctttgatctcgcatggagctgggagatacatcgtctggctgattccagggcttttcgcaaacgcgttgattcagcctatcacgaagttccttcagtcccagagcttgataatgcccatgctcgttgcatccgttgcaaccctggtgttccacatccctctgtgctggttgatggtgtttaagaccggcttggggtatactggagctgccttgtcgataagcatatcatactggttgaatgtggccatgcttgtggcttatatcttgctgtcaagctcttgcaaggaaacacgcacacctccaacaatcgaggccttcaagggattggatgggttcttacgtctagcattgccatctgcgcttatgatttgtcttgagtggtggtcatttgagctacttattcttatgtcaggacttttacccaaccccgagctacaaacctcagtgctttcaatttgtctcacaagtataactttactttttaccattccttatgggcttggagctggtggaagcacacgagtagcaaacgaactgggtgctgggaaccctgaaggagctcgttcagctgtctatgttgtgctgtcagttgcagtgacagaggcacttatagtatgtggaactctgttagcatcacggcgactcctgggtcgtgcatacagcagtgaggaggaggtcatctctttcgtcgcgatgatggttccattggtttgcatcactgtggttactgatggtctacaaggagttatgtcaggtattgctcgaggttgtggatggcaacatttgggcgcgtacgtcaacctcggctcattctatttgctcggaattccaatggcgatccttcttggctttgtgctacatatgggagcaaaaggactttggatgggcattgtctgtggttcaatatcacagatcacccttctatctgctatcacatttttcaccaactggcaaaagatggctgaaaatgctagggagagagtgttcagtgagaagccaacggagccctccaggtatcatctagtggagtagttctactccaatttttgctgggggcagtggggtaaatctcatccctcggacggttggacttgctcgcgagagtgaccatgcagagaaggcatcaataaaccacccttttttgtgtgtttcatcacagcacgaaatgagccatctttcctgaattggttcatttttcacgtgtagttttgctcacaggataggcagggttgacagtcgagggttgcatcccacggaaaacgtttggctaggaaagaaggggtccttttgtggatagtaacagaaatctcaagctgtttggttttctattgtaaaaaaaaaaaaaaaa

SEQ ID NO: 644 - DNA, 337 bp, Oryza sativa
  Clone ID: PAT_MRT4530_100588C.1
caagcccaacaaggcccaacaacttggaccaaccggggaatatccaagaggggaactaattcacactgcaacaggaaaccgggaaaaaacctttaatttaacaaacaaacgcccccaagccaggggccctactaaaaataaattagccaaaagtaagaaggtcacaagccaaaatattgggggaaaaaaccccaaaaaccagggcctgaaaactttttaaatttggccactaaaccccacatgttggaaaagttcactttccaagaaggccccctttggcttaaaaccccaaaattccccttggaaaccgggcccccttaggcccctcccccaaaaa

SEQ ID NO: 645 - DNA, 265 bp, Oryza sativa
  Clone ID: PAT_MRT4530_100589C.1
tgggaggggtatagatccctaagggggaatgggtaccccctaggcgggcggggatatcgaagcccatcgaatactcttcctcgggattgctgtcagctggcctcgtcgtgctccccctccgaggtaatcgccgtacagcaagcattggtaggaagaaaaaatgaaaaggtcttgctcgacgtctaagtaagaaggaagccatggcaaacatagtagactgaaggacagcaaacatgaaggcccgatccttcgcatcgataacaga

SEQ ID NO: 646 - DNA, 1605 bp, Oryza sativa
  unsure (1)..(1605): unsure at all n locations
  Clone ID: PAT_MRT4530_10058C.1
atggatcaggagaaggcggacggcggcggcaggaggaggaggagcagggcgacgagtagcagcggcagcggcgcgagcagcacggcggcggcggcggcggcggagaggaaggagatggagcgcaggaggcggcaggacatgaagggcctctgcgtcaagctcgcctctctcatccccaaagaacactgctccatgtccaagatgcaggcggcgtctaggacccagctgggcagcctggacgaagcggcggcctacatcaagaagctcaaggaaagggtggacgagctgcaccacaagaggagcatgatgagtatcacatcatcgcgctgccgctcaggaggaggaggaggaccagctgctgctgctggccagtcgccgngcggcggcggcggcggggaagaagaagaagaagatatgacgaggacgacggcggcggcgccggtggtggaggtgcggcagcacgtgcaggaggggtcgctgatcagcttggacgtggtgctgatctgcagcgcagcgaggccggtcaagttccacgacgtcatcaccgtcctcgaggaagaaggcgccgacatcatctccgccaacttctccctcgccgcccacaatttctactacaccatctactccagggcctttagctcaagaattggcatagaggcttcgaggatttctgagagactacgggcattggtatgacacctgaggtaccagatcataactgtatatatatgtcttctacacatattaggtcgtcaggtgtctcctgtagttagggtttgtccctagttggtcttttgccggcgagctccatgggtgccggtgtggtcggatgcggcggcgggtggtggcggtggagatgcgagatccgaagaccggtggatgaatcgacggaaaaggctggttccttgcggcggcggcggcggctacatcgtcgtcggcgaccgggagaagccggctccttgcggcggcgccagttgcttcgtcgtcggcgtccgggatgtcgccgtcccgacgaatcgacggaaaaagctggctccctgtggcagtgtcagtggcttcgtcgtcggtgtccgggaggtcgccgccccgttccagtttgtcatgcgtgctgcacgccaaaggaggcccaaggttgcattcgtcgcggcattgccgcagctcccagccatagacgaggtggaggtagcgatccttgatccacttgaagctcttgcggaaggagcccttgaccttgccttccacggagtaggccttgtacgacgccacccgccgcttccgctccatgtccgggtcacccagcgccagccaccgccgcttcgacttgctccgcttcgccgccgcctccgccgccgcctgacccgtcccccgctcctcctccgccaccgacccccagtaccccaccttcccactcccgcctccgccgtactcgtactggtactggtacgacgacgcccccgcgccgcctctcccgccgccgccgccgccgctgtacgagtaggaccggaagtccaccggcctccccccgccaccgcctcccccgccgccgtagtagggctctatctgcatcgtcgtccgcccgccggcgtacgacttggagcggtccat

SEQ ID NO: 647 - DNA, 338 bp, Oryza sativa
  Clone ID: PAT_MRT4530_100590C.1
caatggctagcaaggacaacatcttagcagcgatgctcatggcggacatggaggtcatttcctgcgcgcaactgaccgagtcatactaatgttatgaacggcaagtaacctaggcgcaggacagccataaccgactgtagggctaaccggaatcacggcgtagaggtcatcatgtcctgcgacgtacctgggatcggattcatgtgtcatagtgaggaccgtctcgagtaccctggccacaccgtgtatggagactctaggagagatgcttgacatgagaaacagcttctcacgcaagactacttctagagtctcacatacaggtctaggcagggact

SEQ ID NO: 648 - DNA, 480 bp, Oryza sativa
  Clone ID: PAT_MRT4530_100591C.1
tcagccctgacagtgatgccgcgccgaggtgtagcggcaggtgcctgcacaccaccgcagtttcccgccacagcaccgaccccgcagcacgccgtcgagccaccgcagctgcgcctcacagacggcaccgttgaacatcacgaaccgcctggccacgccggcaaggccgctcgggttgttcttgtccgtgttcgggttcctcttgtccaagaatctccccgctgccgcggccatcgggtggtcgcgcgaccatcccacggcgttgaagtcgtacgcgtcgaggaagcggtcaaactcggcgacgacggcctggacggccagcagcgacctgtccttggggcagaagccgtcgacgatgtcaccgaagttgacacaaaagcggacggcgccaccgccgccgtcattggatgcttgtggttgtgggcattccaggagcggacggctctccggcggacgtgctgatgcagaggacagtgccat

SEQ ID NO: 649 - DNA, 216 bp, Oryza sativa
  Clone ID: PAT_MRT4530_100592C.1
ggggggagcacgtatttacacgtgggggcctgtgtgcataggatatgttgcctttttatttaagaaagaaaactgttggattcatgtgtctttttttttttgagaattaataaactgtaggaccaacttttggggctaccatttaaacaatatgctacttataagcaccagactcctttttatttcctctttttttcggtttgcttgcagcattta

SEQ ID NO: 650 - DNA, 761 bp, Oryza sativa
  unsure (1)..(761): unsure at all n locations
  Clone ID: PAT_MRT4530_100593C.1
cccgcgtccggtcgccgtcgccgacgcccaattcgggggcggtgcgggaggcctgcgatgttttggaaggacagcggcggacggagcagcggcggcggcggcgggctggagcagaacggcgtgggccccttcggccaagtgcgcgtcctcgtcgtcggcgattcaggtgttgggaaatcctctttggtgcatctcattttaaagggttctgctattgctcgacctgcccagacagtaggatgtgcggttggcgttaaacatattacttatggaagtgcaggcggttcttctaataacatcatcagcgacgttcaaaggaacttctttgttgagctttgggatgtttcaggacatgaacgctacagaacatgccgttcaattttctatacacaaattaatggtgtcatatttgtttatgacctctctcagaggaagaccaaaacaaatttgaataaatgggcagttgaagttgctgaaactggcaccttttctgctccactcggatctggtggaccaggtgggcttccagtgccttaccttgtaatttctaataaagtggatcttgttccgagagatggttctagangttagcagtggaagtcttggttgattntgctcgtcagtgggttgagaaacagggcctgcttcctagtagtgaagaacttccactcacagatagctttcctgggaactctggtctcctctcggctgccanagaagcaagatatgancaagaagccgggatcaagtttttccgcatg

SEQ ID NO: 651 - DNA, 291 bp, Oryza sativa
  Clone ID: PAT_MRT4530_100594C.1
ggagactaatgtccatactactaccaaagggagtatcagtgttcacatgttcgtttcctgctacacaaacacaactgagaactgacataacttgctgcacttgctagcaaaaagtaccgtatatgtaacacattcctactgctctatggcagcctccatcaaaattggactaatccagtaaagcaaacaggctgatgatgctacatgtatgcttacatcgcaacaggttgctccagggaaaaattctgcagcaagccaaaggaacccgtccccaccttaacagggttcccc

SEQ ID NO: 652 - DNA, 654 bp, Oryza sativa
  Clone ID: PAT_MRT4530_100595C.1
gggagtgtaaccttgggcgtgtttcccagtggctgggagatgggcttttttcccccacgtacgctatcatctcgaacaggcccagcaacatgccaagaagttctatgatcgccgtcaccaggagctttcatttgctatcggtgatggggtgtggcttcgcctccgccatcgtgttccagcctctcttgcgacaccggtgaaagggaagttgggtcctcgctaatatgggccgtatcaaattttggaggtcatcaatgacgtggcgtatcgcctagccctgcctgatggtgcacgactgcatgatgtatttcatgtcgggttattgaagccttttgtgggaactccgccgacgtcgccgtcggcgctgcctccgacgcaacatggcgtcgttctacctattccggcagaagtgctcaagtctcgtgtcgcgcgtggagtacgacaacccctggtgcgctgggatggtttgcctgcttcagcgacatcctgggaagatttggactccttccggtctcgttacccagcgttctagctcgcggacgagctgcttgtcaaggaggggagagatcttatgtagggattaacgtatcggcgcagaggaaggaacgcacagctggcgcaggcgcatggataggattaagcttcattccagtt

SEQ ID NO: 653 - DNA, 1408 bp, Oryza sativa
  Clone ID: PAT_MRT4530_100596C.1
gttcctttgaccgtggaaaaaaaatctatatttgacacattttactcacatcaatctcatgtctgttaaatgaatatacatatttaaagaaaaccaaataaaacaataatctcgctgctatcagataaaagattaggggtgacgacaaatagtatttggtaccttcgctgtgctgcaagcaaggtattatggaatccaacgtcaaggcacagcatatgctcccacgtcggcgttcgacgtactactgtggtggcctgtgtaatctgtactatacatcgatatcctctcggcttgttctactgctgctcacatcaggaagcgacggcgaggagtatctgtgatatctgtagttatctaaagagaacaccggttgctgtggactgagatctggtggcgatgcgaggttcctctgtgcaggcagcgggtttactcccttgtacatgaagtcctcgccgcttttcctttgaaagctatcaacttcgtctttgagagtctctacaggaaggatgctatcttctctcggagtgagagaccagggactcggggcagcaggctcatttgagaaaaatcttctcctaatcaacatgcggaaaaacttgatcacggcttctttgtcatatcttgcttctttggcagccgagaggagaccagagttcccaggaaagctatctgtgagtggaagttcttcactactaggaagcaggccctgtttctcaacccactgacgagcaaaatcaacaagacttccactgctaactctagaaccatctctcggaacaagatccactttattagcaattacaaggtaaggcactggaagcccacctggtccaccagatccgagtggagcagaaaaggtgccagtttcagcaacttcaactgcccatttattcaaatttgttttggtcttcctctgagagaggtcataaacaaatatgacaccattaatttgtgtatagaaaattgaacggcatgttctgtagcgttcatgtcctgaaacatcccaaagctcaacaaagaagttcctttgaacgtcgctgatgatgttattagaagaaccgcctgcacttccataagtaatatgtttaacgccaaccgcacatcctactgtctgggcaggtcgagcaatagcagaaccctttaaaatgagatgcaccaaagaggatttcccaacacctactgcctctttggtaccaagttcctccttggtatcccacgttttcagagaaagaaaaatggcgcaattccatccaaggttagtgagcactgagcacaccttcttggtgaataattggagaactgaatcgccgacgacgaggacgcgcacttggccgaaggggcccacgccgttctgctccagcccgccgccgccgccgctgctccgtccgccgctgtccttccaaaacat

SEQ ID NO: 654 - DNA, 817 bp, Oryza sativa
  Clone ID: PAT_MRT4530_100597C.1
ggatcccccgggctgcaggtgaggctgcgttcgttgggtggagaaagagagagagtttgtttggttttccgcgcgcacgcttcccaaactactaaacgaatggatcagcgagtagcactgcaaggaaagagggcaagcgcctgacgcatcactacctgaaatttgcattgctcctcgtcacaatctctacagtccccctgattgacattctatttcttcgtggagatgcactcaaacttccactcggactgaaattcgccgccttctttgcattcacagcctttgtcaccgcaatttccctcatgttccacaccctgaagttgatgacaatcaagccagagcacgtcatcagcgccatcaaccagctgaaactttccatagtcctcttggctacctccatatcctcccttattttgtcatttatttccatcacttgttctctgcttcctaaggcttattacttcctgcccatttcattggtcccttccatccttgttggtgtctttcacttcatatataatggcaaattcgatgtgagagatgtaaggcctgaagagagtaaagctctgaagaaagcactaaagagtgcaaatcagctcaccttatctttggtgaccacatcattctctggttttattggagatctccttggaatctatcacaagacagagaaattgggtgggtcagtattcatacgccaaggtgtcgatcttcttcatgcttggttccggtctggccggaatcttgggcgctgctcctttgcaggctgcttgtccaacagtgaagttcaccggcgccgcccaagtcgccgtcgggg

SEQ ID NO: 655 - DNA, 370 bp, Oryza sativa
  Clone ID: PAT_MRT4530_100598C.1
ctgctcttcgtcgtcgtcgggagtactcggcggcgaggggtcttcttcggaaccaggggtactacgcgagggtctcggaggagggctactacgcgacaagcaacacaccggggatgacccgcgtgagctgaccagggcgagcagtaccggcgcactccgtcgatgtccgggttgacccccacagtcagcatcttcccccgcccagtactaggctagctggcttcctcatagctagtaggatcacccgttgctgtgttgcatgcaacgagatagtgatcaaccaataatgaataaggaaatgttttgaaaccaaaatagctggtgataaagtactatatatgatttgtgcgttctgccaaaaaaaaaaaaa

SEQ ID NO: 656 - DNA, 271 bp, Oryza sativa
  Clone ID: PAT_MRT4530_100599C.1
tttgtggcggggagagaggaaagaacccacaggggtgcttttcgtgcagccaccgtagaaccgacggtggctgatccgccactttccagatctatcgatcccacccacatcagatgtgtcctccaggggttcacatggaaggctgctgtggagagcaggaacgagctatggtcgcagttctgatatggatgatgagctcgctgagaactatagaaccaatttgaaggcagacactggagcctgcgggaccgataagtcttcacgaatgctg

SEQ ID NO: 657 - DNA, 3249 bp, Oryza sativa
  Clone ID: PAT_MRT4530_10059C.1
atgtcttcaggggttggaaaggaggttgtagatgcctcctcggtggttactaagggtgatatgaaagatttgctagagaatttgttgaagatgggcatgataggtccgaagagtgtagcagggggattcgaactgaaactagaattgatgccaaatgagttgaggttggaatggagcaaaaattatttgagttggtgtaggagagcccaattaatgttgagagcaaagggggtggatcattttttgcaagagagttgtgaagagccttctgataaggagagccaagcatggagaatgtggaatacaacaaattccaccgtggtatcttggttgatgacctcggtggctccttctattagtaggatgatagagactattcagaatgcagcaattgtgtggaagacattgagcaacatgtattcaggagagggaaatgtaatgatgatggttgaggctcagaacaaaatgcagaggcaaagagtcattcatttcttaaaggggctgaacaaggagtttgaggacagaagagcggctatgttctaccaggctacattgcccactatggaagaggctatttctgctatggtgcaggaggagatgaggttgaaactgatgagaggtacaaatcctacaagatcagcatacactgtggctgataatagagaatgctacaactgtggacaagtgggtcatgtgagctacaattgtcccactcctcggaacattggcggtagggggttgattcgaggagggtatggtggatttggtggaacccgtggtggatttggaggagaccgtggtgactttggggggaaccacagtggtagaggaggtcgtggtggagatcgtggtggtggaggtcgtggtgaacaggtgacacagtgggaggaatggcagaagaacaagatcaatgagagctccaacaccaccactcactttggtaacttcgccaactacgctcaagtgggcgaaggtattcaggcacaggcacttgcatctacatacagacatcctatagattggatcatagactcaggagcatcaaagcatttcacaggattgcataataccttcacatcatacaccccttatgtccactctgaaactatccaaatcgctgatggtacatccaaacctattcatggtatagggtcagtagagtgcacatcatcaataaacttatcctctgacttgcatgttccttcctttccagtaaaccttctctcagttagctcagctattgaccaactcaagtgcattgttgtatttgatgagaactctcatctgttccaggagaaggggactgggaggaggattgggactagagtcaggtgtgatgggttgtggtacatcaatcatgaggaactggggctagctgcggtggttggaaatgttgagaaggagatcagtttgcttcattgtcagttaggacatccatcttttgagattttgagtaagttgtatctagatctctttagtaaagtggataagcatagattggtgtgtgatgcttgtgagcttggaaaacatactcggtctacatatgttgggattggtcttcgtaactgtgagcctttcatattaatacattctgatgtttggggaccatgcccagttacttctgtgagtggttttaagtggtttgtcacctttattgattgccacactcgtatgacttggatttatatgcttaagcacaatagtgaggtccttcgttgctttcaggactttcataaattagtgacaactcagtttgatgcaaaagttaagattattcggactgataatggaacagaatatatcaataatgaatttgtgtcatatatctcagatgaggggattattcaccagactagtacccctcctcaaaatggtgtagctgagagaaagaatcgacatttgctagaagtggcaagatctttaatgttccagatgaatgtgccaaagtacctatggagtgaggctgtgatgacagctgcatatcttatcaatcgcatgccttctagaatacttggtatgaagtcccctgttgaacttttattgggtaagcgagagttcaaggtccctccaaaggtgtttggttgtgtttgctttgtgcgagatcatcgaccttctattggcaagttggatcctcatgcagtaaagtgtgtgtttgttggctatgcttcaagtcagaaggggtataaatgttgggatcccattgggagaagactgtttgtgagtatggatgtgacatttcgtgagtttgagccctattataaaagtaaaggagatcttgaccaatttcttgaggaattctcgactgtcatggaggttgatagtcgagagggggagatagagagaggtgacacacataggaaaaatgttagtgacaagaatggggagacagtggtggttggatcaataccatgctctattgacaatgcaagtaaagaagcagtggaagttattggagatacacaagacaaggatagagaaatggttcttcatgaggaggatggagaagatggagaagatgaagaagtggttgttgggacaattccatgtcctatggagcgagccgaaaagacagtgcccataccaaaggattggaagtgtgcaaaacaagatccaaggtggaaagatgcaatgagagaagagttgaatgcccttatgaagaataagacttgggagcttgtaaaacttccaccaggaaaaaaggcagtgggatgtaagtgggtttttacagtgaagcaaactcctgaagggaaggtggataggtataaagcaagattagtcgcaaaaggctacagtcaaacatatggaattgactatgatgagacatttgcaccggtggcaaaaatgggtacagtgagaactttagtatcttgtgcagtgaactttgggtggcccctccatcagcttgatgtgaaaaatgcatttcttcatggtgatttatatgaggaggtctacatggagattcctccaggatttgggaatagccagacagttggaaaaatatgtaaactcaagaaatccttgtatgggttgaagcagtttccacgtgcgtggtttgaaagattcaggtgcgcagtgtgtgatatggggtattctcagtgtaatggagatcacacggtattctacaaacatagggggacatacatcaccatcttggctgtgtatgttgatgatatagtgatcaccggtgatgatgtagaagaaatcaggtgcctgaaggaatggacacctaaatgtagaaggatattgtga

SEQ ID NO: 658 - DNA, 2316 bp, Oryza sativa
  Clone ID: PAT_MRT4530_1005C.1
atgcatcgccgcggcggccaccacttccacctcctcctcgccgccgccgtcgtcctcctcctcaccgtcccggggctgcgcctcgcttccgcctccgcgtcctaccacaagtacaaacctgatgtgacggttaacttctgagtaaacaagggcggcccatacaataacccgcaacatccaaacaaacctaacagcctcacattttgccagacatctgaacagccaagactgggttgctgacgcccccgcaaggtccttggaggcattgagctctcccattgtgaggttgatataaagattttaaataattttgagatggtttccgtttgtacatttgtgtttatgtattacttgattttccgttttagttatggcctcttaaatttataccgctttggttcattaataagtttcattactgggacttacatatagaacctcattatgtggtagcttcatttgcccagtagtatgatttcattgtagaatattggtacagtgaggcttgacactattagtcagaagtcacctacgcatctagaagctggcaaaaaattggacatgacctattcagtgaagtgggtgcaaacaaacgttgcatttgcacgacgttttgaagtttacttggactacccgttctttgaacatcagatccattggttctccatcttcaattcgttcatgatggttattttcttgactggattggtatcaatgatattgatgaggacgctgagaaatgattatgcgaaatatgctcgtgaagatgatgatctggagtcgcttgaaagagatgttagtgaggaatctggttggaagcttgtccatggagatgttttccggcctcctcgtagcttggtgtttctttctgcttttgttggtattggcactcagctggcggctcttattctgctcgtgattgtattggccattgttggcatgttatatgttggacgaggagctatcatcacgaccttcatcgtgtgctacgcccttacatctttcatttctggatatgttagtggtggcctctactcaaggaatggcggcaaaaactggataaagtctatgatccttactgcatccctttttccgttcttgtgcttttcgattggattggtgttgaacaccattgctatcttctaccgttcactggcagccataccatttggcacaatggttgtcatatttgtcctgtgggctttcatctcttttcctttggttctattgggaactgtagttggtagaaattggagtggtgctcccaacaatccctgtcgtgttaagacaattccacgtcctattcctgagaagaagtggtatcttacaccctctgttatctcattgatgggtggactactccccttcggcagcatcttcatcgagatgtactttgtgtttacttcattctggaactacaaggtttattatgtatatggtttcatgctgctggtttttgttatcctcataatagtcaccatatgtgtcactattgtgggtacttatttcttgttgaatgctgagaattaccattggcaatggacatcattcttctccgctgcatctactgccttgtatgtctacctatactcaatatactattatcacgtgaagacaaagatgtctggcttcttccagacaagcttctactttggctacaccttgatgttctgcctcggactaggaattctttgcggtactgttgaaacatgatctactctctttgtgaggagaatctacagaaacatcaaatgcgactaaattgctactctgaacatcaaatgtgaccaaagggctactccgttgccgatagatcctatcagcgaagtgtgtgttgctggcgcaggtccattgtggagtaatgctcataagattctgatcaacttttggaagctatacaggagattgttctccctttgttttaccttttctttttatgtttttcttttacttcatttttcttcttggagctggcctcataaatgtatacctcattagttcaggaattagtctcagtaccgggaagtacatttagattctcattttgtggtggcctcttttggccagtagtaggatatcattgatgaatattggtgcagtgtggatccaatccagtggctagaattgcccctcttatgaatcgctatacatccaattttggcatagccttgtagtatatgcaaactaatacattcaagttagatatatatggcctgaatgggtgaagttctatttcttcccctgcaggtactgttgaaacatgaattcgacatgattattatttagcctttggtctgagttttcatcaaaacaaaa

SEQ ID NO: 659 - DNA, 343 bp, Oryza sativa
  Clone ID: PAT_MRT4530_100600C.1
gcaactcggtctctagctaatcaccgttgttatcagttccaagttcctggtgacggatatatgaccaatatcttcggtcagtatgtcccactagctcacctgatatgggctggaggagtgagtgtgaagggaacattccaagacgcccgccatgcctaaggtccgttcttgcttgatcaactccattaaagtaaaagtgtatggccatgcagccactgacagcatcatgaagctcaaccttggttgggattatggatggacattgcacacacgtgtctagaggcgatacaacacatctgacattatcacatctactgttgtggatgtcccaaccgcaagtcag

SEQ ID NO: 660 - DNA, 231 bp, Oryza sativa
  Clone ID: PAT_MRT4530_100601C.1
atgccggaattgaaggttaatcgatcgtcaaatcgcgtccaggttggaccgcacaaattacctgcacgtgctgatgtcgttaattcgtacgtccatctatatatcgatcgagaagcaagcatcatcgccagcgagatgatcgagctagctagctcatggctggccttgcccaatgctcatattgctggaattaatgcgccaccatcagccgaaattatgatccagatcgat

SEQ ID NO: 661 - DNA, 263 bp, Oryza sativa
  unsure (1)..(263): unsure at all n locations
  Clone ID: PAT_MRT4530_100602C.1
gaaagggagccgaggacgttcacatgtgcacttgtaacgatcatgtatgagattgctacaccagtattcacgacgcctatgggggtgcgggtcaatctccctgagtcagataaggagtctagggttcctcgcaaaacacatccatctcaatggtccgagcacatgtatcaaaattcttggctctaggtgctcaaccaaccgntacatttcctctcctcactactaaagcaagattcattgggtgcatggtcctaaaaaaccct

SEQ ID NO: 662 - DNA, 309 bp, Oryza sativa
  Clone ID: PAT_MRT4530_100603C.1
gttgtttttataaaaattgtgggtatcaaccccccccaataccattttttattttttcacatataaaaaacactagaaaaaccaaaaaaccaaaaaaaaaaaggaaagaaaaaaacaacaaaaaccaaagaaccaaacaccaatagacaagagaacgaaaagctaaacaaaggacggaaagacggcagtcatttccccaacacactgcggaaaacgccaggtgaggccaagcaaccccccgcggtgggaacaaacaaccaacggcaaaaccagacatgtgatgatgatgaggaaacaacacccgtgctg

SEQ ID NO: 663 - DNA, 822 bp, Oryza sativa
  Clone ID: PAT_MRT4530_100604C.1
actccaggagtcattatcttcatctttgattcagagcagacattctacttcaacaacttgaaatattttggtttggacgagttggacaacaacatcaactctcctccaagtgaagcatctacagcacttctgcttcatcgaccctgacatctctgctgttgctaatggatgattatgttttcgccgacttattatttcaccttcacggttgacctgactgctaccgactggtttcttcgcctccacggctatgcaacttcatcacttttgattggtatcattatcttcactaccaccaatatttttgccacctctggtctcaacatcttcgccgaagccaccgacgaagcactcagtcgcgacatgtgtcacatgatgacgaagcagagcaacctcgcgttttggcccgtgaaaaggcacgatggcaacgggaccctaccgctccctgtctccatcaattggcgcaacaagacctgcgaaggccagccgtgccttggggcaaactacgacaacccggtgctcctgtcagagcaggagctcgtggattgccatccaaggagcaaaggctgcgcagggggcctcgccttgaacgctttccagtacgtcatgaaaaatggtctggcgttgtcaaccttctacccttacatgggagtggacgatggtacatgccacgccagcaccacaccccgcgtgaacatgatcatgcgaaggttccaggagctaccacgccacgacaatgctgagaccatcaacaatacgctattagcctatcggccaattggctatcagtcaattgattctgcttttattctttattgctga

SEQ ID NO: 664 - DNA, 288 bp, Oryza sativa
  Clone ID: PAT_MRT4530_100605C.1
atggcgactggacaagacgccacaggaggggatccaacggtgactggctctcagatccatcatagccgggaggggacccaaatgcgcgtggttgccgtgggttcgatgcttagcctccccgcggcggtgaggcgggagcggaggtccctagaactccccgtggcggttgaggaggagagtggggtgagaggggaggcggccgagtcgtcattgtcagcggcctccgtgacgggggcatgtgctcgtggcttggcggaagctgaggtgcagttcacgcagctggcctag

SEQ ID NO: 665 - DNA, 554 bp, Oryza sativa
  unsure (1)..(554): unsure at all n locations
  Clone ID: PAT_MRT4530_100606C.1
gcccaaactgttnagaaaagggattatgcnnatcccacaatgggcacctagaggctctcatgtattgcacggagccaacaaaataattccggcgtcgtcgnctgattgactccgatcgtggagcactgctaaaaggtgggttaatgatgatgccacaaactgttggttgcttgtgcatgcgtgcattcgtgcatagctgcatggggggactgcttgccggtgtttatgcgctgctggcttatgcctgcgttggaatgctaataataggatggcaggtaaaaaccagggttgtgttttgttgtctttgaagagtacagaagagtgaagaatagaggaaggctcctggaatttgtaccataagattacctgccacatgatagccacttttntgtaccagattgtgttacctaattngccacccactcaatttttcttataattggaacacttagtccanatttttttgtatatactatatagtgcacaaataagactgttatacagtgtaaatttgtcattgccctattcagtgataaaaaaaaaaaaaaaaaaaa

SEQ ID NO: 666 - DNA, 1768 bp, Oryza sativa
  Clone ID: PAT_MRT4530_100607C.1
aaaaaacccatgggttgcgtagccgtagctttcccaccatttccttctctccgaagcctcctcctctccgcttcctcccgcgaaaccaaattccaaagcatttgatcgaatttctcccaaacttttccagcgttttcaatttcgccccgatttcggttcgaaaacccctcgcgaattcatttcaaactcgtccgagagcgcaatggagcacgtgttcgccgtcgacgagatccccgacccgctgtgggctccgccgccgccggtgcagccggcggcggccgccggagtagatgacgtcggcgcggtgagcggcggcgggttgctggagcggtgcccgtcggggtggaacctcgagaggtttctggaggagctcgacggcgtccctgcaccggcggcgagcccggacggcgcggcgatttaccctagcccgatgccggcggcggcggcggaggcggcggcgcgctggagtaggggctacggcgatcgtgaggcggtgggggtgatgcccatgcccgcggccgcgcttccggcggcgccggcgagcgcggcgatggaccccgtggagtacaacgcgatgctgaagcggaagctggacgaggacctcgccaccgtcgccatgtggagggcctctggtgcaatacattctgagagtcctctaggcaataaaacatcactgagtatagttggttccatcctgagttcacagaagtgcattgaaggtaacgggatactagtgcagaccaagttaagtcctggcccaaatggaggatcaggcccatatgtaaatcaaaatacagatgctcatgccaagcaagctacgagtggttcctcaagggagccatcaccatcagaggatgatgatatggaaggagatgcagaggcaatgggaaatatgatccttgatgaagaagataaagtgaagaaaaggaaggaatccaaccgggagtcagctagacgctcaagaagcagaaaggcagctcgcctaaaagacctggaggagcaggtatcactattaagggttgaaaactcttctctgttgaggcgtcttgctgatgcaaatcagaagtacagtgctgctgctattgacaatagggtactaatggcagacattgaagccctaagagcaaaggtgaggatggcagaggagagtgtgaagatggttacaggggctagacaacttcaccaggccattcctgacatgcaatctcccctcaatgtcaactctgatgcttctgtgccgatccagaacaacaacccaatgaactacttctccaacgctaacaatgccggtgttaacagcttcatgcaccaggtttctccagcgttccagattgtggattctgtcgagaagattgacccaacagatccagtgcagctgcagcagcaacagatggcgagcttgcagcatcttcagaatagagcttgtggtggcggcgcaagttcgaatgaatatacagcatggggatcgtctctgatggatgcaaatgagcttgtcaacatggagcttcagtagtaggagcatatcctaacaacatgatgagagcatttggaggtgcaaatttgcaacctgcaaatgctgttttgtagtagtagttgttgtcgctgtttttgtctgaaactgtagtttctatggattttggacttgctgaggaacatctgcggctgttgttgtttcaaattgagaaaatgagggacaatgggacatggtggtctcccttaatatagcgaaaaatggttggaataaaaaaaaaaaaaaaaaaaaaaaaaa

SEQ ID NO: 667 - DNA, 513 bp, Oryza sativa
  Clone ID: PAT_MRT4530_100608C.1
atggcattggcatcggcatccctgggccatggcgaggagtggagcaacgatcgagcagtaattgcccctgcggccgatgtcaccgttgccggcggccgggtctggagcgacgcggcgtgcggtgtgcttgctaagttgctcgagctcactcacgagaaggaggtagaggtggaggccgctggactgagctttaggagcggctccgacaggcggagaccaagagcaaggcatggagtgggctcgcacggagcaacgaggctatcaaggcaaggcttcgtgccagactcgggcatctctcctccacattgccccacccaagctactcagggcttcggctccttcaaccccctcaccgtcatcagcaccatggccatcgtggtagacgacgcccactcctgctacatggagacgaaggtgtgcgccgcgatggtgagagtgggggtgggaggagagctaagtggcggcgctggagcggtagggttggcaatgggtggtgggcaggtccgacagtag

SEQ ID NO: 668 - DNA, 365 bp, Oryza sativa
  Clone ID: PAT_MRT4530_100609C.1
tctagatttgagagccgactggaacaatgagcgaaggctcgatggcgctattctcctcgtcgataggccgagcggcgccaagaccctccttggcgctatcatgacaggggcggatgagcattcgcatgaccgtgacaatgcccaggctaacagtcacgacaagaaggccatggctcgggaccaaccgcgtcctatacctcgtgccgatctcctggaagacggcgagctacctcaccgattaagacacccagagagtacggacgtgacaccttgggcttctccttcgagcaggagaccatagacaagaaccgacagttgcaggcgagacactcacgctggacgacgctggctgcgctaggatggat

SEQ ID NO: 669 - DNA, 4260 bp, Oryza sativa
  Clone ID: PAT_MRT4530_10060C.1
tgaaactagaattgatgccaaatgagttgaggttggaggggagcaaaaattatttgagttggtgtaggagagcccaactgatgttgagagcaaaaggggtggatcattttttactagagagttgtgaagaaccttctgataaggagagccaagcatggaggacgtggaatactacaaattccactgtggtatcttggttgatgaaccggtggctccttctattggcaggatgatagaagctatccagaatgctgcagttgtatggaagacgctgagcaacatgtattcaggagagggaaatgtaatgatgatggttgaggctcagaacaaagtggagaatttgaagcaagagaggagaacagtcaaagagtacgctagcgagctgcaacagttatgggcaaatcttgaccactatgatcccttacaattgaaacatgaggatgacattgtgattggaaataaatggctgcagaggcgaagagtcattcatttcttgaaggggttgaacaaggagtttgaggataggagagcagctatgttccaccaagctacattgcccactatggaagaggccatttcagcaatggtgcaggaagagatgagattgaggttgatgagaggtacaaattctataagatcagcatacattgcagctgataatagggaatgctacaattgtgggcaagtgggtcatgtgagctacaattgtcccacttcccggaacattggtggtaggggatcgattcgaggagggcatggtggaactcgtggtggatttggaggagaccgtggtggttttgggggaaatcgtggtggtagaggaggtgatcgtggaggtcgtgttaccaatgagagctctaacaccaccactcactttggtaacttcgccaactacgcccaagtgggcgaaggtactcaggcacaggcacttgcatctacatagacatcctatagattggatcatagactcaggagcatcaaagcatgtcacaggattgcataatactttcacatcatacactccttatatccactctgaaactatccaaatcgctgatggtacatccaagcctattcatggtatagggtcggtagagtgcacatcatcaatgaacttgtcttctgttctgcatgttccttcctttccagttaacattctctcagttagctcggctattgatcaactcaagtgcattgttgtatttgatgagaattcttgtctgttccaggagaaggggactgggaggaggattgggactggagtcaggcgtgatgggttgtggtacatcaatcatgaggaactgggactagctgcggtggttggagatgttgagaaggagatcagtttgcttcactgtcagttaggacatccatcttttgagattttgagtaagttgtatccagacctctttagtagagtggataagcatagattggtgtgtgatgcttgtgagcttggcaaacatactcgctctacatatgttggaattggtcttcgtaactgtgagcccttcatattaatacattctgatgtttgggaaccatgcccagttacttctgtgagtggtttcaagtggtttgtcacctttattgattgtcacactcgtatgacttggatttatatgcttaaacacaaaagtgaggtccttcgttgctttcaagactttcataaattagtgacaactcagtttgatgcaaaagttaagattattcggactgataatggaacagaatatatcaataatgaatttgtgtcatatgtctcagatgaggggattattcaccagactacttgtcctggcacccctcctcaaaatggtgtagctgagagaaagaatcggcatttgctagaagtggcaagatctctgatgttccagatgaatgtaccaaagtatctatggagtgaggctgtgatgacagcagcatatcttatcaatcgcatgccttctagaatacttggtatgaagtctcctgccgaactgttattgggtaagcgagagttcaaggttcctccaaaggtgtttggctgtgtttgttttgtgcgagatcaccgaccttctgttggcaagttagatcctcatgcagtaaagtgtgtgtttgttggctatgcttcgagtcagaaggggtataaatgttgggatcccattgagagaagactgtttgtgagtatggatgtgacatttcgtgagtttgagccctattataaaagtaaaggagatcttgaccaatttcttgaggaattctcgactgtcatggaggttgatagtcgagagggggagagagagagagaggtgacatacatgaaaaaaatgttggtgacaagaatggagaggcagtagtgattggatcaataccatgctctattgatgatgcgagtaaagaagatagagaaatggtccctcatgaagaggatggagaagaaggagaagtagttgttgggacaattccatgtcctatggagggagccgaaagggtgaaacaaaaggatgtgctagtttaccaaaggaggcggtttgatagtcagggggagaaaagaaaagggttactcttgaacatgtagaattacctcttgcacaacgtagagagactagatctaatgctagtagacctcctatacgtcttggttttgagcatcttagttctatgcatgacattgcaaactatatcacatattctcatgtttcaccagcatacaaaacatttattgcatcattacagacagtgcctataccaaaggattggaagtgtgcaaagcaggatccaaagtggaaagatgcaatgaaagaagagttgaatgcccttgtgaagaataagacttgggagcttgtaaaacttccaccagaaaaaaggacagtgggatgtaagtgggtctttacagtgaagcaaacccctgaagggaaggtggataggtataaagcaaggttagttgcaaaaggctacagtcaaacatatggaattgactatgatgagatatttgcaccagtggcaaaaatgggtacagtgagaggtttggtatcttgtgcggtgaactttgggtggccccttcatcagcttgatgtgaaaaatgcatttctccatggtgatttacatgaggaggtctacatggagatccctccaggatttgggaatagccagacagttggaaaagtatgtaaactcaagaaatccttgtatgggttgaagcagtctccacgtgcatggtttgataggttcaggcatgcagtgtgtgatatggggtattctcagtgtaatggagatcacactatcttttacaaacatagggggacacacatcaccatcttggctgtgtatgttgatgatatagtgatcactggtgatgatgtagaagaaatcaggtgtctaaaggaaaggctgggaaaggcatttgaggtgaaggatcttggtcctcttcgctacttccttggaattgaaattgctcgttcatcaaaggggattgttctctctcagaggaagtatgttttggatctgttgacagatataggaatgcttgggtgtcgtgcaagtactacgcctattgataggaatcaccaattgtgtgctcaatcaggtgatcccgttgataaggaagcataccaaagactggtgggacgcttgatctatctttgccatacaagacctgatatttcctatgcggttagtgttgtgagtaggtatatgcatgatcctcgaactggtcacttggatgttgttcataagattctcagatatctgaaagggactcctggaaagggattgtggtttaggaagaatgggcatctaaatgtggaaggatattgtgatgctgattgggcgagtagtatggatgatagaagatctacatcaggttattgtgtgtttgttggtggtaatcttgtttcttggcgaagcaagaagcaggcagtggtggctcggtctaccgcagaagcagaatacagagctatggctttgagcttgagtgagatgttgtggatgaggagcttgttgactgaattgcgagtgctaagaagtgacactgtgatgcttcattgtgacaataaatcagccatcagcattgcaaacaaccctgttcagcatgatcgcactaaacatgtggagattgataggttcttcattaaggagaagattgatagcggggtgattaggttggagtatattaagtcatgtgaacaactagctgattgtctaacaaaggggttaggtcctagtgagattcaatcaatatgtaacaagatgggtatgattgatatcttttgcccatct

SEQ ID NO: 670 - DNA, 1605 bp, Oryza sativa
  Clone ID: PAT_MRT4530_100610C.1
atggagcacgtgttcgccgtcgacgagatccccgacccgctgtgggctccgccgccgccggtgcagccggcggcggccgccggagtagatgacgtcggcgcggtgagcggcggcgggttgctggagcggtgcccgtcggggtggaacctcgagaggtttctggaggagctcgacggcgtccctgcaccggcggcgagcccggacggcgcggcgatttaccctagcccgatgccggcggcggcggcggaggcggcggcgcgctggagtaggggctacggcgatcgtgaggcggtgggggtgatgcccatgcccgcggccgcgcttccggcggcgccggcgagcgcggcgatggaccccgtggagtacaacgcgatgctgaagcggaagctggacgaggacctcgccaccgtcgccatgtggagggaattattaggtcacatacccttggaagatgaaattattttagtagaaaaaaagaaactgttatattggaatctggcctctggtgcaatacattctgagagtcctctaggcaataaaacatcactgagtatagttggttccatcctgagttcacagaagtgcattgaaggtaacgggatactagtgcagaccaagttaagtcctggcccaaatggaggatcaggcccatatgtaaatcaaaatacagatgctcatgccaagcaagctacgagtggttcctcaagggagccatcaccatcagaggatgatgatatggaaggagatgcagaggcaatgggaaatatgatccttgatgaagaagataaagtgaagaaaaggaaggaatccaaccgggagtcagctagacgctcaagaagcagaaaggcagctcgcctaaaagacctggaggagcaggtatcactattaagggttgaaaactcttctctgttgaggcgtcttgctgatgcaaatcagaagtacagtgctgctgctattgacaatagggtactaatggcagacattgaagccctaagagcaaaggtgaggatggcagaggagagtgtgaagatggttacaggggctagacaacttcaccaggccattcctgacatgcaatctcccctcaatgtcaactctgatgcttctgtgccgatccagaacaacaacccaatgaactacttctccaacgctaacaatgccggtgttaacagcttcatgcaccaggtttctccagcgttccagattgtggattctgtcgagaagattgacccaacagatccagtgcagctgcagcagcaacagatggcgagcttgcagcatcttcagaatagagcttgtggtggcggcgcaagttcgaatgaatatacagcatggggatcgtctctgatggatgcaaatgagcttgtcaacatggagctcccacgcgtccggcatatcctaacaacatgatgagagcatttggaggtgcaaatttgcaacctgcaaatgctgttttgtagtagtagttgttgtcgctgtttttgtctgaaactgtagtttctatggattttggacttgctgaggaacatctgcggctgttgttgtttcaaattaagggagaccaccatgtcccattgtccctcattttcgaaaaatggttggaat

SEQ ID NO: 671 - DNA, 193 bp, Oryza sativa
  Clone ID: PAT_MRT4530_100611C.1
gctcccacttcactcctcttctcgcgagtcgagtcaaggatcaaaattaagcagttaaaaactgagagagaaaaaaaaaacaagaaaagaaaggcgagctctccctccatcgccattgccaccctccacaaaacaccgtgcggcgctcttcacgttgccgcctcgcacgcattgctcctctccaagaagcagc

SEQ ID NO: 672 - DNA, 543 bp, Oryza sativa
  Clone ID: PAT_MRT4530_100612C.1
gatcccccgggctgcaggcccgctcgcactcgccccgcggcgccccacccgcgcgtcaccgattccccatccacgatttctctcctctcccgcgccgcccctccgtcgtcgtcgcgtgaagtcctcgccgatcccccgcctccgtcgtgccgatccaagtcgcggcatcgtcaaacccctgttcccaggtcgccgtcactgatcccgcatctcctctgccccgttcttgccgatcccccgcctccgtcgcgccgtcacgtcgccgattccctctcctcgtcgggagcgccgccgggttcagtcgacgctgatccccaatttgttgtcgccgcctccttctcccctgattgaagtgttgtcaagtttctccgaggtgtttgttttactgatggttaaagtgtagtacaaactgtgcaaataaaatcaatgttttcatcccgttcatttggtatccatgactaaaatattcatcccgttcatttggtatccatgactaaaaattataaggacttgatctagcctgagatagcaacgatcgattca

SEQ ID NO: 673 - DNA, 838 bp, Oryza sativa
  unsure (1)..(838): unsure at all n locations
  Clone ID: PAT_MRT4530_100613C.1
ctagaatgaaattggggattcaactgttcatccattgagttggccctaagggctaatatgttgagaagagtacaacgcaaaaagacagaaataccccttaacacatacacactaatacatatattcttaacacccccactcaaatgcaatgtgtatacaataacattgcatttggagtgaaaactaaacaagagaacacaaactaaatattagcctatctccaaangtcttgatgatatcgtcgaagtgtgccaattcttggatgatgggagaagaaaagatgtatcccctcctcaatgaagtggaccttggagccttcacaaactgttcttcggccctcgataccttgaagccttcacgaaccgttcttcggctcttcattgattcagagatgttgttgatgatgatgacaatagaccttcacaaattgttcttcggtcctttgactgatgatgagacattgatgttgatgaaggcccttcacaaactgttcttcggaccttcactgattgatgatgatgatgagaagctccgatgtggagatgatgaagtgacaatgaaggccagctccgacggggagctgatgatgatgaggaccagctccgacagggagatgatccatagatgggtttctagctttctgctgctttgctcacgaaggactctcccgaagcctcatgcggctgggcgacaagcagacaaccacaacggccatgctgcccagcaatggagacgagcagcgatgacctcggtgcaaggacgcccggccaaaactggagccgttgcggacgacggcggcggcttgccgccggcagctaggacacgctccgcgacctga

SEQ ID NO: 674 - DNA, 1164 bp, Oryza sativa
  Clone ID: PAT_MRT4530_100614C.1
atgcaggaagctcttctacctccggctcatccaggccgcttctactcggactttggcccgaagccgttcggcagcggagatcaacggctctcctcgcccaacctgctgaccaacggtggagatctcttctacggctgctactcccccttcagccctacccgcgtgctctcgccgccgccgccgcggcgcgccgcctcgttctcccactgctcgtcctcctccgactccgtcgtcgacgacggagatggtgcgggggcagcggcagcgaccgagcaccgcctccacctcgcccacctcgcgctccagtaccaggagatggccaaccgcttcgagctctgcctctcccacctcgccgatgccgcggacgaggcggccgcgctccgtcaggagaacgccgagctccgcgtcgccaacaacgacctcgcatgccgcatcgccaagttcggcggaaggcagagctccgccatcgccctcgccggtgacctccgccgcctccgcctccccaaggagcagaccgtgccagctcttcctcctccgccgcagtctccgccggccgcactgatgaatcccgtcgccgtccccgagaagcaggctgttcttccgaagagcatctccatccgttcgaccggataccagaagctgaaccagggcggcaagcatcgcgtgtcgaagccggtgaacgtcggctcggtgagaccaaatcccccaattcctccattgtgttgtgtctggctcccactcttgcagcgcactgactcctgtgctgaatccaaaatcccaatcctaactagtacgatgttcttgatgcgacaatgcaagcagcagcgcgtgttcgtgggcattgacggcgcggagggaggcgagcacaaagttggtgtgaagaaggaggagccgcccatgggtgggctggagttcgaggtgtacaaccagggcatgttcaagacggagctgtgcaacaagtgggaggagaccggggcttgcccctacggcgaccagtgccagttcgcccacggcgtcgcggagctccgccccgtcatccgccaccctcgctacaagacccaggtctgccgcatggtgctcgccggcggcgtctgcccctacggccaccgctgccacttccgccactccatcacccccgccgaccgcttctccttcggccattga

SEQ ID NO: 675 - DNA, 269 bp, Oryza sativa
  unsure (1)..(269): unsure at all n locations
  Clone ID: PAT_MRT4530_100615C.1
gtggatccccgggcctgcaggaatcggcacgaggattgcagcgagagagagccagcgaagcgcgactccgttttaaccgccttcgccgccgccgccgcgatatcgatcccctccctctcgnnccgtcgacgccgtcggcatccatggcgccagggctctacaccgacatcggcaagaagaccagaggtacggcgccccctgcgcccccaggcctcacctctcccttcactctcgtttcttctcgccatggttgttgttcacctctcgtg

SEQ ID NO: 676 - DNA, 263 bp, Oryza sativa
  Clone ID: PAT_MRT4530_100616C.1
ggcctcgtactgcccgatgggagattgttgtgccaatgcttcatgtatggtgtacgtacatactgatattttggctgacgagggctaaccggcagtggtatgatacatagcatcggacatctatatacaccaagggtgaatcatgggcttagctaactaatgtgccgagcggaggacgaatgaacgggaaaaactataggttatgtgagaggggatcattgtaggggcgctcttcacatcaggtttgttggcacattacgaaa

SEQ ID NO: 677 - DNA, 263 bp, Oryza sativa
  Clone ID: PAT_MRT4530_100617C.1
aaaaagtgaaagacaactttttttctatttatatcacccaaagtttcacatgtcacatatgaggatttctgagcttatttttaacttccgaaccactattctgtgaaaactcattacaagacaccgccaagggtggttatggtcctgggtgcaccatagtccctagggtagattccatttctagatggcactttaaaagccaacagagcttgagcttgagccaaattttcgtcaaagtatagatcaccaaactgctggaattg

SEQ ID NO: 678 - DNA, 396 bp, Oryza sativa
  Clone ID: PAT_MRT4530_100618C.1
atgtcgtcctcgtcctcgtcggccggcggctcccacgccggcctcgccctcgccgccaccgccatggcgctctccggcaccctcgtcctcttctccctctgccgcgccaacaagccgcctcaccacgacgacgcccctgctcgcctccgcccctgcctctcctcctccgagaagcggaagagggagaaggcgcggcgcgggagcaagaagcgggtgaggttcgccgccgacgtcgtcgacaacgacagcaatgcgtcgtcccgcccggcggcggccgagccgtcgtgcaggaacgcggcggcgacggcggcgacggcgatgccggcgaaccgggaggcgctgtaccgcggcatgctccgcggccgctccatgctcagggtcgcctgctcctactag

SEQ ID NO: 679 - DNA, 403 bp, Oryza sativa
  Clone ID: PAT_MRT4530_100619C.1
atggcacgcctccgcgacgccacgccggccgtcgtcgccactaggccacttcgccgccaccgcctcgaggtcgccacgccgccgctacgccactcggccgccaccacctcgagctcgccacgccgccgctacgccacgccgcggcggccgcgcgccgccaccgcgcccgcacgccgctggcctcccgacgccgctgccgcgcccgcacgccgctggcgggcccggctgccactgctcggtgaccgcgtggttaccagcctccgttgcgagaccggatcgcgcttttggctcgggattgcctgcccctattcccgggtcccgacggtgctcgccttcggggccgccggctgcgatgcctccccctccttttttgggttcccccccaccagcggcgttttccgtg

SEQ ID NO: 680 - DNA, 846 bp, Oryza sativa
  unsure (1)..(846): unsure at all n locations
  Clone ID: PAT_MRT4530_10061C.1
attaggtggcaccctaatccttcgacagctactgtcaagatatttaatgaaggtttgtctgccgtccagtttgacatgagcagaggtactgcttccatggatgcaatcagcctagatgagtgggagctcctgcctgacaacaagagttcctacttcatggaggagttcaccagtgaccatggcactgttgttgatgatgagaccaagaatatatttctgcctatccatctatcagaagaggtctatgtgggtgatcctgtcatcaagttcaaggacatcgatgtcgtgaagattgaatcgtaccgagaagagttcgtgcctaaggtgactgagatatttgatgcagaagaggaggcagagatgatcaagagtcccgtcagtgcagaggaagttgatgtcgacgatgatgatgaggtgatggctatggttgcacctgatcaatgcgttgaagaggaagaaggtgcccagaaagacaaggaacacaatggtttcagtgtggggaagctgagagtgaatggtgttggggcactctgctcatttggggttgcggctgccaccttgtgcatctttctgcttggtggcaggcagcagcagctgcacaagacgcagaatcagaagaccccgttccagatgtatgctgataatgagagaattcagcaggttgtgcagcaagcctcgagactgaatcaagctgtgtcaacagtaatgggaggtgcatccacaagggcaagcatatcatttggtggctactacgatggattttaatgtgntagaaaccttgatagaatatttcttttcatagtcaagtattagatccaggtgttctctatgatagccatctatatt

SEQ ID NO: 681 - DNA, 795 bp, Oryza sativa
  unsure (1)..(795): unsure at all n locations
  Clone ID: PAT_MRT4530_100620C.1
cggtgcccancccataggacccataatcccattcaatttctttgtattacttcgtgatgggtacaacgtaaggtgctagcctagaacatatcgagcaggcatgagaggaaatttctcaggtcagacagccaaacagaccagaccgtaactctctgaatctattctagcctagatggctaacaagattacttactgtaattgtaatcccatcacataggagacattaaaaacgaaaaagaaacgtggcaaactcatcaaaagaaaaaaagaatgcctgaaagatcaaaacggcttaatgatcaacacaagacctagcagtagcaaaccaacaaatttactagggatgttagcattcgaaatgctggctgctgaagcaggtgacttgaattctatagttcctgaatatacgtttccatttacagaagaggaagtccggttaggggctccggtgtccttgcatgcgcccgctggtgccccagcctggcaagcagcaatggtgttgcagccacatagtgtcacgccattgatcctgtcttgaacatcaaaaacacccccaccatcgcttcgcatgtagtaattcacagctatgaagttagggattctatttccagctgcagtatagcaagtttggaccatctgtggtagtccaacagaattctctttacacgcttcattctctacaggaattgtggggaagtaattttgcataaacagagatgcagatcttgagtttagtggttgtgattcctttctatttggacaagaaccagtgatccctggatctccagctgccat

SEQ ID NO: 682 - DNA, 2473 bp, Oryza sativa
  Clone ID: PAT_MRT4530_100621C.1
atggcgggcctcccctttctcctcgcgctccacatcgcactgctgctgcttcttccctgctcctgccaggttggggattcgtgctcgtcggcgcgcgactgcggcgccggcctctactgcggcaattgcgccgccaccggcaagacccggccgtcctgcatcagagacctggcgatccagcctacctccattgtgaagggactgcccttcaaccgctactcatggctggtcacccacaactccttctccatcataggcgagccgtcgcacaccggagtcgagagggtcacgttctacaaccaggaggacactgtcactaaccaattgaggaatggagtgaggggattgatgctggatatgtatgacttcaatgatgatatctggctctgccactccttgcaaggccaatgctacaacttcactgcttttcaaccagcaattgacacattgaaagaggtggaagcatttctatctgagaatccgacagagataataacaatattcattgaggattacgtccattcaacgatgggattgagcaaattgtttactgctgctgacttgacgaaatattggtaccctatctcagaaatgccaactaatggaaaggactggccaagtgtcacagatatggttgcaaagaaccacaggttgctagtgtttacttctgattcttcaaaggaggctagcgaaggaatagcataccagtggagttatctgctggagaatgagtctggagatccagggatcactggttcttgtccaaatagaaaggaatcacaaccactaaactcaagatctgcatctctgtttatgcaaaattacttccccacaattcctgtagagaatgaagcgtgtaaagagaattctgttggactaccacagatggtccaaacttgctatactgcagctggaaatagaatccctaacttcatagctgtgaattactacatgcgaagcgatggtgggggtgtttttgatgttcaagacaggatcaatggcgtgacactatgtggctgcaacaccattgctgcctgcccccgcgcccgccgcgcacaacaacggagtctacacagttggtgacttcatgaccaaaaggcctaatctccatgtcgttacacctgcaacctcggttgatgaagctctcgagacgctggtgcaacacaagatctctggtttccctgttgttgatgacaccggaaagttggtgggtgttgtctcagattatgatctgttagcacttgactcaatatcaggaagtggactgactggcacaaacacaagcatgtttcctgaggtggatagtacttggaagacatttcgcgagatacagagactcttgagcaaaaccaatggcaaagtcatcgctgatgtgatgacttattcgcctcttgcggttcgtgaaagtaccaaccttgatgctgctacaaggttgctacttgaaaccaaatatcgcagattgcctgttgttgatagcactggtaaattggttgggatgatcacaagggggactgttgtcagagctgccctcaaaataaagaagacagctgaagaaactgcttaaattagacagtgtagatgattctttataagtcatttctgggactgcagtcacttggaaatttagtccactgaaacattatttggtgaaatgaactacatcagccttacagatactgcgaattcgacagtcaattcttcttggaacatagatggatataggtattgtattgttgcagatatttggaatatagccgcaatctgtttggggccaccagatttggtcgcctctccttattaggtagcataacatggagaatgttattatttttatttttacttttatcattgacttgtattcaagaacatcagtgtattgaaatgtaacacttctgatatgatgataccttccgcatctgggttgaagtgaaaatattttccaatgtttaaaaaaaaaaaaaaaaaaaaaaaaagaacaacacggagagaacaaacacgaaaaaagaaagaaagaaggggcggaggcaccagcgggcgcatgcaaggacaccggagcccctaaccggacttcctcttctgtaaatggaaacgtatattcaggaactatagaattcaagtaacctgcttcagcagcaagcatttcgaatgctaacatccctagtaaatttgttggtttgctactgctaggtcttgtgttgatcattaagccgttttgatctttcaggcattctttttttcttttgatgagtttgacacgtttcttttacgtttttaatgtctcctatgtgatgggattaccattacagtaagtaatcttgttagccatctaggctataatatattcatagagttacggtctggtctgtttgactttctcaccttacaaatttcctctcatgcttgctctatatgttctaggctagcaccttacgttgtacccctctcgaagtaattcattgattttgaatggatt

SEQ ID NO: 683 - DNA, 168 bp, Oryza sativa
  Clone ID: PAT_MRT4530_100622C.1
atgtgtgagcgagtgacaggtggggtcgagctacgtgggcccgtgagtggtgtggggtggggtggtgggggtagaggtggagggaacgggtacgagctgggtgcacccgataagcgcacacgggtgattgattggttcgttaggatggctgctgccgacgctgcctga

SEQ ID NO: 684 - DNA, 712 bp, Oryza sativa
  unsure (1)..(712): unsure at all n locations
  Clone ID: PAT_MRT4530_100623C.1
attgatcaatcaggtgactgcagattagcaaagncgaattaatatacatactaggttgaagaaacttagatgcttttttttttttggaactagaaacttaggctgtgtttgagggagaggggattgagaagattggaaagatacgtaaaacgaggtgagtcattagtgcatgattaattgagtattaactattttaaatttcaaaaatggactaatatgattttttaaaacaactttcatatagaaattttttgcaaaaaatacaccatttagtagtttgggaagcgtgcgcgcggaaaacgagtgacaatatctccaatctctccccaatctcctttgaaagaacgcacccttagatgtgaatgtatattattgtacatgagcaaatcagtagaataaaagatgcctgaacaatcgcacgcagtatcattttgtgtctttaattggatagataattatattcatcctagctcttacactgtggtttgtgcaggagacgaatgcataaatgaaatgttaggcattaacacccgccgtttcggccgggcgcaggctctgtcaatatgactggtaaaccatctccatcgactggacgccgagggtaagaatttaactttacaattcatatcgatgatcgatcaatatgtaagatttgccaatacatctgaataaactgaagcctattactaaaaaaaaaaaaaaaaaaaaaaaa

SEQ ID NO: 685 - DNA, 336 bp, Oryza sativa
  Clone ID: PAT_MRT4530_100624C.1
atattccaggttggttatgaatcccaggaggtttgttgttcctccgaaccatccgagttaattgcatctctgcttgttggcaagggtgatgatgagcaagatcaagaacaagaaggacagaagccttaatttctgctgtttagaaaaaaaaaattcagtcctccatcgtgtacaatattcttctatttatcagttgttgcaaaaactgggctacattgcaatgctaccgtaatcaattgttgtattatggacaaaatttttttgcaccatttggcaggtttttccctggcttaaagctatcaagagttctccatacaattatgtccgaacatggag

SEQ ID NO: 686 - DNA, 301 bp, Oryza sativa
  Clone ID: PAT_MRT4530_100625C.1
gtataaatttatatatgtttgattttttatattttttatttatatggggtttattggggaacacaaaggcaacccagatccggaaggttttataatttcagaggggttacttttaaaaacactgatgtttttgaatccaggtcaatgttaaaggtaaaaaaaaaaataatacctttctccatgttatgctacctaaaagggaggggcaaccaaatttgggggcccaaaacaaattgcggttatattccaaatatttgcaacaatacaatccctatttccatttatgttcaaagaaaaattg

SEQ ID NO: 687 - DNA, 339 bp, Oryza sativa
  Clone ID: PAT_MRT4530_100626C.1
gcggttagttggagaagccgacggagctcctccacggggggggcgttttgagcagctggatggctgttatcaaagcattctgcagggactatgccaggaagaaaggaagaacaactgtgagggaagatgaccccatccatgaccccgccccccaaggaagagcatcagcgcctgactcggcgaagacagaactcctgccacgtatccggtcctccatggataccaccactccggaagtcattaatcgagacggccggagctacatgtaccatcgcacaaacactgggaggccgatcttgccggggaccaagggcgccggcactatgagcatgatcaggc

SEQ ID NO: 688 - DNA, 767 bp, Oryza sativa
  Clone ID: PAT_MRT4530_100627C.1
cccacgcgtccgggaacacggcgtacggcggcgacgtgcagaggctagatgtgtatgccaggtgcgcacgtccacttcttagcttttttttttttaccgcaaattgttttggtttttctttttttggctgaattgctctgcaaagttggcgaaaataattctgtagattcctatcgatttttcacatttttggcacgcattgcaaagtactatcaatcagttttgaagggcctgactgtacgcatcgactcatactgaactgtttgccagttgagaggtcactagcttgaattttttttattatttagacatttctaataattttaataatacacttccccttgaatttattttcaaaaaatagacttttggctgcaccagtgatggctaaagaaggataccaccccagtggttgtggcgtgacagttgatgccatcgtggcagtcatcggatggacttggctgtgttctctgattctctcccatgggttctcaacccattttctctcgttttccgtgtgcacggcacgattttcaaactgctaaacggggagggtttccaacccctccaaaagaagtatggcgaggacagtagtgaaccctggcatccctcactccagttttctctcttcacagcttgtacaaacatttttattttttttgagttcaattttcaacttaatactttgtctcaaaatataaggtgcctataatttttttaacgccaattagttataaagcaccacaagttcacgttaaaaaaaaaaa

SEQ ID NO: 689 - DNA, 1630 bp, Oryza sativa
  Clone ID: PAT_MRT4530_100628C.1
aacagcaaatctcgacattttacatattgttaccgggagaaaagacctcattaaccatcctatctaagttgacccatgaggttccactaggcaccacagccatggctgccctttccttccattccgtggcacgctgcctcacctccttgcctttgatctcctcttccatcacctccctcaccatcctcgccacctcttccctctcgatgtcgtcgccgacctccacaccgacgcgccactccgtgcaagcgtaccggcagtttgtctgctgatcggcggccatcgggtagcacagcatgggtacgccattggagatgccctcgagtaccgagttccacccgcagtgcgtcaggaacgcgccgatggcgtcgtgccggagcaccgcctcctgcgggcaccagctcgtcaagtaacccttccccttcgtcttctccacgaactcggctggtagcacgccggtggggccgtcgccgccggtgaccttagcttggtcgtctctgatcacccacaggaagtcgtggccgctgtcggccagcccccatgctagctccacgagctgtgtgctcgtcaagtacacgatgctgccgaagttgacgtacaggacggagcacgggcgcttgcggccgagccactcgaggcacccaccgtcctccgggcagaggctggcggcgctcagggccggcgtgtctggcgggtcggcgccggaagcgacgacgtgtgatgcggcggtgagctgagggagcgggccgaccgtgtagatgggcggcaggatgcgcgacatggcggcgacgacctcgccctccagcgcgtcgaacgtgttgaggatgacggcggacgtggcggtgcgcaggcactccatggtggacacgacgaaggccagcacggggtcgtcggtgtccgtggttcggacgaaggagaagaagtcgcgcaggcgcatgtccgccggcatccccggcacccagtcgaccaccgtgctgtcgaggtagccattgctcagcttctcagcgtctgctttgagtggaatgatgcctctgtcgatgagttccttgcattggaggaacgccatgagcccgcaagcggacgtcgtccagaacgcgacggccgggaggcccatctccctggcagcgagcaggacgtggtcgacgtcggagacgacgcaggtggccggtgcccccgaggcggcggcctcgtcgaggatcttcttcaagtgcgggacgcaggccccgatggagaagagcagatcgcgggggtcggacgggccgtcgtcgtcgtcatccgacggcaggccgtcggggacggcggcgaagcagaaccccggggcgccggcggcgagcgcgccctcgccgtgggagcggatcacgcggcggcggttgcgctcggagtggacgaaggtgacgcggacgccgcccctggcgtggaggagcttggccaggtgcagcgccgacgcgacgtggccctgcaccgggtacgggaagaacaccgcgtgggctggcgacgccgtcggcatggtcgattggacggagaaagcgcgaggtcgatccggtctctctcccggtggagttcaggaggtgtctatccacacatgaatgaatgcacgcgccaggtagctgggacttcgctgcctcgaaaa

SEQ ID NO: 690 - DNA, 1223 bp, Oryza sativa
  Clone ID: PAT_MRT4530_100629C.1
attagaagaagagagttgaccctgtttataagggaaatcaggcccgaaaaccatacaactgcacggttcgctaaggggaaaccgacaaaaccttacacaaaagacacaaaaaaacctgtgacaaaactatgaaccacataagtaaccgagagaggagcaagtctttcaaggcgaagcctccaagaaggtgaacaacgatagaagccgctgccgacgcccgcccataactggactgggttttcaccaagggggagagagtccacaaggcaacaccttcaaggaggaaacggcacccgcaggcgtcgatgtcgccgatcttggaagaccagggctttcgcctaagactccctcaaaaggtgtaggacctccaagaagctagagcaaaagtgttgagtgttatcgttgcccagctcatcggctgacccgatgcgacagctccgactccgccttaacacaaaagctcagcaccgtagaggaaaaacacactgctccaatctcggcactaagacaggtccacacagtcacagggcacatgaagcactggcgaggcataagagccctgacttcagacggactgaaccaccttcatggacgaacacttctcctcaacaaccgaaagactccacggccaggtttggaacagacggccaacagaagggaggagcatcacggaggggaggaggcctagccggcttgaagaggagctgagagctagagacaggggcaaccaggacctcggtgtcaaccatgtttccagcgaggaactcccggtttcgcgggacaaaacctcatgactacggcaaccacctccaagtttaccaccagtgcagagagagagaggagcgctggggcgagcagcagagcaactagtcaactggcagcagagatcaactgccacaatcatgtcttccgcagttttcgcatcaatgaggctgaatgcaacaaatcaaagctacttggcagtaacaaaagaaaacctagcagacacctccttctgccaccagattaagctcacagctgaattgaagagttacatcaaagagattgcagattttctagaagaatcaaacaagttctatgtcgtgcgtatgaacagaacattcatggaacaggacagagtgtactttgcgaccgagttttcaaagaaatacattgtgaacttggttcgaggcaagacagcaaacattagagtgcagattgcaggtcgaccctcaacaacttaa

SEQ ID NO: 691 - DNA, 385 bp, Oryza sativa
  unsure (1)..(385): unsure at all n locations
  Clone ID: PAT_MRT4530_10062C.1
atttccacaggctcttcaggagatatgttccatttgcaccttcagatttaagctccatctgctactgctacttgcagtgagcctcttcatattatcctaggcacggggcctcttcaggagatgctgcttttgagctgtatgacctcacctcctacatctgattgcctgaggtggtctctcactctcttcagatggtcctatgttttttttttgacggaatggtcctatgttcgggatctcagcaatcagacttttcttctgctcattcattgtgatgatggaacaaactggctattggatattcagaagtcgcctgtggcattgtgtattttcagcagnttgagtggttgaatgcagtgnaggtctctcctgaacctctccatcc

SEQ ID NO: 692 - DNA, 683 bp, Oryza sativa
  Clone ID: PAT_MRT4530_100630C.1
atatatccgaatagattcacatcacattgcttacatttattttttaaagagaaaaaaaaaaaaaaaaaactaaaaaaaagcccaaatgcaaaaaaaaagggggtagtaaaaaaacaagtccactttttttccacccacacacccatttcatttcccaatcctttttaactgaagtattttttatgctaaaacaaaccaatcatctttttcaaaaaatcatgatttcatcatgtttaaaaaaaagtttatttttttttaggtaggttgcaactttagcttggatggatcgatcaatcagggtgataaatgagcattattttttttacctaccggcaatggcatggctgcggatggtcttggggtaaaggaactttttgcccccaacggcctcaaggatctttttgctgagggcgtccccatcgtggtcgctggacttggaaacctaaaaggtccgggaaaaccagtcaacaagctccggcgccgtgcacattaccatgtggaacggccagtaccacccgggccatgtcacgtagtagtcgccccgccgaaccgccgccaccaccacctttgccagcgtttccgttttccccaccggcagcggccccacattgatgtcgcgagcctcctcgtcaatgccaacatggccgtccttctggatgcccttgcccatggtgaggttggaa

SEQ ID NO: 693 - DNA, 912 bp, Oryza sativa
  Clone ID: PAT_MRT4530_100631C.1
gaggttaatcatagattatcaaaaaccctagaataaattcttcctgggtcgatgcccgagcggttaatggggacggactgtaaattcgttgacaatatgtctacgctggttcaaatccagctcggcccaaaaatctagggcttcgtgaatatgagttaaatccattttttttcttccataaaaaagaatatttgatccatagaaataaaagaaataaaggataaaaagaaaaggggaaatatctttctaatctatatctctttcattcctctcttacaaaacaaagaccttttcttattggttattgaaaggtggattattatctatttttagcgataataaatcgcgacatactagttatgtcattctcactatacccccatacgatacgggggtatgtagtatatgattcgtctatttcttagagtaggacaggcgaatattcttattcttatggttccattgaagaataagtatgtcagatgccctgtggggattgtagttcaattggtcagagcaccgccctgtcaaggcggaagccgcgccttcgagccccgtcagtcccgaactagggttcaatgaatggagaaattcatctttcctttttccatgaaaaaaggggggcaggaagcaagatcaaatacctatggggtacccctatttcactttttttagttcgcgtttctcagtaaagagaggagagtataggaatttttttatcactacttctggttgatagcgaaagacatacatatcatacgtggaagggatcctcctatgttatactattccactctcaaccatgaattgatttgatagatccgaaattcataatattgagttgattgcgggttatcagaaagcaggagctccccttggatgtacaggataccctgttgcgctgtccatggg

SEQ ID NO: 694 - DNA, 1066 bp, Oryza sativa
  Clone ID: PAT_MRT4530_100632C.1
gagcaggatagatggtgtgctgctcaaatgcctacctcgcgagactggtgttgagatcatctctaatatccatgaaggggagtgcagcggccacgccatgttcgcaccctagttgggaaagcctttcgccatggtttttactagccaaaggcgctccaagacaccgtcgagctagtacaacggtgtcatgcctactagttccacacaacacaaatccaccagacgacgcaaaccctccaaaccatccccctgtcgtgacctttcgcgatctgggggctgatatcttgggcatgtttccctaggccgttggaggctacgagtacctctttgtcaccattgacaagttcaccaagtggccggaggaattcctggtcaccaaaatcgacaaacattccatgctcaagttcattcagggtatcacgagccaccttgggatcccaaaccgcatcatcacagataacgacacacaaatcacaagcgacctgttcagagattactgtgagggcgttgggatcaaactttgctttgcctctcccacccacccaaaaagcaatgggcaggtagagtgaacaaacgccgaaatcttgaaggtcctcaagataagatagtacaacatgctcaggaaacacagcgtggagtagatcgatgagctcccaacggtcctatgggccaattgaaccaccctgagcatagtagcaagggatacatcgttcttcctcatatatggggctaaagaaatcctcccatccaagctaaccttcggctcatctcgggtacaactctacaacagtggccccaagcaggaacagatgcggcgagacaacatggattatctagaagagcgctagcggtaggccatgctctgggtctctaccagcaacgtaaggtccaggccctagtccttcgtcatgtcctaacacgtgccggaaaaaccaagttgtccccaatttggaaggccccttttctggtgaccgatgtcccccaactgagctaaagactggttacataagatgggactccgctccccaacccatggaacattgagcacttccgtaaatcctatcct

SEQ ID NO: 695 - DNA, 485 bp, Oryza sativa
  Clone ID: PAT_MRT4530_100633C.1
aacacgcgaacagtgcagaagtttcaaacatcgcaatacatttagctaccccttatagctcctttaattaatagcctaacaaacgtaatgccagaggcatcaaaattctaattctagagccggatagcccgggctagcttctgattgtgtggcaattgttctagcatcttacacatttcacttcagaacctattctcatggaaccagctatgaatgaggggttcagaagatatatttcacaaaggaaattccaccactcttccaactttccaaagcgggccctacacggtgttgcatatgtcaacaggccatggtgaggatcaagatcttgaggtgcatcatgcaggcagcacactgcatttccgatgacatcctgatgcagcacacttctgtacagtcaatgcgataagctgctccagtctgatcattcttcatgcctcagatgcctgttcaacaccagttatatgagctatgcaggcaaaaat

SEQ ID NO: 696 - DNA, 570 bp, Oryza sativa
  Clone ID: PAT_MRT4530_100634C.1
tcggcacgaggctcctatgcagtttgcaggaactcctggcaccaatatcccaaagaacgacatgagaaagtgtcatgggtggacagggtggtagaaagagaaagtatgcacttcccttacaatcgttcatatctcttatgaagttattagttctctgtgcagtgatattttgccttgcgagttgttttctgtctaggcgaacaaaattttgtttcagtgtgactagcatattccccatgcgttgcaacgtaatttttttttaaaaaaaacatcatcaacccattttgctattacttacatatctcttaaattctccatatacctttgagcggacaggtgggccctttggcccacacttttatttttttcaccgtcaaaaaagtagggagttggtggggatggtcaatggtggcattcaccactcacccctaccactattatcttttagaggagtatagatatatttcaaatggaattacagctgttttataatctagattatgaatatcctcttttcctttatacaggaaagatggttgagtctctcaatgtgcttttgcacgagagctg

SEQ ID NO: 697 - DNA, 743 bp, Oryza sativa
  Clone ID: PAT_MRT4530_100635C.1
ccccgtggcctcctgcccagccccccgccggcgccacatcctctcgtttttcttcaccccaacggccggccggcgtgcggcggccggccggcacggcggcccctgccctttccttgaccaaacctcgagctctagcaaccggtcgccagcaagcacccgacagctgccgctctcgacaagctcgacggagcctcctctctcaccacacgccgttgtctccgtcttgcataagttgtttcgatccaattttctcagctcctttcctctccttttttttcttcgtagcgtgcagcacaagagcgcactccagcaagcagcgagcaccacaaggttgctgatgctccagcctccatcatgatgctgaccagcaatggaagtacaaatccaaaggcaagggctggaagcattggagaacaaacaagattagttccacttcagttctttgcggatgcagtttttcaagtttccactgttgttgcagaagcacgctagtatcaagtggtttagattcgttttcaagaacatgtgttgtcttttatgtttttatcgtttcgatctgagcgatgatagcatcagctcatcagcacatctgaagtgtgtatcatatgtttgtgagaggaattttttgtcaacttttcagctccactttgtactacaaaagtatatgtaaactgaagaatcaatgtaattgagtatttttctattgataatagaatggcatttttatttcggggatccactag

SEQ ID NO: 698 - DNA, 177 bp, Oryza sativa
  Clone ID: PAT_MRT4530_100636C.1
aaagagattgaggatcaacgctcaatgggaagggagaagaggctgagatgttgtggagaagaggagatcgaggttgagctgttgaaggaagttgttgtggtgaggtggagcttgacaatgatggtggcttgttggctctggcagtggcagaggaggctggtcgtgagagggagctga

SEQ ID NO: 699 - DNA, 450 bp, Oryza sativa
  unsure (1)..(450): unsure at all n locations
  Clone ID: PAT_MRT4530_100637C.1
ccggccgggatcagcaaccaagcaagaagaattcttgagctcatcagcacaacatctatctccttcttgcttagttaagtccttcgccctcccacgcaacaagaagatgtcttgctgcggcggaactgcggtgcggcgcggctgccatgcggcggggctgcgcggatgcaagagttccctgacgtggaggncacagncaccccaagaccttcgtcctcgctgctccatccaacaaggcganctctggaggaaggaagatggnggtggagagcggcgagaacggcggctgcggctgcacacctgcaagtgtggnaccacttgcgcggctgctcctgctgctcctcgcacgaatctatcgtcgtcnntccccggctgctgaggatttatcgtatggatgctgctactgtcgatcanagcttgtatcgagggcctaatttgcttgcattatta

SEQ ID NO: 700 - DNA, 642 bp, Oryza sativa
  Clone ID: PAT_MRT4530_100638C.1
acaaggtttgtcttggagattgtccatctttggtgaagccatgaaagagcgagagcttgtgttcaatcaatgtcttgaaccactgtctttgattatgcaccagcttagcacaatattccattggactaaaggtaaagagatcctactgatgagtggaaatgtcctaggaaaattttgagaaactgtgattgaggccttcaatgacatgaaaagcaatgccaatgtaatgcttgcatcaaccgcggagtgctataaaggtattacacttgttggggcatcgcatgtagttctccttgatgttgtatggaacccttatgttcgaaggtaggtaagcaaccaagcttatagaattggtcaagagaagattgtgtacacatacattctaatcgcagaaggaacctagtagaaagacaaataagacaaacaagcaaggaaggatcatatgtccaaactattgttttcgaaagaaccacatcaataccaaagcctgcaggatttcaacttgtcaaaaaaagtgatatccaatgataagatattggaagcaatgacatcacaaggggagctcaaagacatgtttctaaatctagtaatttgatatttggaggttgaaatgtaatttgatcttttgagattaaaatgcca

SEQ ID NO: 701 - DNA, 452 bp, Oryza sativa
  Clone ID: PAT_MRT4530_100639C.1
gaattgttctttatgatggcaacatcagtcatttcaattttaaattgtcacttagtttcaggacaacaaaccgatcacagccggtgagggatttatgactgtgtgcacaacagagggccagggattttactgccaaccctggatagtgaagccctggccatgcaggctgtactttttttgagcggaaagatgatactgataagcggctactatgagacccccccaccttgtaccacgcccggacaccgaaacattatcctattgcacagttgccaagaaagcattggccctttcaaccttggagggtgcaccccctaactgtttttcatttgcaggaacagcaggcaccttgttctttgggtttttataagacttcaagcctccaagagcattggaataaggccacccttgggggaaaggggcaagtgacttgccccatgatcctttaacca

SEQ ID NO: 702 - DNA, 1469 bp, Oryza sativa
  Clone ID: PAT_MRT4530_10063C.1
atggcggcggcgatgattctctcctgcaggtatctgctcatctgcagcgcgacgcttgcgctgctgctgctgcgactgtgcagcgggctgagcctggacacggtgagggagttcctcacgagggaggaggacaccgtcgtgttcggcctcatcgagcgggccaagcacccgcgcaacacgccggcctacgaccccggctacctcgccggcggcggccatggccacgacgcctctttcgccgagatgttcgtgcgcgagtccgaggcggttcaggccaaggcaggaaggtaccaaagcctgcaggagattcctttcttccctttcagagtgcctttcacattggcacctccatataacttcacaaccgagctgtattctgcagccgcattagttaatgtgaatgatgccatatggagcatgtatttcaatgagttgctccctctcctggccaagaatggcgatgatggcaactatgctgcaactgtttcatcagatcttgtatgtctgcaggcactctcaagaaggatcaactatgggaggtatgtggcagaagtgaagttcataggcgaccagcagaactacacaactttaattcgtaacaaggacacggatgccctgatgaaattgttgacatctgaagcccaggaagatgtggtgaagagaagggttcagaagaaggccatggacgaagtggaagacggtgtggaggcgaccgctgggactcgcgaggtggcggcgcgacctacggcgacagcggctgagcggcgtgccggggtggtcggccggtcgcgcggccgtggcgtgggggcgacggcgcaggagtggtggcggagctgcgaccaggtgagccggctggccgctgttgcttgctgttgctaccccgccgcggctggttgctgcgccggcacggaggacgacaagaagggcaccggctgctgtttgctgctgctgttgcttgttgtttgctatttgcggctgctactgcttgctgtttgctgctgctgtggagagaagggactgctgtttgctgctgctattgcttgtttggtggactgctgctgtggagagaagggaaaagagaggagaaggttgctgttgcttgttgttggggttggaaaggaggttgtagatgcctcctcggtggttactaagggtgatatgaaagatttgctagagaatttgttgaagatgggcatgataggtccgaagagtgtagcagggggattcgaactgaaactagaattgatgccaaatgagttgaggatgatagagactattcagaatgcagcaattgtgtggaagacattgagcaacatgtattcaggagagggaaatgtaatgatgatggttgaggctcagaacaaagggctgaacaaggagtttgaggacagaagagcggctatgttctaccaggctacattgcccactatggaagaggctatttctgctatggtgcaggaagagatgag

SEQ ID NO: 703 - DNA, 202 bp, Oryza sativa
  Clone ID: PAT_MRT4530_100640C.1
accttccatattttttgcaccaaaatatttggtttcacaccagggaatggttttaatggtggttcttcgccgcctcttcctgctctccggcaacgggaaccttggcgagttcccaccaccagaaccagggggtttcacaccccggcccctttttgtaagcaagaattgggctaccctttgaccccgttccgggttggccggc

SEQ ID NO: 704 - DNA, 384 bp, Oryza sativa
  Clone ID: PAT_MRT4530_100641C.1
atggctatatatagagccccctccctctcctctttcgggcgccacctctccctctctccgccgtcgccggaaaccttttccccgcgagcgccctctctccgtcgccggtagccgctccagccgcccctagctgccgcctcggtcgtcgccgctccgcgccaccacctccctcggctctgcaaggacaagagaaagcccggcagccatctcgccgaaaccgaagaccccgggaagaccttcgtcgccgtgaataccgagctcgccgccgcgttttgatctccagcgtggccctactgctcctcccgtcatcgtcaatcttcacccaacagggctttttctgagacggcgagatcaacagatgtacgtgcatatgagccggacggc

SEQ ID NO: 705 - DNA, 1986 bp, Oryza sativa
  Clone ID: PAT_MRT4530_100642C.1
tcaaatagccgtcatcggtatacttagttcaagcgcccaccatgatgatgactcgactgctaataactgcgccacgcatgggggcgcgtagggcgggaagaccggggggtctgccaggtcgtgcgctcctctgcccccagcgttccacccttgaccaccgcgcttcactcgcccaacttctcgctcatcctcgccgattgccatggcccaagacaccggcaacgccgttctcctggcttcgcgcatcacggcgcagaaacatttgaacctcatccgcaggttcatgccgaagggcgccgtcgtgagggtgggggagtcatggcgccccggcaccaaagtggcgaggggcagagccgtcaccttgggagaaccgctcagtgggggccttcttcgctcttcgaaatagtcgaggtcattgcggcagagctcgtcctggtccgcctcattgtacagcgcaacgcgaggcgagcccagggagagctctgacggtaggaccgcctcggtgccgtataccatgaagaaaggggtttctccagttgcacagctcggggtcgtccgattggcccacagcaccgtgtgcagttccccctgggaaaggctcaagatacatcgaaggagcaaattgttctcttcctgctgctgcttgaactctgccaactccttttgagtctttgccagtgcttcatttgcaagatttgcttgttcttttagtgcgacaacttctgcatggagaatggctgaactttgcttttcagctgcaagttcttcctgaagtgctgcttctgtcggtgtcactgatttcttggagctcatctgcagaccagcatttttcaaaaacgtggtattggagttgtcccgagagagaaccttggacacaacttctgcactagttcttggtgtctcaccatcaggtacaggttcttccataatagctttcatacttgaaattgcatctttggcagcatcacttagacctttttccctactggtatggcagtcctcaaaggcatccacaacatcaagctctacaaccttgttcttctccttgtaagcgtgcaagtgtgcagcatagctgcgagatcccgtagcctgatggaacctaacattaagccggttttgcttgttctgttcagagatttgcatattctttggatttgaccactttgcaacaagttccagccactgttcatcagtcatgctacttatgggagaggtagttctaatctcgttagcaggtactccattgaagtaggccttcttcaaattataccgtgtttgtcgtatccctttctgcaatacatcagcacaagcatcccttgttggctggtttttttggttaatggccaacctgacagataacttgcccatgaagttgttaatatagccttcatcatccttgtactgcttccaatgagggaagacaggaactttagtcctaatgataacaccagcctctgatgcaaacttggcagcttgcaccggttcatctggccttttcttcccttcggcaacagcaatgggcattcttcccatagctttggtcatcttgtcaagcattattcctgcagttggtggccttgattttcttgtgcctcttcgtataggtacttgttctgctatgagttgccttttcgctgaccttgttgagactccaggaggcatttcggttggagcacccgccctcactctctttgatatccttactcctggtggcatcttgagggtaggtttcttcttcgtcgcacacttctttcgtctagtttgtcgagggtactcaatcattatggggatgggctgctccggttctaaatatgaatcatcatcacactgaaccccttgttcatcatcttcagggagaaactctgatgtatcagaaccttctccatgacttttcttggtgcctgagttttttgtctttgaagatgcatgttgtgtttcgatatgtttaatagtggcagctatgtctttgatgccaagttcatccat

SEQ ID NO: 706 - DNA, 719 bp, Oryza sativa
  Clone ID: PAT_MRT4530_100643C.1
tgagcagcaagcggtgacagagcagagcccgcgggcccggagcagcaagcggtgacagagcagatcacgcgagcttgtcgccaagggggggaggaagagaagtgagaaatccgcgccaagaagcgagagaggtccgcagctggtgtcgtctggtgctgcgggtatcgtcgctgccatggcggatcagtcgaacaacatgatcatcgaggaggtcaacaagggcctgaaccctggaacgatagtccttcttgtggttgcaactctcctgattcttttctttgttggaaactatgcgctctacatgtatgctcagaagacgcttcctcctcggaagaagaagccagtctccaagaagaagctgaagagggaaaagctgaagcagggggtttctgcacccggagagtgaagagattcgtcagtttaccaatgttactgattttatcctgagcttcttttgcatgataagaattatcagctggagcggcagtgtttacagtaactatgttatgtagaagctttgtcctaagtggtttacatttgtattagacgccttatttgagcaatctgttgaacagcactgcaaattgagcccttcttttggttttaaaaaaacaagaatcttagatttagctagcgatcgtgcctgaaaatttctgcaacctgcggagccatcttgcaatctgaaatctgaatgatttataaaaaaaaaaaaaaaaaaa

SEQ ID NO: 707 - DNA, 141 bp, Oryza sativa
  Clone ID: PAT_MRT4530_100644C.1
atgtcgagcaagcgtcgccatggcatcgcgaaggcgtcatggtgttcggcgacctccaaggcgtcctactgccacaacctcgagtctatggcgtccgccttagggctagggtatcgctatggcattgcgattgtggcgtga

SEQ ID NO: 708 - DNA, 2398 bp, Oryza sativa
  Clone ID: PAT_MRT4530_100645C.1
gcctagatgaaatgcttgctatctgtcgtgcctagaataattatctgccgtcgcgttgactacctgactatcaggtgtgcgaggaaacgagactatcggtgggcccgcccagccacaaccgtaatcatagcgcgccccgcgtcgattatgccggcgagaataaaaatgaaggaaggaagagagctcgtatccttcctttcgccattatcactctcgcacacacgctcctctgcccccagcgttccacccttgaccaccgcgcttcactcgcccaacttctcgctcatcctcgccgattgccatggcccaagacaccggcaacgccgttctcctggcttcgcgcatcacggcgcagaaacatttgaacctcatccgcaggttcatgccgaagggcgccgtcgtgagggtgggggagtcatggcgctagactcggaagcccggacaccccgtgaccgccattctcttcttttatcacatataccaacttcacatagcaccatattacaaaaaagttcacagaacctagcacacatatgttcacattaagtccacaaaagtttgccataggatgacattaagtccaccatagcaccaaacatcatttcacagtaatcaagtccaccacatgacaataagttcacagaaccatcaaacaactaatataagtagatagagttcatcacagtgcagaagatcataaaggagactaggacagatttaagttaccctgggaaaggctcaagatacgtcgaaggagcaaattgttctcttcctgctgctgcttgaactctgccaactccttttgagtctttgccagtgcttcatttgcaagatttgcttgttcttttagttcgacaacttctgcatggagaatggctgaactttgcttttcagctgcaagttcttcctgaagtgctgcttctgtcggtgtcactgatttcttggagctcatctgcagaccagcatttttcaaaaacgtggtattggaattgtcccgagagagaaccttggacacaacttctgcactagttcttggtgtctcaccatcaggtacaggttcttccataatagctttcatacttgaaattgcatctttggcagcatcacttagacctttttccctactggtatggcagtcctcaaaggcatccacagcatcaagctctacaaccttgttcttctccttgtaagcgtgcaagtgtgcagcatagctgcgagatcccgtagcctgatggaacctaacattaagccggttttgcttgttctgttcagagatttgcatattctttggatttgaccactttgcaacaagttccagccactgttcatcagtcatgctacttatgggagaggtagttctaatctcgttagcaggtactccattgaagtaggccttcttcaaattataccgtgtttgtcgtatccctttctgcaatacatcagcacaagcatcccttgttggctggtgtttttggttaatggccaacttgacagataacttgcccatgaagttgttaatatagccttcatcatccttgtactgcttccaatgagggaagacatgaactttagtcctaatgataacaccagcctctgatgcaaacttggcagcttgcaccggttcatctggccttttcttcccttcggcaacagcaatgggcattcttcccatagctttggtcatcttgtcaagcattattcctgcagttggtggccttgattttcttgtgcctttgccttcaacatcagaattggtttgctgtgcaggttgctcttcatggttggcatcatgtccatatgaccagtccatcaccgggctcgggggccagttcacatcattatcttgaagcaaatgtccactgcccacatcttcatcaccattgttttctgtttctggaggcagttcttcatggccattacctttaccttgttctgctatgagttgccttttcgctgaccttgttgagactccaggaggcatttcggttggagcacccgccctcactctctttgatatccttactcctggtggcatcttgagggtaggtttcttcttcgtcgcacacttctttcgtctagtttgtcgagggtactcaatcattatggggacgggctgctccggttctaaatatgaatcatcatcacactgaaccccttgttcatcatcttcagggagaaactctgatgtatcagaaccttctccatgacttttcttggtgcctgagttttttgtctttgaagatgcatgttgtgtttcgatatgtttaatagtggcagctatgtctttgatgccaagttcatcaatccttcttatattctgcaagattttctcttgccgcgttctttcatattcgttttgtgcaggttctcgtgctactggacgtcgacgtcttcccat

SEQ ID NO: 709 - DNA, 153 bp, Oryza sativa
  Clone ID: PAT_MRT4530_100646C.1
cgcctcaccgacaaaaacgcagcagtgccggcggctccgccacagaggccgcggccgtgctgtgcagacgggtggaggggaaccgtcggcgcgagcgcgtcggtggtgaagcggaaagccgtgccgccgccggtggcgccgtgggtggattag

SEQ ID NO: 710 - DNA, 1000 bp, Oryza sativa
  Clone ID: PAT_MRT4530_100647C.1
gagatactcaccagtgggagacagaggatcgaaccaacaccaccgctcaacggtaccgccaggccaggacgtgctgtgcgcgcggctgtgccgctcgaccgcagaaccatacggaattgacggaccaattgtgcatacggacttagctaaaataattgtggatttttggcaataagaaaagcgagtagcacataaaatctaaagtggatgagtaaagggacaaaattttatacatgttcaggccttctcgatgaggagtaatactatactcctgttttggggattatatttgtcagatgttgtatcaatctgacgatcgagttatggttattgttggcggctgttaaatatcgattttatgccatcaatacctgtataatttatacagaaataataaaacattcaacatagtggtaggctttaattctaacatattccataagtgttggtgtatatttggatgcaggtaataaaccaccgaattaggaggaaatctagactaagttgaaggaaattttcatccatacaagtgttgggctttttaactccattttaacaccaaaatgcaagcccaaaaacctgcgaaatggataaggcagactgagaaggaggcccaggccaaaacttgggccagttgggccaagccaggtttcggccaaatcctgatcatcgctgttgatctcagggtttggcatggacgctcttgatttactcctgatggcagttgcagggcatttccgatcattcgcatgctctacaaccatcatacctacttatttaaggagctctcatcctcacttcatatcacacactccaatcttgagctgaattataagaggctctattgtattttattgtatactagaattagggaaagattaaggtcgtagaagaaatcggaggaattccggagttatcggtgatccttttctatttcttatactttgttatttgctttaatagaaatatcatttcaagtaattaagatttggttagtgag

SEQ ID NO: 711 - DNA, 339 bp, Oryza sativa
  Clone ID: PAT_MRT4530_100648C.1
atggcgagggggagcacgggtggttgtcttccaatgggcttggccacaactccccggactgatgtgggaagaggccaagatcttggtggtggaggacgaagggcagcgtggatctgctcggccatcgacttcatagacatggagggcggcgtggctttcatagacatcgcaatggacggtgccgaaggtgctgtagatgttgacgcccttgatgatgatctcggtgtggtcgatcaagctcgtcgcctgactcgcccgatttgctttaccgcgctcgtcaagatctgtgagggcctcaaaatgtgtttcacacgtatcaggcgggtggcatggatctga

SEQ ID NO: 712 - DNA, 460 bp, Oryza sativa
  unsure (1)..(460): unsure at all n locations
  Clone ID: PAT_MRT4530_100649C.1
tgtaaagcttagcttgtttaagttttttattgttaaatctggattaatcaggagtaaggtgtttattttcttttgaaatcatcaatttcatgttttggtggtatgctgctaattgagatatgcacaatgtatttcaatgtagctttagttgctaatttgtttgttgtgtatgcaggtcttattttctaaattggataattttcttgctcctaacaggccatgccataatagtttgtggtgagatatgcattattcaacttgctatttataaccgaggccaaaatttatacattgattgctttatttctagctgtttggattgtttaaactgacaaagatggaatttatgaagntaagtatgaatgctactcaaggacnaaatggttcaaacttcttttgaaaagcaccatgttttatttggggtaccttggttcacnatattctgcaaatggcatttatc

SEQ ID NO: 713 - DNA, 877 bp, Oryza sativa
  Clone ID: PAT_MRT4530_10064C.1
atggtggatttggtggaacccgtggtggatttggatgagaccctggttactttggggggaaccacagtggtagaagaggtcgttgtggagatcgtggtggtgaaggtcgtggtaggggcgaagtgctcctcatgccatgtagccatagaggagggtaaagctattaccttaacaggtgaacaggtgacacagtgggaggaatggcagaagaacaagatcaatgagagctccaacaccaccactcacttttggtacttcgccaactacgctcaagtgggcgaaggtattcaggcacaggcacttgcatttacatacagacatcctatagattggatcatagactcaggagcatcaaagcatttcacaggattgcataataccttcacatcatacaccccttatgtccactttgaaactatccaaatcgctgatggtacatccaaacctattcatggtatagggtcagtagagtgcacatcatcaataaacttatcctctgacttgcatgttccttcctttccagtaaaccttctctcagttagctcagctattgaccaactcaagtgcattgttgtatttgatgagaactctcatctgttccaggagaaggggactgggaggaggattgggactagagtcaggtgtgatgggttgtggtacatcaatcatgaggaactggggctagctgcggtggttggaaatgttgagaaggagatcagtttgcttcattgtcagttaggacatccatcttttgagattttgagtaagttgtatctagatctctttagtaaagtggataagcatagattggtgtgtgatgcttgtgagcttggaaaacatactcggtctacatatgttgggattggtcttcgtaact

SEQ ID NO: 714 - DNA, 1299 bp, Oryza sativa
  Clone ID: PAT_MRT4530_100650C.1
atgcctgccgaaggcggcggcaatggaggggctcaccggcgcgtgaggacggcgggctccagtggcgaaattggacggggaaggggtggacggcgtggccctcaggcttgtgaaccggacggcggcggctctaacagcggcgagcgggggccggagggctggggaggtgagaggtggctgggagtggcatggatttgccggcgaagtggggaaggtggaaagagagggggccggcgggattcgaaattagaatcccagccgtttcttggtgtgaacgcgcgggagaagtgggacggcggttgcgggatgtacgggagagggcgcggggagcggacgacgtgcgcgaggcgcacgggagaggcgggcggcgacggttgcgggcgcgggcggtgccggccggaggccgcccccactgctgccggattgacgacggggaggaagaggcaagagagttcgactgcttccgagtccgacggcggaggagccacacctcttgaggatgccaccgctgggttgatgatggagtgggagaggcgagagggaggccagttgctcccaagtccaacaaaggtggatccatccctcctgtcaccattggtggcagaactgccgaggccggtgccgcccccgttcttgtcttcgacgtgcgccacaccaccggacctgcctccgcacattaaactatcattgacgtcaagcttctaccgagaaagagggactaggataaggcgagccataaccgtccccgtatgcaaaatgcccgccccccggccagtgctggcgtcggcgactcgcgacgcccggatcatcaccgacgacctcgggatgggtggatcagtcactagcgaccgcgaggctggcggatccaccgccagtgaccttgtggcatctagatccatccccgacgactgcgagactggtggatccatcgacgacggtgacggtggatccggcagcgctggactcgggagtggtggatctgtcgccatcggcgcgttgacagctgcggtaacaacgatgctggactacggtgaccacgacgacaatcatggcttgggcaggttgggtggatctattgcctgtgaccgtggggcgggcggatccaccactagcgaccttgcggcgtccagatctgtccccaatgacaacgggacggatggatctatcgactacaactacaattacggtgatgacgacggtgtatcgggcggtgccggacttgggtgctacagatttattgccattggcctcagaagaggcattgaccgctgcagtgacgatgatggcggactacggtga

SEQ ID NO: 715 - DNA, 690 bp, Oryza sativa
  Clone ID: PAT_MRT4530_100651C.1
atgaagaaatttaggattattgacgaggatgaggagagttttaatctgctagtgtggaatgttagaggtctaaatgatgttgccaagagtgctagtcaaagggggggacaaatcttggttttgtcttcgatgtactggcctcaaagggatgatgagatgttgatgttcttggaagagatgacaactattagagaggtttatccaggggaatggataattgtatgggacttcaatcttatcacctcagctacatacaagaacaattctagaatcaaacaccagatgatgaacatttttagaagcaagatagatgaactagaactcaagaagatgtacttgtttgaaagaagaccgattaggcacagaagattcaaatttgagaccttttggacaaagttagatgacttcatggtccatggaggtggttcaggaggcatgatggccacactcaatctgtcggagttaaatgccccttttactgaagaagaggtgtgggcatcaatcaaaaacataccaaatgagaagtcactaggcccggatgggtatacatgcctattttatcaaaaatattggagtatcatcaagccaaaattaatggcagtgttgttaaagtttggttatggtaacaaccaaaacctggacctactgaacacggtgatcatcaccctgcttcctaagaaagaattatga

SEQ ID NO: 716 - DNA, 310 bp, Oryza sativa
  Clone ID: PAT_MRT4530_100652C.1
attgatcccccaccaatctaagtacaccaataaactccatgtaactatcaatccatcaatccctccatggaccacccaagatcgcattccatgcctacctgcccctgcccagaaggagaaacggcaagcagatcgagtcctcacctttcaaacgaacaccggcgccgcaagaacagcggtggggggattctgcggccacggagcgaagaagaaacacgaggatagccgccgattttgttgcgaggttggggagaagaggggaaaaaaagaaaaagaagagaaaaacaagtcaatggaaaccacgaggtga

SEQ ID NO: 717 - DNA, 1226 bp, Oryza sativa
  Clone ID: PAT_MRT4530_100653C.1
gctgcaggaatcggcacgaggatcgacgacgactgattcggttcatgatccatcagaaggaatgaatgggagtcggcagatggagctgcactacataaatactggatttccatacacccgcgccgcgggcttcggcgcgtgccttgagggcctcacatatgctcatgctgattttgctattgcagatgctttccatgatcaggctaatccatactgggcaatgatgcatacaaactcgtacaagtatggatattccggtgcaggaaattattacagttatgggcatgtttatgatatgaatgattacatgcatagggcagatggtggacgcagaatctgggataatgctacacctgtaaacaacactgaatccccaaatgtagtcttgcagggtggagaaactcctcatgcaaatacaagctctactactgaggaatgtatccaacaacaagtacaccagaattcaagcagtccacaggtcatttggcaagacaacattgatcctgacaatatgacatatgaggaattgttggatttgggtgaggcagttggaacccaaagccgtggtctctcccaagaacgcatttcattacttccagtcaccaagtacaaatgtggtttcttttcaaggaagaaaacacgccgtgaaaggtgtgtaatttgccaaatggagtacaggagagggaatctgcagatgacgcttccctgcaagcatgtgtaccatgccagctgtgtaacaagatggcttagcataaacaaggtttgccctgtttgctttgctgaggttcctggtgacgaacccaagaggcaatgagtcaaggccgccaaaatgttcttgcgcccagactcagcccacactgtaccccaacggatgcatggtttctcctgcttggcagcgctcccctttcccccttgtcttgcgtcttggattctgttcgcaaatataggttataaccagatgtagttggatcttggaacctgttctgagaggtttgccgtacactggagagttcgaatgtgaactgtaaccctgtgctagatgaagcatgctggatcacgcgcgcttgcgaggtgtttttgtccactgcaaagagcattgcactagcctgtgttatttgaattcaattaagattttgtggacagaaaaaattcgtgtgttacatcccctgcttttagcctgtcaaaaaaaaaaaaaaaaaaaaaaaaaaaaaaaaaaaaaaaaaaaa

SEQ ID NO: 718 - DNA, 303 bp, Oryza sativa
  Clone ID: PAT_MRT4530_100654C.1
atggagaggaaggcgaaggggaagggacctcaccgatttaactgctccatggtgtccatggcggcggaggcggaggacgacggcgagcggcgagcggcggaggattttagccggccgcgcagcgtggcgcggaggcttgagttgaggagaggagaaaccgaggagaaaaatggctaccccgaaatccgaatcacccaactcgacctgccctctttggacttcggagttcggaccgttggactcgacccaaacttcctctcctctccccctccttgcgccggaaggaacaggagaactcggtga

SEQ ID NO: 719 - DNA, 332 bp, Oryza sativa
  unsure (1)..(332): unsure at all n locations
  Clone ID: PAT_MRT4530_100655C.1
cgggagagcaccacagcgccgcctccacttcccgcgcaattcgcaagagaagagccatggacggcgggtcctccacggcggcgaggtcgtcggcggcggagatggaggagcaccagaactggaagaagaacgcgccggtgctctacgacctcgtcatctcccagccgctcgagtggccgtcgctcaccgtccagtggctcccctcccactcccggtcgccgggctccgnccgctcccaccgcctcgtcctcggcacccacacctccgacgagacgcccaaccacctcctactcgccgacgccgccctcccgctcccgccccgcctggcggcg

SEQ ID NO: 720 - DNA, 1954 bp, Oryza sativa
  Clone ID: PAT_MRT4530_100656C.1
atggtggcggtgaccgggggcaggccccccggcctgcaggatgcgccgcggggcaccaccaccagcaccagcagcagaggctgtgccgtcgccgcccgcctcgccgcgggacgcgacttacggaggccgccgtgtacggtggcgtaggaggaggaggatgctgcctcgagttcctcgactgcgtgctccgggcgatgggcgtcgccaccccggccgagatcatgccccccgcggacttcaggtgggccgcgcgcccgatgcggcggcgccgccgcgggggctcctcgtcctcctcctcctcgccgcgcgaccgcgagccgagggacggccggatcgccgccaacggcgcctccgctgccgcctcgctctacacgatgcggggcaacaagggcgtcaaccaggacgccatgcttgtctgggagaatttctgttcaaaggaagatacaattttttgtggtgtttttgatggccatggaccatatggccatttggtgtccaagagggtcagagatctcctccctataaagttgagtgcaaatttaggaagagatggacacaaagaaacttcaactaacattgtcacaagcagcatgactgaaggtggtggcaccgaacgcatggatagagatactgaaactcccctgggaacggaggagaatggagactaccccgagatgtttgctgcattaagaacttcattattaagggcattttatgtaatggacagggatcttaagtttcataaaaccattgactctgtgttcagtggtactacagcagtcacagtgatcaagcagggacatgatctcctgattggaaacttgggggattctagagctgtcttgggaactagagatgaatatgaccagttttttgctgtacaattgacagttgacctgaagcctaccattccaagtgaagctgcacgaattagggaacgaagtggcagaatattctctctgccagatgagccagatgttgctcgtgtttggcttccgaagtacaacatgccagggttggccatggcaagagcatttggagacttttgtctaaaggattatggtctaatttctatgcctgatgtttcctaccaccgcatcactgaaaaggatgaatttgttgtgttggcaactgatggggtgtgggatgtactttccaactcagaagttgttagcattgtcagccaagccaagtcagaagcctcagcggcacgatttgttgttgaatcggctcaacgtgcatggagaacacggttccccacatcaaaaattgatgactgcgctgttgtctgcctgttcttgaatacagatgctagaaataaaccccccggttcaggaatcaaagatttggccaatgccatagaactgggtggtggtaatctttcttgaccatcaaatcaagcactagggctcttaccgatctcgttactgcattggtaacaggtgatgagtggcctgtccttgatggtgtctcgaaaaatctgcgatagcctacttaagttgcaagggaaagcataaaatccgtacttgtctatggattaggataaccattttgcccaagatttgtgcagcttattatacttgcaatgattcttctgcatgggaagacggagccagtttactttgcttgttggggagtggttgcttggtttattctgcactgcaattagtggttctaggacctctgtttcagttattctgtaaagtatcaaatcagcttagtgcaagtctaaagaaattcagtctagtgctgtggtattattacattttgttcataataatagcgaagatttatatgtcaagtatcatttttgttctattatttctgtttcagattaagtttctatggaactgtaggctttgttaaactttttgtccaagtctttttatcatattattgtggtttttgacaaaaaaaaaaaaaaaaaactcgagactagttctctccctcgtgc

SEQ ID NO: 721 - DNA, 2151 bp, Oryza sativa
  Clone ID: PAT_MRT4530_100657C.1
atcagtcagaacatcaccgccggcttgccttcgtcgccgccaactggtgtcctcgcctatacggttggttggcctattatgccgccgttgatgggcatctacatcttcaccgaccgacttcctcgtctgccgccaactggtgtcctcaccttcatagttggatggtcacaccatccttgatgggcgtccacatcttcatcgccggcatgccttcgctaccgccgactggtgtctccgcctgcacggttggcttattatgccgtcattgatgggtgtctacatcatcaccaccggcttgccgtcgtcgccatcgactggtgtcttcacctatacggttggttggtcacaccaccattgttaggcgtctacgtcttcactgccggcctgccttcgccgccgccgattggcgtctccgcctgcacggttggcctattatgccgtcattgatgggtgtctacgtcatcaccaccagcttgccgtcgtcgccatcgactgctgtcttcacctatatggttggttggtcacaccaccattgttaggcgtctacgttttcaccgctggcctgccttcaccgccgccgactggtgtctccgtctgcatggttggcctattatgccgccgttgatgggtgtctgcatcatcaccaccgacttgccgtcgtcgctgccgactaatgtctttgcctatactgttggttggtcacaccaccattgctgggtgtctacgtcttcaccgccggccagccttcgccgccaccgatcggtgtcattgcctacacagttggatggttacaccaccgttattgggggtctacgtcttccccaccggtttgccgttgtcgtcgccgactggtgtgttcgcctgcacggttggcttatatgccactgttgatgggtgtctatgtcatcaccacaggcttgccgtcgtctgccgctgactggtgtctccgccttcacggtttaatggtcacaccaccgtcgttgggcgtctatgtcttcaccaactggctgccttcgtctgccgccgactagtgtctccgccttcatggttggatggtcacaccaccattgttgggcatctatatcttcaccgaccggctgccttcgtctaccgccgactggtgtctccgcattcattgttggatggtcacactaccgttgttgggcgtctacgtcttcttcaccgaccgaccgcctcgtctgctatcgattggtgtctccgcctggacggctggcctattatgccgccattgatggggatctacgtcttcaccatcagcttgccgtcaccgccgccaactggtttcctcgcctccacggctggttgatcacaccacaatcgatgagcgtcatcgtcttcactgccagctcgtcttcgccgccgtccatggagtcttcgctttcacggctggcctattataccgctactcaaggacgtcttcgttttcatcattattctgcttcctctatcggcgactggttttgccaacgccgactagtggttttatcttcatgactatgtgtcttcgccaccggtttgcttctgatgccactgattcgtgttcacatcatcatggctatgcaactttgtcaccatggtggagtgacttcatcttcattgtcttcggcaccggcaaaactctattgccgctacttctcaagttttgctacttcaccaaccacgacgtctacaagagcctcaacatctcggcatgtgtcaccagatttgacgccgcactaataacaagtggttttccaattttcaagatttgtactcggatatcttcaacgcatatcttcattcaagagatggctactcgacgacaagctatagttcttgactctatgttcagatgtttcccaactaaccaaagagacaggggctacacaaatataagactcaaaattcgacaagctttatgtcaagacaaagcaatcaatcagccaacgagttctatggaatttagttcgggagttattagtttcgtctttgcttcagagcagacgttctacttcagcaactcttattatttcatcggcaattttggcttctggacactgccacaatctacttcaagtttttcaagtatcaagttcgagatttaatctacatgtcagggagtttggagttatcaactaatcaactcagatt

SEQ ID NO: 722 - DNA, 1149 bp, Oryza sativa
  Clone ID: PAT_MRT4530_100658C.1
cccacggacaacaaaacttccgcgacgcctccccttacccctaatcccactccacccaacgaggagatagcgcaagagaggagagggtttctgcggcggcgatggcggcggcggcgaacctggaggacgtcccgtccatggatctgatgaacgagctgctacgccgcatgaagtgcagctccaagcccgacaagcgcctcatcctcgtaggtccacctggctctggaaagggaacacaatcgcccattattaaggatgagtactgcttatgccatttagctacaggtgatatgttgagagctgctgttgctgctaagactcctttaggagtcaaggcgaaagaagcaatggacaagggagagcttgtttctgatgacttggttgttggaattattgatgaagccatgaagaaaccttcatgtcaaaagggtttcattcttgatgggttcccacggacagttgttcaggcacagaagcttgatgaaatgctggaaaagaaaggtacaaaggtcgataaggttcttaactttgccattgatgattcaattttggaagaaagaattactggccggtggatccatccctccagtggcaggagttatcacactaagtttgcacctccaaaggttcctggagttgatgatgtcactggagaaccactaattcaaaggaaagacgacacagctgaggttttgaagtctagacttgaagccttccacaaacaaactgaaccagtgattgactactactccaagaaggccttggtggccaatcttcatgccgagaagccaccgaaagaagtaactgctgaagtccagaaagttctttcgtaaatgtaccaccattttgagacgaaaattcgacagattacccagacacactgggtccggcttttagatgttcaaattgacgctgacatgcaaggtgtagactgctctctttttgtattgggtactcttatcagatttgatgagcacagtgctttgcgttgttttagttctaataatctctttatggcattgatggaaggaacatttttttgtaccaatatcacagggttctttcacccttgagagttcccaaaaaagctttgcttaaaaataaaaaaaaaaaaaaaaaaaaaaaaaaaaacataaatacgctagagat

SEQ ID NO: 723 - DNA, 4380 bp, Oryza sativa
  Clone ID: PAT_MRT4530_100659C.1
atgacgttgaccagggcaaggaacaacgagcgtgcggatagcctactggagcccattgagctcaccattttgatcaccaatgccgcccaagccacactgcccgccggatcgggaggcatatttggtaatgctgcaccccttcaccaccgggttgcactcgtcccatgctccttcaccaccaggagtgccttgagcaagaagggggtggaggagggtgttgtgattcagtcagcggcgtatgccgcacaaagaaggctgcatgttcacagcctaggaggacctagtgtcccagaccatcgagcgaaggaaggcgactatggtgggattgggaagaggatattttcctttccagtgaaggaagtaccaactagcaaggagcaagtaattgtcagggagtgtgatcctgaagaagacaaggacaagagaagggagccaagtattgagaaggcagaagaagcaggaagacaagctgaagacttgggccgtcatccagctcgtctgaggaggcccaataccaagagcgaggtgggatttggctgcttcggcggtgagaaatccacaaaagtttcggctccctcaatctggttggctaaattcggagagcatgtgagggattacggtccaaaactagccatggatctagacgccaagtttgatctcttgttcaagaccattgctgacaacgagaagaagaggatggaggcggaggagcgtaccagggcggactacttggagttgaagaagacggtcgagggccgcataccggcgatggagaagaaggtggaagaactaggtgagtcgctgcagtccttgagcaccaaggtcgagcagctggaaggcaacacgatgcggcaagtcaagtttgaaccattctctgctgcaagtgcttcgggtgttcaaggaggagctaaggaggagcagttcggaggtgttgcgggaatgtttactcctaatggtacgcctgagaaattttccccttcccctattcctttcaattgcgattcggcatcacccacttttggtaacggaatggggacaatgaatctaagtagtgctattcctcctatgacttgccctcaatttactggtgataacccccaaatgtggaagtcaaactgtgaacaatattttgatgtctatggaatattgccagttcactgggttaagattgcaacactcaatttttctggtaatgctgccttttggtttcaatctgttagaaatcagatgagtgggatttcttgggtgtctttgtgtgatttggtatgctccagattttttaaggataggcagcaagctcttatcagacaatggttccatattaagcaagagggcagtgtttcagagtatgtggaaaaatttgatagtctgatgcatcagttgctagcttattacaactccctgttgcctgtttactttgtgactaagtttattgaagggcttagaagtgacatcagaatggtagttttggttcaaaggccacaagatttggattcaacctgctcagtcgcattacttcaggaagaggctatggaaggtgttaagttccagggctacaagagaccaaacaattcagttatgattagaaacaactcaccagccccgatagttggacaggcctccacaccccagaaaatcttctctcctcaaattactgaagatagaaggggcactgaagctgcaagagcaagagatgacagactgtcagctctgaaatcctatcgcaggtctaaagggctctgtttcacctgtggtgaaaaatgggaacaagaaattgatgaagtgggagatttgatgtctatttctcaacaggcagtttgggggactgaatcctctcgttctatcagactcatcggctgggtgcagggtactgaattattgatgctgatagactctggcagtactcattcctttatggatgaaacagttggttctaagatggtgggtgtttctccactcaggaagcccttgtctgtgcaactagctgatggtgggtccttgttatgttcccatgagattgctaattgtaagtggtggatgcaagggcattctttctctagtaatttcagactcttgaacttgggtggctatgatatcatattgggcatggactggttggagcaattcagtcctatgcaggtggattggtcacagaaatggatggaaattcaagttaacaaccagcctgtcaggttgcaaggtataacttcccagactaacagttgcaatgctatctctgctgaacaatgcttgggtatggctagaaaggggtctattctgtatttggtccaattgacatcttctgtttcagaaatctgtgacactatgcctgaagcagtacataatttacttctcaagttccaggatgttttttcagaacctactgaactccctcctaagcgatattgtgaccatagtattcctcttgtacctgtggcaacacctgttaatttgaggccataccgctttaatcctgctcttaaggatgagattgaaaagcaaatttctgatatgttgaaatctggagttatccagcctagccacagtgctttctcatccccagctctgttggtcaagaagaaggatggtacttggagacttgtcattgactatagaaaattaaatgccattaccatcaagggtacttatcccatgccaatcattgatgagcttttagatgaattatctcaggctaagtggttttctaagttagacctacgagatgggtatcaccaaattagaatggcccctgccttgcctgatttcaagaaggtcttcattgtggaaactgatgcttctgaagctggtattggggctatgttatcacaagacaatcatcctatcgctttcattagtaaggccttgggtccaagaacaaaaggcttgtctacttatgagaaggagtgcatggcaatcctcatggcagttgatcaatggaggtcttatttgcagttgggggagtttattatccttattgatcatcatagtcttatgcacctttctgaccaaagaaaaggtaccagtaatgctgcagctgatgctctctctcgcaagtttcaggatgataacagtgaattgtatcacatttccagctccaccccactctggttgcaagaagtaacaaaagggaagcatttttctctctctgctgggttactgaaatataagggcagagtttggattggtaacaatgataatttacagcttcaactcatgtctgcactgcatgacagtcccattgggggacactctggctttctagttacttataggaaaatcaaacaactgtttgcttggccaaacatgaagaaaatggtaaaaacctttgttcaccagtgccaagtttgtctccaggccaaacctgatagagcaaagtaccctggcctccttaaacctctccctgttcctgaaggagcttggcaaactatatccttggatttcaatgaaggattgcccaggtctgagcattctgattgcatcttggttgttgtagacaaattctctaagtacagtcacttccttcccttagctcacccatttttagctctatctgttgctaagctgttcatgaaaaatatctttaagttacatggtttgcccctggttatcattttttttagagataaggtttttactagccaactttgggaacacttgtttgagggagctggcaccaagttacatttcagttctgcatatcatcctcaatccgatggtcaaaccgaaagggttaaccaatgcctggaaatatacttgcgttgttttgttcattcagttccttccaaatgggctgcatggttgcatctcgctgagtattggtataacacatcctatcactctgccattcatgctactccatttgaggtcctttatggtcatcccccaaaccattttggcattggtatttcagactgttctattcctgagatggatacatggttcaaggaaaagaagttgatgcaacaacttgtacagcaacaccttcaccgcgctcagcagcaaatgaaacactttgccgacaagaaaagaagtttcagaacttttgctattggtgattggtttcccttgcatattttggacaggcgtttggctaagaaagaggaagccacttgggaagatatggaggatctgcgttcccgttttccagctgcattggcttggggacaagccaattttcaaggggaagggcttgtcaggaagtgtgatcctgaagaagacaaggacaagagaagggagccaagtattgagaaggcaaaagaagcaggaagacaagctgaagacttggggctgtcgttcagctcgtctgaggaggcccaataccaaggtccaaggcccagactgggttgcgtgagtcacttgctcgcatgtgagctggcgtga

SEQ ID NO: 724 - DNA, 294 bp, Oryza sativa
  Clone ID: PAT_MRT4530_10065C.1
acggcacgaggggagagagagcatctaggctgggagagaaaggaagagacgagaggagagagataggccacggcttatagctcccatggcgagccagctagatgaagagcagctatggtgtgctccaagccgagggggctgtctggtgctatcgctagacaaggaggccccgcttacacagtcgaggccatccagtctgagaagccaacgtaccaggtaggtagcagcccatcaatggtgacccctacatacggcggcctaggagacgccggtgacctccagcccgctcgtcgc

SEQ ID NO: 725 - DNA, 312 bp, Oryza sativa
  Clone ID: PAT_MRT4530_100660C.1
atgcccccggccagccaccgctccttgctttttccctttttccctgtccacggccccgcattggccaccgggtggaaaacctcacttgccctcacccccacagaggacccaacgggtgagcggggtcctccactacccgaatggatagcaactgcagggcacctattgtggcagcaagaggcggcgcaccgcaacgtggtgacggttgggggcggcgacaaggtgtctacggctgaggacggtggtgatgaggcagcaccgtccaggggtggcaacgaagaggctacatcgggtagggctagcgcgctgtga

SEQ ID NO: 726 - DNA, 287 bp, Oryza sativa
  unsure (1)..(287): unsure at all n locations
  Clone ID: PAT_MRT4530_100661C.1
aaatatatataccccgaacttccatatatttcattcacatatncctcacccaacggcatataggcgtaacaaataccactcttacatcaantcanananagatcatttaaacaaaaacaaaatcatatcacctcctgtaaaatcaaaacaccatcaacaaacttggaacacacgggacaatgttttatactttattctatcacanattaacaataaaacaaagctatatattactattactgcttaatttccaccagactcctcacaacccctatgcttttatccta

SEQ ID NO: 727 - DNA, 132 bp, Oryza sativa
  unsure (1)..(132): unsure at all n locations
  Clone ID: PAT_MRT4530_100662C.1
ggcgcgctctctagcctctcccgggatggaaacgttcgcgcggtgacgagcacttttcgttttctcgaggacngcctgccgagactggggaacggggtagctgagagggggggagacatggactgggtctct

SEQ ID NO: 728 - DNA, 294 bp, Oryza sativa
  Clone ID: PAT_MRT4530_100663C.1
atggatggatgtggcggcaatgacgacgacgatgatgacaacatgctgatggatgcgacgctccgtgtcgggcttgtggcacctaggtggcgacttggatggaaacggcgctccacgtcgaactcaaggcagagagggaggggagtggaggggaagagcagtgacgacggctgcatcccttcacacagcggcgatagagcgaaggccatcgtgttcctcagtcctcccatggctagcatggctccgacccctctctttgcgacgccggtcaagctttgtgccgccgacgtatag

SEQ ID NO: 729 - DNA, 212 bp, Oryza sativa
  Clone ID: PAT_MRT4530_100664C.1
ggtccaaaaccccataagttcaccaaaggccctacagtcacattaaatgcgccctctgtaattttattcaagcggatagcttctgccaccaccgtagcaaagtctggtgaaatctcaaacggcacatttgacctggaggtgcatctggttggcgtggtggcggagttgcaatggggatcctccagagtcgacctgcaggcatgcaagcttga

SEQ ID NO: 730 - DNA, 681 bp, Oryza sativa
  Clone ID: PAT_MRT4530_100665C.1
atggaggcctcgtcgtctccttgcaagcttcttcttcttcttcttcttcacgtcgtcctgctcgcgttcgcgccgctgctccaagcacggccactcggtcatcaggtggtggtggcgccgctaatgttgccgagcgacggcggcgaggtcgtcggaggtgtcgggcggccggaggatcacatcccaccgtcaccttttgcgcctggcgggccgatcacgctcgccggcggatggctggtggggaggccggtcggccccactccgccgcctccttcgcaccccgttgtgccgactccgacgcagctcgccgccgacgatgacggcggattgctgaggaggccgggcggccccactccgccgtctccttggcaccccggtgtgccgacgcagacgcagctcgccggcggcgacgacggcggcgtcggcggattgcttgggaggccgtggcctaaggctcccccgccgcctgacccgaacacgccgccggtgcagccgctctccaactacggcgtgtcgcggtgttgcggccggccaggacccgctccgccgacgccggccggaaacccgccgggtgaaaccaacgtcgccgtcgcgctcgcgccgccgatcccctgcgccgcttttctccgggtgatccgcgacgccgtgcagtacatggtcggcggcggactcggagcctga

SEQ ID NO: 731 - DNA, 243 bp, Oryza sativa
  Clone ID: PAT_MRT4530_100666C.1
atggcgacgaggaacgggcgcgggaggcgggaggatggagaggccaacgtgtggcctccctccatcctccccgacgccgacggtgaccaggcgaagcgacgacgcaacctaagacggagcagcgcctcgcgcgtggaggttggggaagccggtggcagggacaggaggctcgggccggggtccgccgcgccgacgtcgaggcgacggtgttctcgcgttcccgtgtcctccgccgtcgcctag

SEQ ID NO: 732 - DNA, 383 bp, Oryza sativa
  unsure (1)..(383): unsure at all n locations
  Clone ID: PAT_MRT4530_100667C.1
ccacgtgttgtcttgtgtgggaaaagttgtggtgtggctgggagggttggctgttgtgaatgtagatgctcggtgaaggggtgtctgcacgctgggctgtgcccactgtgcgtgagggggtgttgcacagactgaggaaatagtgngccacatgctgtgtgatgagggttaaatcaagcataaagtgtgcatgtgctgctctggtgaggtgccactgtggtggacataagctagtgttggggtttttgttttgtgagtgttggtgaaatgcagtgtgcctggctgtgtggcacagggttttgggacgcgacctgcatgangnggtcatccaaattatttatttattggggttcatttttgtccaaaaaaaaaaaaaaaaaaaa

SEQ ID NO: 733 - DNA, 1836 bp, Oryza sativa
  Clone ID: PAT_MRT4530_100668C.1
aacacaatttttttaccacatgagacaatcttattgcaatttagacaaccaagtcaaaatcaggtacaaccccattattcattacatgatcatgcaacacttcacgaaagttgtaatcgaattgagatggcagttaagctttcgaacgctaatacaactcggaaagtattcagtgcctacctgcaggcaacactgcatgaggtggtgctacattttctccaaagcacagaagtacattttaagcagaaaacaggggcttagatgcccttctccagcattgcccggactctggtagggagaccatatagcctgatgaacccttcagcatcagcctggttgtagatctccccattctcaaatgaggagatgtcttccctgtacaggctgtatgggctcttccgggacgcgacgtttacggagcccttgtacagcttgagagtcacggagccggttgttgtcgcggtaatgttctccatgaacgcatcaatggattgtcggagcgggtcgaaccaacggccagcgtagaccagctcggcgtacttgagggcaagcatgtccttccactgcattgtctccctgtccaaagtcaaggactcgagctcacggacagcagctgccatgatggtgccaccgggggtctcgtatacaccacgggacttcatgcctacgaggcggttttccaccatatcaatgcgcccaataccatgctttccaccgatttcattgagcttggcaaggagagatgctggtgagagatcttttccattgatggaaacaggaacacctgcaataataccaatctccaaatactcaggttttgaaggtgcattttctggtgcaactgacatcatatacatatcttcctttggctcatttgctggatcttccaaaatgtcaccctcatggctaaggtgccacaaatttcgatcacggctgtatattgatttctttgtaacaggaattggcacattgtgtttctttgcatactcaatagcatcttcacgtcctgtgatatcccactccctccaaggtgccaccactttaagctcagggtttaaagcatagaatgtaagctcaaaacgaacctgatcattgccttttccagtgcatccatgagcaactgcatctgcaccaacttcctttgcaacatcaaccattgccttggcaataacaggcctagccattgaagtccccagcagatactttctttcataaactgcaccagcacgcaagcaggggtaaatgtattcactaacgaactcttctttcaagtccttcacaacaagctggcttgcaccactagcttttgccttcttctctagcccttccaattcaatgtcaccctggccaacatcagcagtgaaacagacaacttcacaaccatagttctcccggagccatggaacaataactgatgtatccaaaccaccactgtaagctagaacaactttattcagtttgccacgcagtccacctttcttttgatcactactactagctgttgcggttgaaattccaccatgctcacttgcacttggcattgcacatcttatagcttggcttttgctccccttcccgctgagctgctgaacccgaacgatggagcctgcggcactgaacaacgccccagccttctcgtggtggtggaggagacccaccccggcgggggcggtggcggcgccgcagccgagggcgtgcgccatggtcgggggcggcggcgaagggaggggcgttcggagcgggaaggcggcgagggtttaagcgcggcgaggcgagaggggaggcggcggcggcggcggcggaggaggaggttggtgggggagtatttgtggacgc

SEQ ID NO: 734 - DNA, 1554 bp, Oryza sativa
  Clone ID: PAT_MRT4530_100669C.1
atggcgtctctactcggactcctcttctcttctcttctcttctcagagcgctgcgaggcaaggaggcgagcaagaagcggcggcgaggttgccatggacgaggcggaggcggcggcggcggcggcgaagatggacgagctggcgggaggaggaggaggaggcggcggcgactggtcgtacctcgcggcggacgcgctggcggcggcgtcgttcacggcgttcccgttccaccaccaccaccaccaccaccaccgcgacgtgctctcggcgtcgaccccgtcgtcgctgctcctcaacatggacgcggccaccgccgcggccatgttcgacttccaggcggccttcccgtcgtcctccgtcccgccgccgccgcccacgacgacggcggcgctcccgccgttccacgacttcgcctcctccaacccgttcgacgacgcgccgcccccgttcctcgcgccgccggggcagaagctcgggttcctggggccccccggcggcgcgttcggcggcgggatggggtgggacgacgacgacgagatcgagcagagcgtggacgcctcgtccatgggtgtctcggcctcgctggagaatgccgcgcccgtggcggccggaggaggcggcggcggtggcggcggcggtgggaggggcaagaagaaggggatgccggccaagaacctcatggcggagcggcggcgcaggaagaagctcaacgaccgcctctacatgctgcgctccgtggtgcccaagatcagcaagatggacagagcttctatccttggtgatgcaattgagtacttgaaggagctcctgcagaggattaacgatcttcacaatgaacttgagtctgctcctagctcttcgcttactggaccatcatcggctagcttccacccatcaacacccacattgcagacgtttcctggccgcgttaaggaggaactttgcccaacctcatttccaagccctagtggtcaacaagccacggtcgaagttaggatgagggaaggtcatgcagtcaatatccacatgttctgcgcacgcaggcccggcattctgatgtccacattgagggctctcgacagccttggcctcgggatcgagcaggcggtcatcagctgtttcaatgggtttgcaatggatgttttccgcgccgagcaatgcagggatggtcctggactcgggcctgaagaaattaagaccgtgctcctgcactctgctggccttcagaacgcaatgtaatcagcaagtcagaaagcagtcaagaccaatgcactgggatttgatcagtgatcatttgcatcagatgatctggtttatcaaaaagttatagtaagtatggcatatatgctgtttatctaggagaactgatgagatgaggctcgccatctagagacatgtgtgatgatgatgatgtaactgggtttctttctttctgttgtcgtttttttttctgaatgttgtttgtgatgtaataggatctttgtccattgaaaccatgtccattatcatgatgagaatatgaacccagtgtttttgaatgaaaaaaaaaagaaa

SEQ ID NO: 735 - DNA, 328 bp, Oryza sativa
  unsure (1)..(328): unsure at all n locations
  Clone ID: PAT_MRT4530_10066C.1
ctcttctccactccacacacgcacacgcacaagccaagcagcaagcagcggcgccgatgagaggaggagtagctgggcccaccgccggcgagccgccgtgngacggaggcggaggcggaggaggtggaggagagctcagctggggacgacgaggagctggagctcnggctcagccttggctccaagaaacagcagcagcagcagcatgcgncgtgccgaatcctnacggccagggtcctgcagccggnggcggngntgtcaccgnactnctncntgtcgtngtcatnaangacggtggcggtaggcnncgnaagtaagaagagnaatn

SEQ ID NO: 736 - DNA, 582 bp, Oryza sativa
  Clone ID: PAT_MRT4530_100670C.1
atggggagcgtgaagaagaaggccacggccatggcgcagaggagcgcccaccacggcaatcgtacctcatccttgaagacggtgcagagcaccagcgcctccgccatggccaacgcggcggctggcgccggcggcgaggacgccgggagacctcaggctcaggttcaggtggcggcggtggaggtgcggtcgtacttcccgttcccgtacgccgccggcccgttccggccctccgcgggcggcggcggcggcggcgtgagcttagggactcatcaggctgatcagccgccggcgccggaggtggtggcggcgcagcagcagctgccgcacttcccgtacgcgccgcggggcggtggcagcgccagcgcgtcgttgtcggtggagtgcgcgatctgcctggagcggctccggcgcggcgagctgtgcagcgagttgccggagtgccgccacgtgttccaccgggactgcgtcgcgctgtggatcaagagcaagagcacgtgcccgctgtgcagggcgcggatctcgccgtggttctcgggatcgatcggagcgccgccgccgccgctcgctgacatggtgtag

SEQ ID NO: 737 - DNA, 528 bp, Oryza sativa
  Clone ID: PAT_MRT4530_100671C.1
tggatcccccgggctgcaggtctttgttaccttcatttgattctatcggcaggaagccggttattggactggaattttcttcacgctggtatttaatactttgttgggctaagcacgcagtactggatggcaataactacacgttttcttgttggatcattgaatggtttacttggcccaataagagcttacactactgaagtttgtcggcctgagcatcaagctattggattgtcacttgatagcacatcatgggcaatgggtcttattattggatcagttattggtggatatcttgcacagccaacggaaaaatatccaaagttatttcctggcaactcactattcggaaggtacccgtacttattaccttccttatgtatatcggtcttctgctttattatctttataagctgcatgtggctcccggagacactgcatgatctcaaagtccacaaaaaggacgatggaccaattgaatctccggttgcacattttggcaaatctgaagaacttttgagcaacata

SEQ ID NO: 738 - DNA, 367 bp, Oryza sativa
  Clone ID: PAT_MRT4530_100672C.1
ggaaccatctcagtcaaagattcaataattatttattttcagaaaaactcttgagttttaaggcaattgcatccccatctttgaacctcgagtaatctccaatttaccaagcttgggggacttaaggggcaaagcccccaacctgttaaaattttccaaacttttattggttgggaaattaagaaatattggtttaaattattccccccaacccagttttgtggagggggaagaagccctttttccacccggatggcaaccggggaagtaactaaccttcattaaaaattccacacttttttaaccctgggttgggccggccaaatcaccacaggcagaagccgtttgcagtattagtaccaccagc

SEQ ID NO: 739 - DNA, 1652 bp, Oryza sativa
  Clone ID: PAT_MRT4530_100673C.1
tcgttttactttacccgcggccggtaccgctcgtcctgggtcgcttccgtgcgccatggcgcgtgcgcgtgcgtctgccatgggcgccgctcctcctccgcacctgcgtagccatgacctcgttgtcgtcgtcgccgtcgccgcggcggcgctatgtctcgcgtgccgaggtgcgtcggcgggcggcggcggcggcgtcgacgtgctcgatcgggcgaggcggccggagttcgcggcgtggatggcgggcgtcaggtgggccatccacgagcggccagagctggcgttcgaggagatcgagaccagcaggctggtgagggcggagctcgacgccatgggcgtcgcgtacaggcacccggtcgccggcacgggcgtcgtcgcgaccgtaggcaccgggcgcccgccgttcgtcgcgctgcgcgccgacatggatgcactcccgatgcagggcaaatatagacatttgtacatcgaattactttacttaaattatgtccaaaatatggccggagaggaggtgcagtgggagcacaagagtaaggtggccatgaagatgcacgcctgcggccacgacgcacacaccaccatgctcctcggcgccgccaggatcctccaggagcgacgccatgagctgcagtttcatattgttcagtactctattttgcagctgaaagcatcagcgggtacggtggtcctcctcttccagccgggggaggaggtgggcaccggggccaggaggatggtggaagccggcgccgtggacaacgtggaggccatcttcgggttccacgtcagcgtggagctccccaccggcgtggtgggatcgcggcccggcccgctgctcgccggctgcggcttcttcgaggcggtgatcaccgggaagggcggccacgccgcacacccccacgccagcgtcgaccccatcttggccgctgcccccgtcgtcctcgccctgcagggcctcgtctcgcgggaggccgacccgctggaggcccaggtggtgacggtgacgaggttcctcgccggcgacgcgctcaacgtgatcccggagtcgatcacgatcggcggcacgttccgggtgttctcgaacgagggcttcttgcggctgaagcggcggatcgaggaggtgatcgtggcgcagtcggcggtgtaccggtgcgccgcggcggtgtacttccacgcggggggcaggccgctgctgcccccgaccatcaacagcgcggcgctgcacgcgcacttccaggccgtcgcggcggagacgctcggcgcctcggccgcggtcctcggcgcgatggagccgtgcatggggagcgaggacttcgccgtcttctccgaggccgtgccggcgtcccacttctacttcgtcggggtgcgcaacgaggcggaggggctggtgcacctcgcgcactcgccgcacttccgcgtcgacgacgccgcgctcccgtacggcgcggcgttgcacgccagcctcgccatgaggtacctggacgaacgccggcgcgagggcggctcgcaccctcacgaggaactctagtttcgtccagtcgctgcatctgccttgcatccgacttggcgacgtcgagtcgccacggcgccggcggcgtctctgttcagcccacgcgcacggcggttcgcggagctcaagatggtcg

SEQ ID NO: 740 - DNA, 333 bp, Oryza sativa
  Clone ID: PAT_MRT4530_100674C.1
aatacattccgctgtagcacttcaccttcatgtgaccccaaaaggatatcgaacttagggaacgtgtgtaatcttcataaggttaagactatacaaggacaacaactactgcgtggttctggctatagctctatgatgtatccgaatgtggaggattactaggacgggagtcatggctgtcactacatagcaaagacaagatcttgtcatacttcacacgtaacgtgtgagtccaaggccttgacggtgccttgtgacctcttctcgtgatcgtccaaacgtttcatgaggagatcctgcttggcagcaagcatctccgtctccatgacggtg

SEQ ID NO: 741 - DNA, 117 bp, Oryza sativa
  Clone ID: PAT_MRT4530_100675C.1
atggctagcggcgctgctctgtccgggatggctggcggtgacggaaagaaaggtgctcgggcggcgggcaacggcggtgggcacctgtgctcggccggctatggtcgggcggaatag

SEQ ID NO: 742 - DNA, 798 bp, Oryza sativa
  Clone ID: PAT_MRT4530_100676C.1
atgaagggtgtcacgccagacgtcgtcaggctgtggctgtttccgttttccctccttgggaaagcgaaacaatggttttatgccaaccgtgccacgatcaacacctgggacaaatgctctaaggcattcctgtcaaacttcttcccgatgggtaagaccaacacccttcgcgaaagaatttcaagcttccagcagacaagggacgagtccattcctaagggatgggaacaacttcgggaatatatggccgcatgtcctcatcatgagatggatgattggctgatcccgcagaacttttacaatggactcactcccacgtcatgcgaccatctggacgcggcgactggaggtgcctttttcccaaaaactgttcgaggagccgtcgacttgatagaaaaaatggatctcctcatgaaacgtttggacgatcacgagaagaggtcacaaggcaccgtcaaggccttggactcacacgttacgtgtgaagtctgcggcagcatgggtcattctggagcgactgcccagaaatccgtgaagaggcgatgtacatgggcaacaacaacgacggattctatccacaaggaggctaaaaccatagatgctcttagcaaaaagctagctgctaatgacaaaatcttagaaaacataaatcttaagctagatggctttgcttctgcattccaaatgacaagatcttgtctttgctatgtagtgacagccatgactcccgtcctagtaatcctccacattcggatacatcatagagctatagccagaaccacgctggcagaccagtag

SEQ ID NO: 743 - DNA, 2346 bp, Oryza sativa
  Clone ID: PAT_MRT4530_100677C.1
acacaattgtactactatcccattgtgattataatctaactagaactgtattatccgataatcattcataggaggtagcactgtaataaactagtactaaaagcagcatttacatgggacattttcaccagtaagctatcaccaattgtgcccttttgtcaactaaatggaggtcagctgtaaaaaaactttcagactcatcaacatgcagttcggccatcttttcttcttgcccccaaatgctatcttctcttctctttcaggttttttccctggcccgggatgaagttggggaaggtcaaaaatggcactggcagagcttcatgcgtcgcggttaaatgtcgacatggttcttgacttggtgcggtatattctatgaacaaaacaatctcttcctagctcttgatgactcctgtacagcttccagagtctccacaagcgctttctgcttcaccaccgttgcgtgcagcactcttttggtcctctccaggtcagcctcaatgcatttgatccgctcaaaagagttcagtagcatatgctctttctctctgggtatctctggtggcctgctggctagatggttacacaaagattcgagactgtcaagacgttgtaagcacatggtcatatcatcatcacgtatagatcgaggctctggcttttcttcagatgggacaggtacggtacaagaatggacattctcgagcctcctcactggtctggagatgaagagacggaggaaggagagtagcttgataaaggttgtgacaacaacttgaatataattttgcaaactccttcgagcaaatgcaccatccaagtgaccattgtttcctgagtcatgtgggttccgatttgtggagggttgcctgttatcaggtagctgattctgcaccattccagtagcttgcactcccttacaagattcaggagctatatctcgacgagtctggtcatcacagctatagtaagtcaaagaatctgttccccttacttcctcatggactggagtgaggtaaccatagtcaacacctttctgaaagaaagaaccaaaatcatcaacgtctgaccctgactcagcatttgatatgtcgctaatcatgccctgccacttcaaaatgaaaggatcattccatgggcctttattcgacccaagacaaccacccttgtcactgcatgagcatgacccaccgaggaagtccggtaactcactgagaaacacaactactgttaaaatgttgtagagtctggaatcaattacttcaagaagtctactctggtaattcgaaccaagaacatgaatcttggatgaagtttttgggtccagaaagcccttcacgctattccagatcaacttgaacccgctgccggcgttcacgacaaacatttgatgtaatgtctcagggtaatagtcactgtctatcttctgcattcggttgataagctccctcgcagtctttgagaaattcttaaatcccactccctgaatgtatcagcttcaaaatgaaaggatcatttccatgggcctttattatatccaagacaaacacccttccctgagcgccctctcaaactcccgaacatggtacttaatgtagcggaccaccgaagtgatctgcatgagcttgttcaggtcgacctagcagcgtctctcgttgtacactgggtggacctcacggtggccaccgcgctagccctgagggtagtagcgcagcacttcatccagttcatgaaaatcaaaatcctgaaggattgtgtcagctccgaactcttccctccatttcagcatgtctgcccacatctgcactgcgctgtcgatatcaaacttcctggccttcaagaacctcagcatcatgtggtagtcgtcatgcttgtcggggaggaggccgtgggcggcgaggcggtcgtggaaggcggcgacagcgcgctcctcctcggcgtcgcggacgtcctcgatggagatggccggcgggaagcggcagtcgacgcgccgccggccgcgcttcttgatcgcgtggatggccttccggcgaaggttggacccgatcctccgccgccgccgctcgtcctccgagttgccgtcgcacagcgatatctcgatgtcctccgcatggatcactgacatcttcaccaccaagttcttggatagctcagagctcgcgtaccaaatgtccaatcttggaatcacctatttatgtgcaagcatcaagatttcctggagacaggagcagaggcgagattggagctttctttcccttcctctgcctctgccactgcctctctctctctctatctctctctctctctctctctctctcctttcttctcccccaacactaagctgcc

SEQ ID NO: 744 - DNA, 743 bp, Oryza sativa
  unsure (1)..(743): unsure at all n locations
  Clone ID: PAT_MRT4530_100678C.1
cgctctcaactctctctctcccccgaaattccgaatccgatcgagacgaatcgagagagagagaggcgccgcggatccgggtgaatgcttcagtgattaatctggccggcacaagatgtcattgcacattgggcggctcagttcacatgtgcgtcaaagatatcttgaacatcttttccagaggtttggaaattgcacagtgaggctgaaagatggatatggatttgcggtctttgattctaatgatgatgcagctcgagccatgcgggcactgcaggggaaatttgtttgtggggagcgcattactgttaattggtcaaaacagcagcccagattttctaaggatttcagaagttcaagaaacattgagtcatctcaccagagggcacccagagtcagagatggtaatattaggttcagggattctttagctcagaagaatcaccctgcaagtcatgatcagggtcacagtcctgatgttgcaccagaacagaaatcatctgatggtgcattggaaaagaaatctgatgaaaagaaatctgagggtgatgttggaggatttgaaaggatgtgaggggaactggttggtcaangatccagtggagatgaagaggatggaaagatgtttacaagtgatgccaatgtaattgaacatgatagatggggaggaaactggaaaagggaatcctggtagagatgatgaaggatttttgaccgttatgaaccttatcatggctatgcca

SEQ ID NO: 745 - DNA, 528 bp, Oryza sativa
  Clone ID: PAT_MRT4530_100679C.1
gcacgagggttgaattccgcgctgatttccgagttcgtgggaatcgtttgtgcgcggagggggtaggtgggcgaggtcttggggggtgatttttgcggagaaattctgctgttgttggatgcaaggaggggccatgtcggcggcggcgacggcgacggcgagcgaggcggcggcgtacggcggcgtgggcatgagcaagagcggggccctggggcctcagccgccgcacggcgccgccgccgcggtgcgcctcgcctacacccacgacggcatcgcggtgtacaagcacacgccgccgccgccggtgtaccagacgccggccgccgtcgccgccccgtcgccgcccgtccgcggcaatggcggtgcgcccgcgtccgccgagcagcacaagcgcaagcgcggccgaccgcgcaagtacgccgtcacggacgtgccgctcgccgtcgtgccaccctcgccgccaaaggctgcggccgccgccggcgccggcgccgaccagtctccggcgacgcccacgctgccgccggg

SEQ ID NO: 746 - DNA, 2265 bp, Oryza sativa
  Clone ID: PAT_MRT4530_10067C.1
atggcgcatgcacagctgcttgtgtttctgataccaatggccctcttcctgaagttggcaatgccggtggacggtgccatggcgatgccgggctgcccggacaagtgcggcaatgtggctatcccctacccttttggcattggagaaaactgctctgcgaccaacctaaacagctacttcaacctcatgtgcaatgacacctttcatccaccaaggccacaaatccgggaaccggaagcacacatcgaggtcaccggcatctcactggagcgaggcgagatgcgtgtgctcagccctgtcaaccacatctgcttcacgtcgaacaccacatccaccaagtccagtggtgtcgggtatgacctgagcagaactcccttcctcccatcgccgtcgcgcaaccgcttcacggtcatcggttgcaacaccctggggctcatcactggctacaggggtgcctcgggacaatacgtgactgggtgctactcctactgtgagggtatcaacagcacctctgatggggcaccgtgtgccgggatggggtgctgtgaggcttccatacctgccaacctcactgccttcgccgtgacatttgatctgaaccacagcaaggtgtggaccttcaacccttgcttctactctgtcgtcgccgaggtcgggtggtacaatttcaagaagcaggatcttgttggtcacctcggattcatcaaggaaagagcccagaatggtgttcctattgtcgctgactgggccattaggaatggctcatgcccaaagaagggggaaaaagaacctagcagctatgcctgcgttagtgcaaacagctattgcacggccgtgataaatagtccagggtatttgtgcaactgctcacaaggatatgggggaaatccttatctttcagatggctgccaagacatagatgagtgtgagatgcgtaagctggaccccaagtatgaagaattatatccatgcagaaaaggggtctgtcagaacacaccaggaagctacatatgcaaatgcaagaaaggaaaaaagtctgatggtacaggttatggatgccaacctgcggattctccagactatagaatggttgtaggtttaagtgtttctgccattgtggtaaccgctatggcatgcatgttgattatgcaattacaaaggagaaggcacaagaaagagaaaattgaatatttcaaacaaaatggaggactcaggttgtatgatgagatgatatcaaggcaggttgacacaatccgtatacttacagaaagagagataaagagagccactgaaaactacaacgaagatcgagttcttggatctggtggccatggaatggtctacagaggaactctggatgacaacaaagaggttgccataaagaagtccagagtaatcaatgatgattgcagggaagaatttgtcaacgagataataattttgtctcaaatcaatcacaggaacattgtgaggttactaggctgttgcttggatgtggatgtcccgatgttggtgtatgagtttgcgcacaatgggaccttatctgagttccttcatggtactgaccacagatcaccaatccccttggatctacgcctgaagattgccactcaagcagcagaagctttagcttacttacattcatcaacatctcgcacaatcctgcacggggatgtaaaatcagccaatatcctgatggacgatcagtacaatgcaaaggttgcagactttggagcttcaaccctcaagtccatggatgaaagcgagttcatcttgttcgtccaagggacgatgggctaccttgaccccgagagctttaccagccatcagctgaccgagaggagcgatgtctacagcttcggtgtggttcttctggagctcttgacaagaaagaaagccttatacaccaatgatttcaacaagaatgaatctctgtcgtacagatttctgtcgatgtttcggcagaacaaacaccaagccatgctagaccctgaaattgtggatggctccaatgtggtggcgatcgagaagcttaccaaagtcgttgtgcaatgcatgagcccgagaggagatgaccggccaacgatgaaggaagtcgcagagagactacagatgctgaggaagctccagatgcaggcaacctgtgatggcgaaaacgatcgtgatgtccatgacaattttggaggatcgccgtcagtgatccttcattttgatgagatgacagatagcagcatagaaacgtctaaccttattctgagcgaatga

SEQ ID NO: 747 - DNA, 422 bp, Oryza sativa
  Clone ID: PAT_MRT4530_100680C.1
atggctcttagaaaacaccaaccttctggtaatgcggcctccattagtatggtgcccctggattttccaagtcaggaacttgagaaggttaattctgtcaatccagtggtagcaacagatgttccacctgaggctgatgttgatgttgatatgagggaagtttactttctcatcatgcattttttatcacatggtccatttaagcggactgttggagaactctgcaatgagctccttgaacatcagctgctacctagaagatatcatgcttggtattcacgaggtggttttcatagcggtgaagaaaatgatgatggcatatcactccctttgggatacctaaagttagttgagagatacccccacattggtaaagaccacttggtaaagcttgagtattctatagtgtcacctaaatagct

SEQ ID NO: 748 - DNA, 134 bp, Oryza sativa
  Clone ID: PAT_MRT4530_100681C.1
actctagaagaccaacccacctgcctctaccgctccgaaaaggcaaagccagccacgcaatatttttttccctaaggactccataggggacagcgcccccatgaaaagccaatcggagcgacacaggcatcgcc

SEQ ID NO: 749 - DNA, 354 bp, Oryza sativa
  Clone ID: PAT_MRT4530_100682C.1
atgctccgctccgtgtggcgggctcgcccgtcgccgctggcgctctgctccgccgccactgctctgctcgccgaggccaccctctctctcgcaatggcggcagcatcatcaatgtcatggcttcctattcgactatgcgccaaccgccacagtgcctgcctctacttccatgcccaccgctgtggcgccatctgctcccggctcgccattgccacgtcaccccttctccagtttcgccgcgccaccgcaccgcccgtcgccgcccgctctttcccacctcaccccaccaaccctatgaggagaataatgagaaagatagagaggaggaagggagagaagaggggaaatagatga

SEQ ID NO: 750 - DNA, 495 bp, Oryza sativa
  Clone ID: PAT_MRT4530_100683C.1
tatgaatcagaggtgccattactggtatatgagttcatatctaatggaacattatacgaccttctccataccgatgctagtgctaaatgcttgttgtcatgggatgatcgtattaggattgctgtagaagctgcaggggcacttgcatatctacactcagctgctgcaataccaattttccatagagatgtgaagtcttccaacatactcttagataacagcttcactacaaaggtttctgattttggtgcttcaagatctgtttcacttgatgagacacatgtggtgactatagtccaaggcacatttggttatctagatccagactactaccatactgggcagttaactgaaaagagtgatgtatacagttttggagtgatacttgtggaacttttgacaaggaaaaaaccaatttttatcaatgatgtaggtacaaaacaaagcttgtctcactattttgtcgaaggacttcaagagggatctctcactgaa

SEQ ID NO: 751 - DNA, 1144 bp, Oryza sativa
  Clone ID: PAT_MRT4530_100684C.1
atgcacctccccgctgtgggcatgtcacaccccaccgagggtgagcttgtcttccactacctctatcgtcgtgccgttaacatgccgctgccctctgaattcatttgtgatgtcaacgttcttcctcataacccatgggacatcgtcccaggctcagaaaagccagtctactacaaccagggaggtggcagcgactgcatgctggtgggaatgaggcgcaccctaacattttactttgggaattcacggaccgcagagcgcacaaaatggggtatgcaagaatttcgccttgctggcaatggtctttcgccttaccctgcgatgaagcatgccaccggggatggctcaaaaccaccctgcaactgtgccgaaacaaccatcgccaagagaaatgatggtctctctgcagttcttcgtaatgtgctcgccgtcaccccccttgtggaaaccgttgtcgaacctgatggatcatggctgatctgccgcatctacaggacaaggcagcgtgcattgcctgttatcactcctcctgccatagaaaatgcaagggaaatcattatccctcctgccaatggcaatgcaagggaggctcaagtccgctttattgacttcctgcagcagggatcgcacattgagtcatcctccccctgtagttgtatagttggcccctctttggcagagggaagtgatgaatctgctggtagtgttgaccaaaaggattgagcgcaatggagggagcaactaatcgataaaagcatgtcaactagtaaggaataaaaattgtgagtgaggtgacctagtgcaagtatgacctgcaagttatataagtactgttggagactgtgttctgtttaagttggggaactgtatgttctgtttaagttggattgtaagctttgttcaatagtttcaaggaattaaagcgtgtttgggttctaggaggaaaacaaatggtcattccagatgaagaagtctgagtaagcaacttttctaaaaaccgtttggtctgtccttcttcaatatattgtgttctgtattatctcatgcctttgtgtgagactactagctatctattaatatctatatgctttatcttccaccgtatatatagcttcttcagtattcctgtcaaaaaaaaaaaaaa

SEQ ID NO: 752 - DNA, 510 bp, Oryza sativa
  Clone ID: PAT_MRT4530_100685C.1
atggaggctggagcagcagcactgcagcggagcaacaccattgtaccgttcctcatcgaggtcgtcctcaagggaacatattggacagatcaatggtcgctgctgctatttatggaagatggcgttgatatgtattgcgggctcctttctgggttcttcctgcaccgtgaaaagaggcggtggcggcggccgcgggcgaggcggaggcggcggcggcggccgcgtcgagggctggtgggggagagcatagcgctgcgggtgcgctcctacggctgcatccgagtgttcctcgccctgtccctgctgctgctcgctgtcgagtttgccgcctacctccaggggtggcacctcgaggaggtggcgttgctcctcgccgtcgacggcctcttcgccgcctcctatgtcgggtggatgcgcctccgcctcaactacctcgcgccgccgctgcagttcctcactaacgcatgcgtctttctcttcatggtccagagcatcgaccatgaagggtag

SEQ ID NO: 753 - DNA, 444 bp, Oryza sativa
  Clone ID: PAT_MRT4530_100686C.1
atgggcggcgctgaaggcctcgctgcgggagacggcggtggcggcgaccaaagtggcagctgggacgacggggcggatggaggaagaggtgatgacaaggacaagttcactgcggcggaggtggagatggactcgtcgtccccgccattgcccggccgctgctactcgctgcctagtcctcctttcccgtgtcgcctcctcttcctcccctcccccgccgctgccgcctccgtacgagcgcgcgggcaagcgcactcgtcgctcgccaccccgtcctcctcccgcatcgtcgcctcttcctccgccccgtcgtcctggccgccgctcgctaacccgttcaacaccttgtcctccttcccccgctgccgccgcctcctcccggagaggtcttcggcgccacccgcccggtcctcccccggcattcccagagcaaccacgatttag

SEQ ID NO: 754 - DNA, 723 bp, Oryza sativa
  Clone ID: PAT_MRT4530_100687C.1
gttcgcgctgtttcggtgtcctgaccactgactggatgtcgagccgcgttagccgtccgccccgctactgcgcgcgcgtcgaacttctcccgcccgatcctcaccacccatgcacacgttggtcgaggtctggtcggagtacagacgtacggagcgcaaccacgccggcactatcggttacgtaatgccgacatctacggatgccgagcccggatgacagagcgatcgtaggaacgcgcgtatggtgcagctctatgctcgagagaccaccgggcgtaccagataggatggaccgggatgtcggaggagatgacggtgcctatgtgggactgatgctggactaattgcgacgaccgctctgacttcttggacgccctgatccccttaacctcgtcgcttccattccgtggtggacacagccgccacacgacggcggcgagcggagcgagcacgatgaggacgacgcaggagaggctgatccggcgcatcgtcatagacatggatgtggaggaagcgcacgtgggcggaggtgtaaatgaattgggttcacctcctcatcttccagcaagctagctcagtcagaagtgacttcgatgtcataatatgaggtccgtcgcccacctagctcgtgtttgtaatagcccctaagcaaagtcttgagatcgcgtggatagaaaataaccacattgaactccagtaagcattagatgatctgatcccaac

SEQ ID NO: 755 - DNA, 1362 bp, Oryza sativa
  unsure (1)..(1362): unsure at all n locations
  Clone ID: PAT_MRT4530_100688C.1
atggagccggggccttcgtcgccgtcgccgtcgtccgcgtgcgcggatcaccccacgccggcgccggaggaggacgaggagggggggagggggtgggtggtcgtgccggcgagcgaggtcccgggagccgacgcgcccaaggtcatcgactgggaggacctgcagcaggagctcgcacgcgtctggagcctctccgccgcgctcgccaccgccagggaacgcaaggcgctgctcgccgcgcgcctccagtccgcgctcgaggcaaggaaggcttccgttcagcaggataatgagttggcggaaatcagggaaagagtgcaagcacgtgctgatttcatgtgggatttgaaaatgcacactaagaaaatgaccgaggatgtggatgatcgaagagaggaactccgcatcaagatccgaaccttgtcaacaacaagcaatactcttagcacagcgcgaaataaacttaaggaagctgataaattgctgtcaggggaaaatggtctccatgtccgtcttaaaactgtggaaaggatgttgcgcacaagacagcaatatatgacagcacaagtagcacatttatatcctaattttgcaggagatgcggaatcaatggctccgaatggttctcaaaatggacaggcacctttggcaattttgggtctccaactatcgaagcttacgatgaaaaagactggctactttagtgacaagactgagattcagaattctgccaccgcattgggttatgttgcacatgcagtgtcccttattgcatcatatcttgatgttcctcttcgatatccgctgcggttgggaggttcacggtcatatgttcttgatcgcgcgccttcagttgagtcatcgtccttagcttctgctataagttctgctcctctgagtacaaccatgcgaacaatggaattccctctgttttttgaaagccaggagacaacaagatcagcatatgcaatatttttgctaaacaaggatattgaacaacttctgaatcacattggtgctgaaagtcttggcccgaggcatgtattagctaacctcaagcagctgactactattgtccagtcacagcagtacatttctaattaatttagtcccagaaacatatttgaagttctgtgagagttttgcttacggctaaatccagaagcggttggtgctatttttagcaagcncctttgttttccagaacncagatgagttaaggtttttctttgctgatatgttcactgtaaaatggataaatggatttgtcnctgtaaaatgtgctcacttggtgtacaggaaatagatgagtaataaatgagaaatagtttgcatgttcaaaaaaaaaaaaaaaaaaaaaaa

SEQ ID NO: 756 - DNA, 238 bp, Oryza sativa
  Clone ID: PAT_MRT4530_100689C.1
cccacgcgtccgcctaggtacccagagacgaggaagggcgtagcaagcgacgaaatgcttcggggagttgatttggcagtggaggaagagggctcgtgcatggtgatttgtgtggtttgggtgtagaagctgataggatcatggaggaatggaagatctgttgtacttaagaaaaactaagtcttgtataccgtacctctctcttgtgtgtatttaccatcttaagattcttgagaac

SEQ ID NO: 757 - DNA, 126 bp, Oryza sativa
  Clone ID: PAT_MRT4530_10068C.1
gcacgagggtggaagatcacggatcagcccctaaggcggaggaaccgcttcctcctacgacaggtgtgatggctcgcgtcagccttcttcggaagcaacacctggagtagttgctggcatctcagc

SEQ ID NO: 758 - DNA, 1872 bp, Oryza sativa
  Clone ID: PAT_MRT4530_100690C.1
atgctcccccgcctccgcgtcctcctccccggaacccgcgggctcagcaccgcgtcccccgccgaggcggcgcctgcgccgctctccgccgcggagctcgagctcctcctccgccgcgaccactactccgcctccacccgcagggccatctccggtaaggttgatgatccaggcttcgtggaattcctgcgcgagctgttcgcttccgatgccgtagcgttcgagctcggcggctgcgagcttggccgcgggctcccacaggagtcggagctcaccgccacgctgctgaacatattcttcgatcctgtcgatagagaggtgatcgccatccgtgaggaggtgcacaagaagaatcctagagttaaggatgacagtgttcttcacacgcctgtgagagtgtacgcggtgcggtatctcgatgagatgctggttgtgacatctggttcgaagatgctcacgattgaggtgagggatagaatccttgcagtcctagagagggatttggaggtgaaggtggacaaattggggagttcagttcatagtgcggagtcggagaagatggagttccttggtatggaattccaagcggtaccaccatcagtcttacacccacccatgtcagagaaggcaaagagggcaaggaagatgtatttgaagcgcaaggcggcaaaggcacaggagctgaagaatgctcgggaaacacggaggaagaagcttggactgaagatattgagccatttgttcaagaaggtgaggcggggacatgaattcgagtttgatttccagattgagagtgaagtgcagcagctgttcaaggagtgggcagaggaggttgtcactgaatacttcaaatcaccagagcattgcagatattggcatcgattgctcacttcaggtgattttttgtcattggctagggtgagagaccagttgccaccagaattggtggattcctacgacaagtttcaaaagacacttgacaggttcttgatgcccatgagagaccgtggtacatctgatgaagaggagaggctagcagaggaggaagagagacagtatgagaagaggactgttcaggacttgacagaattgaagatgagggtcaatgcgccaatagagctgatggtcaaaactgttgttagttaccacttgaggttctcctgcttcttgacattggctgagaagcatgaatgcaccaagaggcaagcaattagccattactcaaaggatttgaaggtgacaaatgacgatggagtggctgaagtgcacttcccaacagagcgcgagatcaggatgatgggtgataagaatctatctgatccaaagcctgtggatggagccttgacaatgatctttgtcagattagctgttgatgacaccacctatccatgtgtggcacatttttgtgctgaaacagacactgtgatttatcgaatacgtttactccagaatcgtctaaatgtagatcctctgaatgagaagaagtggttggttgattctgttattgatttggcaagaaatctcgtgataccaaccgaactgattgttatggtcaggatgtatcatcatgatgaggtgctgtcatccatggtcaaagtggtttcctgcttctatctcacatggccatgtagggatatcagcatgctaaacaggaagctgttcatgattgttgtcatggctggcattggcttccatgaaatggacgacaaggcaacaggtccatgccgacggtggaacatatttggtggtgtccggagcacagcggccgtcgacacctcgtatgcacaggacctcgatcaaagcctcaaaggcaggcagattgcgactgcacggtcaggattacattatgcaatagtatatcacagtgagtag

SEQ ID NO: 759 - DNA, 561 bp, Oryza sativa
  Clone ID: PAT_MRT4530_100691C.1
acccctcactattgtttaaggtgggcccccggtggggccccgccccgaattccggggggccccccacgcgcttttctagatcgggaccggccgcccttctctcgccgtttttttttaagaaagagtcgcctcaagaagatcagcctatcagacagatcaagtagggggagacatcacagcacgctgacgcgagagcacagcagcagcaatgccaatcagtaaacacttgtagtttggaatctatggagtgctaaaagaccacgaccacaacaactcaacataatttacagcaggatgacaccaaaaggccaaggcagtgatggcagctacggcactcattctgtaacccccctagcttcaccatggatctccaatctcgttgttattcccgcgttgctgcacaagaataaaaacgacagggtaaacaagaataggtgccacatacgtcaggataacctgcattgccctttaacaatcatgagtagatgagaacataatctgggttgcggaataggaaaatataacatggatgctgagatcaaggctgtcgcctttggagct

SEQ ID NO: 760 - DNA, 1183 bp, Oryza sativa
  Clone ID: PAT_MRT4530_100692C.1
ctaccgaaatgggcccagagacaggatgacgagactgactgtgggccgtgtcggcgtgggctgcttgtcacagcccaaagtaaagcaaatccgccaacttccagaacgaagcagcggaaacgcgttccccttcgcttcctcccgcccgcccgcccgcccgccgccgcctccgcgcgccgccgccgcggccacatgctcccccgcctccgcgtcctcctccccggaacccgcgggctcagcaccgcgtcccccgccgaggcggcgcctgcgccgctctccgccgcggagctcgagctcctcctccgccgcgaccactactccgcctccacccgcaggttccactccttcctcccgctcctctcccacccttccctcctcctctcctccgcgctcctcctccgccgccgcgcccacccctcgctccactccccaccacccgagccccctcctctcgctcccgccgccgccgccgccgccgaagcgatctcctccccatcctcccacctccgcctcctcctcccctcccgcgtcaagggccgcccgctccccgtccccaccctcccgctccgcctcgctacgctctccgccgcatccgccctcgacgccgtcttcgccccgcgcgccgccaccttcgcctaccgcgcccgccacgccgccgtccgctacctccgctccatccccaacgcgtcctggttcttccgcgtcgcgatcccgcgacagcccttcggccctcgtcacgtccgccgcctcctcagcgccatctccggtaaggttgatgatccaggcttcgtggaattcctgcgcgagctgttcgcttccgatgccgtagcgttcgagctcggcggctgcgagcttggccgcgggctcccacaggagtcggagctcaccgccacgctgctgaacatattcttcgatcctgtcgatagagaggtgatcgccatccgtgaggaggtgcacaagaagaatcctagagttaaggatgacagtgttcttcacacgcctgtgagagtgtacgcggtgcggtatctcgatgagatgctggttgtgacatctggttcgaagatgctcacgattgaggtgagggatagaatccttgcagtcctagagagggatttggaggtgaaggtggacaaattggggagttcagttcatagtgcggagtcggagaagatggagttccttg

SEQ ID NO: 761 - DNA, 901 bp, Oryza sativa
  Clone ID: PAT_MRT4530_100693C.1
cgacgccggccggtgcgagcctggggggtgtgttgcttgcctggcggacagccgtttggtctgtctcagatgtacacctcgcggatttctttcttaccgcgctggtttggcatctctcgggtgatgccccctagtggctctctgtcgtctacgggccgcagaaagagtcggagaagcttcagttccaagatgagctccagatgttacggtcctctcgctcgggtccgtgggcagttgcaggtgacttcaacctcatcctcgatgcccaagacaagaagaacctaaatctcaatcgccgtatgatgggccgctttcgtcgattgattgatgagttggacctccgggaattgtcgcttcacggccgtcgcttcacttggagcaacgagctgcaggagacttggtgacctcctgccaacctccctcctcttcccacgcttgcctggtgtttcgctaacacggttaagcggttccagagctggagtgaccgtcatgttggcagcatccgcctccagctgcggatggcgaaggagctcgtcttccagcttgatgttgcgcaagagaactggtctctctcccccttggagacctggttgcggcgggatttgaagctgaagtgccttgggcttgcctcacttgagcgcactatcgctcgctagcgttcacgtctgatctggctcaaggggggtgatgctaacaccaagcttttccacctacacactagagcccggaggcggaagaacttcatcacgcgtctccgaaaaggggaccaacttgccgtctcccatgatgagcttcaagaactcgcctcttctcactttggcgctatcatggggacgtgcgaagcttggggggttggatctactacctaggcctcggccctgcgaagcttggggggttggat

SEQ ID NO: 762 - DNA, 222 bp, Oryza sativa
  Clone ID: PAT_MRT4530_100694C.1
atggtcagagagatcggaaatgaaagaaacaacgagcatttttcgtcagaaagcttgtcagatttaatgctggctctaatacagcagagggaaaagaaagatcgaacagacgatctgaatgttcaggtccaagatgagattgggatggttcgagaagacagtaaagtccgtattcttgccgtggaaatgattctgtggcataaacggtggcacatggtgtga

SEQ ID NO: 763 - DNA, 467 bp, Oryza sativa
  Clone ID: PAT_MRT4530_100695C.1
atgagcgttatctggccggaggagggaggggggaggccggcggcagcggcgacggcgggccgttgccccaactgcgaaaatcgttgtggtgcaggtggacctatctcccgcttgggaaaattagttttagccgcctgcaaaaatgctttttctagtagtgttggcgctctcggacacggacaggcgtcgaacgtggcgtatctgatcggcgtggacgcgctctcgctgtttctgtgtggtggtgctggtggcatagtctgcatgcgctccgaggcggcgcctatcgtgagggctggagctcaccgcgccgcctctcctcctcgccgcttccgccccccgccgccaccgcccgccactgccgccggggagagtagaggtgaggggaggggagaggagaggggaggggagaggccggtgaggagaggtgaggggaggggaaaggaggagaggtgtggaggggaggagag

SEQ ID NO: 764 - DNA, 1206 bp, Oryza sativa
  Clone ID: PAT_MRT4530_100696C.1
atggctctctcctccggccgccaccttctctccgattgcacttgcacccatgagagttggagaagaccaacctcctccttcctgggaccttgtaccctctccttcctgggaccttgtaccctctccaagagtactactatggatatgagagcaagagaccacgctagaaagaggagggaagaggaggacgatgatatgatgttgtttattttccctgcactacatttgttgagttctagtggagcaagggaaaagaagcgacgccatacatcaaagataacaggcgaggagcgtgttcgggagttgcttgaagggcatgtaaaaaattgccgggtagcattcaggatggagccggaaatatttatatctttggccaattaccttagaactgaaaagttggtcgatgatactaggattaaagttaaagagaagttggcgttcttcttatacatgcttagtcacaatgcttcatttgaggatttgcaagagaaatttgggcacagtggggatagctttcatcatcacaattgccttggtgcaattgacggcacccatatacccatatctatatcatctgacaaagcagctccatttagaaataggaaaaatactcttagccaaaatgtgatgatagcttgtgattttgatctgaagatcactttcatgtctactgggtgggaggggtcggctacagtaccccctggaaagttctatttggttgatggtggatatgccaacaccaattctttccttgcaccatatcgtaaagtcaggtatcatctaaaggagtatggggcagttaatatgcttctaagaggttctccaaggttgaccatgcttttagcgaaagctgcacaaaagaagaactctccgaaaggtcatcctacaaaaaagcatggaggttctccgatagaaaaaagaagagcctcttggaacacagccctagagaagattcttgttgagttattgcatgagcacaacactcctgagtataggggtcagaatggatggacttcagaagcttggaacaaaatcgtgaaggaattccatgagaaggacagatatgtctgcttaacaaagtcccaaatccaagaaaaggagaaagagctaaaaagagaatataggatgctgaaagaggctagaaaacaaagtggagcttcatggaataaccagagatgcatcattgaggctgagcctgctatatag

SEQ ID NO: 765 - DNA, 131 bp, Oryza sativa
  Clone ID: PAT_MRT4530_100697C.1
gggggggaattacgatgtttttacataactagatttgtctgaatgtgaaagagtcaaggaataggtgaaaaacaaaaacttatattagagaacaagatagataagccagaacttggttgagtagtagaagg

SEQ ID NO: 766 - DNA, 998 bp, Oryza sativa
  Clone ID: PAT_MRT4530_100698C.1
cgcctccgcgaggctctccggcgacgcaacgaagacacggacgcgacgggggcggcggcggcggcgcgcggcgcgtggcgcgacccggaggcgacggcgacggcgacggcacggctcactcctccggccgccaccttctctccgattgcacacgcacccattagacttggagaagaccaacctcctccttcctgggaccttgtaccctctccttcctgggaccttgtaccctctccaagagttaatatgcttggaagaggttctccaaggttgaccatgcttttagcgaaagctgcacaaaagaagaactctctgaaaggtcgtcctacaaaaaagcatggaggttctccaatagaaaaaacaagagcctcttggaacccagccctagagaagattcttgttgagttattgcatgagcacaacactcctgagtataggggtcagaatggatggacttcagaagcttggaacaaaatcgtgaaggaattccatgagaaggacatatatgtctgcttaacaaagtcccaaatctaagaaaaggagaaagagctaaaaagagaatataggatgctgaaagaggctagaaaacaaagtggagcttcatggaataaccagagatgcatcattgaggctgagcctgctatatggaacaatataatcatctcatttcctaaagccaagaagtttcgcaccaaatctttccctctatttgaggccttggagaactttacgatggacatactgcagaaagaacctacaatttcacctcaactgagccattgcaacatccaatcattactcaaattgagagtgatcaagatgatcttcggaacactgagattatcttttcagattatgaggacacttttgcttatcaagtacaggatgatgcagatgcaactgaagatgattatgcaaatgcttgaagggcttaaagagatgccgcaaaagaagggtttgttggctgtcccaaggaaccaaagaaagaaaaaggaacc

SEQ ID NO: 767 - DNA, 2343 bp, Oryza sativa
  Clone ID: PAT_MRT4530_100699C.1
atgccactgctgtcacattttccatcatcctctttctttccgtcttcttccttccttctccagcccgtccgccgccgcccacgcctccgcgaggctctccggcgacgcaacgaagacacggacgcgacgggggcggcggcggcggcgcgcggcgcgtggcgcgacccggaggcgacggcgacggcgacggcacggctcactcctccggccgccaccttctctccggggccggccgtctggtcgtgctccggcgccgacgccgacgccgaccgcatgttcagctctggatccggcggcggcatggccgggacacgggagggttcttggacgccggagaggagaggagaggagaggaggaggaggagagaagagggttcttggttcttggcccgtagccttcaaagtgtcggcaccctccatgtcggcttcagcagccggtgcagcccctccacgtcgctgatcttgttctccgccagattgcacacgcacccattagacttggagaagaccaacctcctccttcctgggaccttgtaccctctccttcctgggaccttgtaccctctccaagagtgcaaaattgtaaataatttgtgtgctatctatagtactactatggatatgagagcaagatacctcgctagaaagaggagggaagaggaggacgatgatatgatgttgtttattttccctgcactacatttgttgagttctagtggagcaagggaaaagaagcgacaccatacatcaaagctaacaggtgatgagcgtgttcgggagttgcttgaagggcatgtaaaaaattgccgggtagcattcaggatggagccggaaatatttatatctttggccaattaccttagaactgaaaagttggtcgatgatactaggattaaagttgaagagaagctggcattcttcttatacatgcttagtcacaatgcttcatttgaggatttgcaagagaaatttgggcacagtggggatagcttttatcgtcacgtaaagcatttcttcaactcagttgtccctacgctcttgaagcggtttttgaagcctccaaatcctaatgaagttcattggaaaatagaaaaagatcctagattttatccctatttcaagatcactttcatgtctaatgggtgggaggggtcggctacagatgccagggttcttacctctgcagtaaacaaaggcttccaagtaccccctggaaagttctatttggttgatggtggatatgccaacacctattctttccttgcaccatatcgtagagtcaggtatcatctaaaggagtatggggcaggtcggcgtagacctcaaaactacaaagagttatttaaccatcgccatgcggtattgaggaatcatgttgaaaggactttgggggttgtaaagaagcgcttccctatcctcaaagttgcaactttccacaaaatcgagaaccaagtgaagataccagtggctgctgcagtgttccataatattattcgatcactgaatggggatgagcaatggttaaataaccaaccacataatatccatccaagcaattatgttgacctgccagatgttaatatgcttggaagaggttctccaaggttgaccatgcttttagcgaaagctgcacaaaagaagaactctctgaaaggtcgtcctacaaaaaagcatggaggttctccaatagaaaaaacaagagcctcttggaacccagccctagagaagattcttgttgagttattgcatgagcacaacactcctgagtataggggacatactgcagaaggaacctacaatttcacctcaactgagccattgcaacatccaatcattactcaaattgagagtgatcaagatgatctcggtaacactgagattatctttccagattatgaggacactttggcttatcaagtacaagatgatgcagatgcaactgaagatgataatgcaaatgctgaaaggcttaaagagatgccgcaaagaagggttgttgctgtaccaagaaacaaagaagaaaaagaacccaagaggcaaaaaaagagtgttggcgtagaaggacttatggaaaggtaccttgatatgaggaccaaacaaactgaagatgaggctgtacaattagcaagagaaaaggaggctcatttagcaagagaaaaggaaattaatgatttttcaatcaagaggtgcatatctgttctgaattcgatggatgtgacaaaggcaaaaaaggtcaaagcatataccgtcttcaagaatgcagagaacagagagatttttgtgagtgcttgtgatgaggatccagaatctgccttgagttggttaagaagtgagatggcttga

SEQ ID NO: 768 - DNA, 1684 bp, Oryza sativa
  Clone ID: PAT_MRT4530_10069C.1
cattgttcttttgttcccctttcgtgattgcccggtcgcggcctcgccgctaaccctaaccgatcgaattcctccgaaaaaatccagccatggcgccggcggcgcaggagccttgggccattctggccgcaatccctaacgtggtggggtacaaggaggcgaagcgcatcttcccgccgggcaccgacatctccgtcgcccgcaaggaggtcccgcgagcctccgtcctgaccgtgccgcgccacatctccctcccggcctgcctcggactctacccctatgtcgtcgccgccgaccgctctggccttctcctcctcggcacgcatcctgtcacctccgcctccgccatggtctcctaccacatctgtgatgcgcacaccggtgaggtagtctccctccgcgactgcaaaccaatgcgccccatgaccttctacggcgccgccaacgtcggtctcatcatcaaggacgacggctgtatggtcgctgagctccagccgggatgcaagggcacaagcaccggtggtgccactctgctcagctacaaggtgggggagtgctgcaagtggcgcgagagggagcttacctgctcgcccccactcccgctggactggtacccggagggcgtcgtctcccacggcgggatgctctggtgggtggacctctcctacggcctcctcgcgtgcgatcccttcgccgaggagccgaacctgatccacgtcccgctcccacaagttcccgacgagcttcctgttgatgaccaggttaaccgcggtgcccaccgctgcgtgaaggtgagcggaggaaggctgatgtacgtgcagatacacggcaatcctgttgtgccggtggtcagcacatggttgctcgacgaatcgacctgctcgcccggggagtgggagtggaacccccagctcagcgcgcccttggccgagctctggattgaccagagctatgtggacaccatgctgccgttgaccattcctgcccttgcgctcccccaccccacagatcctaacagggtatatttcttcctcaaatcttgcatcttcgcagccgacctacggttgaggaagctggtgtcattcaatagttttgagatgctcgacccaccgtgtgaactttggatgaagcgctcctcccacttggtccacgcatggcagtatgatccttcaagcagtcgttctgactttgtattggcatgcttgaggcaagacaaggcaattgcttctaagagcagcttctctggtataattcctgtcactcgtagaactgctaaaagtttgaagagagtttgggattctgtaaccaggcagcagcaaaagcaggagcagcagctgcagaagcaagctatgtaaggtgcagaatctctgaagaaagcagaatcagccagcctcattaagtatgaaggaagggtagagtatattattttgtgcatgatttgccagcctcattaaccaggatttatgaaaacgatctgatacagcatgagcttacttgtgagttcttgttctgtgccttttcttaggcctatttataagggagacgcttcatgtacagcttgagtacaaacgtgaatcttgactgttggatgcatttatgaggattttaaccattccgatcttgagttgtcccaaataagactttcaatagacagtcttcaatgttaaatagaaacatgttaatt

SEQ ID NO: 769 - DNA, 1758 bp, Oryza sativa
  Clone ID: PAT_MRT4530_1006C.1
atgcgccggcgatccccgccggcgtggtcgtatcggcgcatacacatcctgttcctcctgctactggccacttcgtcatcctccgcctcggccgctaacttcacctgcaccaccgtgcaggcggcgtgccagtccgccatcgggtacacgacccgcaacgccaccacctacgccgagctcctctccctcttcaacacctccaccctcgccgagctcctccgcgccaacggcctccctcccaccgctatgccgcctgacacggccatccccgccgcggccaccgtcaccgtccccttccgctgcctctgtaatgttgccaccagagtcggccggtcagactaccggcccatctaccttgttgggtcgcaggacgggctcgacgcgatcgcgcgcaaggtgttcgacggcttcgtgacgtaccaggagatcgcggacgcgagcaacatccccgatcccaataagatattcgtcgggcaggagctgtggattccgctgccctgcagctgcgaccaggtggatggccacaacgtcacgcacttcgcttacaaagtccgcgccgtggacaccacgtcggcgatcgccgccaagtttggggtcctcgagtccacgctaatgaggatcaatgggataaccgatcccaaaaacctagtccaggggcagattcttgatgtcccaatacctggtaatgatacaatggcacgaatggctcggaagcatgaagggttgattaatcaggaggacattaatattgatctctcgactttgcgaacagcaacaaataactttgatgaacgaaataagctcggagaaggtggttttggtgtggtctacaagggagctcttccagatggacaacagatagcagtgaagaggctctcaaattgttcaaggcaaggaataaatgaactgaaaaatgagctagttttggttagcaagcttcaacacaaaaatcttgtgagacttgttggtgtttgtgtggaaaaccaagaaaagttgctcgtgtatgagtacatgcccaaaagaagcttggataccatccttttcgatccggataaaagcagggaattaagttgggagaagagattgaaaatcataattgaaattgctcgaggtttagagtacctgcatgaagagtctagattgaagatcatccaccgcgatctcaaggcaaataacattctattagactccgatttgactccaaagatttcagactttggattggcaaagttatttggagcagatcaatctcatgttatcacaaatcgagtagctgggacatatggatatatggcacctgaatacgcaatgtttggacaatattccgtcaagtctgatgtattcagctttggtgttcttattctagagattgtcacaggaagaagaagcatgggctcatacagtgatcatgagcaatctttcaacctcttagaccttatttggcagcactggaacaggggaacacttctagagctggtggatcccaccaaccagtgctctctccaggctgaccagatgctggggtgcatccatgtcggcctactctgcgtgcaggcgaaccccgccgaccgcccgaagctgtcggcggtgaccacgatgatcggcggcacggcgtcgctcaaccctccgtcgaggccggcgttctgggtactcccggaggaggatgcgacgcgggcagccggcaccaattcttcgccaggcggcagggtgatggccgcgtcggccaaccgtgtctccatcaccgaaatcgagccaaga

SEQ ID NO: 770 - DNA, 1134 bp, Oryza sativa
  Clone ID: PAT_MRT4530_100700C.1
atgccactgctgtcacattttccatcatcctctttctttccgtcttcttccttccttctccagcccgtccgccgccgcccacgcctccgcgaggctctccggcgacgcaacgaagacacggacgcgacgggggcggcggcggcggcgcgcggcgcgtggcgcgacccggaggcgacggcgacggcgacggcacggctcactcctccggccgccaccttctctccggggccggccgtctggtcgtgctccggcgccgacgccgacgccgaccgcatgttcagctctggatccggcggcggcatggccgggacacgggagggttcttggacgccggagaggagaggagaggagaggaggaggaggagagaagagggttcttggttcttggcccgtagccttcaaagtgtcggcaccctccatgtcggcttcagcagccggtgcagcccctccacgtcgctgatcttgttctccgccagattgcacacgcacccattagacttggagaagaccaacctcctccttcctgggaccttgtaccctctccttcctgggaccttgtaccctctccaagagtgcaaaattgtaaataatttgtgtgctatctatagtactactatggatatgagagcaagatacctcgctagaaagaggagggaagaggaggacgatgatatgatgttgtttattttccctgcactacatttgttgagttctagtggagcaagggaaaagaagcgacaccatacatcaaagctaacaggtgatgagcgtgttcgggagttgcttgaagggcatgtaaaaaattgccgggtagcattcaggatggagccggaaatatttatatctttggccaattaccttagaactgaaaagttggtcgatgatactaggattaaagttgaagagaagctggcattcttcttatacatgcttagtcacaatgcttcatttgaggatttgcaagagaaatttgggcacagtggggatagcttttatcgtcacgtaaagcatttcttcaactcagttgtccctacgctcttgaagcggtttttgaagcctccaaatcctaatgaagttcattggaaaatagaaaaagatcctagattttatccctatttcaaggttcttacctaa

SEQ ID NO: 771 - DNA, 135 bp, Oryza sativa
  Clone ID: PAT_MRT4530_100701C.1
atgggcctccataacgaagccgagcgtttcggccgcgccattgaaggcgcaccagttgttcagacctcgcgtctcatacagattgcaggggcggccagttcactacacgcacagtcaccgctcactgtggcgtga

SEQ ID NO: 772 - DNA, 1033 bp, Oryza sativa
  Clone ID: PAT_MRT4530_100702C.1
ttaatatgcttggaagaggttctccaaggttgaccatgcttttagcgaaagctgcacaaaagaagaactctctgaaaggtcgtcctacaaaaaagcatggaggttctccaatagaaaaaacaagagcctcttggaacccagccctagagaagattcttgttgagttattgcatgagcacaacactcctgagtataggggacatactgcagaaggaacctacaatttcacctcaactgagccattgcaacatccaatcattactcaaattgagagtgatcaagatgatctcggtaacactgagattatctttccagattatgaggacactttggcttatcaagtacaagatgatgcagatgcaactgaagatgataatgcaaatgctgaaaggcttaaagagatgccgcaaagaagggttgttgctgtaccaagaaacaaagaagaaaaagaacccaagaggcaaaaaaagagtgttggcgtagaaggacttatggaaaggtaccttgatatgaggaccaaacaaactgaagatgaggctgtacaattagcaagagaaaaggaggctcatttagcaagagaaaaggaaattaatgatttttcaatcaagaggtgcatatctgttctgaattcgatggatgtgacaaaggcaaaaaaggtcaaagcatataccgtcttcaagaatgcagagaacagagagatttttgtgagtgcttgtgatgaggatccagaatctgccttgagttggttaagaagtgagatggcttgataggttccttgaaatcgactggtagggaaattccagataatttatttgatggtagcaattttctgaagttcatgaagatttattgcttcagatagcatgatgaaagtcagggcatcattatagtgtctcctgctgctcagctcattccactcataaacctgtttagtttgtgatttatctgagttactaagaatgcgtttaaactgagtgcttccatgccacacaatgaaatgtgtgtgatatttgatattgtggacatttttttt

SEQ ID NO: 773 - DNA, 402 bp, Oryza sativa
  Clone ID: PAT_MRT4530_100703C.1
gtaaaggaaaaaaaatactttttgggacaacttggataattaacaagggaacaattggggccttcccacctacaaatgcccgatgggtacacccttaaaaaccggattaagcccctaaaagggggaaaaaaaaacaaaaccaaaaaaaaaccgggggggaaaaaaaaaaaatcactgaaacgggcccctgggtaaaccctaaaaagtgggcaccgcaccggcgggggccccctcattggctaaagggaggcaaggccgaactgggggaacaaaaggacaaaagtggttcccgggaaaaaatggattaccctccaaagtccacacaaaataccaaccggaagcataaaagggaaaacccggggggcccaaaggggggggccactcaacataaagggggagcgc

SEQ ID NO: 774 - DNA, 2755 bp, Oryza sativa
  Clone ID: PAT_MRT4530_100704C.1
atggcgacaacacggctctctcctccggccgccaccttctctccggtgagcacgctgcctttccccttcttccctcctcttgcaaagctaggattgcacgtgcacccattagagttggagaagaccaacctcctccttcctgggaccttgtaccctctccttcctgggaccttgtaccctctccaagagatcttttgttgctgtgctaagtgcaaaattgtaaataatttgtgtgctatctatagtactactatggatatgagagcaagagaccgcgctagaaagaggagggaagaggaggacgatgatatgatgttgtttattttccctgcactacatttgttgagttctagtggagcaagggaaaagaagcgatgccatacatcaaagataacatgcgaggagcgtgttcgggagttgcttgaagggcatgtaaaaaattgccgggtagcattcaggatggagccggaaatatttatatctttggccaattaccttagaactgaaaagttggtcgatgatactaggattaaagttgaagagaagttggcgttcttcttatacatgcttagtcacaatgcttcatttgaggatttgcaagagaaatttgggcacagtggggatagctttcatcgtcacgtaaagcatttcttcaactcagttgtcccttcgctctcgaagcggtttctgaagcctccaaatcctaatgaagttcattggaaaatagaaaaagatcctagattttatccctatttcaagaattgccttggtgcaattgacggcacccatatacccatatctatatcatctgacaaagcagctccatttagaaataggaaaaatactcttagccaaaatgtgatgatagcttgtgattttgatctgaagatcactttcatgtctactgggtgggaggggtcggctacagatgccagggttcttacctctgcagtaaacaaaggcttccaagtaccccctggaaagttctatttggttgatggtggatatgccaacaccaattctttccttgcaccatatcgtaaagtcaggtatcatctaaaggagtatggggcaggtcggcgtagacctcaaaactacaaagagttatttaaccatcgccatgcggtattgaggaatcatgttgaaaggactttgggggttgtaaagaagcgcttccctatcctcaaagttgcaactttccacaaaatcaagaaccaagtgaagataccagtggctgctgcagtgttccataatattattcgatcactgaatggggatgagcaatggttaaataaccaaccacataatatccatccaagcaattatgttgacctgccagatgttaatatgcttggaagaggttctccaaggttgaccatgcttttagcgaaagctgcacaaaagaagaactctccgaaaggtcgtcctacaaaaaagcatggaggttctccaatagaaaaaacaagaacctcttggaacccagccctagagaagattcttgttgagttattgcatgagcacaacactcctgagtataggggtcagaatggatggacttcagaagctcggaacaaaatcgtgaaggaattccatgagaaggacagatatgtctgcttaacaaagtcccaaatccaagaaaaggagaaagagctaaaaagagaatataggatgctgaaagaggctagaaaacaaagtggagcttcatggaataaccagagatgcatcattgaggctgagcctgctatatggaacaatataatcatctcatttcctaaagccaagaagtttcgcaccaaatctttccctctatttgaggccttgggagaactttacgatggatatactgcagaaggaacctacaatttcacctcaactgagccattgcaacatccaatcattactcaagttgagagtgatcaagatgatcttggtaacactgagattatatttctagattatgaggacaccttggcttatcaagtacaagatgatgtagatgcaactgaagatgataatgcaaatgctgaaaggcttaaagagatgccgcatagaagggttgttgctgtaccaagaaacaaagaagaaaaagaacccaagaggcaaaagaagagtgttggcgtagaaggacttatggaaaggtaccttgatatgaggaccaaacaaactgaagatgaggctgcacaattagcaagagaaaaggaggctcatttagcaagagaaaaggaggctcagttagcaagagaaaaggaggctcatttagcaagagaaaaggaaagtaatgatttttcaatcaagaggtgcatatctgttctgaattcgatggatgtgacaaaggcagaaaaggtcaaagcatataccgtcttcaagaattcagagaacagagagatttttgtgagtgcttgtgatgaggatccagaatctgccttgagttggttaagaagtgagatggcttgaaagagatgggaacactgcagctgggtgactgaagctcatggtggcattagtgctaagcttaaacacttgcattcaatttgtagtttagctcttagctggctacttctatttattctaaaaaaaaacaactgaactgtaaccatttttattactttgtgacactttcatgtatgcatttgtgaacgtacagcatgcatgtgtgttttccctgtacttaaacaatgttttttttaccggatttgatctgagagaatgcatattgtttcattgctttgcttggaaacgtaaaaaaaaaaaaaaa

SEQ ID NO: 775 - DNA, 248 bp, Oryza sativa
  Clone ID: PAT_MRT4530_100705C.1
ggtgggggggggagcgggagacttcttcctgcgttaatagcgtccgactacctgggcggtacatcaagtcggtgttagaatggtgggattaaaccacaagtgtaaaagaggcacccaaaaaggttctacgctccctaacgctcctagtcgcctaggagatctagaatgaaagaaatcgcagaacattccagcataaggagctcccaccgagtggtcttctgacaaaaatcaaggacgaggccaagata

SEQ ID NO: 776 - DNA, 2052 bp, Oryza sativa
  Clone ID: PAT_MRT4530_100706C.1
atggggagcgatgttatccaggccaagctggtacttctgggtgacttgggagccgggaagacgagcatcgtggagtcgacgatcggggcagcgttcttctcgcaggtgctgatcatggacgaggccaccgtgaagcttgacatctgggacaccgccggccaagaacgctaccacagccttgcgcccatgtactaccgcggcgcggccgccgctgtcgtcgtctacgacatctccagcacggattcttacattcgagcaaggaagtgggtcgacgaactccagagacaagggaatccacatttggtgatggcattagtgggcaacaaggtcgacctggaagaaaagaggcaggttggaacgcaggaggcgatggaatacgcagagcgaaacggcctcttcttcatagagacctcggccaagacgtcgcagaacgtcaccgagctcttctacgaactaggcaagcactaccgaaacaactctgctggtcaaagtgcgacctcaccgcccttccgggatggttctccacgacggccggcgccgccgcgacgacggcggcggctggccatggcggctctgttgctccggctgatgcgcctctaccgactcccgaaatacgccatccttaatcgaaaacgtcttttactgaacccgccttggactttaaatgtccctgcaagtcggtgcggcccaccaggccgccactccgagtccgacacgacccatcatatcgcgttcgcgagcccaagttcgagtcggacccggacaccgacagaccgacctagtccgagccctacaaatctcgcgccgccgccgctgctctgctttcttcttccaacctatttccctttcccgccgctgctctcaccgcgaaccctacgcgccgccgccgccgccgccgcggctgcgcacgtcgagcagcccgcgatggagaacgcctgcgaggccggcctgccgctgtcggtggccgtgtcggtgccgccggtgatggttgacggggagacggttccgaaggaggtggaggagtgcgaggacgaggaggaggaggaggagtacgccggggatgcgccgccgccgtggaaggtgatgggttcggatgatgagggcgagacggaggccggcgaggaggaggagattgccgaggccgacggcgaggaagaggcggcggacgtggaggaggtcgagtacgagttctacgacagcgacggcagcgaggacgagggcgacggcgaggaggttgacccggcggtggcgagcgccgcgcagttcgtgccggaagggcagtttcttgggtcggcgcagttcgccgcctacggctgcgccgccggcttcatgcgggtcgccgccgtcgaggcggacccggccgacggccaagagatcctcgtgctctaccgctacaccctcctcaagagggcatggagcgatccggcgggcgtggagctgtccatgtgggcgaaggtgtcgaagatacaccgcctccggttcatcgtcccggcctccggcgacccggcgagctcgctgccattcgccgggctatctctgtccccgctgatctaccacaacgactacgtcgaggagctcgagacgctgtggtccaagctggcggcgcaggtgcgcgtcccgccggtagccacgcgcgtccaggtgatcgtcgacgtgggcatcctcagggcgggggacaacacgccggagcgcagggagtacatgcgcgccgagctggaggccaagaaggagatgccatggccggggaagctcctcggcatggagctgcacgtgccggagccggtggtggcggcggcggcgtcgtgcaagagggacagcagcgaggaggtgttcgacgacgcgccagcgccgccggcgaagcggaggaaggtgttcgacgccggggaggagtgccccgtctgcctggacgagctcgaggacggcgtcgtggcgtggcctgggtgctctgtcgcccatgtcttccatggccaatgcttggagacaactctcaaggggagccagatgtgccctatctgcaggcgtgatcttggcctgaaaaccttgcaggagtag

SEQ ID NO: 777 - DNA, 266 bp, Oryza sativa
  Clone ID: PAT_MRT4530_100707C.1
gttcgttctttttttttttttttcgtttttttacgttttgttcttggcaagtcaatactaattcttttgtttgtgttcagcggtgcttaaacaagcaccttatgcctccccacaaaacgcaaactgtgcgccactcgaggttgcttcacaaccagcacaatgatctaacggcgggacgttgggggcaaccgaacccaaagagtcagggcttttactaaagggccaaggccacccagaccgggggaaaagcggcgatacgcaaaaag

SEQ ID NO: 778 - DNA, 470 bp, Oryza sativa
  Clone ID: PAT_MRT4530_100708C.1
ctgcaggaattccggcacgaggctcctccgctccttgcgccatctcgcggctgaacagtggaggggcgccgatttctccatctggcgagcagagcagggtggaggggaggggatcctggtgagcatccacatcctcttcctgattcatctctctcccgccgcgactacttttgtctggaatttgctttcgttcgttaaccctagcttctcttcagagccttaacctttgtttgttcccccaaaagtttgggggttcaactgaaccccccatgtcccaagttggatccggcccctggaggaaggtggatgttagattgtagggtttcttacctccttttgtcgaactagatgcattgttgtttgctgtagaatggacccatgagatcagtgtggaagagtggccagtcctcgttctagataaatccggcaaccgaaagcgcgcatcacatatttggagtcatcttttctac

SEQ ID NO: 779 - DNA, 282 bp, Oryza sativa
  unsure (1)..(282): unsure at all n locations
  Clone ID: PAT_MRT4530_100709C.1
tccaaaattcccttntcttcccactcctccacttttccctctancttctcaacctttaccctcttgggtggtttatttcaaaaccgggtttggtatatccctcaatttaaccatcgagggccgccaacacacatagaccaatgaagagccaactaacacattacaccaaagcgcgattcgtcatcatctccgtcctcgtcttctcctccttncccactgccactgtcgttaaagcccgggttggacctatcgacatcgctcccaccaaccttatcaccaacc

SEQ ID NO: 780 - DNA, 750 bp, Oryza sativa
  Clone ID: PAT_MRT4530_10070C.1
gactacctctccatcctggctcgtgccgacgatcgtgtgcatttcacttccgagaagaagctcctcgtcagccttgtcaaagaccacgtcctcctcgaccaacacagcaaggcgattcattatacattgcacgcagagtctttggttggaaagaacaagcctagccaagtgctacttgctatcatcgagatcattaccgatagcatgggaagaccatcccctgaaatggagatggatctccttacccgattccagaaaccaaagttttctccctgtttcaggtttgaagaagtaactgagcttctaaaggtctgctggctcgatttatgtggcagagtcaactgcagagagctctcacccaacacagaatatgcagcctacctcgtcttcaaattgacagatgattcgtacggccttgattgccagacacaagaggcagacatcaccatggacgatcaagtagtgtctgccaagcggaccatctctttctacccacgcccacgcccacgcccacgcccatccacacgagagacactttctaacatgggtagaatcgaagaagcaggacaagcagaggagccaagctacccaagagaacgaggtgatggctggctggaggtacaactagggcacttctacaacgacctagaagacactggagtggttgttatccgcctcaaggagcatatccagctcaactggaagaaaggacttatcttggagggtatggaaattagacacaacatataa

SEQ ID NO: 781 - DNA, 305 bp, Oryza sativa
  Clone ID: PAT_MRT4530_100710C.1
gcgacactagctgtcagcaatatactgtgtacaatcgatcgtagagtgaagctagctggactatatcattatgacgtgcatgcacactgttacgatccatatctctgtcaacatcacagaatctatgcacgaaggcgacactagctacgaccatatattgtgtacatgacatcttctagacaatcttggcagagtatatcagctatcatactgctcttgcttatacttactatccacgtgctggaaggatcacacgtctcaacagtcagaagttccccattcttaaccttgtacggttgggcgct

SEQ ID NO: 782 - DNA, 560 bp, Oryza sativa
  Clone ID: PAT_MRT4530_100711C.1
ttcaaattcaaatttgaatcccgatataattcaaattcaaatttgaatcgggcatgtaaacttttcacttataaacattgggtctataaacttcggggatcgatcgctacccttgtcgccgggcgatcgatcgcccattagcacttccgccgtcaacaatgccaacattcatctgcaacagttcctggagatctgtagcacatataccatcaagggcgtcagtccagacgccgtcaggctaaggctgtttccattcttccttcttgggagagcgaagcagcggttctatgccaaccatgctgctgtcaacacatgggacaagtgctctacggcattcctctcgaaattcttcccgatgggcaaaaccaatgcccttcgtggaaggatttctagtttccagcagacaagggacaagtctattccggatgcatgggaacgactgcaggagtatgtggccacctgtcctcatcatgggatggacgattggctgatcctgtagaacttttacaatggactcaccccgatgtcccgcgatcacctggacacggtgtcacgccctg

SEQ ID NO: 783 - DNA, 1677 bp, Oryza sativa
  Clone ID: PAT_MRT4530_100712C.1
atggcgcggctcacggtggagcaggcgaagcgcgaggcgggatccgccgggacgctcgccacgtcgctcaacctctcccaccgcgccctctccgacgtcggtgctgtgtcgtgcctgagcagcttcgtgaatctggagcgcctcgacctcggctacaactgcctcctcactctcgagggtctatcaaactgtgccaatttgaagtggctttcggttattgaaaacaagcttgtgagcctaaaaggtgttgaaggcctctcaaagctgcaggtattgaatgctggcaagaataaacttaaaacaatggatgaggtcaaatctttgacaagcctgggagcattgattctaaatgataacaacatttcttccatctgcaaacttgaccagcttcatcagttgaacacacttgttctttccaagaatcctattttcactattggtgatgctttgatgaaggcaaaggccatgaaaaagctatccttatctcactgccagatagaaaaaattggttcttctctcactgcgtgtgtggaactgaaggaacttagacttgctcacaacaagatcactacaattccatcagacctggcaaaaaatgtcaaaattttgaaccttgatttaggaaacaacttaattgagaggagatcagatttggaggtcctttctgaattgcactacttgaggaacctaaacttgcagggaaatcctattgctgagaaagacggtctagccaagaaggttaagaaattagttcccaacctacgcatatttaactcaaagcccatggaggccagctccaagagtaagaattctagagaagagaatctaccaatcaatgatgctgatacgcctgatgatggtcctactgacatttatacaaaaaagaaaggcaaggggaaacactcaaagcaacaaattaagagccctgaagaacctgcaggacaaagtactcgcccggatgtcaccattgctgccccagccaaatctgaactgcttgatggcaaggaaatgaagaaggaaaaagcggctgtagaacatgtcaagaacaagaaatcaaagaggaaggatgacaactcttctgttgatcatactgataaaaaggttagtaagggagccaagaggacaaaatctgccaagaaggaagagaagaacgccgacggaattgatgacacagaaatgccatttgcagacttggtgttctccggtgaaggcaacaatccagagcttgagttgaagggcaaaaatcaggaaattgcccgagatggaaaatttggtggcctggtaatcgatcacaccaagaagaagaagaaagccaaaggcaccgtctttggctcgtcagctcttgagcagctatcatctgtgccggaggtaggatcaggtgcactgtcaggatgggattagttgtaatgagctgcgagtctgatgactggcgattaatgcttaatggaatgttggaactccttattttggctttacttgcaagccgagcttttgtatgcaccatctgcttgttttgtcacttcaaacgtgcaaactgacctgtcggtgcagcaagtgttgaaaattttgtacaagttcaggttggaagttttgtaaaagttcagatgatggggagctcaatttccctgaactcaacagtgttgttgcttttcatccaaaaaaaaaaaaaaaaaaaaa

SEQ ID NO: 784 - DNA, 2145 bp, Oryza sativa
  Clone ID: PAT_MRT4530_100713C.1
atggctaacaagactctccgcgagttcgctgctccatctactgacaatgtggccaattggccgcagatcaacatgggagacgtggatttcgacttgaagtctagcctcatcactatggtgcaggcttgcccgttctgtgccaagcctaatgaggatgccaacgctcatctgcaacagttcctagggatctgtagcacgtacaccatcaagggcgttagtccagacgccgtcaggctaaggctgtttccgttctcccttctcgggagagcgaaacagtggttctatgccaaccgtgctactgtcaatacctgggacaagtgctctacggcattcctctcgaaattcttcccgatgggcaaaaccaatgcccttcgtgggaggatttctagtttccagcagacaagggacgagtccattccggaagcatgggaacaactgcaggagtatgtggccgcctgtcctcatcatgggatggacgactggctgatcctgcagaacttctacaatggactcacccctatgtcccgcgatcacttggacgcggcagctgggggagctttcttctctaaaacggttcaaggagccgttgatctaatagagaagatggtctccaatatgagttggagcaaggaacgactccagacccgtcagcgaggcatgcacaccgtcaaggagacggaattacttgctgccaagctggacctcctcatgaaacgcttcgacgaccacgagaaacggccacaaggcactgtcaaggccttggactctcacatcacatgtgaagtctgcggcggcatagatcactctaagaatgactgcccggaaacccgtgaggaggcgatgcacatgggcaacaacgggtaccttccacgaggaggtcaggggtggaaccaaccacgcccatattatcaagaagctaaaaccactgatgcgctaagcaaaaagcttgctgccaatgataagaacctagaaaatatgaacgtcaagttagatggctttgcttctgcttttcaaaaccagctgagcttcaataaaatgatagaaacccaactagctcagtttgcatccttagtccatgcaaatgaaactgggaggattccggggcaacccgacttctccattgaaaatgtcaaggtgatcacgacaaggggaggaactactgggataaccaaagaagcgccatctagtgactcggctgacaaggaagttcagccagagaagaccgtgccgcagaaaccgttagtggacgagcaatctgctcattttgttgatgtaatccggaaaatccacatcaacgtgccactgttggacgctatgcaagtgccaacatatactcgttatctcaaggacatactcaacaacaagagaccgctcccaacaacagagatggtcaagctgacagaacaatgcagcaacgtgatactctacaagctcccggagaagaagaaagatccgggctgtcctacgatcacctgctcaatcggggcacaacagttagaccaggccttgtgcgaccttggagccagtgtcagcgtcatgccaaaagacgtcttcgacaagctcaacttcacggtgttggcaccaacaccgatgtgccttcagctggctgattcatcagtccgttacctgacagggataccggaggatgttccagtcaagatacgggatttcttcatccaggttgacttcgtggtgctggatatggacacaggaaaggagacgccgcttatcctagggtgtccgttccttagcaccgcgggagccaacattgacgtgggaacggggagtatccgtttccacataaataggaaggaagaaaagtttgaggttcaactgaggacggaacaatgctccatggtcaggataaagtacgggccgaattcgcagaatattcaagtggtcgaagtggagccacccaagacagacagcctggtgaagttcatgcagaatttcctggagaaggaaacaacgatgcccaggaaccattattggaggacgccggtaaaaccacccataccggctaagctagagcagccggctcagaggaagccgtctttcgcaccaaagcaaaggaaggtgtggaaggaaaaaccaaagatgcccgctccatcacctacggagacgggtagaaaatccgcaaactga

SEQ ID NO: 785 - DNA, 1377 bp, Oryza sativa
  Clone ID: PAT_MRT4530_100714C.1
atggccgccgccgccatcgccgccgcttcactgctcccctcctccgccttcgctctccgccgtctctcctcggcggcgaacgtctcccgctttgcccagctcaagagattcgaccgggctcgccggttcgcgccggccgccgccatgtcgacgtcgtcggggccgaaggaggcgccggcaaacaacccgggcctccaggcgccgtcggagaaggaccccgcgaccaagggctacttcatgcagcagacgagtggtaggagggtctcctgggttaagagggatggctggggcagtagcggttcgctctgggctgcagtcgggcagggtggtgaggacgtggcggtgctgccccggctgtgggagacgagggctgcgggccagtgtcaggtctccgttgccccggccgcatgctcctcggcggcgaacgtctcccgctttgcccagctcaagagattcgaccgggctcgccggttcgcgccggccgccgccatgtcgacgtcgtcggggccgaaggaggcgccggcaaacaacccgggcctccaggcgccgtcggagaaggaccccgcgaccaagggctacttcatgcagcagacgatgttccgtgtaaaggatccaaaagtgagtctcgacttctactcgcgtgtgatgggcatgtcgttgctgaaaagattggattttcctgagatgaaattcagcttgtattttcttggttatgaggatgtggaatcggcccctactgatcctgtaaagaggactgtttggacttttgggcaaagggctacacttgagctcacacacaactggggcacagaaaatgatcctgaattcaaaggttaccataatgggaactcagaccctcgtggttttggtcatataggagtaactgttcacgatgtctataaggcgtgtgagcggttcgaacgtcttggggtagagtttgttaaaaagccagatgatggtaaaatgaagggcattgcatttatcaaagaccctgatggctactggattgaaatatttgacctgaacagaattggggcggtgactgcggaagcatcatgatgtgtttgaaatgctatgaactctagttatgcagctggggtaaatcatttccttgttgacaggtgcgacgtgcgagacgataaaactccagctacccatgggcatatatacaatatacttggtcgtttagagcaacaagttatagattgtgataccctgtttgctggtcagtgtttgaagcttgaacttaacattgcactgtaaccgtttctgcgttaaagattttggcctcataccaaaactaaaaactctctcccccaaaaaaaaaaaaaaaaaaaaaaaaaaaaaaaaaaaacccgagggggggcccggaaccca

SEQ ID NO: 786 - DNA, 408 bp, Oryza sativa
  Clone ID: PAT_MRT4530_100715C.1
cccacgcgtccgcggacgcgtgggcaaattcttgcacacgcgcagctcgagccatggccggagtgagcaccagcgtcgtcggcctcaagcccgccgcggcggtgccgcagtcggcctgtctggcggtgccgaatcgcgtgctcgttgcttgacgtgctttatcttgatgcacgacggttgttgtgttcttttttcgtgactggttggatgttgttgctttgttggcttttatctatgctcgacggcttttgttgtttctctgtggttgaggtgatttccttctgttgctgtctattctcgattgctgtgatgtatcttatagtttggtttctttcttatttttttttaatttttttgtttttatattatattttttattttttttttttacctttttttctttttttt

SEQ ID NO: 787 - DNA, 358 bp, Oryza sativa
  unsure (1)..(358): unsure at all n locations
  Clone ID: PAT_MRT4530_100716C.1
ctcagatcagcagcgcacgtttcgctctgaaagcaccggtccttttcgcgtgacttgcatgggagggcaggccgcatgtttggtggtggtggcatcttagaggattaaaagcgcgggacgaggcatcgggctaagatacggggaatttttttccctcctttcctccgcatctcctctgcctgctttgctcatgctgcctccgattgatttagcacgaagaagaaggggaaaaaaaacaaaagggcctgncaaaaggctagacagcattttgaaaatcaagaaatggttggctggctttactttaagnaatctgatgcaatacctgcttagaaaaatggcctcttcgtgttttcttggc

SEQ ID NO: 788 - DNA, 2499 bp, Oryza sativa
  Clone ID: PAT_MRT4530_100717C.1
tcatgttcttcttcttcctcctctcctccttcttgtagcttccacccccacccatccctcccaccccgccgccgcttaaagtccgattttggggaggttcgtgcgctcagatcggggatggggtccaaccccccatttcgtcttgctgcggcggggagggtggtgaagcgaaagtatggatcgagcggtcgagacaccgacccgatcgagcggtggtggtggtggggcgtgccacgtcagcaacgttttggagggggaggccaagaagcccggggctgactccaaggacgcgcgcaaggacggctccgcggatcgcggggtgtccagggtcggatcagataaatcgagatcacatggtggattagactctaagaaggacgttgtcatccaaagagatgggaacaaccaaaatattgctgcacagacgttcacttttcgtgagcttgctgccgccaccaagaacttcagacaagattgcctattgggagagggaggttttggccgtgtatataaaggacgcctggagactgggcaggctgttgctgtgaagcaacttgatcgcaatggtcttcaaggaaatagagaattcctggttgaggtcctcatgctcagtcttctacatcacactaacctggtcaatctaattggctattgtgctgatggtgaccagcgccttcttgtctatgagtttatgccattgggatcactggaagaccatttgcatgatttgccacctgataaggaacctcttgactggaacacacggatgaagatagctgcaggtgcagccaagggcttagaatacctacatgacaaggcgagcccgccagttatttatcgtgacttcaaatcatcaaacattcttcttggtgaaggatttcaccccaagctgtctgattttggtcttgcaaaacttggtccagttggtgacaagacccatgtttcaacacgtgtgatgggaacttatggctactgtgccccagaatatgcaatgactgggcagctcacagtgaaatccgatgtctatagctttggtgttgttttcctcgaactgattacagggcgcaaagcaattgacaacacaaagccacagggggagcaaaacctagtggcatgggctcgtccactattcaaggaccgcaggaagttccctaaaatggctgatccaatgctccaaggtcgcttccctatgaggggtctgtatcaggctttagctgttgctgccatgtgtttacaagagcaagctaccactcgccctcatataggagatgttgtcactgcactctcatatctagcttctcagacatatgatccaaatgcccctgttcaacatagcaggagcaattcgtcaactcctagggccagaaatctagctgggtggaatgaagatcgacgcagtgtgcgctcgccaaatcatcattctccagatctgaggagggaagctgccaggtcatcaagagcagaggttagcaggactagttctaccggtgattctggccggagatcaggattggatgatttagacatgacagggtcgcagatgggtagtccagctcaaacaggaagaaaaagagagactccaaggactgctgatagacagcgtgctattgcagaggccaaaacgtggggggagaattctcgagaacggaagcatccgaatggtcatggcagctttgatagtacaaatgagtaaatcggagggtttttgtttcagaaatcagtctacggaggatgaatctgctcatctacacgaaacggatccaatcaagtaacattgcattggttccacacggttctttatctgtgaataagacccttgttcttccccggccatcagtgccactccatggtcactatgtcattgctatttgacatgtcttagatctcccggcgtccattccttgtgaatgtgattgtgtcatgtgtctttagagttcggctccgttcgggagccgataaaattcagctggaaaggtaggcaacagaagagaggaacctgatgaatgccttttcttggttacctgatcgccatgctcatgctcagcaccacctgtgttacgaatgttacagcatttcaggtttggctacctgaggacgtgaagttacttccgatgagaattcaggtttggagataggacacattacctgtgtttcgtacagttttttcttttcttttcttttcttttgagttgcctgagcacttatttatttgtattagcttactgtacctctcatgtatcttagcgtgaacgttgttcgacatgcagcaagaggtttttatctgtatcaagctatttcagagccaatgtgttgtacatgtaatattttgcagtagtagtcaatcatgtgttcatcttgcaaagccaaaaaaaaaacatcaaaccccgtctcttgggcgcgccagtgctcttcgcattgttgctatctgcaaaaaaaaaaaaaaaaaaaaaaaaaaaaaaaactcgagactagttctctctctctccctcgtgccgaatt

SEQ ID NO: 789 - DNA, 1143 bp, Oryza sativa
  Clone ID: PAT_MRT4530_100718C.1
atggtcttgacgattattgcatatcactttttcttgcaaggagtcgacgtcttctactcggatgccccgttgcctggggtccgtggcaagaggtgcgctgacgagttgccttctggcgagcggtcatcgaagcacacggcttccggcacaacttatgcgggcacgcccggcagggtcgttggaggtcccaagggctttggcaagctatcgacccaggacgatcctgggagggccgagtcatcgttaggcatcaaaggtgctggcgctcaggtggatccggagccgacgccggctgtggccggagagcaagctgatgcatatggcgatgctgctcctgggacgcaagtggcggctgaaggggtgaaggccggggatgcctccgtccagccgggtgcagccggggagcacgctaatgtatacaacgacgctgctccaggggcacgggcgggggctgaagggacgaaggccggtgacgtctccacccagtcgggtggagaagacgatggagacctccgcgagcaagctccgggcactcagccaagcggtggcgatggggccgccgagtgtgccaccgggtcgtcccggcgaggaggcgatgcaggggccaagaccaacgctggaggccggttgtcgtcatcgctgcggcgttccctgccttgcgccttttctcccctgggcgcggaaggagggccgggccggcatgccgggaaggaggccactgggaacaatgaggaagaggtgggccagcaagagagggaggccttgaagaaggtgtttgatgacgcggccgacaaggcggacgctgaagccatgaatgaggccgggatcatcctaatgcaaaaaatgcagccgactgggagagaagggttgcccaagcggaggaggctggtggcaaagaccagtgcggccaagttgacggcgaagcttgaagaggcgttgaaggagtcaaatgatcttcgtactcagcttgcctgtaacttccgtctcagttttgctcttattggttttgtgctcaccttatggattgatgttagtttccctacagttgcccaagccaccatcgagtcggatgccgccgagaaggaacagcttgccaaggacttgaaggacaagacgactgcctttgacaactttgcgagctga

SEQ ID NO: 790 - DNA, 104 bp, Oryza sativa
  Clone ID: PAT_MRT4530_100719C.1
tactgttacgggtggcatgtcgactgtctatagcttcttcctatacggggcaccctaatattcaaattcacttggtccgttcggttttacaacccgtcgcgcac

SEQ ID NO: 791 - DNA, 428 bp, Oryza sativa
  Clone ID: PAT_MRT4530_10071C.1
cccacgcgctcggaaaaaaaagagaaaaggaaaatctccctcctcctcctcctgcgactgcgagagagcgagacgctgctcagttcgtcgtctcgcttcgcctcgccggcgtttggattggaatctccgctccggcgaggaatttcaccctacaaatattagcccaccgcccggccggccggcgcgcgccatcctctagaagattctcgcgccaaaaagatcccctcggattcctcaccacctcttggattggatacctcagctcaggctgcttctactaccgcatctctctcgccgcctcctcctgagacgtagtggacgacgtcgctatggggggactcgcgtaggcggcacctcgccgccgcgggggagatggaggacgacatcgaggagggcgtggccgagaactcgggaccctctccccgtgc

SEQ ID NO: 792 - DNA, 2705 bp, Oryza sativa
  Clone ID: PAT_MRT4530_100720C.1
ttttttttttttttttgaacaagaacaaatttttaacttattaaattaacatttacacaaccatggaggccataaatacaaaaagaaaatttgtccatgtcaaggaaaaccgatacagatcatgtgctcagagtctcttaccacaagtcatcagtctctgtgacagaatacgtgtccaaaaaggttgcaccctaaggaacaggaatgctcaacaaacagaacaagctcgttcgttcaaagtcgaaatctccagtgacagcatagtggtggagcgctactagattttgcaagcttttaccagcacagtgcatccaccagatcagcagcatgacctagctgccttccactttctttctgaacattatcctgcccagcaagctggggctccgtctcttcttcttgagatcagcagaaataatctcttgggatggctctgggaagatcggatgaacaacggtttgtgttaattcctcttcgacagctttgagggcagcattaacactaccatcttgtgctacgcttttccgtgatgcagcatcaggctctttcttggagtgcacctctttggttgcaggagaaatggcatcctcagtgctggagtcctccccttcagcaagaatgcatgcaagtgactggggcttgtagtcagatgagcttggtctggagttggacattgggctgtctagattgcctgaaaccgccggactcttgagagctcgcagctgcctgcttagatttgtgatggtttcctgacactctgcaagcttctcagccgctgctgatatctctgaacttgatgctaaatgcttttcctctttctctgccagggtttcagcacttggatgatcatgggggctttctatctcacaggatgctgagttctcctgactgattttctcgtcctggtctagtataactcttgtgagttcttcatcaagttgactctcttcttggttaaccaaaatatgatctgtttttcggccttctaccgactgaattgattcttccagtgcttcagtttgtatgtctggagcagatgatgatttcggactttttatgtcacatccaccattcatgttaccaaatgattcctctccatccaaattctctgtattattattcacagtgtctggttgttcttggaatgatatattcttgtactggttgattatatactctagaaccaaacaaacctcatgcacaaacttttcaaggtcagttttaccatgcagtagatcatgacagacatggaccaaatgctcaaggcgagcacaaaattcagacctgtcaagcagcaatttttgagaacttgcaacattgccttcttcagatatgccaataacagaggtgatcttttcagtcaggctgaacaccatttccttcattatgctccagtcatatgatccattcaaatcatctcctttctgattattagcactctgatccaatgcacgagttatctcctcaagaattgtgtcaatgttttccccactggtttcatgcttctgcatcacaagcttgcacatatcctgaacccattcaggctggccattggagatagagataccattttctaggacagtgtctttatcattcttctctgaagaaatcgcttccgaatgcgcattcttgggcgatctcaatccttggccacctgaagccatctccaacctctcgatctcggcgaaatcgtcgagcaagctcatctcagatgctgctgctccctgcagcttcgcggccctgaactgctccagctcggagatcagcgcggaggcccacgactccgtctggccatgggcgtcgctcagctgcttgttctcctcggtcagctcgctgagctgccgctgcagcacggagagcttgcacgcctcgtcggcgtacttcatctgcacgaactgcagctcggcgtccctcttcgccagcgtctgcttcagcgccttgttctcgtcctcgacggcgcgcagcttggccgccgccgcgggcgtctcgtgctccgccgcggcggcacggcgcggcgtcatcggccgcgccgacatgggcgtcattggccgcgctgacatggtgggagtcatcggccgcgccgacgtcgacatgggtgtcatcggcgccgccggcgccacggaccgcggcgacatcggcgccacggagcgcgaccttctgggtgtcgccggctggtccacctcgtccctcatcttggcgatggcggcggggcccgggaggcgcttccgcaccatggcgcgcagccgctggcactcgccctccagcagcgcgatcttcttctggctctccgcctgctgccggcgcgacgcgtcgacggactggaggtcgtactcccgctcctggcccctgatctccagctccttctgcagcatccgcacctcgtactgcagcgacgccgcctgcttctgcgccgcgtccagcctcgccctcgcgccggcgagctcgccgtcggaggccgacttggactccctcagctcgccgatcgccgcgtccttggcgtcgagggccttggcgaggctgctgttctcggcggcgagcttcgcggccttcttggtcgcggcgtcgagcttccgctggagctcccgcgctttcttcttctccgaggagatctcgctggccgcctccacgatgatctgctcccgctcctccctggcgatgagcagctgctccatgcaggatctcagagctccttccatctccgacat

SEQ ID NO: 793 - DNA, 1239 bp, Oryza sativa
  Clone ID: PAT_MRT4530_100721C.1
aatttagagcagatcaaagcactgatcgagcactatggaccaactgttttcttccacccgcaagagatctacttaccatcgtcagtctcttggttctttgagaatggagctacgctccacaagaaaggtaaagaaatgggagatgtaattcttgctagtggttcgaaccttcctgctggtgggacaaatgacggtgagtactggattgatattcctgatggtgataggaatgaatatgtcaaagctggtaatctgaagagtgctgagctctatgtgcatattaagccggctcatggaggaactttcactgacattgcgatgtgggtgttctgcccatttaatgggccagcaacaataaaggtcggatttgctagctttgctctacagaaagtcggcaggcatactggtgactgggagcatttcaccctccgtataagtaacttctcaggagagctctcatctatctacttctcacagcacagtggaggcgactgggtggatgcatgtgatctggagttcatctcaggaaacaaagccatcgtttactcagcgaaggatggccacgcaagctatgcgcaccctggatgttatctgttgggatctgagaaggctggtgttggggtaagaaacgatgcagcacgaagcgatattttggtcgattcgagcacaaggtataagatcatctctgcgggacatctgggagatgccgttatcgaaccatgctggctgcagtacatgagagaatggggcccgaccgtggaatacaactcacggtcggagatagacgctgtgcttagcttcttgcccttctttcttcggttcacagctgaagcaatactgaacagtcttccggtggagctgtacgaggaggaaggaccaactggaccaaaggagaaaaacaactgggaaggcgatgagagaggctagaagatgtttccaacttcaaatatatgcttcataatttgttccagaatccagatagctctatagatatgtaccctaagggtgctgtaatagtgatattgggatcgaacgatcgatatgctttgccaaggcatttcagttcatagagtttgtaggtgaaatgctggcaaagctgaaggttgaagaggtaatcacgttatgttgtcctgtttgatcatctggcctgtttgtaccttgtgtcagctataacgctgtttctaagaaccataaactaaagccgacatagtcgacaaaaaaaaaaaaaaaaaaaaaaaa

SEQ ID NO: 794 - DNA, 195 bp, Oryza sativa
  Clone ID: PAT_MRT4530_100722C.1
tgatttggcacttctccagcttgttgtgtcattagggagctcgtcgtgtcattagggagctcgtctccagagagagaggggtgggggaagggaggggtctttaccggagaagggttccacgccgacggggagcatgccgccttcgccaaagaggagagaggcgtcgttgaggtgcaagtcatcgtcaccagataa

SEQ ID NO: 795 - DNA, 468 bp, Oryza sativa
  Clone ID: PAT_MRT4530_100723C.1
atgggcacaggcatggggtttttgcccgatagacctggcgagtatgtcgccgcgcaccgaaaccaagccgcggaggccagcagcggctgcgctattctgcgccacgccaccgtcgattcaccgagcggtgatcgagggaggcgcccgaagaccgcatacaacgggtccctcgactgtcaaaacagcccatcccctctcttctctattaactccccttctccctctcttctctatctcctcatctcctcatcccattctccttccatctcctcgtcgacgcctgcactgtcgccaacgccgccggagaccgagagggtggtggaggtcaagctctaccacaagcccgtcgtgctcgccggcctcctgctaccgcccgatgctagtgacgacggctacctcctagacctaatatcgtggctcgatgagcagccgggcacggatatgacggaagaagtcgcctccgcctaa

SEQ ID NO: 796 - DNA, 596 bp, Oryza sativa
  Clone ID: PAT_MRT4530_100724C.1
ggcccataaatttattataagcctccccaaaatttcagtgccgtttaaaacaaacaggagccggtttaagttgggaaagacgcaaattaaaccggcccccccccagaaaaggccggggccataaaaataaaaaaaaaagaggtaatcaatctaaaaaaaagggcttacaaaaaacccctgtaaaactgggggtctgggggagcaaccaaagaaaaaagaagtttgaaggcaaactttgtggccccccctagaagttggtagaaacccgggggggggcgggcccccactggcagaaaaattatttaagggaatccgaaaaccggccacttgcggggggtttatggctgggggaaaaagaccaccctgggctttcaaaaaaaaaaaagggggccccatgggggggacatccccaagcccaaagggggccagaaccagggattccatggctttaaaaaaaaaaaattccgggcccttggggggaacccggaaaacccgcccggtaccgggagccgtccaccttccccttaaagagccccttttggggccgggggggagccagccaaaaattgggcccgggggaaaagggctcccccccc

SEQ ID NO: 797 - DNA, 255 bp, Oryza sativa
  unsure (1)..(255): unsure at all n locations
  Clone ID: PAT_MRT4530_100725C.1
gtactagcaaaggccagcatccatatcgaggctatctagggttggtgctagctacctagctaggttggacccttctcttcatcctcccttgcatatcaagcctcgatagatatagccatcagcccccctctcgatcgcccttgccttttgagatcgatcaccaggttactgtagaagtacagatcggagcgagcgatcgatcgaggaagaagaagaggtagaggttgtagatggctgtntcggctggcggcggcg

SEQ ID NO: 798 - DNA, 560 bp, Oryza sativa
  Clone ID: PAT_MRT4530_100726C.1
tgcaggcgatcaataaggtagagcttacggactgaactgtggcagcatgtcgatcaacctcacggcagctccagggggatccctggcttgcggcacggcgtgaagggaccagatcttccgtaaggctcccctttgttcctcggcaccaggtccggcctcaccctgccagccgagcagttagggtggctgccacagccgcagttgccgacgtgcaggagctaaaggctaagtttggcaagcctggggcggttgagctcaaggaggggcggggcggactgccgactgtggttctgaagcatcctgacggatcctccgccgaggtcactctgtttggcggttgcgtgaccagctggaaaacctctggcggcaccgagatcctctacatcagacccgatgccgtgtttgacaagtccaagcccatctccggcggcataccccactgcttcccccagtttgggccggggcccatccagctgcacggcttttgccgcaaactggactgggagctggtgggggcttccggggatgggaagccgcaggtgcagctacagctgactgac

SEQ ID NO: 799 - DNA, 107 bp, Oryza sativa
  Clone ID: PAT_MRT4530_100727C.1
ccgccaagtcagggaagttggagatcccagatggagccgtgcttgagaacaagtcgatgtgcgacgagtcgcacattacgacacggcctattgcgcggttgagctga

SEQ ID NO: 800 - DNA, 1242 bp, Oryza sativa
  Clone ID: PAT_MRT4530_100728C.1
ctcccctcccaaccatttctcctgggccttgctccgctccacctcccaccaaaccctaaccctaaccctaacgcgcctaccacgcgaggcgcggcggcggcggcgggcaccatgtccgcggcggtgtgcggcaaacgggcctcctccttcttcgaggacctcccccattcgccgtcctccccgccctccaagcgcgcctgcttccgtggaggttcctcgccctcccgcccgctcgccgacccggccctcgtcgcccagatccgcccgcggttcccctccgtcggcctcgaggttattgagaacgcgttggaggaatgtgaaaacgattttgattcagcaataaagttcttgttcaatttgcatgtaggacccacagaatgtaatgtggatcctatttatcaatctccatcaggaatgtctactgagcttcaagtggctgatgaaggtattttggctggtaatgaagctgctgtacctataggaaatgctccctgcgctgataactttccatcaagcagcacccagtgggttgagattcttgtgaacgagatgactaatgcctctaacatggatgatgcaaaggctcgtgcctctagagtattggaggtgtttgagaagtccatgaccgctcatgttggtgcaatggggagctttcagaaggaaagctctgtgtataaggaacagtttgaagcaataaccagggaaaatactattctaaagaaagccgttgcaattcagcacgagcgccaaaaggagcatgatgggagaaaccaggagattcagcaactcaagcagctggttgctcagtaccaagagcaaattagaagcctggaggtaaacaactatgcactgtccatgcatcttaggcaagctcagcaagccaactcgattccagggcacttccatcgggacatcttctgaataacttcatacctaaaccggaggtttccatagaatgagatatcgttcacccaacaattaagggcagagttcttgttcttggcttatatccaatatattgccaagttataaacatagtttaatgtatgttgtagacctgtgtgtacatgcttgtcttgcgttgtgctgttggccccctaagatgggattgtgtgcgagcaagcgcaaagaaagcttagttcattcgaacggcagacagaatatgatcaagttagaaaagaaaaaaaaaaaaaaaaagaaaagcgaaagagcctttaaaattaaaaaaaaaaaaaaaaaaaa

SEQ ID NO: 801 - DNA, 435 bp, Oryza sativa
  Clone ID: PAT_MRT4530_100729C.1
gcaaaccctgcgcaaccttgagcaggaacaactgcgggtggtggcatcgccgaatgattagggataatgtaattggaccgggactatcctgcttgtgcgggtgcgggggtgtcacttcggacagggaatagcagacacaagccttgaccagccattgctctggctgacaacggcgacgctggatggcttagttgcaattctaggaggcgatgcttaagcataccacttccctcttcttaccatatactgcggttaaaacatctctccggttataaataagcggcacctgaagatgcacgtcgtatacatcttgggggcatacatttggagaaacctgttgatgcaacgatattgccattggtctatgcattggtttcaaactttactcctaggcattgacaagttctagaagctccacatatatttttttttttt

SEQ ID NO: 802 - DNA, 1260 bp, Oryza sativa
  Clone ID: PAT_MRT4530_10072C.1
attcactgaaacgaagagaaattgagacctctaggctccagccgtacatggccatggcgactaccagctctaaaaacgagaggtggagcctcgccggcgccaccgcgctcgtcaccggcggcagcaaaggcatcggccgcgccatcgtcgaggagctcgccagcttgggcgcgacggtgcacacctgcgcccggaccgaggcgccgctgaacagatgccgggaggagttgacggccaagggccttgccgtcaccgtctccgtctgtgacgtctcgttgcgtgccgacagggaggcgctcgccggcacggtgcgcgagctcttcggcggcaagctcagcatcctggtaaattaacgacccatgtagaaattagctaaggcagcttagctgccgtggtcgattttgatagtgttatctgtgacacacgaatccgtggcgagctcatgaatgcaggtgaactgcgccgggatgtcgttcctgaagccggcggtggagctgacgccggacgattgctcgcaggtgatggggatgaacttcgagtcgtgcttccacttgagccagctggcgtaccctctcctcaaggcctctcagagaggttgtatcatcaacatctcgtccattgcttcggtggtcgcgttctgctctcttcccaacgccgtctactcagctgctaaaggagcaatgaaccaagtcacaaggaacctggctgctgagtgggcgaacgatgggatcagagttaactgtgttgcgccaggcttcattcgtactccgctcctatctgaattcgtggagggtaacgagttggggcgagcagagttcagccgtgttcccatgggccgtctcggtgaaccagaggacatcgcatcgctggtggcgtttctgtcaatgccagcgtcctcctatataaccggtcaggtcatatgcgccgacggcggtcgctgcctttcttgaagtggatggtcctgattcctgaaagatatactaattacctgctacgttgagagatatggaagaattaatggaatttgtctaccacgtgccaaccaggctaggattaatttatctgggaagagcacagattgctgggtgtgtcaaaatgatagaagttacgccacaatattttaaataagtctgggaaattaggtagaatagtttgtcgggacgcgtctaatgtgggaattcccatggaacagaagatcgatctggtttctaagactaattaatcttataaaaaaaaaaaaaaaaaactcgagcctcgtgc

SEQ ID NO: 803 - DNA, 849 bp, Oryza sativa
  Clone ID: PAT_MRT4530_100730C.1
atgtccgcggcggtgtgcggcaaacgggcctcctccttcttcgaggacctcccccattcgccgtcctccccgccctccaagcgcgcctgcttccgtggaggttcctcgccctcccgcccgctcgccgacccggccctcgtcgcccagatccgcccgcggttcccctccgtcggcctcgaggttattgagaacgcgttggaggaatgtgaaaacgattttgattcagcaataaagttcttgttcaatttgcatgtaggacccacagaatgtaatgtggatcctatttatcaatctccatcaggaatgtctactgagcttcaagtggctgatgaaggtattttggctggtaatgaagctgctgtacctataggaaatgctccctgcgctgataactttccatcaagcagcacccagtgggttgagattcttgtgaacgagatgactaatgcctctaacatggatgatgcaaaggctcgtgcctctagagtattggaggtgtttgagaagtccatgaccgctcatgttggtgcaatggggagctttcagaaggttaccaaggtatcgttgttcctactgggtaacctagtggaaagctctgtgtataaggaacagtttgaagcaataaccagggaaaatactattctaaagaaagccgttgcaattcagcacgagcgccaaaaggagcatgatgggagaaaccaggagattcagcaactcaagcagctggttgctcagtaccaagagcaaattagaagcctggaggtaaacaactatgcactgtccatgcatcttaggcaagctcagcaagccaactcgattccagggcacttccatcgggacatcttctga

SEQ ID NO: 804 - DNA, 261 bp, Oryza sativa
  Clone ID: PAT_MRT4530_100731C.1
atgaccgaagaaaactcacgtggatctggaacgaaaatctcggactctgcaaaagcagaaccctcgaaatggagtgaggcgccgcaactgtttgatgtcaccggagagccacccccacttccagccgcagccggacctgcggacggtgaggccttcggacagagtgggtcggccgtcggcggcgctcgacggaggagagaggcggcggcggcggcggcggcgcgtgacggaagggttgttttgggccttggtggggtttaa

SEQ ID NO: 805 - DNA, 327 bp, Oryza sativa
  Clone ID: PAT_MRT4530_100732C.1
atgacgcggacggaatttcaggtttgggatgagatgggaaggacaaaatatacgtcttccgctggttggggacgcggaaccgcgctgtcgacgcggctcgaagacgtgggatcgactggagggggcggttccgcagcttcaacacgtgtgaccgggacggtcccgcgccgagataatgcggcaccgctcaacccgcgactaggccgtgtggcaccaacgcggtaccgatgggagcggacgggagtgacggcggaatgcgtcagactaggtcacggtcccgcggaatggttaagcgggtccgccaaatgcaaacgatcaaacacataa

SEQ ID NO: 806 - DNA, 421 bp, Oryza sativa
  Clone ID: PAT_MRT4530_100733C.1
ggccgctttttttttttttttttcgatccacaacacacaacaacataataataatatattagtttaaacacaccgcagcataatacagtcttttagacagtagttctttttccttccctacgatcacatccctctgggatcgatgctgggtggtactactactatttaagaacttcgcgtcgatcttacataacagacattacccacataaaaattagtactcttggactaacaccaaatgcacgatgcctcatacaaacagcgaactgaccaattgttaaactgtctcctcagtcttcactggccgaggcaataacaaacacacatcccaagaagccaaacgcaaggccagcaccaccaaccgtagacaacgctgtaatcataggtagcctcttgatagttctttccatgtcttgcacgg

SEQ ID NO: 807 - DNA, 4606 bp, Oryza sativa
  Clone ID: PAT_MRT4530_100734C.1
cagtagcctaggaggcttatttatgatcataggcagattacacttattggcgataaaataagccctataaattagtgtattgtgagtatgaaagcaaataataaaaaaaagggcgtaacgtgttatacatgtgccactgtccgattatctaactgtacatcactgccaggtagacttggctcaataatatacatatagattaattcctcatcaataccttgtatgcctcattcagcagtagggtgtagtcatgcatgacccttgtagccagcaatatcaggatatggtgtcgtttctggagcttcctgtaagcctccttgatctctacgtatagcttcccttccttcactgcaccctcaacatcctgtggggacccataaagctcctcaatggcatgaccagcccgtgcaatgctcgagaggatagatttttggaatccctgatctgtaatgagggggtcggtggtgtagtcgagtatgacttcatcttcctcatccatagggacactgaaacaagcagtcagcttagttgtaatgccaaataaattcttgagcgaactatcatacagtcctgctccagcatacccttctaaatcctcaccgttggaatctgaacgaaagatgattgatctctttatgaagagaccaattggcttgcttgggaaacccagtaccttgggagagtcaaggtcgtttttcttacatacaaagctcatggcgcgaccaggataggctcctacaagtgtttctccaagccctttcaccacttcagcatatatctcagacgaatctcccgatgatgggttagtagtatgaatgacaaaggcatagtctgcattgacaatttcttgtacaagtacagccatggaaaggtagtcatgatcaagcttcaccttacgagtgctaaaatatgctctttcattccattttgacgcccaaacctttttaattgccatccatgcttgctcccaacgttggtcaccttcatctccaggccagggcattccagagcctagcatcttctccttcagttccttgatcagttgagtaggagcagttaaattgagaacagttttccgtatttcgcctagagcactaaaatcatcttgagcaagttttcccttcagcatttgtatggtttgcgcgacttccttattgatttcatcagacaaaaccttctcaaaggtcccaaatggaatcgcaactgatgtagggacaccaacccatgagggtacttttcctttgaggtatgctacgttgcgagacttggccccaaccatttcctcagagaattcttctgctgatattgcatattttccaagaaacttcttcttgactaatgacacagatggcactgcctggccagcttctgcatttagagaacctgattgcagttcactctctggaatctccctataggtgatatctgcagaagtaggtttgaaggaaaacactttcccatcatgtccttggagttcagacaaggtgttaggatcaaagcatgttgcaaataaaaccttgcaattccttgctcggactgatacatgggagagaacatctggcatatcaggtgtaataacaccaacaactccatctggtatttcttcctctcccttgacactctttgccacaaggatagttggtttatcataggatttgttttgaacagcaagcaattcatcaaccactacaatgtaacctgatacttcaactgggcttataacctgccaacttccaagctgtgcaacattcctaagaacaggatcaatccgattcagaagagcagacagggtagcagctgatccaccacgaataatttcttctgtaaagatattaactgcccattggtcaatgttaagtaacgagccaagatattcagctgagggctgcatcaaattatagtattgttctcccttgcttgcaagggcaagtctggttctgtccagaaatgctttagcatagagagcccattggttgtttttctgtttagccatttccaaggcttgattccatccctttaagcaatataggatatcttcattgtcgtcggtggataaagcaagattttcaaggacaagactgatgaagtacataattttctctggttctacattattgagctcctcatatgatctttcaactgctgtcctgaaagtagaatcaagagcaatgtctaaaaagataagatccttcatgcgttcaggagagccaaggagcaaagggtgtagttcagctcgagcctccaataacccctcaagaagtggttctgctgatttatcctcaacatggtcaagtacaaattcaagcaatttaggaaatccagatggcaaacccttcactggattaatctgaacaccaaccatgaaaccttcaccctctgatttgtatcccatgcaagttgctatagcagattcaagatcagcaccagaatgcactgccattcgcagtgattgtatcagggtaccctccatcttgaggcttctcatataattgcccaagtcacggagtaagccatctttctgttcactcctgaaatttggctctgaatgaatcggtcgatcatagctcaatagacgctcttttgttataccatcttttttcaaggtgtcccagtaaacaccaatatcaaaatcactcttgatataatcaagtagggcctggcagatcactacatcatctgggcttgtattgttgtgcagtttctggtgccactcctccatcattccacctttgcagtcattatttctctggattactaatatctcatcacgaatgcgttgaccaacatcaccttcacctccccgaccaacagcagacattatcattcttaagatctcctgatattgtgggtaagttctgtacatattctcaagatcatctgtaaacctatcttgtgctttgcttatctcacgtggcttcacattgtagttcttgttccatattagttgccttgtagccatgaacctaatccaaacaaaaattccaataatacccaataatccattatctcttgcttggtcaactagatctgctgcaatattgaatctgtgcataagagatcgttgggcatcttcctctagatctgctattctttcaagcaaggccttagcagtgcctttaccagcatcaccagtatcctgacaatgcagaccattcaattcatattcactgaatgaagtttcacatgccttgtctagcaatgatgaaccagatggcaatatgcttgagggaggtgccttcacagttacaaagcaccccatcagtacaggcccacattgtctgccactctccattctcttttgacaacgcccagtgaagtataagtggctccatatagtttgttgccaagtgaactttggtttttccagtatctccttgtcaccgaacttgaaaagctttctgcttagaacctcacagttatcctgctcctgtaatgactttgtgaagagatccagaacagtgggttgtttaggagtctctacttgcgcttccataacagtaggcttgtgttttttaagtagttgcacaatatctcgttttttccgctgaattctttccacagaaaagtattttttgtccttcagctgcttggaaacttttgtctcaatgttccctttcaaaattttgttcctcaactgctcaactgaggtccccttatccaactcagactgcagttccttccttgcttcctcaaactcgaccaattgcttctctggggcataatttggcttgcctgctttctcccaccttatgtaagcctggacttgtacaagttcctctgggactttagtagtcacagtgctttcagatgcaggagcattactatcagttgcctcaggtgtctttgtcagtttcgctcgtagcttctccaaagaaacacccttgtttaattcctctatcaactcagttcgtgctgcttcatactcctccgaagatatgattgtatctgcacaagatcctctggaaccacagtagaagaagtagcagtagatgtaccctgcccttgatattggctcgcttgtagctgaatttggaaattctggccattgtttttgtacctgtccaaagtagagtgttgttatttgatatcttctgcattccaagaaacagggtaggatgggtaacccaaaaagaactgaccaattattccgtgcctcatcaaatatgaggaactcaatggcttgcactgcaggatcatctatctcaattttcagcgtggagttatcacctgactttataaaaggcgtcctaagagccctgttcttgtacactgtcgtgccatctggtttccgggatggtaggagccattctcctctatccgggcgaagggcgccccaatgcagtatcagggagccgctggtgttagttgcctctagattgatctccaccaccgaaccctgcggtgctgggttcaatgtcaccttaagctcggagttggcatccagggtgaaccttccgacaagcgctcggccgcagcagctgccgcggagaatccgctcatctgcacgaatatcaaacagctcgatcgtaagggcagtatgggatggatggatggatggattcggcttccgggatccggatggatatctctccttccttagcgccat

SEQ ID NO: 808 - DNA, 400 bp, Oryza sativa
  Clone ID: PAT_MRT4530_100735C.1
ttttgatcgatcgcccataatcgcaggcacggctattcgaatagttttactctagccaaaggtgcacaactgtacccataagacacaatccaccggcatgtcaccgcatcaggcctgacacgtcaccatgtcgagtgattgtgacaagacccttcatataactccccctgaccaagtacaccacacctcaggtttcgctcccactcctcaacaggcagcgggcacccccctttcgtgccgcggtgaatccggaagccgatcaaccggacaccccggccgacccaactccatcacgcccaccctcgcctgggtacgtcggctagagaaaagctacactataagcccagccgttgcccacgctggcttgtggtaagtacgataagttcttccagggcatccg

SEQ ID NO: 809 - DNA, 975 bp, Oryza sativa
  Clone ID: PAT_MRT4530_100736C.1
tttggctctgaatgaatcggtcgatcatagctcaatagacgctcttttgttataccatcttttttcaaggtgtcccagtaaacaccaatatcaaaatcactcttgatataatcaagtagggcctggcagatcactacatcatctgggcttgtattgttgtgcagtttctggtgccactcctccatcattccacctttgcagtcattatttctctggattactaatatctcatcacgaatgcgttgaccaacatcaccttcacctccccgaccaacagcagacattatcattcttaagatctcctgatattgtgggtaagttctgtacatattctcaagatcatctgtaaacctatcttgtgctttgcttatctcacgtggcttcacattgtagttcttgttccatattagttgccttgtagccatgaacctaatccaaacaaaaattccaataatacccaataatccattatctcttgcttggtcaactagatctgctgcaatattgaatctgtgcataagagatcgttgggcatcttcctctagatctgctattctttcaagcaaggccttagcagtgcctttaccagcatcaccagtatcctttgtattttttgcaactttggtgctgaaatccaagtaaaagtcagagccattatttttcatccatgtttcaccagaccggagaacaaagggcatccgcttgtatccaccatcgtcaagctcgatctcaacaacctgacaatgcagaccattcaattcatattcactgaatgaagtttcacatgccttgtcagcaatgatcggacgtggcaatatgcttgagggaggtgcctgccactctccattctcttttgacaacgcccagtgaagtataagtggctccatatagtttgttgccaagtgaactttggtttttcctagagcaacggtggtaattcccagtatctccttgtcaccgaacttgaaaagcttt

SEQ ID NO: 810 - DNA, 848 bp, Oryza sativa
  Clone ID: PAT_MRT4530_100737C.1
gaaaattttcaacttcttggctttatttaaagggataggaccaaaagcaagcagaccactgatatttacattatcattgcagaagcaaaatccagttgatcaaaataacctttaatggttttcagtagcctaggaggcttatttatgatcatagtcagattacacttattggcgataaaataagccctataaattagtgtattgtgagtatgaaagcaaataataaaaaaaagggcgtaacgtgttatacatgtcccacggcccgtatatcttactctacaacattgcctgattgacttggctataaaatatacatatagattacatctgtggtcttgtctgtactacgtatagcttcccttccttcactgcaccctcaacatcctgtggggacccataaagctcctcaatggcatgaccagcccgtgcaatgctcgagaggatagatttttggaatccctgatctgtaatgagggggtcggtggtgtagtcgagtatgacttcatcttcctcatccatagggacactatcatacagtcctgctccagcatacccttctaaatcctcaccgttggaatctgaacgaaagatgattgatctctttatgaagagaccaattggcttgcttgggaaacccagtaccttgggagagtcaaggtcgtttttcttacatacaaagctcatggcgcgaccaggataggctcctacaagtgtttctccaagccctttcaccacttcagcatatatctcagacgaatctcccgatgatgggttagtagtatgaatgacaaaggcatagtctgcattgacaatttcttgtacagtacagccatggaaaggtagtcatg

SEQ ID NO: 811 - DNA, 459 bp, Oryza sativa
  Clone ID: PAT_MRT4530_100738C.1
catatttagctacaagcgagccaatatcaagggcagggtacatctactgctacttcttctactgtggttccagaggatcttgtgcagatacaatcatatcttcggtgggaaagaaagggaaagcagtcatatacacctgagcaagagaaggaggagtatgaagcagcacgaactgagttgatagaggaattaaacaagggtgtttctttggagaagctacgagcgaaactgacaaagacacctgaggcaactgatagtaatgctcctgcatctgaaagcactgtgactactaaagtcccagaggaacttgtacaagttcaggcttacataaggtgggagaaagcagggcagccaaattatgccccagagaaacaattggtcgagtttgaggaagcaagggaggaactgcagtctgagttggataagggaccctagtgagcagttgaggaacaaattttg

SEQ ID NO: 812 - DNA, 966 bp, Oryza sativa
  Clone ID: PAT_MRT4530_100739C.1
atgcggtccacgccccctcgattctctctgctttccgcgctgctgctgaccgacgacggccgcgcccctgtcccggtctcctcctcgtccctcctccccgcctctccactcttccagaacatcgccaccgccaccgccgccgccgccgccgctcgccggccacgaccgcccccggcccatctacacctccgccggatctcgcagccgcgctccccccattggagggagatccgttccagcgcgtggattctactcaacccaatgctgttaacagagcccgtaaatcagaggaatgttgtaggacatgcaagtggtgcagaattggcatctcatgccactcaagcagatgaagcaacagagcttgcttccagctgtgattgtgcagaagtgccagcttcacagcagatagtttctgaatcaagtacagcaggaagctccacagagcatctagtttcatgtgaaatcaagccactgggtgttgatgaagacattgaaactattgatgctaacgaagaaacccaccttgtcattcaagactgtccacaatgccggatttgccttgataatgaaggtgatgacttgattgcaccttgtcattgcaagggcacacagaaatacgtgcatcgatcctgtcttgataactggagatcaacaaaggttgttgctttattgggtatgctagtatacagattttatggagatgaactacgagaaatgtttggttatgaagagcatccatatgctttttatgcaatggcaatattggctattgttttggttggtttgctgtatggattcttcatagctataatatgtgggcagaggatcacagaacggcattaccatgttcttgcaaagcaagagttaaccaaggagtatattgtagaggatcttgaaggaactgatggagttcctgaccttgatcctaatcatgttacagagctgaggattctggggctatattga

SEQ ID NO: 813 - DNA, 429 bp, Oryza sativa
  Clone ID: PAT_MRT4530_10073C.1
atggcgccggagcggccgcggagagaggcgttgtttcgccacgcaccgacgcacgccaggtgctcgacgagctgtgctgtaaaaagactgggtaaaggtactttccaatgccggatctcgagcttcgccacaccgttctccacttttccgttgttccctgcattgggagtggcctaccattggcatccagatgtggatgctgttaataacaacatcgtgctttggtcgttgttggaacttggaacaacgtccaataacctgaggcagatgcccttagcccctgatctacccagcaggccagcactcactgactatcccaagcccaattgcccaaatgcctttccattttcgagtaatatgtccttggtgatatccatccaaagaacaacattcactactagaaaaagtattttcgcagacagacaaaag

SEQ ID NO: 814 - DNA, 195 bp, Oryza sativa
  Clone ID: PAT_MRT4530_100740C.1
atgactgttacatacgttttgctgccgctccccgccaccggatccggcaccaccgtctaccgccttctaaccaatcacgccatttgccgtgccgtcaatgccaatccaccgttcgatgccgaccccgtggctctagtgccaccgcctcgccacccgcccaccatcggtgctctgcctccacagctacccgtctaa

SEQ ID NO: 815 - DNA, 748 bp, Oryza sativa
  Clone ID: PAT_MRT4530_100741C.1
tatagagcacttccttctgaccacatgtactcagagaagcatcaaatactcttttctgaatcaagtacagcaggaagctccacagagcatctagtttcatgtgaaatcaagccactgggtgttgatgaagacattgaaactattgatgctaacgaagaaacccaccttgtcattcaagactgtccacaatgccggatttgccttgataatgaaggtgatgacttgattgcaccttgtcattgcaagggcacacagaaatacgtgcatcgatcctgtcttgataactggagatcaacaaaggaaggttttgccttttcacattgcactgagtgtcgggctgccttcttacttcgtgcaaatgttcctccagatcgatggtggttgagattgaagtttcaacttctggttgttagagatcacacgttgattttttttattgtacaactggttgttgctttattgggtatgctagtatacagattttatggagatgaactacgagaaatgtttggttatgaagagcatccatatgctttttatgcaatggcaatattggctattgttttggttggtttgctgtatggattcttcatagctataatatgtgggcagaggatcacagaacggcattaccatgttcttgcaaagcaagagttaaccaaggttggttaaagaacataaagatggaaacacaattttcattgactgatcttttcattttcaagaactacactgtgtcattgaaata

SEQ ID NO: 816 - DNA, 1395 bp, Oryza sativa
  Clone ID: PAT_MRT4530_100742C.1
caaagctccatccgttctgaaggctttgtggccgagttctcctcccccacctcctcctcctcctcctcctctgtagccgagctgaggccaacgcgagtagtgacattctcctgcaatggggtgcaagtcgtgcgagaagcccaggccgaactaccggaagggcctgtggtcaccggaggaggaccagaagctccgcgactacattctccgccatggccacggctgctggagcgcgctccctgcgaatgccgggctccagaggaacgggaagagctgccggctgcggtggatcaactacctgcggccggggctgaagcacggcgtgttctcgccggaggaggaggagacggtgatgagcctccacgccgcgctcggcaacaagtggtctaggatagcacggcatctacctgggagaacagacaacgaggtgaagaactactggaattcttacctgaagaagcgagtggagagcggcggcggcaagacgagccaagggccaccaaccacgcctgcgtcagccgcgagctctcccgccgattcagacgactcgcacagcctgcagcagaagccgcacgagccggccaactccgactcgtcggagccggcgcacgagtcgtcgtcggcgtcggccgactcgagctgcctgacggtgaccacggaccacccgcccgtctcgaggccccacgcggcagtgacacccaaggtcatgttcgcggactggctcgacatggagtacatctgtgggcaggtcgcggcagcacctggtctggacgctgccggattcgcggtggttggtggtgctgcaggcgatcagcagcagcagcagcagcaggtgatgagccaggacggatcggttcatcaggccgatgggccatcgtgcggcgtggacgattcttccctgcagcagcagcagcaggaggggttcggtggcaacggcggctgctgggattttcaggagcagttcgacagcatcgaccagatgcaggcgagcggcggcggcggcggcttctgcgacctgctctccatgagcgacttcgacctctgggccgagctggaacgtaccgcgtgatgggggaacgacgtgctcaaggatcgatttttaattagagcttgttaattcatagatgtcccgtggaaatcaaattaaggggtgtttgtaatactactgcattgtaaattatcgcggtgtatttatagagctgtttaaattagcaacatatataaggaagatcagaggcatgataagtcacttctgtacgaatttatgtttgccactttgctttggagagcatgggcaccgacagaaagatggaaaggaagaaggaaagctgtagagaattgcgcctatggatgcaattattttggtttgtttaatgttgaaaaaaaaaaaaaaaa

SEQ ID NO: 817 - DNA, 384 bp, Oryza sativa
  Clone ID: PAT_MRT4530_100743C.1
atgggtacctcgtcgcccgaggtcatccgcttcttcggggcacgcagggtggaagcctcggtcctcccgctgtcgtccccagcctcggtggccgctgtgaggctgtttgcgcgctgcttcacccaagccagcgcgaccttgacatctcagtggacggtgatggagccgctagggcccggcatctttagctggagtgcatggctgatggtcagtgtgatccaaggtgagcttcacctccgaccaatgcgaccttcgagccacctcatgaatgggaacagcggccagaagctcgtgcttcatggccttaaagcttcgacgggaggcgtgaatgcatgcccctccgtcgatggtggtgatagcatgttggggctcctagaagcctag

SEQ ID NO: 818 - DNA, 516 bp, Oryza sativa
  Clone ID: PAT_MRT4530_100744C.1
atgcgcccgtcaaaggtgctggttaccggaggagagaaagacctcctgagcaccaccgtcgcacccacctccacctcccaagcgccatcatttgctcccaccggaactgaccgctgcaaggacctcaagaggcggcctccaccccgagcttatttcagcgtcgacatcgccttcgatcccgagctccgccaccaatcttccaccgccttcgccttcgcctccgcgctcgacctccaaacacacattcacatccaaacacacgaggcggctgctgatgaccttggagcagaggacgaaggaggaggagcatggggcggcggagagatggtggtcggcgaccttgggcggtggtgggcgaaggaggcggcggcctcgagctcctggaggctagtggcgagcgaacgtgacagtgacgcggtcgtgggaaggaagccgcaacaaccggtggttggcgggctggtggaggaagcgagaagagaggaggaagagagagtggaggagatggggagggagtag

SEQ ID NO: 819 - DNA, 522 bp, Oryza sativa
  Clone ID: PAT_MRT4530_100745C.1
atgggccctctttccttcttcctcttcctcctcccttctctctctttttctctctctcccatttctctttgtcttcatctacaggctgcggcgggcccgagcggccgcggcgagcggaaggggaggcggcgacccggcggcggcgacactggaggagtttcttgcttgctgggtcaaagcaaaaagaagaaggctaggaatgccattaatgacgacaggattcttttgagaataagcggcatcggcctggcatgcggcggcggtatgaatccgtccgacgagagcgtgcaggtggagcgcgtcgtggtgggcgaggagctcaagggcgtcatactctgggatggcgcatcacccgatgagcggcgtctcctcctgccgccgttgggtagccgcctccgctcccgctcgccgctgcggccgctcggaccctcgagcgcccaccgccgcctgcagacgaagaagaagagaaataggagagagaagggacaggaagggaggaggaagaggaagaaggaaagatga

SEQ ID NO: 820 - DNA, 742 bp, Oryza sativa
  Clone ID: PAT_MRT4530_100746C.1
tggatccccgggctgaggccctgcctctctctctcttccccgcgcacgctacgttcgttcgctacgcacagcgcccccacgccacgcttcggttcttctactggtgcacagcacaaccggggcggtgagcttgatgcatggcggagtcgctgggactgggagcgctctgccgcggcgggggatggtgctacgccgtgatctggcgctccgaccgtcgcgacccacggttgcttacgatcggtgagttccacagtgaagatggtaccagaaatgttgttgagaagatgcttaatcaggtccatgttgttggagaaggcatcatagggagagctctagtaagtggagagtgccaatggatttctgatacctcctttagttttgcccagacaagtgatgcagataaccaagacttatttcagggctatacttggtggcagcatcagttcctgtgtggaataaagactattgcagtaatacctattgcagatcttggtgtcgcacagtttggttccatgcaaaagatttctgagtgcttggagtttctggatcaagttaagggcatattttgtcagagggaaatcgttccgtgggatctttctgctgaagaaattcaaagaaatgttctcccatatcatcagcaatttcaactcagttctctaagtagtgcagatggtcttacaaatatcaagactgacccagaaaaacaagaaacttctggagaactcagcaagtgtagagtctc

SEQ ID NO: 821 - DNA, 216 bp, Oryza sativa
  unsure (1)..(216): unsure at all n locations
  Clone ID: PAT_MRT4530_100747C.1
gcgaaagcgaaagnnaaccngcaccaaacggcgacgcgcacggcggcggcgnntcgagcccaacgcngacgagcncncatggcgggcntgcagaagccggncaagcggctggggggaatggcggaggcgctntccatagccgcngacctcggnttcnccgnncntccngngnaggaggntcagggtagntnagacaaaagcgatgatctagtaagg

SEQ ID NO: 822 - DNA, 741 bp, Oryza sativa
  Clone ID: PAT_MRT4530_100748C.1
atgggggacatcacgagacaagaaaaacccaccggatccggcatccactactcaatcggcctcctcgtctccgaccgctccctccgcctaaagaacgagaccgccccaatccgctcggcaccgaactggaccatcgtggcagctcgatcctacgatgacgactgccacccaacggcgaaggccgatccatcgccagtgagctcgggggaattggatccgtgccggcggactcggtggggggacgaggaaggggagctgaggagagggagaggcgccgtcggtgggtggtcgaggagggggatcggcggagaaggagggcgtcgctgagtggcggaggagaggagagaaaaccgagaggaaagaacgaaaggaaggaagtagcagaaggaggaaggcgatggatccatcgagagcatctgagcacgacgaggagaaacatggagaaagtgacactgccgcctacgggaacccgccgcccatcgagggcgcggccgccgccgccgccgccgctaccgcctccgccggcctcaccgccgccagccaacgatggagatgaacatggtggcggctggatcgacgcgaggaagcagcaaccacgacttgggccagtggtggatctggccggcccgtcgccgtcgacggcagaaccgcaggatccaggcgagcaccactgccggccgccttggtgagtagcgagagggacctccggtgaacttattccttcctgagcatttggaagcc

SEQ ID NO: 823 - DNA, 968 bp, Oryza sativa
  Clone ID: PAT_MRT4530_100749C.1
cccacgcgtccgcccacgcgtgggcggacgcgtgggcccacgcgtgtgcacacacggatccaaaagaatccgtcgaggccacagattgttccagagtttttgttttcctcttctccccttcgcgttagcgagcatgtgtcccggaggcagatacgcgggcctcgacgtccccgcctgcgcggcggcgggagacctgaggccggcgttcgacgtgctggacgcggaccgcgacggtcgcatcagccgggaggacctcaagtcgttctacgccagcggcgcggccaccagcgagcggttcgacgacgaggacatcgccgccatgatcgccgcagccgacgtggacaacgacgggttcgtgcagtacgacgagttcgagcgcctgctggggcgcgccgccgcgggggcggggtgccggcccgcgatggaggacgtgctccgggtgatggaccgcgacggggacggcaaggtggggttcgacgacctcaaggcgtacctcggctgggccgggatgccggcggccgacgaggagatccgcgccatgatacgcgtggccggcggcggcgacggcgatggttgcgtggggctcgaggagctcgccatcgtcctcggctgctcgcccacaaattggaccgcatcttctcaaactctgcattgatgcattgattgggagacttcaatttgttggttggtggtgttgtggtgatgtgattgttgagcgattttcgagtttcgagaagcgtgagggatgtttaattgggcgtaactgctcccgaaaataggggtattaaaaactccccgatgcagcttcttccatagaaaaaagttgaaaagtttgtattgaagctgagcatcgatggtgtgagttgggggtaggttttatttggaactaatgagatgtttcttttctcaatccttttttaagaaagtttctttttcaatctgaaaaaaaaaaaaaaaaaaaaaaaaaa

SEQ ID NO: 824 - DNA, 391 bp, Oryza sativa
  Clone ID: PAT_MRT4530_10074C.1
agcggccacccttttatttctttttttttttataaaagaaaacaattgccaaaaccgatgatggcattgacgcaaaaagaacacgaccgccaaaacccaaatatgaagaaagaaagcaagtgccgtcccaaaaaaaagaaaaaagtgaacccaaacaaaccatgacagctacataaattccatatagaggagccgaactacagaggttacaaggggtaaaagaaacccaaaaaggggaaccaccacttggcagcagtcttatcaagggaggactaacttaatttctgatgccacaaagggtaagctcagctaaaatccctcaaaccctcctttaaacacatccaaggacttctttcgagcacccatcactggaaccttggcctgaaaggct

SEQ ID NO: 825 - DNA, 1414 bp, Oryza sativa
  Clone ID: PAT_MRT4530_100750C.1
aacttgaaagttccagacaagtccaaatatcttacatattgaccaaatattatcttcctgggctcctggtgaactgccatacccaccatcacccccatagctgctcaagtaaccactagcacctggcatcccattgctacaaaagcctttgggtttagtgaaccagttcaagcacctctactgcgggggagtcaattgtcactggatccggcggccacagcagcatccttgttggaaaatccatagaggtccaccttcgtccgacaatttgaaccctcctatccggactaccgaacagctctgcttgtacaactccacctccagattcgtccactgcaccatatccaatcagaccaaatagtgatcatggaggacattacgagacaagaaaaacccacaggatcctgcatccacgactcaatcggcctcctcgtctccgaccgcttcctccgcctaaaggacgagaccgccccaatctgctcggcaccgaactggaccattgtggcagctcgatcctacgatgacgaatgccacccaacggcgaaggccgatccatcgccagcgagctcgggggaattggatccgtcgccggcgggctcggtggggggacgaggaaggggagcggaggagagggagaggcgccgtcggtgggtggtcgaggagggggatcggcggagaaggagggcgtcgctgagtggcgaaggagaggagagaaaaccgagaggaaagaacgaaaggaaggaagtagcagaaggaggaaggcgacggatccatcgagagcatttgagcacgaggaggagaaacatggagaaagtgacaccaccgcctatgggaacccgccgcccatcgagggcccagccgccggcgccgctaccgcctccgccggcctcaccgccgccagccaacgatggagatgaacatggtggtggctggatcgacgcgaggaagcagcaaccacggcttgggccggtggtggatctgaccggcccgtcgccgtcgacggcagaaccgcgggatccaagcgagcaccactgtcggtcaccttggacccttgcacggcccgtggatggccgggccgtgcccgtgccggcacggcatgcgtgtggcccgccgtgtcagtacgggcccgtgaatgaaaaatgggccgtggacggggcacggttggcccaggaaccgaaatggcgcggagggatgcgatgcggacttgcggaggtggctggcgggctgggccatcagctaggaggggtgctcaacggacttgcggaggcggctagcgggctgggccgccgtgccggctacaggttccgccgtgcctcgggccgcccgttttggcccggcccgtttggccacctctacgtggaacaagttgaagggcagaattggactttcgcataatagacagttttcgcagaga

SEQ ID NO: 826 - DNA, 216 bp, Oryza sativa
  Clone ID: PAT_MRT4530_100751C.1
atggcgcaggcagacaagctggaggacagtagagccattgagcttgaggacggcagagtcagcgagctccgagggcggtgcggtgtgcaagctcgacggaaccggctgacgagttcccgggctcgtccaggcgaactcgaggtgtggctggttttcaggctcaagaatggaggtgcaccagggctgtggcatggccgattgtctgagctcacatag

SEQ ID NO: 827 - DNA, 222 bp, Oryza sativa
  Clone ID: PAT_MRT4530_100752C.1
atggggatctcgctgaggccatggccgctggagatcatggtacgggtcaagtatggtgcagcgtggcacaaggttgtagcctcgcgcacggtcgggcgaggacgccactgccgtggccacctgacggagcagctcctccatcttggtcgcgtggagttggtggaactcgtgttccactgggcgaggccaacacagagctccctcatcatgtcgagctgctaa

SEQ ID NO: 828 - DNA, 348 bp, Oryza sativa
  Clone ID: PAT_MRT4530_100753C.1
atggtgctcgtcgccggcatcatcatgttcgtgctgtggctcagcctccggccgcaccggcccaggttcttcctcgacgacttcaccatccccaacctcaaccggcagtccggcgccgtgaacctgccggtgaggttcaccgtcgacgagcgcaaccccaaccagaagatcggcatccactacggcaccatcttcgggtcggtgtactacaacgacctgctcgtcgcgtcggggccgatgtgggacaccagggagcaccacatgaaggtggactgcgagttcggcctgcgtggcgacggcacgctccagcagggggacaagaacaagcagtgtacgctctacttctag

SEQ ID NO: 829 - DNA, 159 bp, Oryza sativa
  Clone ID: PAT_MRT4530_100754C.1
atggtgttcagaatgacgttcacgaagcggcatatatacgcccgatgctcacatcaagtcacgctcgacgccgatgtcgccgagtcggctcggtcgtcttccgccgcgctgccatgctgccgctgcaggcagatgcatattctttttcatcgtgagtaa

SEQ ID NO: 830 - DNA, 632 bp, Oryza sativa
  Clone ID: PAT_MRT4530_100755C.1
gtttaagcagcagctcgccgccggcaataatgccgccgtaccggctgccgatgtaccgggagaggccggcggtgaggtgcatcaacttcctctgcgccgtgctgctcaccatggtgctcgtcgccggcatcatcatgttcgtgctgtggctcagcctccggccgcaccggcccaggttcttcctcgacgacttcaccatccccaacctcaaccggcagtccggcgccgtgaacctgccggtgaggttcaccgtcgacgagcgcaaccccaaccagaagatcggcatccactacggcaccatcttcgggtcggtgtactacaacgacctgctcgtcgcgtcggggccggtggtccagccattctaccagcagcccaagggcgacacgccgctggccggcgagctcacggcgtccgggccgacgcccggcgacccggcgtggcagcggttcgccggcgacgcggcggccggcagcgtcgcgctccggctgctgctcaactcgacggtgaggttccaggtgcagatgtgggacaccagggagcaccacatgaaggtggactgcgagttcggcctgcgtggcgacggcacgctccagcagggggacaagaacaagcagtgtacgctctacttctag

SEQ ID NO: 831 - DNA, 1191 bp, Oryza sativa
  Clone ID: PAT_MRT4530_100756C.1
tgcgacgcacccctcatgctgtatcgggggatggtgtggggggagaggggacacaggggatccgaggcatactagaagacactcgcaggagttgtgggcaaggtattttatggggggaggtgtatcccgggccgggttgcagcccggttgccacgggggggaacgcgggccgaactgccgccgcgccccccccgccgttgtccccggggaggttgttgtccccgggccaaagtggatccgccggccgccacgggatccccggctcccgccgccggcggccccgggttccgccgcccactcccgccgcgggatccgggggggacgaggcccgggtcgccgccccctttgttgttgtcgtcggggtcggccccgcccactccctctcctccaccatcacaaccacttcctcacccacagatcgatcctcctctcttctcccctccactctcctccccttcctcctccctcccctggagacggatgaggccgctcctccttcctttccctttcctcctccctcccctcctcctccttccttcctcttcctcctccctcccctcctcctccttccttcctcttcctcctccctcccctccacgccggtcgtcgtcgtcgcctccgccatcattgcgccgtcgccgccgccactgccccgtgccgtatccgccgccgccggtctcccccctccctcctccggccagatctgggagggaggggggaggggagccccccccgggccgcattgtcgtcccggtagtcgccgccgccggcctcccccttccctcctccggccagatttggaggggggggggaggggagccgccgccccgcgccgtcgccgccgccgccgccccgtgccatcgtcgccgtagtcaccgccgccggtctcccccctccctcctccaaccagatctgggagggaggggggaggggagccaccgccgggccgcatcgtcgctgcctccgccggacgccactgccgccgccgccccaccgccttccgcgcggccccgcgcgcgtagctgccgtgggagagggtgagggcccgaggggaggagaagtgaggggaggggaggggaggggaggagagggtgaggatttgggacttagagaaaaatctactcctattccagtctattgggtccaagtttgttcctagctagatcagaaagttctccgggctttaatatc

SEQ ID NO: 832 - DNA, 1641 bp, Oryza sativa
  Clone ID: PAT_MRT4530_100757C.1
ctaggtgtcagatatcaagaatgcctgaaatgcaagctttctacccatgttaggaagcccctcacttccagcattattactgtgtcctccaggcaaggtaaaagcagcggcgaaggtgattgttgcaaggaggattgctactaaagaagtgttgcttgtgtatgtttgagtcaatgtccttatatccttccttgctttctcagttacttgatctttgattgtttttataagattatagatttcacctttgtcttccgggtcagctttcaacatacgcatggagacttcactccagttgagcgtcttagcatggtcggcggcatcatttggtacccagattggggggttaccgttgctgtcgagcactgtgacatcctgggctttacattgcagtaaaagagcgacgatcttcggatggcacttccggattgcataatgaagggcagtttcaccgtttctgtctcgcatgttaatgagtttccgcagctcctttgactgcaaaacaaattccacaaactttatgtgacctttttgtacagctatgtggagacatgtggtgccatcgttttcaactagaaatggagcatctggacaatgtttaagaatctccatagcaacaccaacatggccctggtatgcggcactaccaagaagagggataccacttgtgctgattatatatcctaaagagaaatcatgttccaacaatacttttagcacgtcaatcttgttctcaagcacaccaaattgcattggattaacccgtgcgctgttctcttctcttgccaatttaggacgagtctcaataatctttttggcgatatcagtattgttatttctaaaggcagcatgcagagcattgtatccggaggttccaccgtgagcagaatcaggaacctccaacagtttatcgaacacatcggtgaaattcctcatcaccgcgatgaacatgggcgattcatcgtgtttgttaacagctttcgtcaaggcaggctctttttctatcagctcgaatgcaagcttcctgtgtcccctgcggatggtgtggtgcagcgcgttgcatccttgcttgtcttgcctcaccatcgcctccctcgtatcaagatcgtcatggcggcggcagtagtaactgagaagaaaagaagctaaagcgacattgccgctttttacggtggcgagcaacggcgtctcgccatccgcgtttacagtgcagaggagggacgggttcagcatcaagatatccttgcagaattcctcgtggccatgggccgatgctatgtggaggcaggtgttcccctgcactgtccttccaagcagaaggcttgggtcatgcagagccggcttcacacccgatgtggctgctttcagcagacctctgtccatcactggcgaatctgcggttgctttgctgtctggaataggcctaagcggctgggatggccccttgggcctcttcaaagttgggcttgttatggcgaagcccccatccttcagcatacacccttcgcccaatgatgcatttggtcttgccagataccaacgcgattcttcagccttcgccatctctacttcatagtcttcgccatgggacttcgcccagatgatcttatcgtcatgggcctgaatcctcacaggttgcat

SEQ ID NO: 833 - DNA, 319 bp, Oryza sativa
  unsure (1)..(319): unsure at all n locations
  Clone ID: PAT_MRT4530_100758C.1
actgaacaatttaaacttgtatgttttaaacattgttttatcctaataaatatatcattttatactttcanacaaacaacagatcctcccatgcattgtataaacggtcccacatgctactacaatacacctaataagaacttccatactatcaatgacatgctacaatacatcccaccatactttacaaacaaaaaatggtctcaaagaacaatcaaacactcaaccttactagaaaaaacataaatcccaccccctccataaaatcataacccccccacgcccattttgtaattcccaaacacccccccttttcctt

SEQ ID NO: 834 - DNA, 1890 bp, Oryza sativa
  Clone ID: PAT_MRT4530_100759C.1
atgaacgcggcgggtgcagacaccgacaccgtcctgcggaagcggcaactcaccgtccgcacgacgagcagcaacggcggcaatgggttccgggtcggcggcggcaagggggcggcggcggcgacgccgccggagcccgtcagcccctccgcgcggctcctggaggactttttcatcgtcgtggtgatcggcattgccacgccggtgaacgaccccgtcgcccgcgccggcatcgccgcccagttcgcgcgctacccacgcttccgcagcatccaggtgacggatgaggacggcggcaacccgcggtgggtgcggacgacgctgaacgtggacgaccacatcatctacccggagctggacatggacgcggtggcggccgacccggacaaggcggtggaggactacgtggcgtcgctgtccaccaagcccatggacgagtcgcggccgctgtgggagttccacgtgctggacttcccgacgtcggaggcggcggccaccacggcgatccgcgtgcaccactccctcggggacggcatgtcgctgctcacgctcctcatggcatgcacccgcagcgccgccgacccggcgaggctgcccgccatgccgccgcagccgacgcgcaccggcgcgatctacgcgcggcccaggccgccggcgtcggcgggcgcgctggcgttcgctgcgtggctctggtcgttcgtcgcgctggcgtggcacaccgtggtggacgtcgcgagcttcttcgccacgaccatgttcctcaaggacccgcacacgctgttcaagcgggtgaagcacggggagttccagcggaagcgcatcgtgcaccgggggcttagctttgatgacgtcaagctcgtcaagaacgccatgaactgcggcgcgcggcgtctaccattggaggcggcggcggagggcggtggccagcggccggagggcggggtgagggcggtggccacgagtgcggcggcggcggtggcgggaggttggcggcggcgagaggaagggggccgcgacgacgtcagaggaaccgatggcctggtcggcgcgcgcaaggagaggagcagccggcggccgtcggcgcctcgatgcgcgcaaggaggaggcggcggccaagaggagcggcggcggctctgggcaccaacttccttccccccagacgccgacggcggcggcggcgcagacagcaccggccactcccctcccagatctggacggaagaggggagccggccagcagcggcggcaaaggcggcgctcccctcgccctcgggtaacggcaccggacggaggtgacacggacactgacgaggatatacgtttgagaacgatcctccttgtcaatttgaggccaaccacaagcctgcatgcatacgtagatatgatcaattctggcagagaggatgaagtgaaatggggaaacgcacttggtttcataatcctcccgttcttcataggcatgcacaaggatccactagactacgttcgtaaagccaagaaggttgttgataggaagaagagctcgttagaagtggtattcactcatttagctgcagaagtgatcctcaaactttttgggctcaaggcagcagctgctatcttccatcgtatgatctctcatactaccatatcattctccaacatgatcggcccagttgaacaggtggagttttgtgggcatccagttgtcttcattgcccctagcggctatggacctccagaagccttaaccgtgaattttcaaagttacgttaacaccatgatggtaaatcttgccgtggacgaggcacaatttccagattgtcatgagcttttggatgatttttccgaatccctcaggcagataaaggatgcagctttgagcctaggaaagcatcacaccaaggcttaa

SEQ ID NO: 835 - DNA, 234 bp, Oryza sativa
  Clone ID: PAT_MRT4530_10075C.1
atggtgatggttgctgttagagatgtaaacagagaggcaactagggatgacatttcagtcggcaagcagcatacagagcacaccgaaacacagccagcaaagctgggagaaacacaggtgcgacagctgtacacagttgatgcaactactacaaccaaaagtaacacaagctggaggcaggactgcaggagtgggggacaactgctggcgctggaactctttagaatgagatga

SEQ ID NO: 836 - DNA, 515 bp, Oryza sativa
  Clone ID: PAT_MRT4530_100760C.1
gcacgaggacggagagtcccgccccgacgggcctgcctcccctccactcgcctccattcccctcgcctcgccgggcccccctcctccgggcgtatggtggcgacggcggcgacttctcccgtcatgcgacagtggcttctcccacgtgcgacaaccacaggcggcggcagcgacttctcccgtcgtgcggcgacgacaggcggcgccgccttctctcgtgtgcaatgaccacgggcggcgccggactcttccgtttgtggcaacgacgggagatggtagcggcttctcccgcgggcggatccggtgaccaccagcggcggctctcacgggcggatccgacgacggtggcggcgtcggcttctccctcgacggatttggcagacgatgatatgagtagtggtggagtcagacttttcccttgttgttcattgttcttggttgtgagttcattgtctgcgatgttgatttgggttcttggataatattcattgttcttggttgtgactttattgttc

SEQ ID NO: 837 - DNA, 1938 bp, Oryza sativa
  Clone ID: PAT_MRT4530_100761C.1
atgaacgcggcgggtgcagacaccgacaccgtcctgcggaagcggcaactcaccgtccgcacgacgagcagcaacggcggcaatgggttccgggtcggcggcggcaagggggcggcggcggcgacgccgccggagcccgtcagcccctccgcgcggctcctggaggactttttcatcgtcgtggtgatcggcattgccacgccggtgaacgaccccgtcgcccgcgccggcatcgccgcccagttcgcgcgctacccacgcttccgcagcatccaggtgacggatgaggacggcggcaacccgcggtgggtgcggacgacgctgaacgtggacgaccacatcatctacccggagctggacatggacgcggtggcggccgacccggacaaggcggtggaggactacgtggcgtcgctgtccaccaagcccatggacgagtcgcggccgctgtggaagttccacgtgctggacttcccgacgtcggaggcggcggccaccacggcgatccgcgtgcaccactccttcggggacggcatgtcgctgctcacgctcctcatggcatgcacccgcagcgccgccgacccggcgaggctgcccgccatgccgccgcagccgacgcgcaccggcgcgatctacgcgcggcccaggccgccggcgtcggcgggcgcgctggcgttcactgcgtggctctggtcgttcgtcgcgctggcgtggcacaccgtggtggacgtcgcgagcttcttcgccacgaccatgttcctcaaggacccgcacacgctgttcaagcgggtgaagcacggggagttccagcggaagcgcatcgtgcaccgggggcttagctttgatgacgtcaagctcgtcaagaacgccatgaactgcggcgcgcggcgtctaccattggaggcggcggcggagggcggtggccagcggccggagggcggggtgagggcggtggccaccagtgcggcggcggcggtggcgggaggttggcggcggcgagaggaagggggccgcgacgacgtcagaggaaccgatggcctggtcggcgcgcgcaaggagaggagcagccggcggccgtcggcgcctcgatgcgcgcaaggaggaggcggcggccaagaggagcggcggtggctctgggcaccaacttccttccccccagacgccgacggcggcggcggcgcagacagcaccggccactcccctcccagatctggacggaagaggggagccggccagcagcggcggcaaaggcggcgctcccctcgccctcggacagtcaatgatgtgctggttgggatcacgtactctgcactgtcacgatattactaccggaagtcaggtgacacggacactgacgaggatatacgtttgagaacgatcctccttgtcaatttgaggccaaccacaagcctgcatgcatacgtagatatgatcaattctggcagagaggatgaagtgaaatggggaaacgcacttggtttcataatcctcccgttcttcataggcatgcacaaggatccactagactacgttcgtaaagccaagaaggttgttgataggaagaagagctcgttagaagtggtattcactcatttagctgcagaagtgatcctcaaactttttgggctcaaggcagcagctgctatcttccatcgtatgatctctcatactaccatatcattctccaacatgatcggcccagttgaacaggtggagttttgtgggcatccagttgtcttcattgcccctagcggctatggacctccagaagccttaaccgtgaattttcaaagttacgttaacaccatgatggtaaatcttgccgtggacgaggcacaatttccagattgtcatgagcttttggatgatttttccgaatccctcaggcagataaaggatgcagctttgagcctaggaaagcatcacaccaaggcttaa

SEQ ID NO: 838 - DNA, 308 bp, Oryza sativa
  Clone ID: PAT_MRT4530_100762C.1
cactgtcaacatcgatacatgctacatgacatgtgcacatggcacctgtaagctacgaacagagaacagcaccattacatgctggagctcggatgttcaacactgagacatgtgatgatatcatcatggccaacacgggcttaatgcctgcacatggagatagacccgctacctcataaactctactgcatttggctgccacacactgtgatgacatgtctaccagaacaggctcagatatatccaaccgacctacttaccagtgcccgaactactaaaatacacttttattgctaacctataacgtg

SEQ ID NO: 839 - DNA, 706 bp, Oryza sativa
  Clone ID: PAT_MRT4530_100763C.1
gaacagattgtataatctgggtatttttctccccaactttcctctctcggtttccccgagaaatttcttgttgtttcccgcatcactccccactgagccgcctccttgctcgccgctcgcgttcgtcgtcgtctcgtcgtttccacaatcaatttgacgtcgcccctatttatgtcctgcctcggtagttgattcctccccatttctgttgcctctcgcggttgtggtaatcgacgctgtaggatttttttcttcttcttcttttgggtcttcggaggaggcgtccggatctttcgtccccatcgatcccttccggccacggggttaatattgggcaggaaatggagagctctttgaaagaggagaaggctgcgggcgaatcaggggatgatgagaaggcggagaggagctcccctatcaatctgaattcgttgccagcaactgcggcgtgtgcggcgaccgccccggatgaggatggcttgcactctgcagtggagtcaggagctaaggattcgaacaccacgaagggagttgagtctcttggtactggtcacaagaagatcccgaaacgtgaggtagttgatgaagttgatgttcagacctgtgccgaaagaaagaacgattcagtggtcccttcaagcagcaagaaccctatcaatgataagaatgcaaaggcaaatgtggcagagaatggacagtctgctga

SEQ ID NO: 840 - DNA, 1825 bp, Oryza sativa
  Clone ID: PAT_MRT4530_100764C.1
ccgcgccgcgggcctcggctcgtgggcttcgcgggcctcgcgctagccacgcggtggccgcgcgcatgccccgggctagtccacctcactatacttttctgtatactcctagtatttcccaatgcaaaaccagctcactacactacactttctctagctagcgcgacgcagttaagccgcggcccacacgagatggacgcgggtgcaggcgcagccaccgcccttcggaagcggcaactcaccgtccgcacgatgagcagcaacggcggcaatgggttccgggtcggcgacggcggcggcggcggcagcaagggggctgcggcggcgacgccgccggagcccgtcagcccctccgcgcggctcgtggaggacttcttcatcgtcgtggtgatcggcatcgccacgccggtgaacgaccccgtcgcccgcgccggcatcgccgcccagctcgcgcgctacccacgcttccgcagcatccaggtgacggatgaggacggcggcaacccgcggtgggtgcggacgacggtgaacctggacgaccacatcatctacccggagctggacatggacgcggtggcggccgacccggacaaggcggtggaggactacgtggcgtcgctgtccaccaagcccatggacgagtcgcggccgctgtgggagttccacgtgctggacttcccgacgtcggaggcggcggccaccacggcgatccgcgtgcaccactccctcggggacggcatgtcgctgctcacgctcctcatggcgtgcacgcgcagcgccgccgacccggcgaggctgcccgccatgccgccgctgccgacgcgcgccggcgcgatctacgcgcggcccaggccgccggcgtcggcgggcgcgctggcgttcgccgcgtggctctggtcgttcgtcgcgctggcgtggcacaccgtggtggacgtcgcgagcttcttcgccacgaccatgttcctcaaggatccgcacacgctgttcaagcgggtgaagcacggggagttccagcggaagcgcatcgtgcaccgggggcttagccttgatgacgtcaagctcgtcaagaacgccatgaactgcacggtcaatgatgtgctggttgggatcacgtactctgcactgtcgcgctattactaccggaagtcaggtgacatggacactgacgaggatatacgtttgagatcgatcctccttgtcaatttgaggccaaccacaagcctgcatgcatacgtagatatgatcaattctggcagagaggatgaagtgaaatggggaaatgcacttggtttcataatcctcccgttcttcataggcgtgcacaaagatccactagactacgttcggaaagcaaagaaggttgttgataggaagaagagctcattagaagtggtattcactcatttagctgcagaagtgatcctcaaactttttgggctcaaggcagcagctgctatcttccatcgtatgatctctcatactaccatatcattctccaacatgatcggcccagttgaacaggtggagttttgtgggcatccagttgtcttcattgcccctagcggctatggacctccagaagccttaaccgtgaattttcaaagttacgttaacaccatgatggtaaatcttgccgtggacgaggcacaatttccagattgtcatgagcttttggatgatttttccgaatccctcaggcagataaaggatgcagctttgagcctaggaaagcatcacacgaaggcttaaggcactatttaatcattgcacacatgcatgtattcgtaagaatgattgtaccatccaaatatcaaatactactggc

SEQ ID NO: 841 - DNA, 163 bp, Oryza sativa
  Clone ID: PAT_MRT4530_100765C.1
gggattaggtagaggagatagagaggaattcgtttttgcaaccaattttggaagggaagcaacggatgcaccggatttgatggaggaggaggcggctgcacaggttagctcggctctggctggagctggaagacgacactgtagcggcagggagggaaactag

SEQ ID NO: 842 - DNA, 2445 bp, Oryza sativa
  Clone ID: PAT_MRT4530_100766C.1
atgcctgtgctgcgtagcgcggcgaggagggcccgagaggcgcaggagaatccggcggcggcggcggcggcggcaccggccccaccgccggcgaggaggcgaagggcggcgaggaggaaggagccagaagtcgccgtcgaggctgctccggaggcggaagaggggagggaggaggagatcgaggtcgcggatttggggagggaaggcggcggagagaagaagatggaaggcccggacagcggggcgcgcagcgccgacaagcaggccgtcgaggacgaggggaataccactccagtacctgatacggtccaggtgggcagttcaccaaagtatagagttgataaaaagcttggtaaaggaggatttggcgttgtatatgttggccgccgcatgttagctaacggtccaggtgcttctgaggtggcgctaaagtttgaacatagaaccagtaaaggatgcaaccatgggcctccttacgaatggcaggttatggatatgctgggacccagtctttgggatgtttggaataataattctcacacaatgtctgttgagatggttgcgtgcatcgctattgaagctatctccatacttgagaaaatgcattcaaaaggatatgttcatggggatgtgaaacctgaaaatttcttgctagggcctattggaactcctgaagaaaagagactcttccttgtcgatcttggtttagctaccaagtggagagatgcttcaactggcctccacgttgactatgaccagcgacctgatgttttcagggggacagttcgctatgctagtgttcatgcacatctagggagaatcggtagccgaagggatgatttagaatctctagcttacacactagtttttcttctacgggggcgtctaccttggcaaggttatcagggtgaaaacaagggtttccttgtgtgcaaaaagaaaatggctacgtctccagaatcattgtgctgcttttgcccacaaccctttagggagtttgtagagtatgtggtcaacttgaagtttgatgaagaacctaactatgcaaagtgtatattccttttcgatactgtagtgggcccaaatccagatatcaggccaattaactaactatgcaaagtgtatatcccttttcgatactgtagtgggcccaaatcctgatatcaggccaattaacaccgatggtgctcagaagatcaggttggttatgcctgcaaaacagaggcttattgttttaatggaaacagatgaacaaccaaagaagaagatcaggatgggtatgcctgcaacacagtggattactgtttataatgccagacggcctatgaaacaaaggtatcactacaacgttgcagattcaaggcttgtacaacacattgacaaagggaatgaagatggtctgtttatcagttgcataacatcttgctcaaatctgtgggctctaatcatggatgctggcactgggttcacttcccaggtttatgaactttcaccacattttcttcacaaggaatggattatggaccaatgggaaaggaactactatataactgcacttgctggagcaaataatgggacaaatctggtagtgatgtcaaaaggaacaatgtatacacaacaatcctacaaagtaagtgatgttttccctttcaaatggataaacaagaaatggagggacggtttttatgtgacttccatggcaacagctggaagtagatgggcagttgttatgtcgcgtaatgctggattttctgatcaggttgtcgaactggacttcctataccccagtgagggaattcaccagagatgggacaatggttaccggataactgcaactgctgcaacctgggatcaggctgcattcgttttaagcgtaccaagaaggaagcctacagatgaaactcaagagacgctgagaacatctgctttccctagtcaacatgtcaaggagaaatggtccaagaatctctaccttgcatcagtatgctatggacgtactgtatcctagaaatctggccatctagttgaagccatttcgagttctaggcttctagcattggtctctgctcagagtgcagcggcttatgtgatgctggcaagttctgaatgcgacttagcgtaccctgactatcgtgctgtcgtgaagatatttaatggctatcgttcttaattatagaagagcttgtacagtagtaaatgtttttgtagttcgtgtaatcgttcatgtagtgtactgttaattgtagtgcaaggcgttgtcagatgtgtacacctgtccgatatgattgaactcctatctaatcgtgtgaaagcatgaggttcctgctcgccaccttatgagctaaaaaaaaaaaaaaaaaaaaaaaaaaaagaacagagactcctccagctccggggatccactaatcactcacttagctaattaaatcttcgaacatgtcggac

SEQ ID NO: 843 - DNA, 128 bp, Oryza sativa
  Clone ID: PAT_MRT4530_100767C.1
ctaaagatagttcgattggaaatggtaccagcttcatctctcaaaaaccactcatcatgcttggaagaatagtcttggatcgtagtgtaccaactcagattcagattccagagaacatgaaaaacttg

SEQ ID NO: 844 - DNA, 736 bp, Oryza sativa
  unsure (1)..(736): unsure at all n locations
  Clone ID: PAT_MRT4530_100768C.1
ctgcgtatcgcggcgaggagggcccgagaggcgcaggagaatccggcggcggcggcggcggcggcaccggccccaccgccggcgaggaggcgaagggcggcgaggaggaaggagccagaagtcgccgtcgaggctgctccggaggcggaagaggggagggaggaggagatcgaggtcgcggatttggggagggaaggcggcggagagaagaagatggaaggcccggacagcggggcgcgcagcgccgacaagcaggccgtcgaggacgaggggaataccactccagtacctgatacggtccaggtgggcagttcaccaaagtatagagttgataaaaagcttggtaaaggaggatttggccaagtatatgttggccgccgcatgttagctaacggtccaggtgcttctgaggtggcgctaaagtttgaacatagaaccagtaaaggatgcaaccatgggcctccttacgaatggcaggtttacaacgccatcggtggcattcatggggttcctcgagtccactataaaggacgtcaaggcgaatactatgttatagttatggatatgctgggacccagtctttgggatgtttggaataataattctcacacaatgtctgttgagatggttgcgtgcatcgctattgaagctatctccatacttgagaaaatgcattcaaagggatatgttctgggnggatgtgaaacctgaaaatttcttgctagggcctattgga

SEQ ID NO: 845 - DNA, 400 bp, Oryza sativa
  Clone ID: PAT_MRT4530_100769C.1
ttgttttcaatgttgaaagagaaccttgtattctgaagaggttttcggcaagccagcaatagcgcattgcgcacaggtgaggtgaggagatggtaacagtaagtagctcataaggtggcgagcaggaacctcatgctttcacacgattagataggagttcaatcatatcggacaggtgtacacatctgacaacgccttgcactacaattaacagtacactacatgaacgattacacgaactacaaaaacatttactactgtacaagctcttctataattaagaacgatagccattaaatatcttcacgacagcacgatagtcagggtacgctaagtcgcattcagaacttgccagcatcacataagccgctgcactctgagcagagaccaatgctagaag

SEQ ID NO: 846 - DNA, 682 bp, Oryza sativa
  Clone ID: PAT_MRT4530_10076C.1
ctagtggatccccgggctgcaggtttttttttggttcgggtcaagagagccctaatcaatcgattagcgacaattctttctgtccgaatcatttagtacgactagcttgtagccattagtacaacgtacctagcacaacttcgatctcagtctccgcagaatataatgaatatatatctggatggtgccgctccgctgctaagctctggatctgaatttctacacataggtggtgtatatgtacctccttgcatgccgtaacaagcgtagcccccataatatctttgaacgaccatgatgagtaacttcaattcactgcaagcttacgcttcatttttcaggcttcaactccagatcaaactagaattgtgatgatgccacattatgatttgtgtgacgacagtgtagtcactgctgaaaaaactgaccaatcaatgcaatcatgcaatctcgatctggggcttcgtccccagctgctgctgccgactattccctatccttggaaagctacaaacgatctcctcaaaggcatggcatggaaaagatgagaaaagtacttacctttcgatatatatagcagcagtaacggacattgatgcatgcagaattgcatagcagaactccaattaatcgccatgaaggcagtaaggtgaacagccggccggcgagagaaacagcgatc

SEQ ID NO: 847 - DNA, 588 bp, Oryza sativa
  Clone ID: PAT_MRT4530_100770C.1
atggcgacggcgatgagaaggcagcccaatctttacatcctgcagaccacgcggcccgtgatgatcgagcacaatggagtcgtgatccgccgcgtccaaatgcaggcgaaaccctactcgaagcccgcggcgagccaccgccacctccagatccgaccacaccgcgccgccgcagcgatggtgtacttcgattcgtgggacgagttcgtcagcaagtccgtcgagctcttccgcaaccaccccgacaccgtaagcccgccaccacgatcctctcctctcctcccctccgatcctccctcccggcttttcttcctgcccgatctaaccttccgcttcggccacgggcgcctcggcgaaaaatttggggtgaaaattggcaaggcgaaaccctactcgaagcccgcggcgagccaccgccacctccagatccgaccacaccgcgccgccgcagcgatggtgtacttcgattcgtgggacgagttcgtcagcaagtccgtcgagctcttccgcaaccaccccgacaccggtcaatttgccaattacaatgcacctcctgaatatgctatggtagctcttgttatgaagtag

SEQ ID NO: 848 - DNA, 180 bp, Oryza sativa
  Clone ID: PAT_MRT4530_100771C.1
atggctaaggcgctcgagctcactggcgaggtggtgcaggatccagtgcgcctattctgggacgcggtcgaaactggtgatccacttcatggtggcggtgggaagggacgtggaaggatgtatttgaaaaagagctttctcgaaggatccagaagagattttgcaaatagagatatctga

SEQ ID NO: 849 - DNA, 177 bp, Oryza sativa
  Clone ID: PAT_MRT4530_100772C.1
cgtcgcgagttcctagggtgctccgcctctttattactcatgggcaagactaagatcggcatcaatgggttccacccacatcgggaggctggtgagcaacgtggacctccacatccaggatatctagctcatctgccttcaacgattcctcgatcaccacggcgcccatgacataca

SEQ ID NO: 850 - DNA, 4335 bp, Oryza sativa
  Clone ID: PAT_MRT4530_100773C.1
ccacctccagcaacccccctatccggccaatccacccctgacaagctcacccgcagcaatttcttgctatggaaagcgcaagttctcgccgtgatccggggggcgcgcatggaaggctatctcaccggtgcaaccaaagctccttcggagacaatcacggttgtgccggagaaggaaggtggcagacccacctaaaccgtgaaccccgcgtatgaggcatggctcgccgcggaccaacaggttctcggctatctcctctcctccttttcgaaggaaattctgacgcaagtcgtcaccatggagatggcggcgcaggtatggaaggggatcacagagatgatctccactcggtcgcggtcgcagtgtctcaacacacgactcgcgctctccatgacgcgcaaaggtgacttgagcgtgtccgactacatcaacaagatgaagatgctggcggacgagatgaccgccgccggcaagcccatggacgacgaggaactgatgggctacgtgcttgccggcctcgacgacaactatgaaccggttgtctccagtttggtaggcaaaagtgagccggtttcaatctctgaagtctactcacagcttctgagttttgagtccaggggaaaacttcgccagatgacggctaatcacggatactcctctgcaaatgccgccaagcgcggcggcaaaggcggcgacttcagtcgcggtggaggcggcgggggtcgcggtggccccaggaacaacaatggccgtggcgaacgcggcggcttcagtggacgcggacgcgatggcaacaacaccggcggctgctacaactccaaaccccgtccggtgtgccaactctgtggcaagattggacacgtcgtcaccgattgcaggcacaggttcgacgactcgttcgtccctgatccaaagatggcagcagcagcctcctaccatgttgatccgaactggtatattgataccggtgcaacggatcacatcacgggtgaactagagaagttagcaacccgtgagaagtacaatggcaaagatcagatctacacggcaagtgatgaaggtatggaaatcaaacatataggccattccattattcgcacacccacacgcaatttgcatctcaataattttctccatgtaccacatgcacagaaaaatcttgtatctgctcatcgtcttgcccttgataaccatgccttcattgaagttcattctcgtttctttgccattaaggatcaggtcacgaagaatcttcttcttagagggcctcgccgaaacgggttgtatttgctgccacggtcgtcgctcccttcatccaagcaagcacttggagttatcaagcctagtctcaaacagtggcatagtaggctaggtcatccttctttttcaattgttcagaaagttattaataataataatctcccttgtttaggagatcttcatgagtctggattctgtgatgcctgttagaaagccaaaagtcatcaactcccctatcctaagtctattagtgtgtcaagtgtgcctcttgaacttatgttttcagatgtgtggggacctgctcctgattttgtaggaggcaggaaatattatgtgagttttatagatgattttagcaagtttacttgggtatatttgcttaagaaaaaatctgaagtttttaagaaatttcttgatttgcaacaacttgttgaaaggctctttgacctcaaaataatctccatgcaaaccgactggggaggggagtatgaaaaattacatagcttttttttttaccaaaattggcattagtcatcatgtgtgatgcccgcatgctcatcaacaaaatggatccgctgaacacaaacatagacatattgttgaggttggcctatctcttcttgctcatgcttctatgcctttgaaattctaggatgaagccttcttagctgccacttatctcattaatcgcaccccatccaaggttattcaatttgctacgccattagagcgactcttaaatcagaaacctaattattcatccttgagaacctttggatgtgcatgttggccaaaccttcgaccttttaacactcgaaaactccaatttcgctccaaacagtgtgtttctcttggatatagtaatattcataagggattcaagtgtcttgatgtgtccactggtagggtttacatttcgcgggatgttgtgtttgatgaacaaattttcccgttttccaagttgcattctaatgccagtgctcgtctacgggctgaaattaatctcctaccacacactcttttgaatccgacttctccttatatagaggtagttatgacggttgtggaaggggaattgtccgaagtaccccgcaaccgccatcaggagaagatctggagcgtccctgccaaaccccacatccaacaatggagagatgggttcggccgaacctggggccggcccaaccagctctcccggagtgagcacagaagatccggatgatgccgtcctttctcccgctccctcggcgtcctcgggatcgccacatccatctggcgctggtgcagacgctggctctgcctctgacgcctcctctgcaagcgctgccagccattcaggaggtgacagcagcccggtgcagcctggtgcagccgacagcacatcgcagggggacagcatgcagggggacagcatggcagccgatgtgcaacggcagcagtcgcaacaacagtctcgccctgtcactagtgcccagaggcattcgcaaggagaaagtttacactgatgatacactcagatataatttccttactaccagtggagaaccacatgatttagatgaagctctctctaatcataactggaaaaatgcaatggatttagaatataatgccctgatgaataataaaacttggcatttagtaccgccttgtaaaggtcacaatataattggctgtaagtgggtctatgagataaagcgtaaatctgatggaactttggatcggtataaggctcgcttagtggcaaagggatttaagcaaagatatggtattgactatgtagatacttttagtcctgttgttaaggcagctattattaggactattctatctattgctgtatctagagggtggtcctttcgccaacttgatgttcagaatgcttttcttcatggccatcttgaggaagaggtctatatggcacaacctccaggttatgaagataaacgaaaacccaaccatgtttgcaagcttgataaagcattgttgtatggtttgaaacaagcacctagagcatggtactccaggcttagtagtaagctttgtgatattggttttaagttatccaaggctgatacttcgttgttcttctatagtaaaggaggagttactgtatttgttttgatatatgttgatgatattattgtggctagttctacacagaatgctactgatgctctattaagtgatctgaagcaagactttgctctcaaggatttgggagatttgcattattttcttggtgttgacgtaaataagatacgtgatggcatattgctaacacaagaaaagtatgcttcagatttactaaaaagagcaggaatggaaaattgtaagtcttctactactcctctttctacagttgaaaaactctcagcctataatggttctgtgttaggagtaaatgatgcaacaaaatacaaaagtatagtgggtgcactttagtatttgaccttgagtaggcctgatatatcttatgctgtgaataaagtctgtcagtttttgcatactcctacagttcaacattggtggatggcagtaaaaaggattctgagatacattaagtcctctatagatcttgggttgaggattactaaatcctcttctacacttgtaagtgccttttcagatgcagattgggctggctcaatggatgacagaaggtcaactggaggattctctgtgtttttaggatcaaatctaatatcctggagtgctagaaagcaagccacagtatccaggtctagtacataagcagagtataaagcagttgctaatgctacagctgaggtaatgtggatacagactttgttaaaagaaattgggattcattcgcctcagtctgcctgtttgtggtgtgataatctaggtgctactttgtcagtaaatcctgtttttcatgctcgtactaaacatatagaggtggactatcattttgtcagagaaagagttgctagaaaacagttagaaattaagttcatttcatctggtgatcaagtagctgatgggtttactaagcctcttcttatacaacagtttcagaagtttagatacaatcttaacttagataaatta

SEQ ID NO: 851 - DNA, 677 bp, Oryza sativa
  Clone ID: PAT_MRT4530_100774C.1
acagagaaagtgggaaaccaaggatttgcacaactcccgccggcgcctagactatgacgtaagtgcgcgcacggaccacccaaggatcaagttaaaatgcaaattctaaaacaatagatctgggccggagccaaaatcccccattagtaacaggctccctggactcctgagaggctctccaaaagagctcttcactctactggttaggcaagatggagttcgaatccaggtaaaccaatcaagataaacagggtgcgccccagcccatgactgattaggattatctgcgaagtacacagggcggtttactgcacccccaccctccgttcagaggggagctcggcgggcccccgacttcaccttcatttgcgtgccagtgaggcctgaaaagcatttccgtcctcatttgtaaattaattttaacccacagctggcagtacgcacaagcgagattgtcctgggtttaagttctactcttaaagcccagtccgcgggagaggccgcctcagtattacgcagttgagtctttcgccctaagacttaccgctgaaaggagcaggagcgatttctattttcctcaagcaagcgcggtctacagccgggaccccccaattacaccagacacttaaaaacgcagagaaatccgggaaaaggccaggtgcatctccttttgttat

SEQ ID NO: 852 - DNA, 2731 bp, Oryza sativa
  Clone ID: PAT_MRT4530_100775C.1
taaaataggatttagtaaatttggtacataaccttgcatgtgctgcgaacctatttaatggaagctcacagagaaagtatgttttatctccttcgttactgttcatcttcaacctctcgctgccgaacagataccgagttggctcggttttttccctccaaatccggccttttccctcatgttttcccaaaattagttgaagggaaatatttcccttatctccctctttcgtttcccccaagaatcggactttatccctttgaattcgacgcgaatttggattcgtttttgagtttatctctccaccaaaccctaggttttcccggcgcgattccttgcgttccaagcccgatctctccctccctccagccgtgccgctcgtcgccgtccatcgtcgactttggtcgccgtcgccgccgtcgggatcgcgaggaggagacgcaccccgtccatccctttgttgcagccgaagaccgccggagcgccgccaacgccgtcaagccgaagtcgccgcttttgggagctcgtcgccggccgtctccagtcgtcgtcctccgtcgcgcttgtcgtttccgtcgttgcgaaggttcagggggtgattatgatccaggaacggtgcactgtggtgagttgtgttgtgcagaggatattgtcacagcctctattcggctactttccagtatcgcgacgcatggtagatatgatgttgaggctgtgtcttgtgggtacagtgtttgtgtacctcggctgattcctggacgaggattttatgcacaaattaattcggaaattattagtgaattttcgggcgtgacatcggcgatacgcgattgaagattggacataaggctaacttcaagtacacccagtccccaactgcaaaagctctgaagctgcatttttttatcagcctgaactaaatcagatggacagactgagagggtaaatcagtgtctagaaacttatttgtgttgttttacgcaatcttgtccatccaaatgggccactaggttgtatttggcagaatattggtacaataccggttatcattccactttgggcaaaactacttttgatgtgctctatggacacaccccactacagctaggtattggtgtggattcttgtgagatacctgatcttcagcagtggttttcaaatgatgatgtgcatagagctcagcagctgttacactaacatttgcatagagctcagcagtatataaagggggtgataagctgtgctcaaatgtagtttagtgcccaccttttgccttttggaacaactgttcccagaaatgactggtaaatatcttgtctctatcagaaatgatggccaggggtaatccatacaatttaaaaacaccttccatatacagctgggcaacatcttgagcagagaaaggatgagccaaggctaaaatgtgagcatacctagacaacttgtgcactaccaccatgatgcaattaaatcgtctggatgttggaagcccttttatgaaatctatggtcactgtttgacaagcccctgatgccacaagtaaaggctgaaacagtccaggatatttatatcagtcaggtttagcttgctgacaaatggagtagttcttaacctgctgtttgataaatcccttcattccaggccaaccaaacaatgctttcattcttctatatgtcacaggaagcaaagaaaataaccctgagcaacctcttccaaccaagtgtcaatggtgtctccatgatcacacctggacaaagcatccgcaaaccattatggatccttttttttaacaaaattttaattttaaacccaacaacttggtgtaagctttctactaccaactagtatgtaaacgttggtccgtaaggttcatcaaacttttgtgatcagtaaggatagtaaactctgcatattgaagataatatctccaatggtccatacccaacaaaatggctaagcacataatctcataagtcgacaaacctcaggtcctaggccccaaagctttgctgacatagtaggcgattgggtatttgtcttgagacaacacaacaccaatccctaattcactagcattagtctcaataacaaaagttttctgaaaatcaaagagtgctaaaactggggctgaaaccaaggcctgcttcaatgactgaaatgctaactcagcttcaacagtccattgaagtctacccccttccttaacatgttagttagaggtttacttaaaatgccaaaatttctgacaaaccttctataatacccaacaatgcaagaagcctctgagcttcttgagagtggtgggtgctgcccaatccaaaatatcttggattttactagcatcagtggaccctcccttaaacccaatggtatgacccatatatgtaagttcctgctgtgtaaaagaacacttactcagctttaccttccactgatgattcaaaaggagctgcaacactatcctcaaatcttgcccatgagtattataatcaggactgctgattagaatgccatcaaagaaaactaaggcatatttcctaaacacaggagacaaaatgtcatttatagctccttgacacgttgcaggtgcccaagtcaaccaaaatgacatgactttgtattcaaaagtggccaaaatgagtttgaaaggcagttttgggatcctccctagcgaccagtcaaattttatggtaaattatttttatttaaagtttattaatttttagaattt

SEQ ID NO: 853 - DNA, 158 bp, Oryza sativa
  unsure (1)..(158): unsure at all n locations
  Clone ID: PAT_MRT4530_100776C.1
gntcccgccggggtcnggctctnccnnggncgtcactggtntgtgttntntggggtctgncccccatagangggggatgantccncagctgtactntatntgtccggnttcgcgcagngcacanacntctctctacgnannccgggtcgcgctgcnnn

SEQ ID NO: 854 - DNA, 331 bp, Oryza sativa
  unsure (1)..(331): unsure at all n locations
  Clone ID: PAT_MRT4530_100777C.1
ccatataatcaactactaaccaaagttttgtgttcatcaggcctgatgaacacaaaactttggttagtagttgattatatggggagaaaaaaaaagcaatgaagaattagggataggtcaaattaaactgaagtcggatgagaaaattagcaagaaccataaagntacattgcaaacaattgatgtctaaaagaagagattgctttttttatgggccatcagtttgtttggngcatctgctgttaaagggcaagaaggtttatagtgcatatgcactactgcaaaagattaatcagataaaattaccatccaccccaccaaaaccccaaaa

SEQ ID NO: 855 - DNA, 327 bp, Oryza sativa
  unsure (1)..(327): unsure at all n locations
  Clone ID: PAT_MRT4530_100778C.1
cttccatgagccagntggcggttagcatctgaagaaacagntgacagcagcagcagcaagcttcagtccatttgaaggttaattattagctagctagctccgtattatanccgatggtaaaacctcctaaaaaaattaattaagttgtgcatgtgaatcgtagcgctagctagggatgatatttgatcagtaacccgtagtccccgtaccagtgacgcttaagtacgcatggtttggttgttcatcgttgaacccctgtagtgtgtcgtcgtccttaatcgtcgtgtccatatggaattaattaattaccttaaaaaaaaaaaaaaa

SEQ ID NO: 856 - DNA, 3329 bp, Oryza sativa
  Clone ID: PAT_MRT4530_100779C.1
atggccgccgtcctcctccgcaagctcctctccccgacgccctcctccgacgcgtccagcgccgccgcggcgccggtgtggccccacctctcccccgcggggcaggccgcgctcaagcagcacctcctctcggcgctccagtccgacccgcccaagcccatcgcgaagaagaacgcgtgggccgagctgctccccttcctgttccgcgcggcgtcgggacccgaggctcccaatctgcaggagtccgcgcttctcatcttcgcgcgcctggcggattacatcgctgaatcgcttctagaccatctgatgacaatccacaacctgctcgcctccgccctggcgcacccgacatctcctgatgtgcgcatcgccgcgttgagcgctgcggttaacctcgtccagtgcttgcccaccaacgctgaccgggataagatgcaggatttgcttcctgcaatgatgagggcgctcacggattgcctaaactctggtcaggaggcctctgcacaggaggcgctggagctgcttgtggaactggctggtgcagagccaaggttcctgcggcggcagattgcagatgttgtaggtgcaatgctgcagatagctgaggctgcacagctggaggatgggactaggcacctcgctgtagagtttgtgattactctcgctgaggccagggagcgtgcaccaggaatgatgcgtcgcctcccgcagtttgttggcaggttatttgcagtgctcatgcagatgttgcttgatgtcgaggatgatcctgcttggcacactgcagagacagaggatgaagatgcgggtgaaggaaataactatggagtagcacaggagtgccttgaccgtctagccattgctattggtgggaatgcaattgtgccaattgcatctgagctgctcccgcagtacctttccgctcctgagtggcagaagcaccatgctgcactaatcacacttgcacagattgcagaaggatgtgcgaaggtgatgcttaaaaatctggagcaggttgtttcgatgattttgaatggatttcaacatcctcatgcacgtgtgcgttgggctgcaatcaatgcaattggtcagctatctactgatttgggtccagacttgcaagttaattatcaccagcaggtgctgcctgcattggcaaacgccatggatgattttcagaatccacgggtgcaagcacatgctgcatcagctatcttgaatttcagtgagaattgcacgcctgaaattctgacaccttacctggatggaattgttaccaaattacttgttcttcttcagaacggcaagcaaatggtgcaagagggagcattgacagctttagcatcagtagctgattcatcgcaggagcacttcaaaaaatactatgatgcagtgatgccatacctgaaagctattttaatgaatgcaactgataagtccaataggatgcttcgtgccaagtctatggagtgtataagtctggtcggaatggctgtaggcaaggataagttcagggatgacgcaaagcaggtcatggaagtacttatgagtttgcaaggaactacaatggaaaatgatgatccaataacaagctacatgcttcaggcttgggccaggttatgcaaatgtctcgggcaggattttcttccgtacatgaacgttgttatgccaccactgcttcagtctgctcaactgaagcctgatgtcacaattacttcagctgaatctgatgatgatatagaatcagatgatgatagcattgaaacaattacgcttggcgacaaaagaataggtatccgaactagtgtactagaagagaaagcaacagcttgcaacatgctatgctgttatgctgatgaactcaaggaggggttcttcccatggattgatcaggttgctcctacattggttccactccttaaattttactttcatgaggaagtgaggagagctgctgttgcagctatgcctgaactactacgttctgcaaaattggctgttgagaaggggctggctcaaggacgcgatgaatcttatgttaaacaattatctgactacataattccagctcttgttgaagcgctgcacaaggaaccagaaactgagatgtgttcatccatgcttgattcattaaatgagtgcatgcagctctctggtcgactccttgatgaaaaccaagtaagagctgtttcggatgagataaaaaatgttattatagccagcgctaccaggaaaagagaaaggtcagagagatcaaaggcagaagattttgatgctgatgaaggagaactactcaaagaagagaatgagcaggaggaggaagtgtttgatcaggttggagagtgccttggtactttaattaagaccttcaaagcttcttttctgccattctttgatgaactgtctgtatacatcacacctatgttgggaaaagataagactgctgaagagagaaggatagctatctgtatatttgatgatattgcagagcaatgtcgtgaatctgctctcaagtattatgatacatacctaccttttctgctggaggcatccaatgatgagaactcagatgttcggcaggctgctgtctatggtgtgggtgtatgtgctgaatttggcggtcatgttttccgcccacttgttggagaggcgctgtcaaagttgaacaatgttatcacacatcctgaagcaaagcatgcagacaatataatggcatatgacaatgctgtttcagcgcttggtaaaatatgccaattccatcgtgatggtatcgatgcagctcaggtcattcctgcctggcttggttgcttgcctataaaagatgacaagattgaagcaaaagttgtacacgatcagctctcctcaatggttgaaagatcggatgcagatattcttggtcctcatagccaatatcttccaaaaattgtttcaatttttgcggaggttttatgcaacggaacagagcttgctacagatgaaacaaccaagcggatggtcaatctcttgaggcgtttccagcagacattgccaccagattttcttgcctcaacattttccagcttgcaaccacagcagcagcttctgctgcagtccattttgtcgacatagattgaccatccgcttggttgtttcatctgtagcaagctctgttccgttgcataaaacctccgccaaaaattgaaacaatttttggaagatattggctatgaggaccaagattgaagcaaaagttgtacacgatcagctctcctcaatggttgaaagatcggatgcagatattcttggtcctcatagccaatatctcacctgcagcccggggatccactagt

SEQ ID NO: 857 - DNA, 342 bp, Oryza sativa
  Clone ID: PAT_MRT4530_10077C.1
atgttgcatttcatatataggacatttggaagagcggtagagtctgagaaacaagttgcgagattcgcaattgccgagtatcaactgccgagaaacggccaaaatatctctaatagcattaatatttcatatgctatattgtttcaaaaaaattatttcatatgcgatatacttggagtcagggcaaattttactttggcgtaccacatctgctatataagttggggtgatcatttggcgttcaaatatgggaagttgggcggcgtcgcggcggtgaccgaaaatggaatgctcatgcaaccgcactgcccggctgcagatctccggttagatacgcagtac

SEQ ID NO: 858 - DNA, 1809 bp, Oryza sativa
  Clone ID: PAT_MRT4530_100780C.1
atggccacaaacccaggactcttcacggagtggccatggaagaagcttggcagcttcaagtacgtgttgctggcgccgtgggtagcgcacgggtggtatgaggtggcgaccaaggggtggcgggaggtggatctcgggtacatcgccatcctcccgtcgttgctgctgcggatgctgcacaaccaagcctggatcaccatctcccgcctccaaaacgcccgtggccgccgccagattgttcgccgcggcatcgagttcgaccaggttgaccgcgagaggaactgggacgaccagatcatcctgagcggtatcctactatacctcggcgcactgtacgtaccgggcgggcaacacttaccgctgtggaggacggatggcgcggggctgatcgccttgctgcatgcggggccagtggagttcctctactactggttccatcccgtcatccatccgtttgctgagctcgttgcctacgaattgctcttctcgatcccactgatcgcctgtgccttgactggaactgcttccataattgcattcgagatgtatttgatttacattgatttcatgaacaacatggggcactgcaacttcgagttggtacccagctggctcttcacatggttccctcctctcaagtatctcatgtacacgccatcgtttcattctctgcaccacactcagtttcggacaaactactcccttttcatgccgttctacgattatatctacaacaccatggacaagtcatcagacactctgtatgagaactcactgaaaaacaatgaggaagaagaagcagtggatgtggttcaccttacacacctgaccaccctgcattccatctaccacatgaggcccggtttcgccgaatttgcgtccaggccctacgtttccaggtggtacatgaggatgatgtggcctctgtcatggctctccatggtgctgacatggacgtacggttcttcattcactgttgagaggaatgtcatgaagaagatcaggatgcagtcatgggccataccaagatacagtttccattatggattggattgggagaaggaagctatcaatgatcttatcgaaaaggcggtatgtgaagctgacaagaatggggctaaagttgtaagccttggactcctgaatcagggaaaaggtttagtcataaaggcacataccctgaataaaagtggagaacaatatctgctgaaatacccaaagttgggagcaagaattgtcgatggaaccagcttagctgctgcagtggttgtcaacagtatcccccaaggcacagaccaagtaattcttgcaggaaatgtttccaaggtggcgcgtgctgtagcgcaagcattatgcaagaaaaatatcaaagtcacgatgacaaacaagcaagattatcatttactcaagccagaaataccagaaactgtagctgacaatctttcgttttcgaaaacaggcaccgcaaaggtttggttaattggtgatggtctagattctgctgaacaattcagagcacagaaaggaactctgtttatcccatactcacaatttcctccaaagatggtacgcaaggacagctgcagctactcgacaactcctgcaatggctgtaccaaaaacgctgcagaatgtgcattcatgcgagaattggctgccaaggagggttatgagcgcatggcgaatcgcgggaattcttcatgcgttggagggatggaatgagcatgaatgtggtgacaaggtgcttgatatggacaaagtttggtctgctgcaattatgcatgggttctgcccagttgctcaaggttga

SEQ ID NO: 859 - DNA, 281 bp, Oryza sativa
  Clone ID: PAT_MRT4530_100781C.1
cgatcatcccttggatgcggcctggggtttacattaaattttgtcccaaaaaagcaaaacttttgccagccagaaattaattaatttggaaattttcttgttcgatcccccccccccccccaattaggggccatacatacatgccctgttgaaactgcaactgcagggtcggtgcgtggttactccaagggtcccctaggcccgggggttggccccattttaatcgggttgttgggcttatttgccggggacaaagttggtttcttttgcccaggtttttt

SEQ ID NO: 860 - DNA, 2283 bp, Oryza sativa
  Clone ID: PAT_MRT4530_100782C.1
cgcaagactcttgccgtgtcttgccgtgttgagactgcagaaacgagagctagctagccagaggctgcaagaagattctgcacccatagatcgtctaccatggccacaaacccaggactcttcacggagtggccatggaagaagcttggcagcttcaagtacgtgttgctggcgccgtgggtagcgcacgggtggtatgaggtggcgaccaaggggtggcgggaggtggatctcgggtacatcgccatcctcccgtcgttgctgctgcggatgctgcacaaccaagcctggatcaccatctcccgcctccaaaacgcccgtggccgccgccagattgttcgccgcggcatcgagttcgaccaggttgaccgcgagaggaactgggacgaccagatcatcctgagcggtatcctactatacctcggcgcactgtacgtaccgggcgggcaacacttaccgctgtggaggacggatggcgcggggctgatcgccttgctgcatgcggggccagtggagttcctctactactggttccatcgtgcgttgcaccaccactttctctacacccactaccactcgcaccaccactcttcaatcgtcactgagcccatcacatccgtcatccatccgtttgctgagctcgttgcctacgaattgctcttctcgatcccactgatcgcctgtgccttgactggaactgcttccataattgcattcgagatgtatttgatttacattgatttcatgaacaacatggggcactgcaacttcgagttggtacccagctggctcttcacatggttccctcctctcaagtatctcatgtacacgccatcgtttcattctctgcaccacactcagtttcggacaaactactcccttttcatgccgttctacgattatatctacaacaccatggacaagtcatcagacactctgtatgagaactcactgaagaacaatgaggaagaagaagcagtggatgtggttcaccttacacacctgaccaccctgcattccatctaccacatgaggcccggtttcgccgaatttgcgtccaggccctacgtttccaggtggtacatgaggatgatgtggcctctgtcatggctctccatggtgctgacatggacgtacggttcttcattcactgttgagaggaatgtcatgaagaagatcaggatgcagtcatgggccataccaagataccagtttccattatggattggattgggagaaggaagctatcaatgatcttatcgaaaaggcggtatgtgaagctgacaagaatggggctaaagttgtaagccttggactcctgaatcaggcacataccctgaataaaagtggagaacaatatctgctgaaatacccaaagttgggagcaagaattgtcgatggaaccagcttagctgctgcagtggttgtcaacagtatcccccaaggcacagaccaagtaattcttgcaggaaatgtttccaaggtggcgcgtgctgtagcgcaagcattatgcaagaaaaatatcaaagtcacgatgacaaacaagcaagattatcatttactcaagccagaaataccagaaactgtagctgacaatctttcgttttcgaaaacaggcaccgcaaaggtttggttaattggtgatggtctagattctgctgaacaattcagagcacagaaaggaactctgtttatcccatactcacaatttcctccaaagatggtacgcaaggacagctgcagctactcgacaactcctgcaatggctgtaccaaaaacgctgcagaatgtgcattcatgcgagaattggctgccaaggagggttatgagcgcatggcgaatcgcgggaattcttcatgcgttggagggatggaatgagcatgaatgtggtgacaaggtgcttgatatggacaaagtttggtctgctgcaattatgcatgggttctgcccagttgctcaaggttgatgattcagttgcaaagtatcagaataagttttagctggattatgctatgtggtcaccgtatcagaaagagagatgttctgttggcaagaagagatatagtatctgagtaatttcatctgccatggtttttaaaacattgttcatcatctcctttgatcaaagactggccatggctactttctgtataagtatctgtcctttttagtccatagtgtaattcagcaacaaaacactcttggcattgttatgcagtctcatgaatgtttttccagcatacggaattacggatcaactcatgaatgctttggggttctatg

SEQ ID NO: 861 - DNA, 240 bp, Oryza sativa
  Clone ID: PAT_MRT4530_100783C.1
gagtaaattaacttcttcttttctggacaatggaagtataacttccagcctctgcaacaactaagaacacatacaaccatgtctatgaacactaggatttgaaccctggtgggtggatccacgactccaccaccacatcaacgggaagcacgcttccctagtaaatttacttagggacaacacattttttagggagatctccaaaaaagtttatgaagaattgatactcttttgtttgag

SEQ ID NO: 862 - DNA, 1067 bp, Oryza sativa
  Clone ID: PAT_MRT4530_100784C.1
gctctaataatctacaactatataaaattaaacatctcatcgatctttttttacaaaatttacatgcatattattacacaaaagaaggaaaaaggagtagtagtagaagaagccaagaaacaaatggaatcaaagctaataaaagagagcctccagaaagcaaagcaagaaggtgagcgagctagaacagccacacgagcacacgacacaacgcacgcctcctgcacaacagctacacgcctcctcatcaagaaagggatcaacgctacgctactacatgtgctagctagctgcaggttcgatcagattcagaccaccacgctgaagtaggagagcgcgaggcccccctcgccggagccgccggtgagggcgccgaggaggcggcggaaggcggcggcggggcaggggatgcggatcgggccgcggcgcgcgtagccgtactcctgcgcggcgcggcggaggagctcggcgatgggcgggcgccccagcagctcggccggcaccacgaaccgctccgtctcctccccctctgcccccacctccaccggcacgtgccccgccggcaccttcgtcgtccctcctcccaccgccgccgccgacgccctcgccgccacggcgcccggcgccaccctgcacgcccccgtcgacgcgcaccgcatcaaccccctcatcgtcaataatggaggaggaagagagagcacagtgtcgcgcagagagagggaggaaggaggcggagagacgagggcgagcacgtcgctatatacccgcgtggggctgaggttgccaacacgtacaggtgggtcccacgcacgcatgggccccacatggcagtgggtgcgggtacgattaggaccacggggggcgtacttgcgctccggtttgagtgggatcggagccgggatctcgtgcaccgccgcggaacaccgcacagcgttcgcgccaccgcggagttcacgagtggggcccagctgcagcctcacgtacacgtgtcgtcggagtacggtagtgtgatgcaggcaacagcgagggagggggagagagagagaggagtcggctcgggtccccat

SEQ ID NO: 863 - DNA, 1143 bp, Oryza sativa
  Clone ID: PAT_MRT4530_100785C.1
ctctgctgctgtgcttgataatggagaaggcaaagagaagagggcaatgaagtgcagcaggcacccgtacgagggcggggttggcgtgtgcgcgccgtgcctccgcgaccgcctgctcgcgctcgccgccgcgcagaacgaggcctcctcattgccgccgccgccggagccggtgccggttttcccgaggtcggtgtcgccgtacgtgtgccgccggaagtccgacgcctccggggcgaggaggcgcacgccgagcctcctctttttccggacgccgcaggtggggccggcctacggcggcggcggcggcggcggaggcggcgcaggtggattcgaggaaggggacatagaattcgagatccggcgccgcagcagcaagttctccgtgctcgccgcgctcttcggagcccatcggcaacacgggtcggaggaaaagcgcagtagcaaggagcggaagcaccgttcttggctcgcggcgatcatggcaccctggggcccccggaagaaggatccggccgtcgcgtcgccgccgcggcactcttgccacgtgatcagcaaccgcgggctctcgccggcgatgaggtacgccgacgaaggcggcgaggaggggagctcgccggcggagtcgccatggcgaccttcgccgatgcggaaaaccccctgccggcgcagaccgggaggcgcgactggggccggcggcgtctcgggcttcgccgtctgcatcagcccgctcgttcgtcccagcccggcgcggcaccaccgcgggggaggccacccgccggacgccgccgccttctccggcgagctggggccgtcaccgctccaccgcctctcctccggctcctcgctcccccactgccggtcatggaagctcgccgacggcggccgcttccggatgaggtactcgaacaggtatgaagttttggtcaacaaatccagcaaatcttcagactggtcctccaacagacgtaggttggctctcccgttctcccagctgcaggttttctctcaggctctcaccggcgcgccactaaggtcaaccggcttcatcattctcatcgatgcatttaaaaatgcggtggtggtggccgtggccgtcgtcgttgtcgtcctgccaaaagcttgcgatttcaccgaatcgcg

SEQ ID NO: 864 - DNA, 354 bp, Oryza sativa
  Clone ID: PAT_MRT4530_100786C.1
atggcttccgcttgcggccttccctttcggggcttgacgacgctgtgtcaagtcggcaacgcgcagatgcaggtggcaaggtcagcgaagcgaggcactgcgcacactggcacgacgcgcccaatgattggctcgcgagctgagagggccgcgaaaacgacgcgcgctaagcttagcttcggtgggcttctgcctgtacggcgagcgaagagcgatcgatggagatggatggatagtgcacggtccacgcggaagccaccaattttaaccgatccaacgtacacaacacaacaaaatcacacgaagctcacagcagcagcagcggcgtgccgtactgccgttcccgtgtcgtag

SEQ ID NO: 865 - DNA, 811 bp, Oryza sativa
  unsure (1)..(811): unsure at all n locations
  Clone ID: PAT_MRT4530_100787C.1
gcacgagacgctctctctctctctctctctctctctctatctctctctctctctctctgtgtctctctatctctctctggctctagctagtgggcaggggagcccacaacaaggcgcgcacaagcgcacacgcgcgcgcatacatgtccttaggtcccacggggggggtgcggagctggcacagagcgcgcatctctatgacatccagcggcgctgtgaacgacatctggccgagtaccacccacacgacgagcggataacacccggacgacaaggagatcaagtccaccatcgtcgcggggaagggctgaccggctcacgcagacgggctcgcaaacgcacacagcctgataaagagagcatactgacgcgcacgagctgggatatgagaatggaccagagcgcgtgccatacagagaaagattatgaccgcaagagcttaaccaaatgaatggagacacagtcaaaaagattgtccgtcgtgtcattgtgatagtccgggagaaaattgtacttgtaagtgattcaaactaccctcccgtgctccgtaagagacgtataggcagaaaacgcgccgaccccagtcagttgagagtgaggtaggaggntcnatatnnncgcatactaaagccaaaaatgattggaatagaggtattcaactaaggatagtcaatagcatagggtatacgaacaccgaagtttcacacatgctaacatacaagagagagaacgggnngcannntgatgncnaagantagcccctntccttccccattatagcgcacctcagatatcttacggacagaacggt

SEQ ID NO: 866 - DNA, 518 bp, Oryza sativa
  Clone ID: PAT_MRT4530_100788C.1
atattgccaacacattacatattgaagcgatggacatgggatgcacgccatgtaactataagggacacccaggaacgacataatcgaaaatccaaagttggaagctatgcttcactacaaattcctatctcataaatttctcactttggcgcatcaagcggccagctttccagaatgttgtttgctagttgataatgcactgaacatcctagaggatgctcagccagatgaaatgctaagtgatgcacgcttaaagaaaaaggacgttcgcacgagacgcacaaggcatcaaagaaactggcttgataagaaccacaagggagagaacagggcaaataaaaacatcaaaggtatgttgaagaacgagccccgtttctcagcgaaggaggagatcggcccctgtaaaaaggtattagaaattaagttaggtctctcacaagtggattgagggggaagaatggagggagggagatacttttacaaatctattataatggccttagcatgaagtgacgacg

SEQ ID NO: 867 - DNA, 488 bp, Oryza sativa
  Clone ID: PAT_MRT4530_100789C.1
ccggggatctaaaaatggggggcgcataccccgcggcttgctgcgattgggtctttctttaagaatttctttgggttcttcagaatagaaaaccgcaatctgtttctgaaaaatatcttgactactgtgcccgtgggcgacatctttgctccaccaactcggcggccagtttaatggcggcaatgagactatctgccctggcaatgccttgccccgcaatgtcaaaggcggtgccgtggtcgggggaagtgcggacaaagggtaaaccaatagtggtattaatagcctgatcaaatgccagcagtttaacgggaattaagccttggtcatggtacaaagccaggtaagcgtcggatacccgtcgtttggccatcggttaaccaagctttgccagggccgacccacatggtatcccgaggaatggggccaattagttgggcctggggatatttttttctagcttgctccaaccaaggaattaaccaatc

SEQ ID NO: 868 - DNA, 238 bp, Oryza sativa
  Clone ID: PAT_MRT4530_10078C.1
ctacgccttcgcttatatgaggaaaacattcatatacacttttagtggttgtgtgattgatcattaatgactatcagggtcgatttctttgtggtggcactcatgacagccatggtggccatctactacgctcaactgaacgagtctgagatgaggtttaggcacaggcagaagactctgggatgtgcacgactgaaccgctggaatcgtaccgagaggtgctcgactcgtagctcac

SEQ ID NO: 869 - DNA, 657 bp, Oryza sativa
  Clone ID: PAT_MRT4530_100790C.1
atggtgaagggaaagggaagggctggcaggaaaaaggttgagatcaagcgcatcgaaaaaaaggatgcacgtgacgtttgcttctcgaagcgtcgccaaaccctatttaataaagctggtgagctttcattgctatgtaatgcaaatatagctgctgttgtgatttctcctgctggtaggggtttctcctttgcccatccctctgttgatgatgttgctgaccgcttggcctccatggccatgggcattcccaataaccattccttgggtggtgggtaccatgatagcggtgaggtgacaaacatagcgcaacagcagaaaattgaatatgtggagctccaaaagtcattggaaaagtcggaaaagaagaagagggttcaggaggcaatggagaaggagagggcaggacatcttatgcaatcactgacttctgaagttaatctcctggggcaggatgaattggaggagctgcacaacaaactctcagctctaccttacacttccattgcaaagttctaccaggtactgcaagatgcaaagggtactagaatgccattgccacagccacatattgaaatagcatgtcaatcacaatttctatttgaagagcaggctgtcacacccgcaaatgctgattttccgggatctagcacatga

SEQ ID NO: 870 - DNA, 1675 bp, Oryza sativa
  Clone ID: PAT_MRT4530_100791C.1
tcatgcatacacttcacgagcatggtgaatcacaacaatgtcaacactgaaaactgagctcccctgactcatgttgtcaggttccgatgacttgctcagtgccatatgccccagcgtcttccccggctcccggtttgtgtgcttgtcttgcggtgggaagctaggctgctcacgttcatgcattgtctgcgcaaggctgcggccgccaaccctgtcaaccgggatctccttggagaaaatggggatctgtgtttgcctcaaattgtccattgttctcttcgtcttgcggcgggatgccatccaaatgcatatcatcagcagaatggcaactagaagagcgaccacaccaattgcaatccagacccacaatgttaggccaagaaccgtcctcctcatctctgaactcaaatcactggaacccatagtggccccgtgctcaattcttgtgtagattgggaaatttcagttggactgcatcaatggggatcccctagttggcctcagcaagtgtggatgcactcttctcccacttttggcaataggacctccatctgctcatccctcaagcaaagaacctgtgccagcaatggcgatggaagtaacgcccaagacggagagagagagaggagggagtaaaagggaaggtggtggatgttgcaggtctagcattcttggccaatccaaagtcagagaccttgccattaaattcctcatcaatcaagatattgcttgattttatatctcggtgcacaacttttggttctatagcttcatgaaggtaagctagtgcttttgcagtgccgataacaaccttcatacgattttcccagctaaaaacaccatgctggcgcatagctccatgaagccactgctccaagttaccgttattcacaaattcatacaccaacatcctattcactccctcaacacagtaacccaacagccgaaccaaattcttatgccggacatggccaatagcctcgacctccactctgaactccttttctgcctgccccatattgttaaagatctttttgatagcaacttcagttccattcactagacggccacgatacacaactccatatccaccctctccaagcacattctccctagagaaacggttggtagcaagctcaaggtcacgcaaagtaaaccaatggccccagccgagatgagagaactccgggaggccaaccagcggcgacgctgacacaaatgctgcaggagaatacggtttcctaccatgccctgtgctaccatcttcaccggaatgcacactaccagcacggtcaacattgcaaactgagctcccctggctcatgttgtcaggttccgatgacttgctcagtgccatatgccccagcgtcttccccggctcccggtttgtgtgcttgtcttgcggtgggaagctaggctgctcacgttcatgcattgtctgcgcaaggctgcggccgccaaccctgtcaaccgggatctccttggagaaaatggggatctgtgtttgcctcaaattgtccattgttctcttcgtcttgcggcgggatgccatccaaatgcatatcatcagcagaatggcaactagaagagcgaccacaccaattgcaatccagacccacaatgttaggccaagaaccgtcctcctcatctctgaactcaaatcactggaacccat

SEQ ID NO: 871 - DNA, 505 bp, Oryza sativa
  Clone ID: PAT_MRT4530_100792C.1
atccctaggcacttactcctcctcgatgtagcatattacagcatatcagagttacaacgaccctcggccgaagaaagtttctttcttgtactacaaggactagtttctccccataggtataaatatgtatacccagggtcattgtaaatcatctccacgatcaatacaattcggcgcatcgccaccttttaccttttctactttattttatcgtccggctggacttggcacctgacgcggggctgcatcggtgttcgatctccggtgaagggataagtccaatgttccgccagcccaggcaattgtctcgtctacgtcggtgtcgttcaaggctgcatcagtatatttaatctcttggattgctccggtttggatgatatatttgcctaactatttatcatatgtcttagttaatatagtcctagtatctcaatttagctctatcggttgtctctcgctttagggtttctgccggtatcggttaaattgttttactatattagat

SEQ ID NO: 872 - DNA, 882 bp, Oryza sativa
  Clone ID: PAT_MRT4530_100793C.1
atggcgacggcgacggcgacggcggctgcggccgccccggcggcggtgcccgcgctggtgtcccccttgtcccgccgcgccttcttcccgctccctcgtcgcgccggccccaaatcgcttcgggtcttcgcgtcggcggcgaggcgacgtgggttggtcgtggtggcggcggatgcggcagcggcggcaggtggcgcggagttcagcgacgaggagaacccctacgagattctgggtattaccccgcttgatagcttcgaccacatgaagctggcctacaagaggaagcacaaggaagcggacgagaatggagatcagtactacctgtcaaagttggagaaggcatacgacactgtgatgatgcagcagctgcagtataggaagaaaggagtaacatatggttctgttcaggtgtcgaaggatatcaagtatgctgatgaccagccaattgttccttggggacctagatcctccaaatcaacagtaaaggacatgcgcatcaatttaggaatatcagcagccattgttgtttggatagctatcatgggcaatgcggactggaagccattgcagttcctatgttttgctttcttctacagaatacttcaaaagctaagggctactgaaccaccaataacgccaatatataatgagtatggtgaggttgaaggacgtggaatacgaatggcaaaacgagtagtccgtgctttgggtttgatatttggatgtgtatttgccgcgtcattgggttatacagcagctgttaacgtgattgagttttcatggcagtatactccacgcattgtttattactatcaggagttgattgttacagcagctaccgctgctctgctgtacatcacagcctcatactaccggtaa

SEQ ID NO: 873 - DNA, 524 bp, Oryza sativa
  Clone ID: PAT_MRT4530_100794C.1
gtccggaatggcgagcccggtgcgaagccggagcagccggtgaacacgcccacctcgatggtgttcttggcgcctgtcaggttcagcagcagcgacagcagctgcccttcctccggcggcgacgacatgaacccataggtgtgctcgctggtgatgaggcggagctcgcgcatgaactcgttctcccgcgggtacaccatcgtgttcagcatgtactcgtggagggattcactcttgaggagggtcttggggctatcgttgctgtggatggccgtcttcatctccttggactgaatctgaatgccgccgttggcgccatggctggcatcgccgttcgccgccgccatggccgtgcttgatactcttgacgccggtgtcgttcgcttcagccgcctgggtgtgtacatcgtgcttctccacaccttcgtgcaagccatggacatatgctcctcggtgacagcttcaccagcgacggaggacaagcaaaggtagcatggagagggaggctattatgacccggccgg

SEQ ID NO: 874 - DNA, 335 bp, Oryza sativa
  Clone ID: PAT_MRT4530_100795C.1
tcgttagcattcccctctacatcgctccagagtccccagttcccaactactagtttctttcaggtgcagcgcgcgatctcgtcactctggtgaccatctgacaagttctcggtgcgtcgcggccggacggattctgtatgcacgcctgacgacttctgctggtgaagcagggcattgaccgtcgtcggcgatcagatgacccggtgcggactggctccgatcgctcgagtggcgctgccggtcagcctgtagtctccggtgaacggcggagggggacaaccttcctggtaagacggagcgggaggtctactcaaccagccaaccagaggctgatc

SEQ ID NO: 875 - DNA, 662 bp, Oryza sativa
  Clone ID: PAT_MRT4530_100796C.1
tccgggatggcgagcgcggtggcgagcacggagcagccggtgaacacgcccacccttggatggtgtcttggcgcctgtcaggttcagcagcagcgacagcagctggcccttctccggcggcgacgacatgaacccactgatcgaatccgacaaaaatgttaaacaacacaggcatcatatcatcagcttctaattaatcacgctgaatttagcatgtactacctccataaaaaaaacctaatcttagatttgaatctgaacatatatgtgtctaggttcaaaacctaggagtgtgtccagatttaaacttaggattagttttttttttttggaatggagagagagtataaattaggagacaaatagtactaggtgtgctcgctggtgatgaggcggagctcgcgcatgaactcgttctcccgcgggtacaccatcgtgttcagcatgtactcgtggagggattcactcttgaggagggtcttggggctatcgttgctgtggatggccgtcttcatctccttggactgaatctgaatgccgccgttggcgccatggctggcatcgccgttcgccgccgccatggccgtgcttgatactcttgacgccggtgtcgttcgcttcagccgcctagagtgtgcagtgcagtacacagggagaagttt

SEQ ID NO: 876 - DNA, 1255 bp, Oryza sativa
  Clone ID: PAT_MRT4530_100797C.1
tcacgtcatcaccttgccattgccacttttcccaggaaggagtagaattacataatcatggctgcacttccaccccacgttctcatcctcgtccagcgccatcaaccacaccagaggcatcggcttcgccgacgccggcagctgcggcggcggcggcagccgagcgttgcgcagggggagcagcgcgtccagcaccacgatgttgcgcaggtcccaggtggacgcgccgtgggtgtagtcgcgcagcgtccagagctggaggatgtacccggacaccgcggcgaggccgactccgccgccgccgctcctggggacgacgatgctcaggttggcatcgtgcacgtcgtcgaacgcgtcggccggcaccaggatctcgtgcagctcgtgcgtctccaggttgaacgcgacgaggccgtgcgagatgaggtgccagtagagggtctggccgatcaggacgctcggccggccgtcgatcaccgacgacatctctgtcgccgccgccttggtccaccggaacgtcgccgagttgtagacgaaggcggtggagcgcttggtggcggcgttgctcgagacgaacaccacgcggaacaggtgcggccggaggcggagctcgtcgtggccccccgcggcggagaccacggcggcgttgctgaagtatgccggcctgtactccggcgccggcggcgccgggatgtactggcggcggccgagcatgggctccagcaccaggaggcggagccgcgtggggctgaggaggaggacgcgcccgccgcggcagccgatgacgtgccactcggcgtcgtcgcccagggcgagcaccccgccgggattacgcgccgcggtggcgcggcggctgcggcagcggctccgacggctgtccccggtgccgtcgacgccgacagggatgaagcgggtgtccgcccaggggccatggttgtggttgctgaagaagccgacgaggggagcccccggcgcgccgccgtggaggtcgctgaaccggcggaggaagcggcggctggtgaccacgcggcggaaccggcggctgacgagggagacgcggcggaggcaggccgggtgcggcggcagccggaggaagatctcggcgaggatgtcgtcggtgagtcccgccgccgcgtcgtcggccgcgcctgcacggcggcgaggaggacagccacagcagctgatcgcggcgcccatggggatcgaattggggatcgattgattgtgttttttgcgagctcggtgtatgaagctg

SEQ ID NO: 877 - DNA, 594 bp, Oryza sativa
  Clone ID: PAT_MRT4530_100798C.1
aagggaaacaaaacacatatttgcagaagcaaatcccgaagcacacatgttaattacagaaaagggcatcttactataattaattaagggctcatcaaacaacaacaaattactttaaataaatcatctaatgccgagagtttttttcttgtctattatatattagcttaatgagcaaaatctcggttattctcacgtcatcaccttgccattgcctcttttcccaggaaggagtagaattacataatcatggctgcacttccaccttgagggagaaagaagcttttgtagggaaaaacgaattgcatccccctacaaacaggtccaagcaccttgtggtaattcatggtgtcaagctgaacagcgaacaccccagccgcggtccacacgtaccccacgttctcatcctcgtccagcgccatcaaccacaccagaggcatcggcttcgccgacgccggcagctgcggcggcggcggcagccgagcgttgcgcagggggagcagcgcgtccagcaccacgatgttgcgcaggtcccaggtggacgcgccgtggggtgtagtcgcgcagcgtccagagctggaaggatgtacccgg

SEQ ID NO: 878 - DNA, 1254 bp, Oryza sativa
  Clone ID: PAT_MRT4530_100799C.1
atgcctgtagcagcagcagcccagaaagcattattggcacaacctgttctgatacttatcatcctcatcgtcagctcatgtccttgtgtaagttcattagcaccatccagaacccataacacatcagaagccgaccggcaagccctcctttgtctcagatcacagttctctgatcctttgggagccctggactcatggagaaaagagtcacttgcattctgtgattggcatggggtgacatgcagcaaccagggtgcagctcgcgtcgtcgctcttcgccttaaatcactgagcctcactggccaaatacccccttgcattgccgacctgagcttccttacaacaatttacatgccggataaccaaatcagtggccacatacctcctgagattggccgcttaacccagctcaggaacctaaacctaggcatgaattccatcacagggatgattccggataccatatcatcgtgtacccaccttgaggtcattgacatgtggagcaacaacatcgaaggtgagatcccatcaaaccttgctaattgttcacttcttcaagaaattgctctcagccataacaacctcaatggaacaatccctcctgggatcggttcactgcctaatcttaaatatcttttgcttgctaataacaagcttgtgggtagtattcctagatctttgggaagtagaacatcattgtccatggttgtccttgcatataacagcctaactggtagtattccacctatcttagcgaattgctcatcactcagataccttgacctgtcacaaaataaacttggtggggtaatcccttctgccctcttcaacagctcatctcttctttccttagatctctcaagtaataacttcattagatggtcaatcccctctgccccactgatatccgcaccgattctgcatgtcatccttacaaacaacacaatctttggaggtattccagctgcattgggaaatctgagttccctatcttccttgttagttgctcaaaacaacctacaaggaaatatcccagatagcataaccaaaattccatatttacaagaattagacttggcttataacaatttgaccggcacagttccaccatctctttacacaatctcgactttgacttatcttggcctaggggtaaacaacctttttgggagaattccaaccaacattggatacactctaccaaacattgaaacattgatcctagaaggaaatcattttgatggtccactgtga

SEQ ID NO: 879 - DNA, 1176 bp, Oryza sativa
  Clone ID: PAT_MRT4530_10079C.1
atggcgagcaagaaccctaccaaaaccctcctcctcctgctcctcctcgtcttcttcctctcgctggcttgctcccagccgctccactcggagcccatgtccaccaccaccaccgccacccagcccgcgccaccgcctcccccgccgcaatccaagattccccacgcggaggccggcggcgccgcccgcctccgccgcatcgtgctcggcgtcctcttcggctccctcactggcttcctcctctccctcgccttcctctacgccatccgcgtcgccatcctccacgccaagtacgccccggcaatcgtcaggggccccgtctccttcaccccgcagatttcccccaagaacctccactccgcgctcccctccgcgcagccgctcgcccatggccccaacggcaagtattacaagctggttcttgacaacgatgtcaccgtcgccgtcaagcggctcgaggctagccgccctgaggcctcgccgtcgtcgatgcccaatgtttccaagtctgacatgaggagggtgcagaggcagctggagttgctagctcgggtgaggcaccagaatgtgatgggattgaaggcgtatgtccgggaagccgaccggctatcgctggcgtacgatttcgtgcccgggggcagccttgaggatgtgatgaagagggtgaggtctctgcaggtgaacctcaattgggatgcaaggaacaggattgcgattggagtggccaagggattgagcctcaagccgtcgaatgtgatgctagatgaagatttcgaaccgagattggcagattgcggcgtttcaaggctaattgcatcaggttcagctgatccagaactggccagcagcctttattctgccccagagtgctaccaaagcagcagatacacagataagagcgatgtctacagttttggcatgatccttggcgtgttgctaactgggagagacccaacagatcattttttctcgggagaaaccgggcgcggtggattagctagatggcttcggcacatgcaacaatctggtgacgcaaaagacgcactggatagtagtgtcttaggagaggaaggggaagaagatgagatggcgaaggcggcagaaagacggaactccacagtgaaaggcaggcagtccggagaagggcattgccgcattgccattgacatggagtag

SEQ ID NO: 880 - DNA, 765 bp, Oryza sativa
  Clone ID: PAT_MRT4530_1007C.1
atgagattggctaaaattcctattgacaatgactgcatacaattatatggatacatagcagtgcgggatgatttggataaattgcttaattatgttgtcaactatagcagggataatcccatcattatgcggcagggagatctgattgaaatgactggccccaagcgaggcatatcaatgtgttgctctgttctattggagtttgacatgaggataaaaaaaggagagcaagaaaaagatgacctacagttaattgatggagcaatagattatatcgggctaattacagcaacgtttccattcacaaaacgcattaatggtgattgtggtgcagttgatatcactttagcacgtgtttactgggccgtagaggccaccatacaagttatcatatcagatgtgcaaagtggtttcaatttatatctcagttccttgtgttttgttagtgatgtatggaaagaaattcaactcttcaatggccctattggaaaaagtcaaacgacttatgtgattataattggaggtagtacttaccaatgctcaagctcgacggaaacaacagatgggcagcgagactactataggcagactggaaagagaaacaagaagtcaaggttgtattttggagaccgtgtcgctgtccaaaacgattttctttacgagtacctttacgagtacggagggagtacactatagtaaactcctggaatgtgtttcttaccaaccgtcacaaataagtgatgtttttatgatgcatgcaaaaaa

SEQ ID NO: 881 - DNA, 286 bp, Oryza sativa
  unsure (1)..(286): unsure at all n locations
  Clone ID: PAT_MRT4530_100800C.1
nctccatctcacctcacctcagctcgcgagctccgctcttaccaaccgcagcgcgcgacgaaggggattggattgggttgggttggattgatctgagaatatatatttgctttagttaattttgattcataaccgaatagatgggactttaaggaccttctagatgtaccgattacgttactggatttaataagttccatggagtaattgagattcccaacgagaagattgagcgcattctatattcactttattgaaaaaagagggttgcctaaaggattaacac

SEQ ID NO: 882 - DNA, 425 bp, Oryza sativa
  Clone ID: PAT_MRT4530_100801C.1
atggtgaaatttttttttttaaaggaaaataatggccaagaggaaggactccttgcccgtgccgggcattaaccgatacattcacaagcgcctgagacagtggtacaaaagcttaccttgcaaacttaaaccaaaggtggctgaacaggtcaataacgagaacactacctacacagcccacgaacattgtcccaaaagctggttaaactcacttgggtgaaccgatcgccaatgcctcataagaagagaggctcagcgggattctccgtttgctcattcacacacaacagaggtgaccgttttatccgaagcttccactttgcccccaaggatgtctgcctcggggaggggggcccacccaacgccggatcccactgtcgtattggtcttagaaaaggagcatgatgccttccccttttgacttt

SEQ ID NO: 883 - DNA, 396 bp, Oryza sativa
  unsure (1)..(396): unsure at all n locations
  Clone ID: PAT_MRT4530_100802C.1
agagtccntttcggcagtnnnnggcctcaaggacaaggagctcncgtccattnacggtcgcgnctcttcctgnaagtncgggtcacngtnncaagcntncgggatcatcctgtttggcaagttccgcatnnccacaatgccngcngccggnccngcgtacgtccnctttcgggcgttttcacaggggccgactgntccggccaagtttcgcagcttcctcaccganatgaaggagnagcaggtnggtggcaagacgttcagggccatctttaccgacaaggatgagctngagtggtttnacngctgcaaatggaaagggaagnagggggaggagcgccgataagctttgtganacnatncttgatacaatacctntggtgagtaaannnnanaaaa

SEQ ID NO: 884 - DNA, 102 bp, Oryza sativa
  Clone ID: PAT_MRT4530_100803C.1
atggccgcccggattctgtttcggtccgccaccgacgtcgtctcagccgtcaacgcccatttgcggtcgcgccggtccacggcgagcaagaacacgttgtag

SEQ ID NO: 885 - DNA, 1740 bp, Oryza sativa
  Clone ID: PAT_MRT4530_100804C.1
ctaaaatgcaaaccagaggaagaacttgcatttagcagggcccttcgcgtgccagagaagatcggcacaggcaaaggagtgctggccaaaaaagaaggcctggtacgctgaacgcgcagagtagcgctggtcgctcgtccaacgccaaacaagacggtctctgacacccggcaagagctgaattcggagcgcagcatcccagataagaagaaactgggagatgacagggacagtgagggccccgcggatgtccgaaacccaggagttgttcgccagaccagaagcaaccgtgcgcgaacggaggcgctgtggcacagcgaagaggaggtcaggagccaaggaggccactgagtggcctccatcaatccaatggtcagtccagaagagcatagattcaccatcctccggcacgaagaaggtggacgcctcgaacatgtcggagacagactgctcgaccggggccttcaagccatcccaatagggatgcccggaacgctgaagccaaagccagcgaacgcgcaaggcgaaccctgccaacctgaggttaggaattcctgtccacaagaaggcgcgtcgcttcttgtcaatggccttaacaacccaggcaggaaggccgattgccatagacacatggactggaatggaggagagaacagactggaccaacatggagcgaccagcaagagtagtgagacgccccttccaaggtggtaggcgatgagcgaccctgtccaccagtggctgaagagccgccttcggcaacttgcgaacggacagcggaatgccgaggtaggtgcaaggaaaatcagaaatcgagcaggggaagcaagagtgaaccagctccaggtcctcatccgaggagcggatcggagtaatcgagcatttggcaaaattggtgcgcaacccggatgccgcaccaaagaccgagagaatgccctggatgaactcgagatcctgccgaaccggggagaggaagaggaccaagtcatcagcgtagagggaggcgcggtgtcgcaaagcgcgatcattaagcggaaggaacccgcccgaatcagaggctttacgaagcatcgcattgagcacttccatgactagaatgaaaagcataggagaaagagggtctccttgccgaagacccctccggtgaaggaagcgcggacccggcaccccattgatcagcacccgggaagaggaggcgctaataatgagggagatccaatcacgccagcattgactgaaccctagatgggcaagcacctcaagcaagaacggccagctgaccgtgtcaaaagccttcgcaatgtccaccttgagaagaaggcggggagtgcgtctggcatggagagcccttgccgcgagctggacatagcgaaagttgtcatgaagagatcggcctttgacgaaggcactctgattggcctccacaagcccgtcgaggagaggagaaagacgggaggccaaaatcttagagaacaacttcccaaagctgtgaatgaggctaatcggacggaaatcttgaacgtcaacggcctcatctttcttaggaaggagagagatgagggcatcattgagggaggagaaaccccgtgaacccatcgggaccaagcgccttgtcagaaggcaaagacttaaccaccgcccacacctcctgaaggggccgtccagctccccaagctgcgccggacagaggccgagggagtggagatcaagagcgagctcgcgctcaacgcacgtccccat

SEQ ID NO: 886 - DNA, 526 bp, Oryza sativa
  Clone ID: PAT_MRT4530_100805C.1
gttgtctgctcagctgcatgagacaggcgacaggccggcaacagaccgagcgtggctacggaagcagcacgcggcgagcgaagcaaagtctgccccatacctcaacgcctgcggcctgctgcacggtgaggcggctggttctcatgtaaaggaggttctgctgggactaacgacgaggggctgaccgcgtgaaaggggagaaagacggggatcccccgacaaaacagtgctagggccgaaccgacctgaaccatgcccccgaggcctcggcgaaaagacgaggatgacatggcgaccgctggcgaggagaacgctgctatgacccgaggtgaacgggaggatattcatactgtatgggatgaaccaggataccaaggggatagatccccttagtccggataccgaagctgaactagataaacagccctgatcgtcataaatgatataaaatatgcttgacggaatataacactatgagttacagagtgacaagctatacaaggggataactgcgactaggaatgct

SEQ ID NO: 887 - DNA, 1008 bp, Oryza sativa
  Clone ID: PAT_MRT4530_100806C.1
atgtgtctaaactatgttcatttggaggatctcgagttcatccagggcattctctcggtctttggtgcggcatccgggctgcgcaccaattttgccaaatgctcgattactccgatccgctgctcggatgaggacctggagctggttcactcttgcttcccctgctcgatttctgattttccttgcacctacctcggcattccgctgtccgttcgcaagttgccaaaggcggctcttcagccactggtggacagggtcgctcatcgcctaccaccttcgaaggggcgtctcaccactcttgctggtggctctgtgctggtccagtctgttctctcctccataccagtccatgtgtctatggcaatcggccttcctgcctgggttgttaaggctattgacaagaagcgacgcgtcttcttgtggacgggtacagatgcggttcatgggggacagtgccagctctcgccgggtgtcagagaccgtcttgtttggtgttggacgagcgaccagcgctactctgcgcgttcagcgtaccaggccttcttttttggccagcactcctttgcctgtgccgatcttctctggcacgcgaagggccctgctaaatgcaagttcttcctctggtttgcatttcagcggcgctgctggacggccgacctcctcctaaagcgtggcttggatagtcattcggccagccccttctgtggtcaagagcttgagacagcgaaccacatcctcctcgattgcatcttcgctcggcaagtttggctccgtgtgctgtcgcctcttggttggactaccctctctcctccccgaggtagctgtctccaagattggtggccttcttctagggttggcttgccggggcatctccgggccagtttcgattctatggtcctcctagtctcttggcaactgtggaaagagcggaactctagagtttttgactctgcattgtcatcggtctcggaggtccttgagtctatcctctctgagggccacctttga

SEQ ID NO: 888 - DNA, 376 bp, Oryza sativa
  Clone ID: PAT_MRT4530_100807C.1
tgtagcatcaccctctgttccatttacaatcaacttgttgagtaaagtccatcaccggtccctaaactagtactactgtgttatcctggtccctaaactcgcaaatcgatcgttcaggttctcaaacttgttcgactgtgtcatcccagtccctaaacttgcagatcactcgtttaggtcctccaacttgttcagttgtgtcaccccggtccctaaacaggacggtctaaaaactttatatcaaaaatttagggaccaggatgacacagtcgagcaagtttgaggacctgaacggtcgatttgcgagtttagggaccgagatgacataacggtacaaatttattgactttagacaatcacaacaagattatactca

SEQ ID NO: 889 - DNA, 1803 bp, Oryza sativa
  Clone ID: PAT_MRT4530_100808C.1
atggggacgtgcgttgagcgcgagctcgctcttgatctccactccctcggcctctgtctggtgcagcttggggagctggactgccccttctcggaggaggaggtgtgggcggtggttaagtctttgccttctgacaaggcgcctggtcccgatgggttcacgggtcagttctacaagacttgctggccagtgatcaagtcagtggttttggtggctctcaactccctcttcttggctaacggccagggtttctcctccctcaatgatgccctcatctctctccttcctaagaaagatgaggccgttgacgttcgagatttccgtccgattagcctcattcacagctttgggaagttgttctctaagattatggcctcccgtctttctcctctcctcgacgggcttgtggaggccaatcaaagtgtcttcgtcgccgatctcttcatgacaacttttgctatgtccagctcgtggcaagggctctccatgccagacgcactccccgccttcttctcaagatggacattgcgaaggcttttgacacgcgcctcctcttcccgggtgctgatcaatggggtgtcgggtccgcgcttccttcaccggaggggtcttcggcaaggagaccctctttctcctatgcttttcattctagtcatggaagtgctcaatgcgatgctttgtaaagcctctgattcgggcgggttccttccgcttaatgatcgcactttgcgacaccgcgtctccctctacgctgatgacttggtcctcttcctctccccggttcagcaggatctcgagttcatccagggcattctctcggtctttggtgcggcatccgggctgcgcaccaattttgccaaatgctcgattactccgatccgctgctcggatgaggacctggagctggttcactcttgcttcccctgctcaatttctaattttccttgcacctatctcggcattccgctgtccgttcgcaagttgccgaaggcagctcttcagccactggtggacagggtcgctcatcgcctaccaccttggaaggggcgtctcaccactcttgctggtcgctccgtgctggtccagtctgttctctcctccattccagtccatgtgtctatggcaatcggccttcctgcctgggttgttaaggccattgacaagaagcgacgcgccttcttgtggacgggtacagattcggttcatgggggacagtgccgggtgtcctggacgaatgtctgtcgtcctaaggccttcggtgggttaggaattcctaacctcaggttggcagggttcgccttgcgcgttcgctggctttggcttcagcattccgggcatccctattgggatggcttgaaggccccggcgtccaccttcttcgtgccgggggatggtgaatctatgctcttctggactgacaattggattgatggaggccgctcagtggcctccttggctcctgacctcctcttcgctgtgccacagcgcctccgttcgcgcacggttgcttttggtctggcgaacaactcctgggtttcggacatccgcggggccctcactgtccctgtcatctcccagtttcttcttatctgggatgctgcgctccgaattgagctcttgtcgggtgttagagaccgtcttgtttggcgttggacgagcgaccagcgctactctgcgcgttcagcgtaccaggccttcttttttggccagcactcctttgcctgtgccgatcttctctggcacgcgaagggccctgctaaatgcaagttcttcctctggtttgcatttcagcggtgctgctag

SEQ ID NO: 890 - DNA, 753 bp, Oryza sativa
  Clone ID: PAT_MRT4530_100809C.1
tcttgcttcccctgctcaatttctgattttccttgcacctacctcggcattccgctgtccattcgcaagttgccgaaggcgactcttcagccgctggtggacagggtcgctcatcgcctaccaccttggaaggggcgtctcaccactcttgctagccgctccgtgctggccattgacaagaagcaacgcgccttcttgtgggcgggtacggatttggttcatggggggcagtgccgggtgtcctggacgaatggttcgccctgcgcgttcgctggctttggcttcagcgttccgggcatccctatttgggatgtcttgaaggcctcggtcgagcgatctgtctccaacatgttcgaggcgtccaccttcttcgtgccgggggatgcgcctccattcgcgcacggttacttctggcctggcgaacaactcctagtgtaccaggccttcttttttggccagcactcctttgcctatgctgatcttctctggcacgcgaagggtcctgctaaatgcatgttcttcctctggtttgcatttcagcggtgctgctggacggccgacctcctcctaaagcgcggcttggatagtcattcggcctgccccttctgcggtcaagagcttgagacagcgaaccacatcctcctcgattgcgtgttcgctcggcaagtttggctccgtgtgctgtcgcctcttggttggactgccctctctcctccccggggtagctgggtttgcttggtgaccttcttctag

SEQ ID NO: 891 - DNA, 341 bp, Oryza sativa
  Clone ID: PAT_MRT4530_10080C.1
cccacgcgtccgtccacgcgtcggactagctgccttcattaagaaagtaactatcgaatactcactactgactctagttaagcggcagctatctatagtgaagaggaattataacctagctactagagctacaggaacctgtgaagttcttctcttgcccctagcttacttacaaagaacaacgacgaactcggcaccattgggatgctgctcatgttatgccaacaagcactaacactatctgtggatagatcccatggctcttctctctctcagatctctctctagccatgcagtacgtaaacatgtccacgcttcatgcgaaacgacatgaccatgca

SEQ ID NO: 892 - DNA, 547 bp, Oryza sativa
  Clone ID: PAT_MRT4530_100810C.1
acagttcaaagcccaatgctttgcaagaatccgctatttcagcaagaaaaacgtaccctctccattcactgcaacgagttgctagctgaagctgaagccactgtggatgatgactctcttccaaaagaagctcagatcatcatcccagatccagatggattgcataattatgcagcttatgctacttgattatgcgatcattgttatagcatcagacagtgaagaaaatcatcttccgggtgcaacggcaatttggcaatgctaacaatggtataggttgttcgcggagcatattatccattcatgtgaagcaggtttgagatcatcagactaacattgatcatgaggaacattacgggcgatgagtgcttctgtactagtgcaaacgaagtactaaatttcagtgtcaaactgtagacagtaacattttcttgatatatgtttatagaagaaaatcttgtgatgcggaaaaaaaaaaaaaaaaaaaaaaaaaaaaaaaaaaaaaaaaaaaaaaaaaaaaaaaaaaaactcgaggggggcccgtacc

SEQ ID NO: 893 - DNA, 471 bp, Oryza sativa
  Clone ID: PAT_MRT4530_100811C.1
tgagaacatggaattgcaaaggactttcaaagattgtatttaaaataggtttttaaaataaacgaaaaatcaggatgttacatcttctccataagcgaggcatcgatagtcactctgctttgccccttttgcgcttaagagcttgagacagcgaaccatatcctcctcgattgcgtgttcgctcagcagacttgacaccgtttgttgtcgcctcatggttggactgccctctccccttcccacggcagtttgcttctggactggtggctgtcttctagggcccgagtatcttcgctctagctttaactccttggtcctcctagtctctttggctgctgtgaaaaggagcagaactccagggttttcgactctgctctctcctcagtccccgttgtcattgattccatccactcggaaggctgtccgtgctctgccacaggcattgccgtttctggggatttgctgagagca

SEQ ID NO: 894 - DNA, 747 bp, Oryza sativa
  unsure (1)..(747): unsure at all n locations
  Clone ID: PAT_MRT4530_100812C.1
cctcgcgcgtcggcccacgcgtccgcccacgctcattcactcccatcccccctcccaccgctggcagcctcccccgcccgacgccacatgtccccttctccccaccggcgccatctctcccctctagtggcgcagcttcccttcttctcccctctccccactggcgcgccgctccctctccccctttccctcccatctcgcctgcacggcgcgacgatggcggggtgcggaggagacgacggtgatagtcgtccctcctcctcctcctcctccctctccccgtcggcctcgatggccgtcccttcctcttagggacggcaccctctccaccctcaagatccgacggcgtcggtggtttccctcgggcagatccagtgccgacggcttcctgcggcggatccaacggcaacgtagaaatcgccgatccggcttcaccgatggcgcctcgtggacggatctggtggcgacgacgatgttggtggctttcccggtgatgtttttgttcttcttcatagcggtggacctgagcggagtgagagaacggcgcacggctcccagagcgagggcgcatctcgatccttccacccagctagaaggaggngaaacggcggcggcggcccagtggcggctcggcggatccctggagcagcagccggtcgacggctcccggtagcaaggcggcgtggaggtccggcaaggagcagcgctcgccctccctctcctgtgtgatttgttttgtactataat

SEQ ID NO: 895 - DNA, 252 bp, Oryza sativa
  Clone ID: PAT_MRT4530_100813C.1
aaacgcacgatcgtacgattactaacactggatgaaaggtaacactttggcaacaatagtacattacaaaggtagctaaatgcgaagccacaaaaccgagagcccaagacgaccaaaaataaagtttacacaacatagcacaacatgcaaaccattcggactgaccctacatgagggcacttgaaacggccggggagggccttgcatcacaaatgccgaacaactagattgtgagcagcccacactgaaagg

SEQ ID NO: 896 - DNA, 1819 bp, Oryza sativa
  Clone ID: PAT_MRT4530_100814C.1
atggagttgaaaccacaagttgcctcgcgaccacacgcgccgaagaagtggcagctcccctcccattcccaattcgagccgagaatcatcgtgcacctcgtccataaaccaatccaaagcgacgtcaccacaccacacaagtacgccacatacaaggtagtaagtcgtgaaccaggcccacgttgttttttccgaggaaaagtccacgaggcttcgtggcttcgcgcttcgccttactacaagaggggaacgcgcacgaggcgagccacgcgattcccccatctctccgacagcgagcttcgtcgtcggctgtgcgcggccgcggcggcggcgctggtcgtgtgcttcccaaattctctcattccccagcgagcgatcaccatggggctccacaaggaggcgagctcgtcgtcgtcgcggctcgacgcggcgccgctgctgccgcaccacggccacggcggcggcggcgcggggcaccacctgtcgtcgcagcccaagacgttcgccaacgtgttcatcgcggtggtcgggtcgggcgtgctggggctcccctacaccttctcccgcaccggctgggtggccgggtcggtcctcctcctcgccgtggccgcgctcaccttccactgcatgatgctgctcgtcgcctgccgccgccgcctcgcctacgaccaccccaagatcgcctccttcggggatctgggcgccaccgtgtgcggccccgcggggcggcacgtcgttgacgccatgctcgtgctcagccaggccagcttctgcgtcggctacctcatcttcatctccaacaccatggcgcacctttacccggttggggattcgtcgccctcgtcgccgctcctcaccgccaaggcgatcttcatctgggtcatgctgccgttccagctggggcttaactccatcaagacgctgacgctcctcgcgccgctcagcatcttcgccgacgtcgtcgatctcggcgccatgggcgtcgtcctcggccaggacgtgtccacctggctcgccaacaagccccccgtgttcgcctccgccggacccacggagatcctctacggcctcggcgtcgccgtctatgccttcgagggcatcggcatggtcctcccgctggaggccgaggccgccgacaagcgcaagttcggcggcacgctcgcgctgtccatggcgttcatcgccgtcatgtacgggctgttcggcgccatgggttacctcgcgttcggcgcggccacgcgggacatcatcaccaccaacctcggcaccgggtggctgtccgtcaccgtgcagctgggtctctgcatcaacctcttcttcaccatgccggtgatgatgaacccggtctacgaggtcgccgagcggctgctctgccgcaagcgctacgcctggtggctgcgctggctcctcgtcatggtcgtcgggctcatggccatgctcgtgcccaacttcgccgacttcctctccctcgtcgggagcagcgtctgcgtcctgctcgggttcgtgctgccggcggcgttccacctcaaggtgttcggcgctgaggtcgggtggcccgggctcgccggcgacgtcgccgtcatcgtcgtcgggaccgcgcttgcggtgtccgggacatggacatcgctcgcacaaatcttcagttcttccgatgtgtaagcggttgacagtaatgcagacaatgcgcaggcaacgcagctagtagctcatgtgtatacattgaatttagcagaaaagaacattcagctggcatgctgattttgggcacggttcacgtggttcaaattgaatactgcataataaaaaaaaaaaaaaaaaa

SEQ ID NO: 897 - DNA, 642 bp, Oryza sativa
  Clone ID: PAT_MRT4530_100815C.1
cttaatggtatttctatatggactctatactctacttctaatattccttatttttaattcagaatttctattatttcctaattgtatttctatatggactctatactctacttctaatattccttatttttaattccgaatttctattatttcctaattgtatttctatatggactctatactcctcctctaatattccttatttttaaattccgaatttcaactatttctaaagtgtatttctatatggactctagtctcctcttctaatattccttatttttttaattccgaatttcagctatttctaaattgtatttctatatggactctgttttttctttttctccgattaatttgagaatttctaggccatgagagcgaaccgggaggctcctttttctattcctttaattatataatagatttaggacatcaaatttagtagtcaaagtgaactattgctgatgataaaaaaggcaaattgaagcttcttttacttaaaggtactaatatggcttgcttacaggcagcatgatatatcactcattatatactatctgttcatatttttcaaagatgttaaataatagacagaatagtacctctggtggaggggatgattcgggtgaggaatatctt

SEQ ID NO: 898 - DNA, 3452 bp, Oryza sativa
  Clone ID: PAT_MRT4530_100816C.1
ttttttttttttttttgatgaaatgattggcatcttacatcacatttactgctgtagaaaatgagaaaaccaatttacatatatcagctatgtatgtactgtatttcacaaagcagtacagtagtagtagtacaattacagcagatagctgctctgtcaggctatacaggcaatcaggcagctactgcttagaatttcagataagcagatctacatacttcacatgctcaaaacacacgtgaactgagtaactgaccacaaacccaaccacaccagctgcctcaaccacacttacaagttacaacagacatcaccatgttaagtatcatacaaaccaggcagcattttattttgggatacacaaagtcacaaagcttgcacatatacagtacatacacagcatatattggtgtcccgattttgtcacaaatacacagtagtccagtgtcacaaactcacaatgccatgagtcacgggctgcaggggatgccggcttcagagaaggtggtgacaagcttcggcaagagcttggctagcattatcttgaaaccggttgaggagttcttgcatccgtcatccgatatataggcgctgtcacgagcatgtccaacaagatcgccgccgagataagccttgcaggcatccagaatgtgcggcgcgcaacaagtgaagtgctccttgacaaaattctcgaaatgctttggtggcttgtgtaaaatgtacgtcatggacttgcatgacagcaggaaagcgttctcattgtaagtgatggagttcttctctccatctgctttccccatgaatttgtcatagccagcctcattgaagtaaggtttttcattgagaacaagagcttgaagggacagcagcagttgaagaacagttgaattttcagggtcccacacttcactaccagttcctgcccatgttttgagcaggctaaggcacactttgccagactcatacaaatttgggttcaaacggaggccaccggaatggtagtgaacagaaggtggctcatgaggataatcaggaggaaagaaaatatcaaagaagaaaagattgtcatgataaggtgttccagctgcacctacaaggcatgccctcaggaggtccatcctttcttcataaactctaacatgaataccatctggcagatcgttttgtaagattgaccattcctgttgtatcttcttcacccaacctcttttgacattttcgtgaccaatttctttgacaaagtggtgatcagaacagtcggtcacaacatcaaatccttttgtcatggcattttctgaagctaatgttggcttctcaaactgtgttatcagctccatggtctgtttctcttcagagatatcttctgcagatggctgcagttctgctgtcgtcacaatttgatactgagaatctgcattgaccgagctggaagatgttgaatcatgagcaccaaacaaactagaagccacatttgtcagaaaattaaatgctgtcttggaaaagaggaaagcagtggctttgcgcaaggatcctgtacagtctccagcagattcttccagcgcactcttagtatcctcaaggtgcattttctcctgctcagccatgtctaccaaatcatcagtagtgtgctcctcgatcatggattctagagaatcatctagaatcctatctaatgcaataatttcaaaatgctgaaccctagatatcgcaccactagcccattggacttcaagtccttcatcattgtatccaagaacattgccaatacatgataagaaggcagaggaggtatccaagctctccctgctaactgccacggttccattggtaagatttgcttcagaattttctatgttgacagcagatctaataatgacttcgccagtgaagaaggagaaatctgggtgtaatactagctcataagcactcacagtctcctcagtgagtccatctccataactgacagtgtcactatcaactgaaacagcccattttacctttacagtccgttcaagtgcatccacacttgtcactatcccagtccgctggcatctaccattatcctcaactgtcaatttctcaaggataaattgcccaggccaaaaatcatgatcaccaagagtactcacaggaaccaaactttgaggttctaaaccaagagatgtacttccatcttgccataaaacatcaacactactctttgtctttgcaacaacatatgtttgagaataatctgaaccataagttccgatagccgtttgagtgtcggagctggacttccaggtcatactcatgaagcaagatttgtcagaattttcccagagacttccctcgcaatccgaaagagtgcaccagtcacccaactgccaattggcataagggaagcatgaaagcaaagtgagcttctttgggtcctgaaagtttggaggacttgatgattgacctccccaaacatttgttactgaggtgatccagttcacatgtaccagcccaacgtcgacatgagacactactccttcatctctactagctttccatgatccacacaaccatgtacccgacttagaaatggaaggatgaacaattctcacacgttggcctggatagtaaaaataaggtgcatcttcaaaaaggattggaggaatgggcttcagtacctcagaatctcttaagagcatttcacaccttgccccatcactgaacacaacagtgaccaggtcaaatgccctgatcacccgtccaatccatggccccatcaccacacaatcaccagagacaaaggatctaactcttgaaagtttcttgctgttgacatgttttattatgtcaccagagctcgtttccaagtcaacaagcatatcaactccaactacacggcccagctgacctgatgggtcagctgcagagcaaactatgtctccatgcagaaatcctctttcaaaacttagaaagttatcgatctttccaatgctctcgtccaagctggacaagatgttctgggcatgaccacagtatgtaagttcacattcttcttggtcttcttcactgtcactagtttcagcgtatgactcagtgtccgagtcaattgcatatagatccatctttccgagcccttgaatcgttctggacttcctggtgttcagtctttcactgagatcgatattgtggtagaaccaatgtgtgtacagtgctaatgccaaaggagaattaccacgatatatagttgcaggaaataatgatgtaataccactaacttccagaggatatttgatccaaatatctaatgcggatagtagtagagtacctagtgccaaaggagatttgcccaaagagcaatctgaagctaaaggtagtgccaaaggagatttgcccggaagcaatctaagaaaccagcttaaggctttaaactgacacaaaaaactgagtctgtgacaagcccaatctcccgccat

SEQ ID NO: 899 - DNA, 232 bp, Oryza sativa
  Clone ID: PAT_MRT4530_100817C.1
ggacggggcttccatttccctgctgctctctgatccctatggtttactttcccctcctcctcgacctctatggtttttccactcgctctccgccccatgacggccgacgagaacaggaggagatgctccgcaagcacctcaaggaacaaaagagcgaggtagaggagcctatccttgaggatgacgatgatgacgacgttgatgatgaggactaggatcaccaagatgatga

SEQ ID NO: 900 - DNA, 841 bp, Oryza sativa
  Clone ID: PAT_MRT4530_100818C.1
gtcagagaccaccactccacacatcgtgttatttgagattccggcgagccggccggccggagacgaggaggatggtgttcttctgcttcttggtggaccagaggaggaaggtccggagcagcaagccggcggcggggatctgctcgcggtgcggcgggtgcgcgagcgtggcggacatggagacggcgacgcgcttctgctacctgctcaccgtgcacagggccacgtggcgcgccatcatctgcaccttctgcggcgccatgctcaagtcctaccgccactacaggctctacgccagctagctctacgctacctacgatcgccggccgccggcggtgatggccggagagagagagaggaggaggcgacctacttgctgcgtacgtctctgtgctctctgcgaggtgtgcttgttgcgttgggccttggctactagtactactattggaggagtattaattaattggctttgttgatttcttgcaaaatgctaagctttgcatgcagcttgtaatccctgtgcatgtagtatgttgtacatatgctggagatgaagagaggaagttgattaaatttttgttaccggtttcattagcagagcctatgtgtgatcgatcctttaattatttcttctaatagaattatagaaaagatcagggaggttatgatatttgaaggggcatcactcatcagtactactacttttgctcgcacgactgctcatacatttttcttgtctcgccttgatccatcatatcatggcttgaacgtgattagtcacaccattgagagcggcgtggccatgagatatttcgaaataaataaagacccatttttctct

SEQ ID NO: 901 - DNA, 412 bp, Oryza sativa
  Clone ID: PAT_MRT4530_100819C.1
taatatgaaaacttttaaaaatacatagtacaaactacccgatagtctcgtgatatgctaagcccagtacagttttatcgtctctgcacattatggttgggttggtcactaggattactaacctcttgcagagaatggccataaaatagaggataatcgacatcaaaacaggcgatcaatcaatcggacgatgttgagaatcagacttatcaatgaatgggccaagaaagcaaaaatgacacgaccaattggaccaaaatttacaagtctgcatttgggagcaaaagaggaggccacctgccgaaattgggccaggccggaccagcccatggttcggccaaatccaccgcagctccgttcgatccaggttttggttggacggctgggattgatccccaatgatggttggagg

SEQ ID NO: 902 - DNA, 277 bp, Oryza sativa
  Clone ID: PAT_MRT4530_10081C.1
ctttccgtgcccatgatagagccgtcgccctgcgccgtgcagctagatccggccgcgggagcaccggatctagccaccgcggtgccggatccccggcctccctcgccatcgagcgcgccgccctccgctcggctcaccgcgctccgcgcttcgccccgcctccctcgtgccagtgacgacgcgtcgccgcggtatggccccgcccgccatcctggctccccgcatggttgttcggcggtgaactccggtggcggcgaggcagagagaagggaggagg

SEQ ID NO: 903 - DNA, 549 bp, Oryza sativa
  Clone ID: PAT_MRT4530_100820C.1
tcaaattggccattactatacttacattatgctagctggattgtccctttcatgtgctatactacatgagaaactgggatggaactcgtcttgtcaacccctcattaactgatcaaggaaatcttcgaaaggaatttctgtccacttgctgtcattcaagaaaaacgaggctattctgccggacttcgtcactcacggcctaaagttatctaagaagatatgagcatgttatgcaagcaagccagaatagttgcagcatttttctttcgaaaatttcttagttcagaataatttatgtctggtataactgtattcaaggctatatgtacccagctattctttttacaaattaaggattctgtcattatccttccaacgtcataaatccagggtataccaaaatcaaatccatgttcatttaagggttaatttgatccatgtcactgtaaatttggctattcagaaaaatgccattacatttgcctatttgtaaccgtgccattgaagttttgcagaaattagaaccgtgcccaaaaaaaaaaaaaaaaa

SEQ ID NO: 904 - DNA, 167 bp, Oryza sativa
  Clone ID: PAT_MRT4530_100821C.1
ctgggggtttttttttttttttttacccgcggaaggtgaagcccgaactctaagtggcggggctctcgggactaagagtgggtttacaaagaacggcgtgggcccaaggacacgaccttattaaggggagggggaagacaaaggtttttaaccctcacattgcgggg

SEQ ID NO: 905 - DNA, 461 bp, Oryza sativa
  Clone ID: PAT_MRT4530_100822C.1
gtagtatgtcactctggtattctcccatggcgactgcgaccgaggaggttgccgctgcggctgctgccgccggcgaggcgccgccgtcgccgccgccagcggtggtagaggaggtgaaggaggcggtggaggcaccgaagccggaggaggcgccgaaggctgaggagggggaggagaagatggcggtgggtgagaaggagaaggagatggcgaatagggagatggaacagcgtaagagcctggctcttacgttagagatattagagacctcagtgttaccattaagaagggtggtgaataagacgttgaactcgcttctttcaagtttattctcatcgaatagaacaaaggttaaaaccacttttgaaggcataaactaactcttgcgtttgtttagtgtctacaaatgctataaagagtaagaaaactgctgggaaaatcaaatgacgggaacaattaaa

SEQ ID NO: 906 - DNA, 261 bp, Oryza sativa
  Clone ID: PAT_MRT4530_100823C.1
atggacctcaactttagaggagaaggtgactggcacctgtctatccgggcgggagggcagcgagagcgagcggcggcgggcggcgaggcccgagctgtggcggcaggcgagggctccgaggtagagagagaaaatccaggggagctcaagcaatccgccatccgtgtcatcggcggcggcggtggcgaggtcgtcgtctccggcaagggggggggagctaggtcgaggcgaggcggggggagcccggaatccgcagatgca

SEQ ID NO: 907 - DNA, 948 bp, Oryza sativa
  Clone ID: PAT_MRT4530_100824C.1
gcgcacttttgctgctgatgcgacggagtaccaaaggggggggacgaggaggaggaggagggatattcttagagtctactagactcacacactagctttagcttaactaaaagaagaaaaagaaaagagaggcacaataatagggtaggcatggcggagcagctgggcggcgtgggcagcccgcagctaagcctgagcagctgcagctccttcctttccatctccagcgccggtaccagcgccgccgatggtgctccccatctatccctcggcgtgggcggcgccgaggagctggatctgctgctgcaggtgggcataggcggtggcggtggcggcggcggcgacgaggaagaggaggagcgcaagaccatccggatgatgaagaacagggagtcggcgctgcgctccagggcaaggaagagggcgtatgtgcaggagctggagaaggaagttcgccggctggtgaatgagaatctcaagctcaagaggcactgcaaacaacttaagacggagatggctgctctgatccagcagcctaccaacaagcagagttcccaccgaagaagctcatccacttgatcagaacgcagcagcttaagcctttaattaattaagcataggcaaggtagcgggcagccattggattggggaccattatttaattgggttggctgtccagctccagcaagagtctctagcaagtaacaacaactcactctgatccgccggcttggctttccatgcattccggtagtacgtaagtactctattttgttactgtgtcgatcatccgctacacatggatgcatacatgcatgcttaattgtttgtgtcaccggctaacttttgcatacccttgtttgcttgcttgctgcaagacccaaattaatataaattgtatgagaaaaaaaaaaaaaaaaaaaaaaaaaaaaaaaaaaaaaacaacaa

SEQ ID NO: 908 - DNA, 531 bp, Oryza sativa
  Clone ID: PAT_MRT4530_100825C.1
tcaagctgcaggcgctcaaggcgaaggaggcgcagaagaagatcagccaggctgatgaggaggctggctcgctgttgcaggagcgcaatgggcacagtgatcgcaagagcgataaccaggcatagagccaccaccagatctgatcctggcacacacaaattgggtatctggtgcaaagtgcaaaagactgtagtttggttggtctacggttgctttcaaggaggtggacaccagtttgttctttcacttatttaactttagttggatctggagggcaaatcaagggaatttattggtttaggaaaatacttgcacttgcacctactttctggaggactagagtaaactttcatgttaccctgttatttattcagctatttttgttccagagaaagacagcctcgttgcctctctcgctcattgcctaaaatttatttgttctactagtagcctaggtactaaaaatgtacttctacatattggtattttggtggttatcttctatatataatgagcttactgtaatattat

SEQ ID NO: 909 - DNA, 417 bp, Oryza sativa
  Clone ID: PAT_MRT4530_100826C.1
cgctcacccacagtgtggtcgtatccgctgcagtttgctagcttcacactgcgatgcctcctcgcccgtagccgtgtccagctgctgtgcgacactatggtcggtgtaacgacaagggcggtggctgcggcggtgctggaggtggtcgtggtcgtggctgctgccgagctcgagggcgctgagccgccggcgagcgagcggttggcgcttatggagctcctgcacacaacgccgtacgagcggactctgggatggaactgatctacaaggtggtgcggttgggtcactgtgacgtgccacccccggaaacccacggtggtgcacgtgcgactcccctgaactactctatatggggccatcccggcgggtacgcttgggcgactaaccaacctgcaggtgctctccctgcgctccacc

SEQ ID NO: 910 - DNA, 510 bp, Oryza sativa
  Clone ID: PAT_MRT4530_100827C.1
gtattcggtcgctcgccctcccctcaatcaaccggcgtcgcgccgccgtctcgcttccgccgccaccgccactgcctctgccgcttcacttctcgtctggacgacgccggcctcctcccccaatcgcagccgccgccgctcgcttctcctctggagtctggacaaactcctcgttcccacgtgtccccatcgttccccgtccctgctgcctcctctcgtccccgatcccagtccccagaggcgtcaatcggaaggagctcgagggcggcgccgactccgcgtgcaagacctgcacgatccaccagcgcccaagcttcgtcctctcagtctcctgcgccgttcgtccttccgtccccgccatcgctgcctcaggtcatccctgccgtggccgagcggcggtggatgggcaaaatggtggcagatccgcgactagatgccggtgaggaggttgcggatcagccttctttcatcccatcacacaggagaaattagaggcaaaccagatgcaaa

SEQ ID NO: 911 - DNA, 1340 bp, Oryza sativa
  Clone ID: PAT_MRT4530_100828C.1
tcggttccaagcatcacagaccaaccatatacggcaaagatgagctccctaagagggcttggaaatatcgccagaagatggagagagctcaatggtgtgagttactggaaggggttacttgatcctcttgacgttgatctccgcaataacatcatcaactatggtgagctttctcaggcagcctacacggggttaaacagagagagaagatcaaggtacgctgggtcttgcctcttcagtcgcaaggacttcctcagcagggtggatgtatcaaacccaaatctgtatgtcattacaaagttcatatatgcaatgtgtactgtcagtttgcctgatgcattcatgataaagtcatggtcgaaggctgcatggagcaagcagtcaaattggatggggtttgttgcggtggccacagatgaagaaatagtagggccaggcagtgcatgacccttgtgtgcatggggggtggctgtctgtgtacacgatgccgatccagaatctcagtacaataagcagagtgcaagatatcaggtcttgaatgagatcaaacggctccaggatatgtacgagcatgaggagactagcatcaccataacaggccacagccttggggctgcacttgccaccatcaatgccactgacattgtctccaatggttacaacaagagctgtccagtgtctgccttcgtcttcggtagcccaagagtgggcaaccctgattttcagaaagcgttcgacagtgctccagatttgagattgctccgcattcgaaactctcctgatgtggttccaaactggccaaaactaggatacagcgatgctggcacagagctgatgatcgatacagggaagtcaccatacctgaaggcccctgggaatcccctaacgtggcatgacatggagtgctacatgcatggggttgccgggacgcaggggagcaacggagggttcaagctggagattgatcgagacattgctttggttaacaaacacgaagacgcactgaagaatgagtatgcaattccatcgtcttggtgggtggtgcagaacaaaggtatggtgaaaggcacggatggtcggtggcatttggccgaccatgaggatgtatgactgatgcacccaggcatctcctcttgatgcctgattcaaccgacagctcaaaactaagactctgaaaacaggggatactttcatgtgttcgttattgctcgacaatgaagtaatgcatatgtttggaatcattttgtttttaacatttttcagttcattgtgttttacttaatgttatctgtaataagttatcaaaattgcccacaaaaccctcaattatcagaattgtt

SEQ ID NO: 912 - DNA, 332 bp, Oryza sativa
  Clone ID: PAT_MRT4530_100829C.1
aaacaaggctacatgacaagccttttttttgttcaccaataataagaatagctagcgttaaggtggactaaattacaaggcctaatcattctgttgggccaacatagtgtgtccaagaaggtagccttgttggtataatagtgtggtaaattgtggctgaacatgtttgctcggatgctgcttcaggttcagaagatttccatttcctggacctgacactgggatggtattaggactctgtttctctggttcaaaaaaaaagccagcgtgtttgcaccatctgaagaaattttattttaatttcccccagaaaaaacatgatgaacgagtgc

SEQ ID NO: 913 - DNA, 4005 bp, Oryza sativa
  Clone ID: PAT_MRT4530_10082C.1
atgggcgccgccacggcggacgaagacttcgccaccccgccgccgccggcgcgggcgcccggcggcagggtgtaccaggtgggcggcgtgccggtggagttcccgtacaagccgtacgggacgcagctcgccttcatgggccgcgtcatcgccacgctggaccgcgcgcggcggcagggccgctcccacgcgctcctcgagtcgcccaccggcaccggcaagtcgctctccctcctctgctccgcgctcgcctggcagcgccactacccggaggacgcacgcgcagataacccaggtggtccgggagtaccgcaagacgtcataccgagttcgcatggccatcttggtaaccattgcccccatctcaatttgcttcttgctttatcttgcgtagcctcaaggaagcactactgtgtcaataagaatgtgtgcatgagtggcaacatcgatgaactatgcaagtcactccttgatgacagtgctcaaggctgtccagaatacaagaatgcacagaaactaagtcgccatccatcccttcagattggtggctgctatgaagttcatgatattgaggatctcgttagagttggacggaaagtgaaggggtgcccatattttgctgcacaaactatggctgaggcagctcaactggttttctgcccatataactatctgattagtccaatcgtgaggagagcaatggacattgacataagaggctcaatcattgttcttgatgaggctcacaacatagaagacatagcacgtgatgctggaagttttgatgttgatgaagaatcacttctctttttgcggcaagaactagaagggttagtcactgatgaggctgttgcaaagatatacgaacccttgcatgaagttattcaggggcttaatggttggattgatgagcagggaaataaccttcaaaagaatgagtttgagcatcctgcttcattttggactggtgaagaggctatgaaggaactcaagtatgctggcattactcctgtaaacttcccagtattgcaagagtgtgcaacaaaggctattaaagctgcttcagatgctgaatcagaaggagtgcacttaagtggtggttcagctatgacactagagagtttgttctcctcattgagctacttttttgctgagaatggacgccattcaaatgattaccaacttgctttacagcgttttgctaaacgtgaaggtgctaatgtgatgtcttatgatcttatcatctgcaattctgtcacttctttcattggatggaagtgtgtgatgagtctgtggtgtctcaatcctgctgttgtttttcgagacatcgcagatctaacactttcagtaattctcacatctggcacactctctccaatgggatcctttgcatctgaacttggtgtccagtttgaagcttgcatggaagctcctcatgtaatcaatgctgattctcaggtttttgcaactgtgctatcatctggcccaacaggacgtcgactgaatgccagttatagaactgcaaatgaatattctttccaggatgaacttggagctacactagaagaaatatgcagagtagtgcctggtggtgctcttgtgttttttcctagctacaatttgttggagaaacttcaaaggcgctggtctcagacagagcctagaggaagtaccgaggaacttgagcctgtcctaaaaggatattacaacgcaatccttggcaaggctcccccaaagaaaggcagaggtggtgcaaaacaaattgtgaaaaatcgagtgacaaaggattcatcacaggagtctgctaaaggaggtgctgcttttcttgcagtttgtcgtggaaaggtatctgaggggattgacttctctgatgacaaagctagagttgtggtatcctttgttttctcctcatatgttttttatgcaccagagagaataaatgacgttcaagtaaagctcaaaaagagatataatgattcatacaaatcatcaaaagatttgttgagtgggaatgaatggtactgccatcaagcatttcgtgctctgaatcaagctgcaggtcgatgcattcgccataaatttgattatggagggataattttgattgatgagcgttatcaggaagaaagaaatattgtgtatatttctaaatggcttaggaattcaattaggaattgtggtactttccaggagacaatggatggattgacaaggttttttcaaaatgctgaggaacaaataaaaatcaaagctcaaggtgtgtcccctaaggacagattggatgcttgtgtactcccatctcaaggcgataaaagaaagctgccatggccagaaccaaatttctcaaaccagacagtactgcaaaataataaggatgttaagagtgaaagccacattgatggtgcaggagttgaccgtatgaagttgtctgatacatcatcagagtcatggcatctctcttcaaaacattctggtttagtaaagaaacaaatctccccagaaccagaaaatgtgccaatggcatgccaactccctccctcatacaaagttcaatataatttagaaggtgaagcagataatgggacaaattatgaagtaaatataaacttcattgacttggaagagtgtgatactaagccacggtatgtgaagttaactatctttaatccttcagaacacataacacaacaatctactgttatggaagaaacttatgcagaggtgccaattgctagtcccagtaaccgaaatggggaaaacgcctctacagtgatgaatgaaggagatccggttttagatctgcccatttcgctttcagctgctaacagaaacatttcttgtgtgtccacatcggcagctactcctgaaagatcaggtagcattagtcatttggagcatgaatcttggactaacagaagtgtgaattcccactgccagaaaaggagaaagttaagctcccctatgagctgctgtacctacacagagcgttcatgttctccaagcaaaccctacttacatggtggttgtgatgtaagcatgttgcctggagatctgagaactgatggaatgtgttgcaagagtatgaaaatgtcaagatgtgaaaatgttaaggttgaaagaaacagcaagcttgcagagttcccatcgagggaatctacgcaggagaagcttttcatttgttgcgctagatgcaaaacagcacttggattacaagaggatggctttcttgtttcatgctcatcgtctttgtcctcaaaattttacttgacatatctttggagacatggaccatcagcagatatccttccaggaaaagattttttggcatcaccacccttgaagataaaagtgatggtgtgcaatgtatcttcagtgaacaagatgatgcttggcaacttgagcaatgaaggttctgctcataattctagtttttggtctgaaaaggatggatgtgtgtacaagccagtaacttgtcagacttgctcttgcaaaaacgcctgtgtcacaaccctcggagcacaagttgttgcaactgattcgtcaaatcaacaattttgtgataaggtaattttgtttgatgatcttctgcatgtcaagcatggaccgtcgaaggatcaggctttaagtgctcccataggtactgttaaacccatctcacccccgccagtgattgatctcgagtcctttgcgtacaaaccactgaagaaggatcctgtgccggtgaacacaagaaggtccaagttttttgttgtttatgtgagcagcttaggttacctggcacagccaaatccaggaatggtgcataatatgaaggattcgtctgctatatgctctgaaagaactgggaagtcaagtacacttcacaagcgaatggggtgccaattgctgtgggttctttttgtgttgttttcccccttctgtaaggaaatatgggcatgcctcttctgggtcaatctcttcatggatgagatcagcatgtttcttgttcttttgttgaagggttga

SEQ ID NO: 914 - DNA, 408 bp, Oryza sativa
  Clone ID: PAT_MRT4530_100830C.1
atgtggaagcgtggagccatcgataatttggaatcgaccgaggcgccggtgaacgtgttcgatagagtcgccgacaacaggtcaccgctgaagcccagcatccagccgccggcgaggccgtgccaaggaggaaaaggactcggcgcctggagctggaccctcgtgagtaaagtagcagcagtggaacagactcgtcaccgggcggagggcgatccccacgacgggcaggtcggcgtgctcggcgatcgtggtcatgctcaggcggcaggtcggacacaacattacgagctcagcccccatgaacattacgagctcaacacaagaaacattccaggatcacaattgagccaatttctcagtgacagaagtaaaaattgtacaaaaacacgcacatactccatcaattaa

SEQ ID NO: 915 - DNA, 329 bp, Oryza sativa
  Clone ID: PAT_MRT4530_100831C.1
atggagatccaacatgagcttgattcggatagggatccgaataggagtcctacgggccttggaggcccgagtgatggatcctatatattcgtgaggggtgtgaccggcggaggtattgcatcaccgtgggagtacggcgaggagaacgcacgaggaggagaaggtcgagccggtgcgatcgactacttcctctacaccgacgcgcgctacttcgcgagagttccttcgacttctcagtgttttcttccgctgcgccgcgcgtcgagtggtaacgctcaattttgtcgcaaaaactaccccagtaaacacatgcttaactaaatcaacat

SEQ ID NO: 916 - DNA, 793 bp, Oryza sativa
  Clone ID: PAT_MRT4530_100832C.1
cccacgcgtccggtgcctaacttgtttctggggaagtttgggatgaaccaaactctatctttaacataggttctttagaatcagcaacaaagttaatcttctatgcctctatggaatcttttggatgtcagcatggttactgctttatgcccaccatcttttcaccttacatatttatttatgctcttcaaatatactaatagtgaaatcccttcttatgtgtacaaccggataaagttgattaaatactaggattttcctttgtatggcatggagatgcaactactgaagttttttgctttgttagcttttatcctgaggagcatcctatgttgatagttgaaccatctacaaacacagggcagcaaagagagaaaaggatagacaaaattccaatgaccattggacatgattcgatctggcgttgaataatcaagaatttccctatcttttttaacaaaagtatccattaaggtatctattgactttaaagatcatgaaggcataatgcatatatcaaggctttgacatggtcttcgtgcaagaataaaatgccattttgtgttcgtcaacaagtgttatttatttttaatcaacaattgtttgtcttacttcaggttcactgatctaatgttttagtcttgcacctgtcacttgctaataatgttgtaaccttgctcctgtcacttgatagtatttcaaataatttccaatattatttgtgcagattaaaaaaaaaaaaaaaaaaaaaaaaaaaaaaaaaaaaaaaaaaaaacaaaaaacacaagggggg

SEQ ID NO: 917 - DNA, 310 bp, Oryza sativa
  Clone ID: PAT_MRT4530_100833C.1
aaaaaagggaaacttttcataataatttttttaaaacatttttgctggtgttttttgatcaccctgcgatcaaattttgctttataggcggtccaactccccgtcaggaaaaagtgggggggatatttttcttggtattacttaatacagcattcacattttttgaaccatccggtccgtacgtagtagtcctccacccgttcacatcgatgagcggggaccttattcccttgactcttagcctggctcttggattcacccgggattttcggtccggctcctgggggcgttccagctttccctttggggg

SEQ ID NO: 918 - DNA, 707 bp, Oryza sativa
  Clone ID: PAT_MRT4530_100834C.1
ggcacgagggtttctttaaatcagcaacaaagttaatcttctatgcctctatggaatcttttggatgtcagcatggttactgctttatgcccaccatcttttcaccttacatatttatttatgctcttcaaatatactaatagtgaaatcccttcttatgtgtacaaccggataaagttgattaaatactaggatttcctttgtatggcatggagatgcaactactgaagttttttgctttgttagcttttatcctgaggagcatcctatgttgatagttgaaccatctacaaacacagggcagcaaagagagaagtatgtccatatgttctgtatttaaattaattgtgttgcttatgtggtcctatatctaaatttaacaattctcaaaacctttttatcttttttgtatcgtgggttgtcaaaataagcaactatagtatttctacgtaaaacacccataaagggtatttcaatcgaaatcccaaaacaggatattggttctttcgcttgctcttgatgatactgtaatggaatggcaaacctatttcttcgcattttggctaacaaatctgaattattttgaagaatagaaggatagacaaaattccaatgaccattggacatgattcgatctggcgttgaataatcaagaatttccctatcttttttaacaaaagtatccattaaggtgttccttttatcat

SEQ ID NO: 919 - DNA, 165 bp, Oryza sativa
  Clone ID: PAT_MRT4530_100835C.1
atgggagcgaattttccaggatttatcggcgttgtgctttcagtggatttgccggcccagtccagcctagtctttgaagatgctcataggggtagggtttacttcgtcaatctctccaggatttgccggcccagtccggcccagtctttgaagatgctcataggg

SEQ ID NO: 920 - DNA, 323 bp, Oryza sativa
  Clone ID: PAT_MRT4530_100836C.1
atggattccggcggcaacagcgtgaattctgcggtggagtcggtggcggagtcgccggcgccggcttcaccggcgagcaatcccaccgcacccgccgcggtcaccaaggggcgtgggctacggcggtggcggcgtatcccccgggaacaccacgaggagggctcacctggctccggcggcggcggcggcggcggcggcagcgttgcggccgctgccgcggatgaggacttggcgcagcttcacaagcgccggcaccctctcggcgccgacgcgcctaaggggaaggaggaagccgccttcctttctttttctttttctcccac

SEQ ID NO: 921 - DNA, 243 bp, Oryza sativa
  Clone ID: PAT_MRT4530_100837C.1
aactctagcctttggtcgtcgggacacgtgggcgcccaggctgaacggcagcgcacgcggtcaaaacgccaccgtcgcaaatgtccagaagaaacgcgcgccacgtcaccctcctcggcagaacattccatttccctgaccacgcacggcacagcgagcggccgcgctatcgatcggtggcggcaccgcgcgatgacgtgtcatcagcggacagacgatatctggacggcgggcgcgttccac

SEQ ID NO: 922 - DNA, 729 bp, Oryza sativa
  Clone ID: PAT_MRT4530_100838C.1
gccacggggacggcgagctggttcgaccaatcgtagccccggaggggaaagggatcccgtccgcgccctgacgccaccgcctctacatggggcctcgccgccggccgcgccggcgccgagaagatcatcctgttcggagtgaagcatgcagacagccgagtcgtcatccgatcatgggaggtggacggcgacagcctctccctgtcccatggcgcggcggcggcgcacgacacgatgccgagcgagatgtccgagaggctgttcccgcacggcgacgacggcgaggaggagacgtcgtcgccgtcgatcggggtgtgcggcaacaccgccggtgggtacgtgtacaatgcggccgtgccggcgacgggcgccgtcctctacgagctccggcggggcggggtggagggcggcggcgtggagcggtgggcgtgggttgcgtgcgcgccggtggtggccgaagcggaggcgttgggacgcgtcatcctcgcgtgttcgccggtggggctgcacgagcttgcggacgaacggcttgcacactgaactaataatggctatcgtgacatgttgtcgatagccagttgagcttgtaataagcatatagggctgttacactctgaaaaataagtttggatactcccaccggttttataataattctcgttgttttggacaataataacacggcatattcactacccaattcgccctatagtgagtcgtattacaatt

SEQ ID NO: 923 - DNA, 504 bp, Oryza sativa
  unsure (1)..(504): unsure at all n locations
  Clone ID: PAT_MRT4530_100839C.1
aaatttccggggcccgagccgcgacttnggccnccacttgccgaagnaagcccggggggaggggggacttnctttntcggncggngngangcatccatccaaaaatntttgttcgggtnaaaaantanaacttttngaccggccgngccgnangccgttccgcttcngggtgcacctgaangangangacgacgcattntcnccgggcggcggatnggccggcggcggcggcggcatcccnaccgtttcccttgntgggtgngggctggangntntgntngtgtgctggttttttgtgcacctttcatgtaacagngagcagggcctcantttaanaanactgtttttgttttttaantttcacggtttcaccangaacccgagtgngatggttttaatggaacaagtaataaatcagtttaatttcctttcnaaaaaaaaaaaaaaaaaaaaaaaaaaaaaaaaaaaaaaaaaaaaaaaaaaaaaaaaaaaaaaaaaaaaaaa

SEQ ID NO: 924 - DNA, 4101 bp, Oryza sativa
  Clone ID: PAT_MRT4530_10083C.1
atgggcgccgccacggcggacgaagacttcgccaccccgccgccgccggcgcgggcgcccggcggcagggtgtaccaggtgggcggcgtgccggtggagttcccgtacaagccgtacgggacgcagctcgccttcatgggccgcgtcatcgccacgctggaccgcgcgcggcggcagggccgctcccacgcgctcctcgagtcgcccaccggcaccggcaagtcgctctccctcctctgctccgcgctcgcctggcagcgccactacccgctgcgtgccccgcccgccgccgcccccgacccgttcctccacggcggcggcttcgtccccgacgacacccagaagcaggcgacgcccggcgtcccggagaaggcgaccaggaagaagaatgttccgaccatctactatgcgacgaggacgcacgcgcagataacccaggtggtccgggagtaccgcaagacgtcataccgagttcgcatggccatcttggcctcaaggaagcactactgtgtcaataagaatgtgtgcatgagtggcaacatcgatgaactatgcaagtcactccttgatgacagtgctcaaggctgtccagaatacaagaatgcacagaaactaagtcgccatccatcccttcagattggtggctgctatgaagttcatgatattgaggatctcgttagagttggacggaaagtgaaggggtgcccatattttgctgcacaaactatggctgaggcagctcaactggttttctgcccatataactatctgattagtccaatcgtgaggagagcaatggacattgacataagaggctcaatcattgttcttgatgaggctcacaacatagaagacatagcacgtgatgctggaagttttgatgttgatgaagaatcacttctctttttgcggcaagaactagaagggttagtcactgatgaggctgttgcaaagatatacgaacccttgcatgaagttattcaggggcttaatggttggattgatgagcagggaaataaccttcaaaagaatgagtttgagcatcctgcttcattttggactggtgaagaggctatgaaggaactcaagtatgctggcattactcctgtaaacttcccagtattgcaagagtgtgcaacaaaggctattaaagctgcttcagatgctgaatcagaaggagtgcacttaagtggtggttcagctatgacactagagagtttgttctcctcattgagctacttttttgctgagaatggacgccattcaaatgattaccaacttgctttacagcgttttgctaaacgtgaaggtgctaatgtgatgtcttatgatcttatcatctgcaattctgtcacttctttcattggatggaagtgtgtgatgagtctgtggtgtctcaatcctgctgttgtttttcgagacatcgcagatctaacactttcagtaattctcacatctggcacactctctccaatgggatcctttgcatctgaacttggtgtccagtttgaagcttgcatggaagctcctcatgtaatcaatgctgattctcaggtttttgcaactgtgctatcatctggcccaacaggacgtcgactgaatgccagttatagaactgcaaatgaatattctttccaggatgaacttggagctacactagaagaaatatgcagagtagtgcctggtggtgctcttgtgttttttcctagctacaatttgttggagaaacttcaaaggcgctggtctcagacagagcctagaggaagtaccgaggaacttgagcctgtcctaaaaggatattacaacgcaatccttggcaaggctcccccaaagaaaggcagaggtggtgcaaaacaaattgtgaaaaatcgagtgacaaaggattcatcacaggagtctgctaaaggaggtgctgcttttcttgcagtttgtcgtggaaaggtatctgaggggattgacttctctgatgacaaagctagagttgtggtatcctttgttttctcctcatatgttttttatgcaccagagagaataaatgacgttcaagtaaagctcaaaaagagatataatgattcatacaaatcatcaaaagatttgttgagtgggaatgaatggtactgccatcaagcatttcgtgctctgaatcaagctgcaggtcgatgcattcgccataaatttgattatggagggataattttgattgatgagcgttatcaggaagaaagaaatattgtgtatatttctaaatggcttaggaattcaattaggaattgtggtactttccaggagacaatggatggattgacaaggttttttcaaaatgctgaggaacaaataaaaatcaaagctcaaggtgtgtcccctaaggacagattggatgcttgtgtactcccatctcaaggcgataaaagaaagctgccatggccagaaccaaatttctcaaaccagacagtactgcaaaataataaggatgttaagagtgaaagccacattgatggtgcaggagttgaccgtatgaagttgtctgatacatcatcagagtcatggcatctctcttcaaaacattctggtttagtaaagaaacaaatctccccagaaccagaaaatgtgccaatggcatgccaactccctccctcatacaaagttcaatataatttagaaggtgaagcagataatgggacaaattatgaagtaaatataaacttcattgacttggaagagtgtgatactaagccacggtatgtgaagttaactatctttaatccttcagaacacataacacaacaatctactgttatggaagaaacttatgcagaggtgccaattgctagtcccagtaaccgaaatggggaaaacgcctctacagtgatgaatgaaggagatccggttttagatctgcccatttcgctttcagctgctaacagaaacatttcttgtgtgtccacatcggcagctactcctgaaagatcaggtagcattagtcatttggagcatgaatcttggactaacagaagtgtgaattcccactgccagaaaaggagaaagttaagctcccctatgagctgctgtacctacacagagcgttcatgttctccaagcaaaccctacttacatggtggttgtgatgtaagcatgttgcctggagatctgagaactgatggaatgtgttgcaagagtatgaaaatgtcaagatgtgaaaatgttaaggttgaaagaaacagcaagcttgcagagttcccatcgagggaatctacgcaggagaagcttttcatttgttgcgctagatgcaaaacagcacttggattacaagaggatggctttcttgtttcatgctcatcgtctttgtcctcaaaattttacttgacatatctttggagacatggaccatcagcagatatccttccaggaaaagattttttggcatcaccacccttgaagataaaagtgatggtgtgcaatgtatcttcagtgaacaagatgatgcttggcaacttgagcaatgaaggttctgctcataattctagtttttggtctgaaaaggatggatgtgtgtacaagccagtaacttgtcagacttgctcttgcaaaaacgcctgtgtcacaaccctcggagcacaagttgttgcaactgattcgtcaaatcaacaattttgtgataaggtaattttgtttgatgatcttctgcatgtcaagcatggaccgtcgaaggatcaggctttaagtgctcccataggtactgttaaacccatctcacccccgccagtgattgatctcgagtcctttgcgtacaaaccactgaagaaggatcctgtgccggtgaacacaagaaggtccaagttttttgttgtttatgtgagcagcttaggttacctggcacagccaaatccaggaatggtgcataatatgaaggattcgtctgctatatgctctgaaagaactgggaagtcaagtacacttcacaagcgaatggggtgccaattgctgtgggttctttttgtgttgttttcccccttctgtaaggaaatatgggcatgcctcttctgggtcaatctcttcatggatgagatcagcatgtttcttgttcttttgttgaagggttga

SEQ ID NO: 925 - DNA, 4324 bp, Oryza sativa
  unsure (1)..(4324): unsure at all n locations
  Clone ID: PAT_MRT4530_100840C.1
cttcggtccttccgcccgcgccgcgcgagcacctcgccgccggtggagcagcgagagangtggaggagggagggatgagatcgcagctcgacgccgccgccgtctcgtcgccgccgcgggcgcccgccgcccggcggtgcctccgccccgcgctgccactggccctcaggtttcatgcgttccccgggcaggttcgcgtttatcgcggtggtggaatcggagtcggagtccgctccgcgggccatctcccaagcaagcgaggactagtaagagtgttcgactcagcaatggggatgaatgagaaggtgactaatggtaatctagaacaaccaaccacttccacatccggaaataaccaaagctttcctcctgagggaaggggagaagatatcattttcagagctctactgaaagggcgattttgcgtcgtgaagttgcggttggctatgttcaagggcaagaagcccgtatataaatcctacgaccaagttggagctactttcttttgaaatgacagatcaactcattgtgatatctgagtttgaaggtgaacagccagttgtaaggggtggagacacttccacataaaatttccagcttgatgttctgctgaaatttcagtagcttcatctattatgatgaggtcttgtatcacgttagatgttaatcattctttcccctgggttcaaagggaaataaaaaaaaagtcataaaggccatttagtaaaatatcatatatgccttaatagctgtagaaccttttgagcttttcttttatttatctgcagctaaactgcagaatcttttctgtttattgtaaacatagttgattcacatagtcaacttgtctgatgtagcaatcttgcataaaaaaatggaaaggaaagttctttgaaaaaaaaaaaaaaagcacagcagcaagtcattgaggatgatcatatcatcatctgtggagtcaatagtcatctgccatccatattgaatcaattgaacaagttccatgaatcatcaattaggttaggaactgctactgcaaggaagcagagaattcttcttctatctgatcttcccagaaagcaaatcgagaaacttggagatagctttgccaaagatttaaaccatattgacgtcttcaccaagagctgtagccttagcttgacaaaatcatttgagagagcagcagcaaataaggcaaaatctataatcatcctgcctgcaaagaatgaacgatatgaagtggatacagatgcatttctttccctgctggctctgcaatctcttccacaaattgcatctattcctaccattgttgaggcttctaactcaaccacatgcgatcttctgaaatcaatcacaggcttaaatgtgcagccggtggagatggctgcttctaagctgtttgtgcagtgttctaggcaaaaggaaaacgtcttcaaccttttcagctttcgggaagtagtaggcatgaagtatgtggatgtgaggcgtaggatcccagatgcagttgtttgtggtattttccgatctggaatgatgcactttcacccatgtgaggatgaagtgctgacagagaaagacaaactactacttattgctcctgtttcctggaggagaagagcacagtctacattctcaaattctccaaatggagcacaaaattcaagtcattactcagagtcaacagagggacaaagatcgtctagtatggctcttgaggtgaatgaaacacggctaaatagcatcagaaagcgcccctcaaaaacgctctccaagagcaatgattacacgctaggaccaagagagcacgtgcttattgttggttggcggccaaaagttactgatatgattcgggaatatgataattaccttggacctggcagtgtattggaaatattgtcagaaacccctattaaagagcggagcagtattgtcaaccccctcatgcagaaacaactgaaaaatattaaagttaaccatcaggtgggatgtcctatgaactatgatactctaaaggaagcaataattaaatttaagaaatccaggaagcatgaccaaaatgttccgttttcagttgtcgtaatatctgacaaagactggctaggtggagatactgcacaggttgataaacagttagcgtatactcttctccttgctgaaaacatttgccagaaacatgacattaaggttgagcatcttgtatcagaaattgtagacacgggactgggaaagcaaatgtctagaataaaaccatccctctcatttattggagcagaggaagttatgagccttgtaacagcacaggttgcgggaagtagtgagttgaatgaagtatggaaggatattctgaacgctgaaggagatgagatctacatcaaggaaataggattctacatgaaagaaggggagaagatatcattttcagagctcactgaaagggcgattttgcgtcgtgaagttgcggttggctatgtcaagggcaagaagcagtatataaatcctacgaacaagttggagctactttcttttgaaatgacagatcaactcattgtgatatctgagtttgaagggcagaacacaaggatgaggaagatgacagcgagtgcaaatggggataccgatgaaacttcaggcttaacaactccccggagctgtgaagtaccgctgtgttcttcatatgaaaatggtatcacccgtatccctgaagaaactcggttgcgcgacccagaggcttaccatcctaaggctgtctgcatcggtccctacttccattcagggagaaattcaccaagcttcaggcgaatggaacaacataagcactggtgtgtcaacagattgctggagcgtagcaaccacagccttgaacctttggttcaggccttcctgcttagactgtcaaagacaatcaaaacaaagtctttccagcagctatacgcaaaaccagttgatatgacagaggagggaatcggcatgatgctgctgtttgacggctgcttcattctgcatttcttgctgaggcatgacccgaacaaaggtgcggagcatgaatactggacaaagctggatgctgggcttctcgatcatgagtacgagacactccagtgggagagaccctgggaatggagcctggtcgccatcgacatgctcctgctagagaaccaaatacctttcgtcgctgtcaggatcctgtttgacattctgaagacggagcatgacaaagctgttgacctgacggcatgcgcgaggaacatgttcaacaagtacctgccagctggaatgtgcacatcaacacgcccaatccgctgccaggacgtgcgctgccttctgcagctgctctaccggtcactccttccaaatccaaagctacacagtgatctgatgaagacaccaccaaagccaccaagaaccggcattgatcctgccaagaagcttgacaccgatggggttcgcatcaccaggaggcagcaatggtattggtggccgttgagccatttccaggagcccttcaccttccttgacatcgtcttcagccatggcaaggtgcggatccctcagctggaggtcagcgatgccagcatccagctgctgcagaacctgatcgcgttcgagaaatgctaccagggcaccacgtcccatgtggccaactacgctgccttcatggacgctctgaattcggatcaccatgacacggaattgctgcgtaagaggagtatcttcgacgtccagttcacccctgcccagcctgagctctccctgagaaggcggtgcaagcaggacgtcgatccgtcgtcggagaactacctcagccggatgatggtggacgtagtcctgtacaaggaggcgagggccagcaggaagaagacgcagacgccgatatcggacaccgcgttcttcgcggtgctggctgtgacggcgtatgttttgctggccttctgttggtacatcgtttcttgatgatactatgaaagtggatggtggttttctaacttttgctgttgttacgttctgttggctgttaagcgggtcctttgctccttcacgaaacaagatagtaccaatgttgtgcgaaattgtggattgtcacgcatctgttgaagaggacttgcatgngaggtggagggacagagaatctgcacagtttcgctgtgttatctttgtaacagaaagaggatgtttcagagatttcagtatggtgtagcctttgccaatctgactccacaatgggtcatttgggatcagtaaggtcctttggggaagcaccatggtgtatggatggatggtgtatgactccaacattaaatatttaaccttggtttctatagatgaa

SEQ ID NO: 926 - DNA, 503 bp, Oryza sativa
  unsure (1)..(503): unsure at all n locations
  Clone ID: PAT_MRT4530_100841C.1
agccttaaaattaacccctcactaaaggggaataagnncttgcggcggcgctccaacatncagtaaccagctatgagtgtcctcaaggagggccaaatggacgctttcgtgtaaagataccaatgccaaatttgacgctcatgatcaccggctcatatcgtttacagttcatatttttactgcatacccgagtcctatcgactcttttaactttggtggtggtgtgggggtggtccattcttcgaatagtggatatgtctggcgctccgatttgtaatctggaaaactgccccgctacactggttgattacttttcatactctcggtgactagtgctgctgagtctggggctgcattccgctttcctgttgacttactcgttgtgctctcacattgggggtgttctagcggtgtacatgtactggcgggctgtcatgcggcttacacgcaatcggggggtgactgaagagagaaaggccgatcaatgcgcccgatcaaggggg

SEQ ID NO: 927 - DNA, 3331 bp, Oryza sativa
  Clone ID: PAT_MRT4530_100842C.1
atggagctggttacaggggtgctgggcagtttgctccccaagctgggcgagctgctcaaagacgagtatgacctgcagaggggcacgagagagaagatcaagtctctgtcgcgggagctcgagagcgtgcacgctgtcctccgtattgtcggcgaggtgccatcggagcagctcgacgagctggtcaagctctgggcacgtgatgtgagggagctgtcctatgacatggaggacatcgtcgacaccttcttggtgcgtttcaatgacggtcatgagcccgatgacccacgggtgctcaggcgcctccgcaagaagatgagcaaactgttcaagaaagccaaggatcgccgcgagattgctggcgcgatacgaagaatcaatgagaagctccaggaggtggcaaccaggcgtgccaggtacagagtcgatagcattgtcacaaagcctgcaggcccagtgagcatcgatcctcgcattcaggctctgtacaaaaggtcaacagagcttattggcgttgacggaccaatggacaagatcataaacatgctatcacctaggaatgatattcatctgtctgataagaagaagattatctcaattgtgggatttggaggactaggaaagaccacccttgccaaagcagtctatgacaagcttaaaccagatttcgattgtggggcttttgttccggtcggtcggaatcctgacatgaaaaaagttttaagggacattctgattgatcttgacaagcaaaactatatgcattcaaatacaacgacgacattggatgaaaggcagctcatcaacggaatcatggctcttgccgtgggacagaggagcattgttattattgatgacatatgggataagaaatcatgggaattaatcagatgtgcactgcaagatagtaattgtggaagtagagtagtcgtaactactcgtatttctgaagttgccacacatgcgggttgtgtttacaatatggagccactttctcgtgatgactctgaaaaattgttatacacaagaatagctagtgctgaaggcaaatgtcttactagaccatcagccgtggcatgtgagaaaattttgaacaaatgtgatggtgtgccattagctataataacaatagctagtctgttggcgaacaaacccgaagaggattggtctgaggtgtacaattccattggttttgggcatggaggtaataacgatgtagagaatactataaagatattgtcttttagctactatgatctgccttcctatctaaaggcttgcctattgtatctaagcatatttcaggaagatgttgagatcgacaaaaatcttttgatatggaaatggatagctgaaggttttgttcaggagaaacaagcagtacggatagggttatttgagcttgcggagggttgtttcaacgagctgataaacagaaacatgatccagccagaggtgtcacaatatgaatggtatggaccgaagttccaaagtgaccaagtgtatgaggaaggctatgtatatggttgccgtgttcatgatatgattcttgatatgatccgttcattgtcaaaggaagaaaattttgtcactgtattggacagccatgagcagtcggaacttcctctgagccatgctcgcaggttagccctgcatggtatgagtattgaacagcaaaaccgttgtcagatggctaatatggctgcagagcaagcgaggtccttttttgccaacaagtgcgatgatattagcttggttttcccatacttccgagctgtacgggtattaggtctagaatattcagcggattatggtatttggcggcattttaggagtttatttcacctaaggtaccttgggctagtaggtgtcaacattaaagatctccccaaggaggttggagatctgaagtttctgcagacattggatgtgaagagaacttctatatcgaaactgccagatactgtgggcatgctaacacagctgctgtgcctacatgcttacgctgccgcaccggttggtttgatcgggaagctgacatccctccaagagctgtggattataaagccttctgcagctgcatacatgcaccatgacgagaatgctgatgacatgtgcttcagcgagaaggatgctggtgacatgtactctgatgagaagaatgctgcaaggcagtttgttaaggacttaggtagactcagagagctgagggtgctccggactaagattgatgtaatggatgatagcatagcaagagatttgctagagtctctagacaatctgcacaagataaggtatttggaaattttgggtatattatgggggatgaacgtcacatggaccagaacaggattcatctccccatggcacctccgccgcttgtgtttggtatgcatcgagttttccagattgcctgcttggattaactcgtcagctcttccaaacctctcctttataaacgtgacagtgcaggttatccaggagcaggacatggaaacccttgggatgttgccagaactatattgcctaaaattgtactcgcgttacacaaacgtagttagcattaagcatactggcaatggtggctacttccagaagttgaaatccttcaagattgttggctcatcagtccggtttgatctgagttgctgcgactgcagtggtggtgagataaaatcttctttcatgccaagcctcgaaacctttgagactgatgtccatgtgcggttcctagaagatgcgaacatgcttggtttcgacaagcttggcttggagaacctccctagttcgctaaagagaatcattgttgtaatctgttgccgagatgcctgtgatgcagaggtggaggaagcacaggcggcattggagcatgcagctgacatccatcccaacaatcccactcttaaaattgatagatatggagaagaaattaaacggcccttgtgatacccaacccccagcaacaggttggttatctatcttgatgactttcacaatcatgttgctggttgtaagaatgaatcatcacatacttggcaacttcggagtatatgcctgtgaaactctagacagaatgtattggatatcgttcactccaaaaatacaagtttacaacacaaggattctataccactagtttctgatggaaatggcagcaagcatgaatgagctgaacatgtcaaccttccagacgtgtgtgtgctcatgctgtttactttgcagatcgtttaacacatcgtgatattgaacagacaacaaaaatatcacctgtatattgaaatgaagtgaggaaatctctgatgatgtcaatgataaaaaaaaaaaaaaaaaa

SEQ ID NO: 928 - DNA, 1912 bp, Oryza sativa
  Clone ID: PAT_MRT4530_100843C.1
tccttgtgctccctctaataaagcatatatgggatcattacagcaaccaatattgttacttcatcagtcctagtatgaaacagtcgtgtaattcccctgtacacgttctacgctaacacaacaccctcaagcatctcacaaaatcacactacagatcccgcaaaaaagctcgagattttcagcaaagcgggcagcgcacgagcccattctcgttgcagtcggggcagcgccggaaggtgtccagctcctcgaggaacaccttgcagctgccggagcactcctcgcacggcacgaaccggacgccgccgcagccggagcacgcgtccagcgcaatgcccttgcccgcggcggccggcggcgccatctcgcagtcgcccagcgccttggacagctccccggactcgtgcatgcggcggacctcctcggcgccacccaggtgcctgccgtccgcgaacacctgcgggaggctgcccggcgcgcccagcgcggcgtggagctcctccttgaacccggcgtgcatcgacaggtcgcgctcgtcgacgagcacgccgtagccttgtaggatggacttcgtcgcccagcagtcctcgtacgtcttgcggatgccgcggaggctggtgaggtacagcaccactttccggtcgctatcaggcggcggcggtggaagctgcggctctggctccggaggcggtgacggtgacggtggcggaggcgccatcttggcgagcttcgcgtcgatcctcttctggaacgcgctgacccgctcgcgcacgatgcccggaaacctctgtatctcgcgcttcttgacgcacacctcgtcgccagggcattcgccggcagcgggaacctcgtcgagcgccttccggaaagcggcgatgatgtctggatcgaactccggtgacccgggcgtcgactgcccccgtcgctcctcgccgcggacgtcgccctcctcatccttgtcgtccaggccttccatgagctcccacacatttatcacctccggctcgcgggccggcgtcttggccggcgccgtggtggccagcaccaattgcctctgccgcctcgccatctgctgtggcggcggcgtggtcttcgccgcgccgccgtcgtcgcgccatttcatcatctcctcgtcccggtcccgctcgaggctgagcgaacccagtgtggaggacttgagcgagacggtgtggtgcacggcggccggaccggagcggctccgcgcgtacgccgtcttgccgccccggacgccaccccggaacgcgtgcctggaccccgtgcagcccatccccgatccctccaccaaacaaccaaccaaaaatctcccgcactgccaccaatacaacccgaacgcaccactcaccggcagaggaacgactccttggatcactggaccatcacgccccgacgcggagaggagaggtcgatgtccatgcggcggtcgcgtttcaaccttgaactgcagatcgccgcgttcctgaacttgaattcggcacagcgggagagtgcagcgacgagcgatgcgttgcggcgggggatcacccgtcgccgttgctcctcctgcccaggcgtccatccatccatctaccagctcggcttcttcccagctgtagctcacggcggcgctgccatcgccattccacccatcgccgccgcctttgccgcagtcccccctctcgtgcacggcgacggcggcagagtagagtggcggcggtggagcaaagcggcacaacacggcggcggagtagatcggcagatcggcgacggagtagagcgacagcgtggcggcgcgcctttcagttagctgcttgcctgctgaatcaggaaaagggaaaaggctgatgatgatgaggatgcaaaggtcgacgctttctgggcctccccgggcacagttcggcgtcgatgtcgccat

SEQ ID NO: 929 - DNA, 1328 bp, Oryza sativa
  Clone ID: PAT_MRT4530_100844C.1
cccacgcgttcgcggacgcgtgggcggacgcgtgggcggacgcgtgggcggacgcgtgggcggacgcgtccgcttgtgactacacccgcttcgcttcctcccctctctaagccggggaaggctaagccatggcgtcccggtcaccgcccgcaccccggtcgcagccctccgctcgtcggcgtcgctcaagtctaccttcctagggcaatcctccacccgcctcgcccgcgcaccgactacgaggcgtaatgttcgggcggaggccaagggagagtggctccccggcctcccttctcccacctacctcaacggcagcttcgccaggcgataacgggttcgacccgttgggtctggcggaggacccggagaacctgcggtggttcgtgcaggcggagctggtgaacgggcggtgggcgatgctgggggtggccgggatgctgctgcctgaggtgctgacgaagatcgggttgatcgacgcgccgcagtggtacgacgccggcaagggcacctacttcgcgtcgtcgtcgacgctggtcgtcatcgagttcatcctgttccactacgtgggagatccggcggtggcaggacatcaagaaccctggctgcgtcaaccaggaccccatcttcaagagctacagcctcccgccgcacgagtgcggctaccccggcagcgtcttcaaccccctcaacttcgagcccaccctcgaggccaaggagaaggagctcgccaacgggaggctggcgatgctggcgttcttggggttcctggtgcagcacaacgtgacgcagaaggggcccttcgacaacctgctgcagcacctgtctgacccgtggcacaacaccatcatccagacgctgtcaggctgagcgtgtgatcgatttcatcaggcgccagggcatctcaaggagcttgatgagttcaggctggtgaaaccgatgattgggcgatggaagatgttctcttcttgtttcttcttttttttttttgtggagtatgcatgtataagatgttaatgaattggggggaggagagagagagagagatggatgtgatgagattcagacttactgtgtgtgttgtggtaattgtttcctgcatgcatggatctggatgcatgggtgagggggtgagttgagtggtgaatttctgatgtacagtactacagggggataaactatctcatggtagcagcagtgttctagctatctcatggtctcgatcttaattatggtggataaactacgcttaattgcttgtcaaaaaaaaaaaaaaaaaaaaaaaaaaaaaataaaaaataatccacagacccagggggggcctgcagccc

SEQ ID NO: 930 - DNA, 337 bp, Oryza sativa
  Clone ID: PAT_MRT4530_100845C.1
ccggccgggaacctaccaatgtagcttcttctcctgtgacaactctcttctctcacaacatccgaggtctaccgggaatccctctgtatattaatcctccctcatactacttctccatccaaacatttcatctcttcctgtctttgtcttgcgcattatacccagtcctcaacttctttactaatcaccctcagttacatcatagcaaaaatgggcgtcaccgaccgcattattcagattggaggccagatctctggcaacccgaccgctggcggtcgcgagaagacctccagaagaccctgatgatatcgttgtcaccgccgcctgccgaagcgca

SEQ ID NO: 931 - DNA, 149 bp, Oryza sativa
  Clone ID: PAT_MRT4530_100846C.1
ctttttgtttgaccggggcctactcgccgtcgcccgcggggagccaaatctgtgctcgctcggcgctgtggagatgtaccgctcttcaccgacgccggtctccccgagatcgccgccgggtgcacctcgctggagcgcctgcacatcac

SEQ ID NO: 932 - DNA, 219 bp, Oryza sativa
  unsure (1)..(219): unsure at all n locations
  Clone ID: PAT_MRT4530_100847C.1
cccggtcgaccacgcgtccgctatagtgcacccgataggaccaagggtngttaccatatttagaacttcaagattcactccaacggtgcttgtacttgatacggatagctgacaattcattgattgccacattgctaactggcagagtattacacagtaatataatcatctttcatatctaatacaataagaggtggttaacctatatgatgcttgttt

SEQ ID NO: 933 - DNA, 584 bp, Oryza sativa
  Clone ID: PAT_MRT4530_100848C.1
atgtctcgttaccgaggacctcgtttcgaaaaaatacgccgtttgggagctttaccgggactaactagtaaaagacctagatcctgaagtatctttaaaaaccaattgcgttctgggaaaagatcgcaatatcgtattcgtctagaagaaaaacggaaatttcgttttcatgatggtctgacagaacgacaattacttagatatgtacatattgctggaaaagcaaaagggtcaacaggtcgggtttgactacaactacttgaaatgcgtttggataacatcctttttcgattgggtatggcttcgaccattcccggagccaggcaattagttaaccatagatagacatattttatttcacggtcgtctagtcgatatactaagttttcgttgcaaactccgagatattattactatgaaggataaccaaagatcaaaacgctgattcaaaattctattgcatcatccgcccacgaggaattgccaaaacatttgactagtgactcattccaatataaaggactagtaaataaaataatatttagtaaatggtgaaaataaatgagttcttagtcgtagaatat

SEQ ID NO: 934 - DNA, 1102 bp, Oryza sativa
  Clone ID: PAT_MRT4530_100849C.1
ctttttttctttctcttggcctgctcgggaatttctttctcagatttttctctttttttttttttttttttttattttcacatcggagcaaagaggttgctcatcgatcattattagtataaagtataccacatatcgagtatgtatttccaaatctctaagtacacttgcaaatcttttagtagaaaatacatattcacaagatatggtgctacaaggcactagcactctttttttagttagtgcagcacagcaccggtcggaaatctacattctcctcagattgtccagcctcgcctgcaaatccgcgtcgattccaccgtcaccattcccaccagcagattcagcctgcgcaacctttcctgctgctgcgggctgagcgacggcagccgaaggggcctttacaagctcttggttaatatcaatgccaatttcatcaaggacttgattcacaagctcctcagtttcttcctcttgatcctcatctccctccaaagcatcatctatagcatcccccatgacttcactcgtcatctccattctctcattttgtcgctcaaactccatcataatcctctgtaatcctggcagatttaactgcctgttcatctgacccatagcctttgtaacacctttcatggcatcacccatagcttgtgtagatttcagcgtctgaactcttagagaaactccttgaagctgagatttaagttggtaaaactttgtgatctgatgccgtgttcgaataagatctttggccattactttgacagcacccatctggccttcctttgctgttttcttaatctcagtaatgagttttttctcctgggcttgcaatccctgtctttctcgttcaatttcccttattgatcgatccagcattctcttgttctctctcaagagctcagcaggcgtcttccgcttcccgaacaagaaactcatcttggcaggcggggtggagaggaaccgagacgaggtggatcgaatcgaaggagctcggatcgagtagaggaatttggcttctcctcgctcgccgacgccgatggcggcttcgctaccctttcccttctcttcgctaggaggagaggaggagtagttt

SEQ ID NO: 935 - DNA, 840 bp, Oryza sativa
  Clone ID: PAT_MRT4530_10084C.1
atgagtcctggtgtttcggccaagaagcgccacgccggcgtgaggttcacgctcggctgcggctgcaaggacgcgaagagcgtgtccgtctcggcgccggtggtggggacgccgtcgacaacggcgacgcggcgcaggagcgctgggatgaacccgtcggggtcgacgacgaccgacactcttaccataacgtccgcgttgtcgtccttcctgtgggagcgctccgtggtggagttcgacgatgacggcggcgactacgggccggagagcttctccggccttctgcgcgagctcagcgagctggagcagagcgtcgcgtcgtggggccggaagagccaccaccagaaccacgacaagaagcactcgccgccgtcgtcatcgccgttgccatcacaggaggacaggaaggagaagaacggcagcaacggcgatgccacggacaaaccaggagactgccgtgacggcgacgatggcgtcggtgtggggctcgacggcagcgtggcggtggtgaagcagtccgacgacccgctgggcgacttccggcagtctgagcgagccaggcgccgacgtggtcctagcactcctcggcgggttccccttcgtcgccgcaccgacgctgctacaagatcgtggttgggccctcggcgacgacggcgagagctcccctgctcccacgccgccgtcaccgccgccgccgccttgctcccctgctcccgcgtcgtcgtcgccgtcgccgtcgccgccgccgccgcgacgtcgccggccgccggacctcctctcccgcatcgccccgtcggccggcggcgccggtctgcccagagcaccaaacgagaagagtga

SEQ ID NO: 936 - DNA, 873 bp, Oryza sativa
  unsure (1)..(873): unsure at all n locations
  Clone ID: PAT_MRT4530_100850C.1
ctacattctcctcagattgtccagcctcgcctgcaaatccgcgtcgattccaccgtcaccattcccaccagcagattcagcctgcgcaacctttcctgctgctgcgggctgagcgacggcagccgaaggggcctttacaagctcttggttaatatcaatgccaatttcatcaaggacttgattcacaagctcctcagtttcttcctcttgatcctcatctccctccaaagcatcatctatagcatcccccatgacttcactcgtcatctccattctctcattttgtcgctcaaactccatcataatcctctgtaatcctggcagatttaactgcctgttcatctgacccatagcctttgtaacacctttcatggcatcacccatagcttgtgtagatttcagcgtctgaactcttagagaaactccttgaagctgagatttaagttggtaaaactttgtgatctgatgccgtgttcgaataagatctttggccattactttgacagcaccctgtccatttttagcagcaaagtggaattgttcatccacgaccttccaccacttcatcggcaggttatccaatttcatctggccttcctttgctgttttcttaatctcagtaatgagttttttctcctgggcttgcaatccctgtctttctcgttcaatttcccttattgatcgatccagcattctcttgttctctctcaagagctcagcaggcgtcttccgcttcccgaacaagaaactcatcttggcaggcggggnnnnnanaacacctcaaactagataaatcaaatcgaagncgctcggatcgagtagaggaatttggcttctcctcgctcgccgacgccgatggcggcttcgctaccc

SEQ ID NO: 937 - DNA, 412 bp, Oryza sativa
  Clone ID: PAT_MRT4530_100851C.1
gatatctttcgttgtctcctgcagctactcgccttcttgcgccgccgccaagacgagtcgcggctgaacagggggagggccgggcggcgatctccatcagagcggaggggaggcgatcctggcggctcaactattggatagcaacattgaggattgcggatgttaagaattttgatatcactagcacgattgcccctctcgccgactgttgaccaaggagaacgtccaccacgccggggtccaggcttctagaatgggagccactattatgtgcctaacactacacgtccagggctatactggatttgaagagaagaaaaaggggtgttcaagaacataggaaagggatgggacttggaagcataaatggactgagggcaagcaccttaaacgtgacattcttgcttttttc

SEQ ID NO: 938 - DNA, 315 bp, Oryza sativa
  Clone ID: PAT_MRT4530_100852C.1
atgcctaacgtttgtgggcctcaatgtccggtggtatctgctgacatggcagccgaccaccacagccgcctgttgatccgctccggcatcgacctgtcgacgctagcatgtctgacaaggttcgtgctcaagcacggggtcaccggagacaacgctgccatcctttcccttcgtctgctccatgtccatctgcagatcaatcaacaacccaagttagcaaacaagcgatcaccagaacagacatgcaacatgccggcgatgtgcgaccctggcaacggggaagcctaccgcggcgtggccagtgccaacgactaa

SEQ ID NO: 939 - DNA, 452 bp, Oryza sativa
  unsure (1)..(452): unsure at all n locations
  Clone ID: PAT_MRT4530_100853C.1
gtttctttntcctcctcctcctcctcctcctcttcttcttcttgttcgtcgggttcttgcgtnaggcctgcttggggggatcctcgggcttcttgtcgcaagaaaccaaggaggaggctttagccgnattacagggctacttggagttcaggcttgaaagtggtggccaggtggggttgccctgatgccttcaatgatctnattntttctatgcggtccctgtggttctaaactcgaggacccgggtctggattttttggaatttnctgttgtcagaggttcgtgtgtattgcttgtnttggtccttttcctttattggctcggaggaataccaatcatagggagatatgccaaanagactggacatgtacaaggaattttggtctgccaatacttgaaaacatnggttggctgagcaaaaatttttaaaggtcagtaaatagagttcaaga

SEQ ID NO: 940 - DNA, 219 bp, Oryza sativa
  Clone ID: PAT_MRT4530_100854C.1
agtgcacggatcgctccgaaaatgtggccgcggccgcgactctcccgtccgcaggacggcacaatcgggcatgatcttgtgggaaaggataaggtgcctgtctgccgtgatgcggaaggaagggagcactgtgtcgctggggtcttaagccatggtgcccgacgaaaaagtgccgaagagcgtggcgcgtggaacagtgtaaagtggcgagaatattag

SEQ ID NO: 941 - DNA, 596 bp, Oryza sativa
  Clone ID: PAT_MRT4530_100855C.1
ctgcaggaatcgcacgaggcttgcatgtagtgacgacagtgcctgaaggagtggtcatgtttttgcttcctatgaatatgaaagatttgtttatgatgcatgggcagcttcaggcatgatttccaagatttctaagaagaaacatgtcttcagagagcctaaaaacagtgttgatgtcgaaatgacgctcaacaaatacaaggaggcaattcaatcctgtagcaagagttcgcaagatacaggagtcactggggcacttctattggctgttgttggtgggaaaatttctgaaggcataaacttcagtgatgggatgggccgttgtgttgtaatggttggattgccttatccaagtccatctgatgtggagctgaccgagaccataaagtatatagaaaatatttctaaaccagttttggttgggggtgataattcctcaagcagcaaatatgatgatgaatgcaaacttcagcctggctttgatatattaagaaagtgcaacaaaggtggacgagagtactatgagaacttatgcatgaaagctgtgaatcaatctattggaagagcaatcagacatgcaaatgattatgctgcaa

SEQ ID NO: 942 - DNA, 198 bp, Oryza sativa
  Clone ID: PAT_MRT4530_100856C.1
atggcaatgatggcggcggagaggagctgtgcacgggcggtggggaaggagcggcgtgcaggcggcgggcagaggagcgccgagcatgcctccccaattgttttcctcgggatcatttgccacatcggcctctatcacctggatagttttgctttctttggcctttgcacttgtagctgccaacttgacctcctttag

SEQ ID NO: 943 - DNA, 532 bp, Oryza sativa
  Clone ID: PAT_MRT4530_100857C.1
atattttagacctcgatggcatcctgctgttctttccagtaaataaaaagtcattccctcgcaaatatctcagtttgctgcttcacaccataaaactgatgaaagttgatctacaaccgttagtggataagataagattgagaataccgagttggaagggcagatttttcacatcggctagcccggaggtcctcgtcaaatcgaccttgtcggcaacacctatctaccaccttacagttctaccatagaatgaatggctttataagcggattgatcattttagacgagctttcctctagaaagaagatgactcggacaacgtctgtgcgggaagctgccttctaaattggaactatgtttgcaagccaaaggattatgggggtcttggaatcttgaacttggaaaaaattgcacgaaccttaagactgtgttggctctggtttggttggaaagatgaatcgaaacccggggctaacatggactgtccgcctcctgagatgaatgggtccctcgagagtgtatgaaaaaaaat

SEQ ID NO: 944 - DNA, 309 bp, Oryza sativa
  Clone ID: PAT_MRT4530_100858C.1
atgacggcgtcggtctcgtcctctgattgggcatcgatgtcggttcggctcgtgtttgatgtcagcgaagtgaccgggtcccacttcttcaacctcatctacctctgtggctctgtatgcttcaacgatgccggtgggagagaagcagggtgcggcgggtggctgacggcgggagaggagggggagtgcggcgggcggctgacagcgggagaggagcggggtgcggcgggcggtaggcggcgggagaggagcggggtgcgcccgccgacgggcttcggcgggagaggagcggggtgcggtgggcggtag

SEQ ID NO: 945 - DNA, 139 bp, Oryza sativa
  Clone ID: PAT_MRT4530_100859C.1
gctcttgaagttgagaccttcttgttgccttatgccgttgagtggaatgatccaaagaatcgcgactgcgagccacggcgctacgcaggagaaaatggtggctgcgccgtcgcgcggtgcgacccggaccgtgaaaacc

SEQ ID NO: 946 - DNA, 633 bp, Oryza sativa
  Clone ID: PAT_MRT4530_10085C.1
atggtggtggcggcgaccccggaggcggcagatccggcgctgccgtggccggatctggccccccggtggatggagcgccgccggccgcgccgcattgaggcggtggacggcgagcgcgaggcgagctcgaggcgacggacggcgagcgtgaggcggcggactgcgagtgcgaggtggcggacggcggtggcgagcacggcaccggtggaggaggccgggcaaggcgcgcggtggccggatctcgtcgccgccatccccgagcgtgacgaccaccaccacgacgtcgtcctcgtgctgctcggccgcgagcacgggcacctcaagcccgtcgacggcgccgagcttgacctccgccatcctccgcctcctccgttgctccttagcccgtcgacgacgccgagctcgacctccgccgcctactcccgctcctcgccgccgctcttgccgtcgcctcctcccgctcctcgccactgctcgggcggttgctgtggcggcggagggcccaagagaggggaacgggcgagagagagaaagagagagaggagaggggtggaaggggaatctatcgctggagacacggtggccataggaaccggtcgctgcaatgcgttgctcgtcttcgtccctggctaa

SEQ ID NO: 947 - DNA, 1446 bp, Oryza sativa
  Clone ID: PAT_MRT4530_100860C.1
atgaccggagcctgcgaggcggcgccggcgcggcggcgggggctgacggtgctccccctcgtcgcgctcatcttctacgacgtgtcggggggccccttcggcatcgaggactcggtccgcgccggcggcggcgcgctcctcccgatcctggggttcctcgtcctccccgtgctctggtccctccccgaggcgctcgtcaccgccgagctcgcctccgcgttccccaccaacgccggctacgtcgcctgggtctccgccgcgttcggccccgccgcggcgttcctcgtcgggttctccaagtgggcgtcggggacgctcgacaacgcgctctacccggtgctcttcctcgactacctccgctccggcggggggctcgtgctctccccgccggcccgctccctcgccgtgctcgcgctcaccgccgcgctcacctacctcaacttccgggggctccacctcgtcggcctctccgcgctggcgctcaccgcgttctcgctctccccgttcgtcgcgctcgccgtgctcgccgcccccaagatccgcccgtcgcggtggctcgccgtgaacgtggccgccgttgagccgcgcgcctacttcaactccatgttctggaacctcaactactgggacaaggcgagcacgcttgccggcgaggtggaggagccgaggaagacgttcccgaaggcggtgttcggcgcggtggggctcgtcgtgggcgcgtacctcatcccgctcctcgccgggacgggcgcgctgccgtcggagacggcgggggagtggacggacgggttcttctccgtggccgccgcggccatgtccaacatggggctcttcgaggccgagatgagcggcgactcgttccagctcctcggcatggcggagatgggcatgatcccggcgatcttcgcgcgcaggtcgcgccacggcacgccgacgtacagcatcctctgctcggccaccggcgtcgtcatcctctccttcatgagcttccaggagatcgtcgagttcctcaacttcctctacggcctcgggatgctcgccgtgttcgccgccttcgtcaagctccgcgtcaaggaccccgacctcccccgcccgtaccggatccccgtcggcgccgcgggcgccgccgccatgtgcgtcccgcccgtcgtcctcatcaccaccgtcatgtgcctcgcctccgccaggacgctcgtcgtcagcgccgccgtggccgtcgccggcgtcgccatgtactacggcgtcgagcacatgaaggccaccggctgcgtcgagttcttgacgccggtgccgcctgacagcctccgtggatcatcatcatcatcatcctcatcggcagcgtccgacaacggcggcgacgacgacgtcgaggacgtctgcgccctcctcctcgccgccggcgagcacgccggagaaggcgtcagtgtcagcaaggagaattattag

SEQ ID NO: 948 - DNA, 1819 bp, Oryza sativa
  Clone ID: PAT_MRT4530_100861C.1
ccttgtcgccgtcgccgtcgccgtcgcctcaccggcgccccaccaacccccaaccccccgcgcgggcggcggcggcgcctatgaccggagcctgcgaggcggcgccggcgcggcggcgggggctgacggtgctccccctcgtcgcgctcatcttctacgacgtgtcggggggccccttcggcatcgaggactcggtccgcgccggcggcggcgcgctcctcccgatcctggggttcctcgtcctccccgtgctctggtccctccccgaggcgctcgtcaccgccgagctcgcctccgcgttccccaccaacgccggctacgtcgcctgggtctccgccgcgttcggccccgccgcggcgttcctcgtcgggttctccaagtgggcgtcggggacgctcgacaacgcgctctacccggtgctcttcctcgactacctccgctccggcggggggctcgtgctctccccgccggcccgctccctcgccgtgctcgcgctcaccgccgcgctcacctacctcaacttccgggggctccacctcgtcggcctctccgcgctggcgctcaccgcgttctcgctctccccgttcgtcgcgctcgccgtgctcgccgcccccaagatccgcccgtcgcggtggctcgccgtgaacgtggccgccgttgagccgcgcgcctacttcaactccatgttctggaacctcaactactgggacaaggcgagcacgcttgccggcgaggtggaggagccgaggaagacgttcccgaaggcggtgttcggcgcggtggggctcgtcgtgggcgcgtacctcatcccgctcctcgccgggacgggcgcgctgccgtcggagacggcgggggagtggacggacgggttcttctccgtggtcggcgaccggatcggcgggccgtggctgcgcgtgtggatccaggccgccgcggccatgtccaacatggggctcttcgaggccgagatgagcggcgactcgttccagctcctcggcatggcggagatgggcatgatcccggcgatcttcgcgcgcaggtcgcgccacggcacgccgacgtacagcatcctctgctcggccaccggcgtcgtcatcctctccttcatgagcttccaggagatcgtcgagttcctcaacttcctctacggcctcgggatgctcgccgtgttcgccgccttcgtcaagctccgcgtcaaggaccccgacctcccccgcccgtaccggatccccgtcggcgccgcgggcgccgccgccatgtgcgtcccgcccgtcgtcctcatcaccaccgtcatgtgcctcgcctccgccaggacgctcgtcgtcagcgccgccgtggccgtcgccggcgtcgccatgtactacggcgtcgagcacatgaaggccaccggctgcgtcgagttcttgacgccggtgccgcctgacagcctccgtggatcatcatcatcatcatcctcatcggcagcgtccgacaacggcggcgacgacgacgtcgaggacgtctgcgccctcctcctcgccgccggcgagcacgccggagaaggcgtcagtgtcagcaaggagaattattagtgtacagtgattggaatttattacagtggcttctcttcagtttgagtaaatatctacagaaaatgcagaagaatacagtttagttttctgaactcctgatgagcttttgtcaggaaaaaaaactgttgtcttatgtgatctgaatcctgaaaacatgggagcaaatcttgcacatgtcaaagattaatttgcccccaaagtgataaatacagtttagtttattaagtacagagaaaaaaaaaaaaaaa

SEQ ID NO: 949 - DNA, 680 bp, Oryza sativa
  Clone ID: PAT_MRT4530_100862C.1
acgatggcacctacactgctgcccgcctccgcgccgcgccggcctccacctcgcgagcctcctccaccaccaacggcaccgccgccaacggatctgaaggaggagaagggggagggtgggagagagagaggaggaaagaggcccctgggagagggagggaactggcgagcctcctccaccaccgccgccacctcgcggtgcgtgcgctggcctccacctcacgagcctcctccaccaccaccgccgctgccgccaatggatctagaggaggagaagggggagagcggcggagaggaggagggagggccaccgggagagagagggggctggcgcctcctccacgacaaccaccaccgtcgctgccgccgcaacctggccgcgcgtgcgccgacctccgtgtcgaccgcccccacctgggccagccgctggacgtcgtggccagtgaggacagcggtggacggcggcgtcacggggagggcgcgacgggttgcgggcaaggaggatggtggaggcggtgggccacgccgaggcggatggtggaggggacgggcagcggcgtcgcgggaagggcgcggcaagcggtggtccgcaccgaggaggacggtggagtggacggacagcggtgtcgctgggagcgcacagaatatatgggtatctggtattacaagtttagggggtga

SEQ ID NO: 950 - DNA, 582 bp, Oryza sativa
  Clone ID: PAT_MRT4530_100863C.1
atgcatcacccaactggaaccgaactggatggcttcagctcatggaattcagcagctgttgatgtaggggttggtgctgaggcagtgaggctatgctgcagaacatgtggtactgactgcattgacctcgggggaggtgggccgatagggaacaccggcgacttcgtggttccctcccgtcagtgctcccgcttcctccctcctcccggttcgatcctgacggcgccgcattctagtccctcctacccattccaccagagcgaggacgggcatcgcaattcgcaagggcgccggcagctgcaaggtcaaatcgcgccagggcgattggctgctacgggctacggcgaggccaccaggaaacttgaagcagacaaagcttttcactcgagaagctcatctagagaagccaatataaatccacgaatttcagaggcctcgtgccaaggaggcacgatgatcaagagcaaggggggagatagccgacagatgaaggcaacggcgccctgtggctgcagcagaaaggacaaagaatcggagacggccatgggagggagcaggggcaccctgccgcggggaggatag

SEQ ID NO: 951 - DNA, 316 bp, Oryza sativa
  Clone ID: PAT_MRT4530_100864C.1
ttgaagaccccctcgcgcagaaacgaaagcggatgcttctccggattccagacgcttatacgcctcacagtaggagcagtcgccggcctcagactgcgagtgttaggggtgctcgcggacaggggagatccaggcgagggagctcggaggatcgatcgacgggtgaccgatggagcagcagagcgcaatgccacgtggaaggccgtagggatggcgggggtggcagtggcggaagcggtagtatggcaaggggcgtagcgcgcgcgggagttttcggtggtcgcgccgagaccgcgagggggtgctagtaccggcg

SEQ ID NO: 952 - DNA, 387 bp, Oryza sativa
  Clone ID: PAT_MRT4530_100865C.1
atgcactctaaccacaactttgggattgagggagagagggtgagagagaagatggaaccgggttgcctagacgacgtcttcagggagcaaattgacggaaacactgtcgtcgtcgtccgtcgaggcctcaaaggagagccgagactgagttttcacccggcaaaacccctagaggtgatgggacgtcacgacaacgccctcaagagggaaagcgacgctcgaaagcgatgttgttgctggctcggccaggccaaggccaggctgggttttcacctatcgttcaccacctgcctattcaccaatgtcgccacaatgctccgctaccatcgaaacctccatcagctcgtgggcactgagccggcgccgaccgccggccagcctcactag

SEQ ID NO: 953 - DNA, 334 bp, Oryza sativa
  Clone ID: PAT_MRT4530_100866C.1
ggaaaaaaaaaggaggaaaagaaaagaggaggaaagcgaagaggttggagagagacgctcgtttccacgtcgccgtcatggccgctccgcgccgacgccgacaagtttgtgttgatgctcatcataaggacaccctccaggctgcctcacttgtcgatactcttctacttgtcattgatggactcgcgggcgttgtaagaagacctcatggacttcgatgctctcgctgtgtactgagctctggctcttagcgaacaggggcggctaacgctctacactaactggtgaccacgaccgaagaatgctttcgctatggttgcccttaagtttgaca

SEQ ID NO: 954 - DNA, 414 bp, Oryza sativa
  unsure (1)..(414): unsure at all n locations
  Clone ID: PAT_MRT4530_100867C.1
atggagcggcgccggccacgccgcatcgagacggtggcggcgccgacggtggccacatcgacgatggcgccgtcattcttaaccgtgctcgccgacgntgcctcccctcctcaccctcccttcttctctccgacggcaagcggccgcattgaggagacggtggtgacaccggcggtggccgcatcgacgttggcgccgtcgccttctacacagcgctcgtcgacgccgcctccctcctcgccctcccttcttctcttcggcggcgagcagcgcctctgccttgcccttgacgcgtgggccggtgacagagaggagatgggtggaagaggaaatcgaagctctgtggtgcgtcgcctcaagaacctacgtacgcaatgggttgcttcgccccgtccccctggaaaaagcgattga

SEQ ID NO: 955 - DNA, 5919 bp, Oryza sativa
  Clone ID: PAT_MRT4530_100868C.1
atggccgagcaaggaaaaacgcacgacatctcgccgagtgtgagcggcgacgacggggagccgaatccacgccgtcgagctcgtactcctccacctcctccgcgccaaagtcctaagcagggggaggcgcttgagagggtcgacaaatccgcggcgtcaccagccgcaggtgatgcaggagaacggcgagatggggagcgtcgcctcctcgtctacggcgacggcagcacgcctcagggcgcgcttcaggctgctggcgcgctcctacgacacccgcctgtcgtccatgacccggagtctccagcccaacgatggctggaagacgtggccaacttggtcatgacggctcagcagcgcttgggtgctggtggacggtccgccaccaccaagacctccggcgccgctaccaccggctccatgtcgtcaaggcggagggcgcggcgagcggcggcggctgcacgtcattcggctgctactccctcgtcgacgccttcgactcgggaggatcagcatggggagccggatgcccgcctcaacatcgagcgccggcgtaatagccggcgtaccccctgtgcaacggagggtgcctcctcgtccagagtgtcacctcgacatggacgtgaggaccagccctccgtgcctccggctggtggtgttggctgtagagcctttgtggcgagtcttcggaatgtccgttggcccccaaggttccggcccgccatcaccgagaagtacgatgggagcgtcaaccccaccgagtttctccaggtctatacgaccgggatcgaggccgctgggggtgacgacagggtcatggcgaacttctttcccatggccctaaaaggacaggcgcggggttggctaatgaacctgccacccgcgtcggtccactcctgggaagatttgtgccaacagttcaccatgaacttccaaggcacatatccgcgcccaggcgaagaagcggacttgcatgcagtacagcgaggcgataatgagtcgcttcgctcgtacattcagcggttttgccaagtccgcaatactataccatgcatccctgcacacgcggtgatttacgcgttcagggggggtgtgcggcacaaccgcatgctcgaaaagattgcctccaaagagccccagactaccgcggaactttttcagctcgcggaccgagtggctcgtaaggaggaagcgtggacatggaactcctccggttccggagtggcagcttcggccgcccccggatccgccgctcagacagggcggcgtgacaggaggaggaagaagaggtcggaccgttccggcgacgagggtcatgtcctcgccgtcgagggcactccgcgggccacccgaaaggggaggcctgcgagcgacaaaaagaaagaggctggtactcccagcagggagcgtcccgccggcaggtggtgctccgtccataacacctccctccacgatctcgcggactgtcgcgcagtcaaaaatttggctgagcgaacgaggaagtgggaggaggacaggaggcaggaacgccgtgagggcaagtccccggcggttccttccggcaaacggcgaagtgaggccaagcagaaggcccccgctgttgacatcgatgatggtgatgatgacctaggtttccaagaacctggggccaccattgccaccgtcgatggaggagcgtgtgctcacgtctctcgccggagcttcaaggctatgaaacgagagcttctgaccatggcccctactcatgaggcgatgcgtcgagcgcggtggtcggaggtcgctctcactttcgaccagaccgaccacccaccgtgcattgcccggggagggcaggttgcgatggtggtttcccccaccatctgcaacgtgaagttgggacgtgtcctcatagatggaggagcggctctcaacattctttcccccgcggcctttgatgctatcaaggccccggggatggtgctccagccgtctcaaccgatcatcggtgtgacgccggggcacacgtggccattaggtcacatcgacctaccggtcacctttggtggacccgccaacttccgcacggagcgggtaagcttcgatgtggcggacctcagtctgccctacaacgcggtcctcgggaggcccgcgttggtgaagttcatggcggcggtccactatgcctacctccagatgaagatgccgggccctggtggccccatctctgtccgtggcgaccttaaagtcgcgcttgcttgcatggagcagcgcgcggaccacctcgctgccgcgaccaagcccgagggtggtgacgagaggcttggcacctctgcccccaccgccccgaggcagcggatcgccacatgcgacgaggtcccggaagacgcgctcgtctccttcctgcgggcaaacgctgacgtcttcgcatggagaccagcggacatgcccggggtccccagggaggtgattgagcaccgtctcgccgtgcggccgggcgcaaggccggtccggcagaaagtgcggcggcaggccccggaacgtcaagccttcatccgcgaggaggtggcgaggcttctggaggccggattcatccgtgaagtcatccatccggagtggctggcgaacccggtggtcgttcccaaggcgaacggcaagcttcggatgtgcatcgactacaccgaccttaacaaggcatgtcctaaggatccttaccccctgcctcgcatagatcagatcgtcgactccactgcggggtgcgaccttttgtgttttctagatgcatactctggttatcatcagattcgcatggctagggaggatgaggaaaaaactgcgttcattacccccaatctagcggaaacttttgagaacctccgctccgcccgcataaagctgaaccccgataagtgtgtgtttggtgtacctgcgggcaagcttctcgggttcttggtctctgcccgaggcattgaggccaaccccgagaagattcgagctatcgagcggatgcgcccccctagcaaacttagggatgtgcaatgcgtcaccggttgcatggccgccctaagtcgtttcatatcaaggctgggagagaaggcgctacccttgtttaagctcctcaagcgctcggggccgttcacttggacggaggaagctgaaaatgccctcgcccagttgaaggcgtatctcagctctcctccggttctagtcgccccggagccaaatgagtccctgctactttacttagcagcgaccccccaagtagttagtgcagcgttggttgtggagcgcgatgaggacaatcctcattctgcgcacccccactctgtgccgacttggcccgggagcaggcagggaggagaggcccccgagtcaaacggtggcctaaggcccctgacgaccggagacggccctctgcccgcttgtcaaacggtgctgggtgtccccgaccctcaggaaggccccgaggccactgcgggaaggccacacttaacgccctttgaccccgaggctaaccctgtgctgagccgacccgggaaagagcagggagaagaggcccccgagccgaacggaggccagaggcccctgacgaccggagttggccctttgcccgcttgtccgacgatgccaggagcccccgacccccaggacggccccgaggccactgtgggaaggccgctcctgtcgtcctccgaccccgaggtcatcggcacagaagacgagtgcgccccaaggggccacttggacgaagaacgccccgggggtacggcccctagcaaagaggatcggccccaccgaagggtgcagcggcctgtctactttgttagtgaggccctccgggacgccaagacccgatacccacaggcccagaagatgctttatgctattctgatggcctcgaggaaactgcgccattatttccaggcgcatcgggtcactgtggttacgtcttaccccctcggtcaaatcttgcataatcgagagggtacagggcgagtggtaaaatgggcaatcgagctttctgagttcgatctgcactttgaaccacgccacgctatcaagagccaggccctcgccgattttgtggcagagtggaccccggctccagagaccgtctcaatgcccgaggccagcgcgaacccctcacagctgcctcatgccgcccactgggtgatgcaattcgacggttctctgtctcttcagggcgccggtgcaggggtcacgttgacctctccaaacggagacgtcctcagatacttggtccgtctcgactttcgagcgactaataatatggcagagtacgagggactccttgccgggctcagggtggcagccgggctggggatccgccgcctcctggtgttaggcgactctcagctggttgttaaccaagtctgtaaggagtaccggtgctccgacccgcagatggacgcctacgtgcgccaagtacggcgtatggagcgccattttgacgggatagagcttcggcatgtgcccagacgggataatgtgattgccgacgaactctcacggctcgcgtcctcgcgagcccagaccccaccgggcgcctttgaagaaaggcttacccagccgtcggcgcgacccgaccccttaggggagacggatgcgcctgaccggcccccgaggcccgtcggagtccaggcctcgggacccgaagggagcgctccaagctcccttagattgattgcttggatctctgagatccaaacatacctcacagataagactctacctgaggaccgcgaagggagtgaacgcgtacaacgcatttccaaacgctatgtgctggtagaagggaccctctatcggcgcgcggctaacggaatcctcctgaagtgcattcctcaggaacaaggcgttgagcttcttgcagacatccatgagggcgagtgcggagcccattccgcctcgcgtaccctggttggcaaggcctttcgtcaaggattttattggccgacagctctcaatgacgcagtcgatctggtccggcgatgcagagcgtgtcagttccacgccaagcaaattcatcagccggcccaggccctgcagatcataccactgtcatggccatttgctgtctgggggcttgatatcctgggaccgttcaaacgggccccgggcgggtttgagtatctgtatgttgcgatcgacaagttcactaagtggcccgaggcttatccggttgtcaagatcgataagcactctgctcttaaatttattaagggcatcacggcccgttttggagtgcctaaccgtattattacggataatggcacccaattcactagtgaactcttcggcgactactgcgaaaacatgggcatcaagctctgcttcgcctcacctgcccaccccagaagcaatggccaagtggagcgcgccaatgcagaaatccttaaaggcctcaaaaccaagaccttcaacattctcaagaagcacggcgattcatggatcgaggagttgccagcggtgctctgggcgaaccgaaccacaccaagccgagcgaccggggaaacgcctttcttcctcgtctacggcgcagaagcggttctcccatctgagctcaccctgaggtctcctcgggccaccatgtactgcgaggctgatcaagatcagcttcgtagagatgacctcgactacttggaagagcgaaggcggcgcgcggccctccgagctgcgcgctaccagcagagcttgcggcgctaccatcagcgccacgtccgggcccgatcactctgcgtcgacgacctcgtcctacgccgcgtccaaacgcgtgctggattgagcaaactctcaccaatgtgggagggtccgtatcgagtgatcggtgtcccccggccgggctcggtacggctggccacgggcgacggcacggagctgccaaacccgtggaacattgaacaccttcgtcgcttctacccctga

SEQ ID NO: 956 - DNA, 287 bp, Oryza sativa
  Clone ID: PAT_MRT4530_100869C.1
accaggaaaaccacaagaaaacacggttgattaatttcacggaaaatagaacgggtaccttaaataaaaaaaattaattcgttgtttcacccaaaggcggcaaaccccccaggtttttaattaaatcaaaacacacgggtttaatttattctttatgaggcaacacacaaaccacactcctttggggggtttttattggggactaataaagggaggtatctcgcccgcggggaacatatagttggttagggactatattttccccatttgcacttggtgaaagaaaa

SEQ ID NO: 957 - DNA, 290 bp, Oryza sativa
  Clone ID: PAT_MRT4530_10086C.1
acgggttcgttttcctcctcttgttgacacggcaagcctccggcgccggtacagcgggtggcagagcgcccacgccacgttctacggaggcggcgatgcttccggcaccatgggcggaggttgtggttacggcaacctgtacaggcaagggtgtggtacgaacaccgaggctctgaggacggagctgttcaacgacggtgcggggtgcggagggcgctacgagctgtggctcgacaatcgggaggagttcgtgcctgatggactacatcaccgtgaccggcaccaacttt

SEQ ID NO: 958 - DNA, 5103 bp, Oryza sativa
  Clone ID: PAT_MRT4530_100870C.1
atggccgagcaaggagaagcgcacgacctctctccgagtgtgagcggcgacgacggggagccgaatccacgccgtcgagctcgtactcccccacctcctccgcgccaaagccctaagcagggggaggcgcttgagaaggtcgacaagtccatggcatcaccagttgcgggtggtgcaggaggacggcaagatggggagcgccgcctcctcgtctacggcgacggcagcacgcctcagggcgcgcttcaggctgctggcgcgctcctacgacacccgcctgtcgtccatgacccggagtctccagcccaacgatggctggaagacgtggccaacttggtcatgacggctcagcagcgcttgggtgctggtggacggtccgccaccaccaagacctccggcgccgctaccaccggctccgtgtcgtcaaggcggagggcgcggcgagcggcggcggctgcacgtcattcggctgctactccctcgtcgacgccttcgactcgggaggatcagcatggggagccggatgcccgcctcaacatcgagcgccggcgtaatagccggcgtaccccccgtgcaacggagggtgcctcctcgtccagagtgtcacctcgacatggacgtgaggaccagccctccgtgcctccggctggtggtgttggctgtagagcctttgtggcgagtcttcggaatgtccgttggcccccaaggttccggcccgccatcaccgagaagtacgatgggagcgtcaaccccaccgagtttctccaggtctatacgaccgggatcgaggccgctgggggtgacgacagggtcatggcgaacttctttcccatggccctaaaaggacaggcgcggggttggctaatgaacctgccacccgcgtcggtccactcctgggaagatttgtgccaacagttcaccatgaacttccaaggcacatatccgcgcccaggcgaagaagcggacttgcatgcagtacagcgaggcgataatgagtcgcttcgctcgtacattcagcggttttgccaagtccgcaatactataccatgcatccctgcacacgcggtgatttacgcgttcagggggggtgtgcggcacaaccgcatgctcgaaaagattgcctccaaagagccccagactaccgcggaactttttcagctcgcggaccgagtggctcgtaaggaggaagcgtggacatggaactcctccggttccggagtggcagcttcggccgcccccggatccaccgctcagacagggcggcgtgacaggaggaggaagaagaggtcggaccgttccggcgacgagggtcatgtcctcgccgtcgagggcactccgcgggccacccgaaaggggaggcctgcgagcgacaaaaagaaagaggctggtactcccagcagggagcgtcccgccggcaggtggtgctccgtccacaacacctccctccacgatctcgcggactgtcgcgcagtcaaaattttggctgagcgaacgaggaagtgggaggaggacaggaggcaggaacgccgtgagggcaagtccccggcggttccttccggcaaacggcgaagtgaggccaagcagaaggcccccgctgttgacatcgatgatggtgatgatgacctaggtttccaagaacctggggccaccattgccaccgtcgatggaggagcgtgtgctcacgtctctcgccggagcttcaaggctatgaagcgagagcttctgaccatggcccctactcatgaggcgatgcgtcgggcgcggtggtcggaggtcgctctcactttcgaccagaccgaccacccaccgtgcattgcccggggagggcaggttgcgatggtggtttcccccaccatctgcaacgtgaagttgggacgtgtcctcatagatggaggagcggctctcaacattctttcccccgcggcctttgatgctatcaaggccccggggatggtgctccagccgtctcaaccgatcatcggtgtgacgccggggcacacgtggccattaggtcacatcgacctaccggtcaccttcggtggacccgccaacttccgcacggagcgggtaagcttcgatgtggcggacctcagtctgccctacaacgcggtcctcgggaggcccgcgttggtgaagttcatggcggcggtccattatgcctacctccagatgaagatgccgggccctggtggccccatctctgtccgtggcgaccttaaagtcgcgcttgcttgcatggagcagcgcgcggaccacctcgctgccgcgaccaagcccgagggtggtgacgagaggcttggcacctctgcccccaccgccccgaggcagcggatcgccacatgcgacgaggtcccggaagacgcgctcgtctccttcctgcgggcaaacgctgacgtcttcgcatggagaccagcggacatgcccggggtccccagggaggtgattgagcaccgtctcgccgtgcggccgggcgcaaggccggtccggcagaaagtgcggcggcaggccccggaacgtcaagccttcatccgcgaggaggtggcgaggcttctggaggccggattcatccgtgaagtcatccatccggagtggctggcgaacccggtggtcgttcccaaggcgaacggcaagcttcggatgtgcatcgactacaccgaccttaacaaggcatgtcctaaggatccttaccccctgtctcgcatagatcagatcgtcgactccactgcgggccaaataggacgtaatgttgaggcgtatgtcgatgacttggttgtaaaaacgcgcaaccaagaaactttactttcagatctagcggaaacttttgagaacctccgctccgcccgcataaagctgaaccccgataagtgtgtgtttggtgtacctgcgggcaagcttctcgggttcttggtctctgcccgaggcattgaggccaaccccgagaagattcgagctatcgagcggatgcgcccccctagcaaacttagggatgtgcaatgcgtcaccggttgcatggccgccctaagtcgtttcatatcaaggctgggagagaaggcgctacccttgtttaagctcctcaagcgctcggggccgttcacttggacggaggaagctgaaaatgccctcgcccagttgaaggcgtatctcagctctcctccggttctagtcgccccggagccaaatgagtccctgctactttacttagcagcgaccccccaagtagttagtgcagcgttggttgtggagcgcgatgaggacaatcctcattctgcgcacccccactctgtgccgacttggcccaggagcaggcagggaggagaggcccccgagtcaaacggtggcctaaggcccctgacgaccggagacggccctctgcccgcttgtcaaacggtgctgggtgtccccgaccctcaggaaggccccgaggccactgcgggaaggccgcacttaacgccctttgaccccgaggctaaccctgtgctgagccgacccgggaaagagcagggagaagaggcccccgagccgaacggaggccagaggcccctgacgaccggagttggccctttgcccgcttgtccgacgatgccaggagcccccgacccccaggacggccccgaggccactgtgggaaggccgctcctgtcgtcctccgaccccgaggtcatcggcacagaagacgagtgcgccccaaggggccacttggacgaagaacgccccgggggtacggcccctagcaaagaggatcggccccaccgaagggtgcagcggcctgtctactttgttagtgaggccctccgggacgccaagacccgatacccacaggcccagaagatgctttatgctattctgatggcctcgaggaaactgcgccattatttccaggcgcatcgggtcactgtggttacgtcttaccccctcggtcaaatcttgcataatcgagagggtacagggcgagtggtaaaatgggcaatcgagctttctgagttcgatctgcactttgaaccacgccacgctatcaagagccaggccctcgccgattttgtggcagagtggaccccggctccagagaccgtctcaatgcccgaggccagtgcgaacccctcacagctgcctcatgccgcccactgggtgatgcaattcgacggttctctgtctcttcagggcgccggtgcaggggtcacgttgacctctccaaacggagacgtcctcagatacttggtccgtctcgactttcgagcgactaataatatggcagagtacgagggactccttgccgggctcagggtggcagccgggctggggatccgccgcctcctggtgttaggcgactctcagctggttgttaaccaagtctgtaaggagtaccggtgctccgacccgcagatggacgcctacgtgcgccaaggcatcacggcccgttttggagtgcctaaccgtattattacggataatggcacccaattcactagtgaactcttcggcgactactgcgaaaacatgggcatcaagctctgcttcgcctcacctgcccaccccagaagcaatggccaagtggagcgcgccaatgcagaaatccttaaaggcctcaaaaccaagaccttcaacattctcaagaagcacggcgattcatggatcgaggagttgccagcggtgctctgggcgaaccgaaccacaccaagccgagcgaccggggaaacgcctttcttcctcgtctacggcgcagaagcggttctcccatctgagctcaccctgaggtctcctcgggccaccatgtactgcgaggctgatcaagatcagcttcgtagagatgacctcgactacttggaagagcgaaggcggcgcgcggccctccgagctgcgcgctaccagcagagcttgcggcgctaccatcagcgccacgtccgggcccgatcactctgcgtcgacgacctcgtcttacgccgcgtccaaacgcgtgctggattgagcaaactctcaccaatgtgggagggtccgtatcgagtgatcggtgtcccccggccgggctcggtacggctggccacgggcgacggcacggagctgccaaacccgtggaacattgaacaccttcgtcgcttctacccctga

SEQ ID NO: 959 - DNA, 6084 bp, Oryza sativa
  Clone ID: PAT_MRT4530_100871C.1
atggccgagcaaggaaaaacgcacgacatctcgccgagtgtgagcggcgacgacggggagccgaatccacgccgtcgagctcgtactcctccacctcctccgcgccaaagtcctaagcagggggaggcgcttgagagggtcgacaaatccgcggcgtcaccagccgcaggtgatgcaggagaacggcgagatggggagcgtcgcctcctcgtctacggcgacggcagcacgcctcagggcgcgcttcaggctgctggcgcgctcctacgacacccgcctgtcgtccatgacccggagtctccagcccaacgatggctggaagacgtggccaacttggtcatgacggctcagcagcgcttgggtgctggtggacggtccgccaccaccaagacctccggcgccgctaccaccggctccgtgtcgtcaaggcggagggcgcggcgagcggcggcggctgcacgtcattcggctgctactccctcgtcgacgccttcgactcgggaggatcagcatggggagccggatgcccgcctcaacatcgagcgccggcgtaatagccggcgtaccccccgtgcaacggagggtgcctcctcgtccagagtgtcacctcgacatggacgtgaggaccagccctccgtgcccccggctggtggtgttggctgtagagcctttgtggcgagtcttcggaatgtccgttggcccccaaggttccggcccaccatcaccgagaagtacgatgggagcgtcaaccccaccgagtttctccaggtctatacgaccgggatcgaggccgctgggggtgacgacagggtcatggcgaacttctttcccatggccctaaaaggacaggcgcggggttggctaatgaacctgccacccgcgtcggtccactcctgggaagatttgtgccaacagttcaccatgaacttccaaggcacatatccgcgcccaggcgaagaagcggacttgcatgcagtacagcgaggcgataatgagtcgcttcgctcgtacattcagcggttttgccaagtccgcaatactataccatgcatccctgcacacgcggtgatttacgcgttcagggggggtgtgcggcacaaccgcatgctcgaaaagattgcctccaaagagccccagactaccgcggaactttttcagctcgcggaccgagtggctcgtaaggaggaagcgtggacatggaactcctccggttccggagtggcagcttcggccgcccccggatccaccgctcagacagggcggcgtgacaggaggaggaagaagaggtcggaccgttccggcgacgagggtcatgtcctcgccgtcgagggcactccgcgggccacccgaaaggggaggcctgcgagcgacaaaaagaaagaggctggtactcccagcagggagcgtcccgccggcaggtggtgctccgtccacaacacctccctccacgatctcgcggactgtcgcgcagtcaaaattttggctgagcgaacgaggaagtgggaggaggacaggaggcaggaacgccgtgagggcaagtccccggcggttccttccggcaaacggcgaagtgaggccaagcagaaggcccccgctgttgacatcgatgatggtgatgatgacctaggtttccaagaacctggggccaccattgccaccgtcgatggaggagcgtgtgctcacgtctctcgccggagcttcaaggctatgaagcgagagcttctgaccatggcccctactcatgaggcgatgcgtcgggcgcggtggtcggaggtcgctctcactttcgaccagaccgaccacccaccgtgcattgcccggggagggcaggttgcgatggtggtttcccccaccatctgcaacgtgaagttgggacgtgtcctcatagatggaggagcggctctcaacattctttcccccgcggcctttgatgctatcaaggccccggggatggtgctccagccgtctcaaccgatcatcggtgtgacgccggggcacacgtggccattaggtcacatcgacctaccggtcaccttcggtggacccgccaacttccgcacggagcgggtaagcttcgatgtggcggacctcagtctgccctacaacgcggtcctcgggaggcccgcgttggtgaagttcatggcggcggtccattatgcctacctccagatgaagatgccgggccctggtggccccatctctgtccgtggcgaccttaaagtcgcgcttgcttgcatggagcagcgcgcggaccacctcgctgccgcgaccaagcccgagggtggtgacgagaggcttggcacctctgcccccaccgccccgaggcagcggatcgccacatgcgacgaggtcccggaagacgcgctcgtctccttcctgcgggcaaacgctgacgtcttcgcatggagaccagcggacatgcccggggtccccagggaggtgattgagcaccgtctcgccgtgcggccgggcgcaaggccggtccggcagaaagtgcggcggcaggccccggaacgtcaagccttcatccgcgaggaggtggcgaggcttctggaggccggattcatccgtgaagtcatccatccggagtggctggcgaacccggtggtcgttcccaaggcgaacggcaagcttcggatgtgcatcgactacaccgaccttaacaaggcatgtcctaaggatccttaccccctgtctcgcatagatcagatcgtcgactccactgcggggtgcgaccttttgtgttttctagatgcatactctggttatcatcagattcgcatggctagggaggatgaggaaaaaactgcgttcattacccccgtaggaacctattgttatacatcaatgcccttcgggttaaagaatgcaggtcctacttttcagcgtactactcgaatttctttgggtagccaaataggacgtaatgttgaggcgtatgtcgatgacttggttgtaaaaacgcgcaaccaagaaactttactttcagatctagcggaaacttttgagaacctccgctccgcccgcataaagctgaaccccgataagtgtgtgtttggtgtacctgcgggcaagcttctcgggttcttggtctctgcccgaggcattgaggccaaccccgagaagattcgagctatcgagcggatgcgcccccctagcaaacttagggatgtgcaatgcgtcaccggttgcatggccgccctaagtcgtttcatatcaaggctgggagagaaggcgctacccttgtttaagctcctcaagcgctcggggccgttcacttggacggaggaagctgaaaatgccctcgcccagttgaaggcgtatctcagctctcctccggttctagtcgccccggagccaaatgagtccctgctactttacttagcagcgaccccccaagtagttagtgcagcgttggttgtggagcgcgatgaggacaatcctcattctgcgcacccccactctgtgccgacttggcccaggagcaggcagggaggagaggcccccgagtcaaacggtggcctaaggcccctgacgaccggagacggccctctgcccgcttgtcaaacggtgctgggtgtccccgaccctcaggaaggccccgaggccactgcgggaaggccgcacttaacgccctttgaccccgaggctaaccctgtgctgagccgacccgggaaagagcagggagaagaggcccccgagccgaacggaggccagaggcccctgacgaccggagttggccctttgcccgcttgtccgacgatgccaggagcccccgacccccaggacggccccgaggccactgtgggaaggccgctcctgtcgtcctccgaccccgaggtcatcggcacagaagacgagtgcgccccaaggggccacttggacgaagaacgccccgggggtacggcccctagcaaagaggatcggccccaccgaagggtgcagcggcctgtctactttgttagtgaggccctccgggacgccaagacccgatacccacaggcccagaagatgctttatgctattctgatggcctcgaggaaactgcgccattatttccaggcgcatcgggtcactgtggttacgtcttaccccctcggtcaaatcttgcataatcgagagggtacagggcgagtggtaaaatgggcaatcgagctttctgagttcgatctgcactttgaaccacgccacgctatcaagagccaggccctcgccgattttgtggcagagtggaccccggctccagagaccgtctcaatgcccgaggccagtgcgaacccctcacagctgcctcatgccgcccactgggtgatgcaattcgacggttctctgtctcttcagggcgccggtgcaggggtcacgttgacctctccaaacggagacgtcctcagatacttggtccgtctcgactttcgagcgactaataatatggcagagtacgagggactccttgccgggctcagggtggcagccgggctggggatccgccgcctcctggtgttaggcgactctcagctggttgttaaccaagtctgtaaggagtaccggtgctccgacccgcagatggacgcctacgtgcgccaagtacggcgtatggagcgccattttgacgggatagagcttcggcatgtgcccagacgggataatgtgattgccgacgaactctcacggctcgcgtcctcgcgagcccagaccccaccgggcgcctttgaagaaaggcttacccagccgtcggcgcgacccgaccccttaggggagacggatgcgcctgaccggcccccgaggcccgtcggagtccaggcctcgggacccgaagggagcgctccaagctcccttagattgattgcttggatctctgagatccaaacatacctcacagataagactctacctgaggaccgcgaagggagtgaacgcgtacaacgcatttccaaacgctatgtgctggtagaagggaccctctatcggcgcgcggctaacggaatcctcctgaagtgcattcctcaggaacaaggcgttgagcttcttgcagacatccatgagggcgagtgcggagcccattccgcctcgcgtaccctggttggcaaggcctttcgtcaaggattttattggccgacagctctcaatgacgcagtcgatctggtccggcgatgcagagcgtgtcagttccacgccaagcaaattcatcagccggcccaggccctgcagatcataccactgtcatggccatttgctgtctgggggcttgatatcctgggaccgttcaaacgggccccgggcgggtttgagtatatgtatgttgcgatcgacaagttcactaagtggcccgaggcttatccggttgtcaagatcgataagcactctgctcttaaatttattaagggcatcacggcccgttttggagtgcctaaccgtattattacggataatggcacccaattcactagtgaactcttcggcgactactgcgaaaacatgggcatcaagctctgcttcgcctcacctgcccaccccagaagcaatggccaagtggagcgcgccaatgcagaaatccttaaaggcctcaaaaccaagaccttcaacattctcaagaagcacggcgattcatggatcgaggagttgccagcggtgctctgggcgaaccgaaccacaccaagccgagcgaccggggaaacgcctttcttcctcgtctacggcgcagaagcggttctcccatctgagctcaccctgaggtctcctcgggccaccatgtactgcgaggctgatcaagatcagcttcgtagagatgacctcgactacttggaagagcgaaggcggcgcgcggccctccgagctgcgcgctaccagcagagcttgcggcgctaccatcagcgccacgtccgggcccgatcactctgcgtcgacgacctcgtcctacgccgcgtccaaacgcgtgctggattgagcaaactctcaccaatgtgggagggtccgtatcgagtgatcggtgtcccccggccgggctcggtacggctggccacgggcgacggcacggagctgccaaacccgtggaacattgaacaccttcgtcgcttctacccctga

SEQ ID NO: 960 - DNA, 327 bp, Oryza sativa
  Clone ID: PAT_MRT4530_100872C.1
atggctcttgacaagttgtcaacttggcaattgccatgcgatggccgattggccgaggccgacagggcatccgtgaaggacgagctcctcaagtctgcagccgtcatggagaagctctctcaggtgctggaacccgatgagaccgacgaccatcacgccaaaatcctgcagccatcgccgcccaagaggacggccaacatgagccgccgcgagagtgccacgtcgtcgtgcagtaccgacgagaaggccatgatcgctgcaaagcgcaagctccgcgaagtgtatcaagaagcagaggacgcgaagcggcagctagcgcacaattaa

SEQ ID NO: 961 - DNA, 5103 bp, Oryza sativa
  Clone ID: PAT_MRT4530_100873C.1
atggccgagcaaggaaaaacgcacgacctctcgccgagtgtgagcggcgacgacggggagccgaatccacgccgtcgagctcgtactcccccacctcctccgcgccaaagccctaagcagggggaggcgcttgagaaggtcgacaaatccgtggcatcaccagtcgcaggtggtgcaggaggacggcaagatggggagcgccgcctcctcgtctacggcgacggcagcacgcctcagggtacgcttcaggctgctggcgcgctcctacgacatccgcctgtcgtccatgacccggagtctccagcccaacgatggctggaagatgtggccaacttggtcatgacggcacagcagcgcctgggtgctggtggacggtccgtcaccaccaagacctccggcgccgctaccaccggctccgtgtcgtcaaggcggagggcgcggcgagcggcggcggctgcacggcattcggctgccactccctcgtcgacaccctcgactcgagaggatcagcatggggagccggatgcccgcctcaacatcgagcgccggcgtaatagccggcgtactccccgtgcaacggagggcgcctcttcgtccagagtgtcacctcggcatggacgtgaggaccagccctccgtgcccccggctggtggtgtcggctgtagagcctttgtggcgagtcttcggaatgtccgttggcccccaaggttccggcccaccatcaccgagaagtacgatgggagcgtcaatcccaccgagtttcttcaggtctatacgaccgggatcgaggccgctgggggtgacgacagggtcatggcgaacttctttcccatggccctaaaaggacaggcgcggggttggctaatgaacctgccacccgcgtcggtccactcctgggaagatttgtgccaacagttcaccatgaacttccaaggcacatatccgcgcccaggcgaagaagcggacttgcatgcagtacagcgaggcgatgatgaatcgcttcgctcgtacattcagcggttttgccaagtccgcaatactataccatgcatccctgcacatgcggtgatctacgcgttcagggggggcgtgcggcacaaccgcatgctcgaaaagatcgcttccaaagagccccagactaccgcggagctttttcagctcgcggaccgagtggctcgtaaggaggaagcatggacatggaactcctccggttccggagtggcagcttcggccgcccccggatccgccgctcagacagggcggcgtgacaggaggaggaagaagaggtcggaccgttccggcgacgagggtcatgtcctcgccgtcgagggcgctccgcgggccacccgaaaggggaggcctgcgagcgacaaaaagaaagaggctggtactcccagcagggagcgccccgtcggcaggtggtgctccgtccacaacacctccctccacgatctcgcggactgtcgcgcagtcaaaaatttggctgagcgaacgaggaagtgggaggaggacaggaggcaggaacgccgtgagggcaagtccccggcggttccttctggcaaacggcgaagtgaggccaagcagaaggcccccgctgttgacatcgatgatggtgaagatgacctaggtttccaagaacctggggccaccattgccaccgtcgatggaggagcgtgcgctcacgtctctcgccggagcttcaaggctatgaagcgggagcttctggccatggcccctactcatgaggcgatgcgtcgggcgcggtggtcggaggttgctctcactttcgaccagaccgaccacccaccgtgcattgcccggggagggcaggttgcgatggtggtttcccccaccatctgcaatgtgaagttgggacgcgtcctcatagatggaggagcggctctcaacatcctttcccccgcggcttttgatgccatcaaggccccggggatggtgctccagccgtctcaaccgatcatcggtgtgacgccggggcacacgtggccattaggtcacgttgacctaccggtcaccttcggtggacccgccaacttccgcacggagcgggtaagcttcgatgtggcggacctcagtctgccctacaacgcggtcctcgggaggcccgcgttggtgaagttcatggcggcggtccactatgcctacctccagatgaagatgccgggccctggtggccccatctctgtccgtggcgaccttaaagtcgcgctcgcttgcatggagcagcgcgcggaccacctcgctgccgcgaccaagcccgagggtggtgacgagaggcttggcacctctgcccccaccgccccgaggcagcggatcgccacatgcgacgaggccccggaagacgcgctcgtctccttcctgcgggcaaacgctgacgtcttcgcatggagaccagcggacatgcccggggtccccagggaggtgattgagcaccgtctcgccgtgcggccgggcgcaaggcctgtccggcagaaagtgcggcggcaggccccggaacgtcaagccttcatccgcgaggaggtggcgagacttctggaggccggattcatccgtgaagtcatccatccggagtggctggcgaacccggtggtcgttcccaaggcgaacggcaagcttcggatgtgcatcgactacaccgaccttaacaaggcatgtcctaaggatccttaccccctgcctcgcatagatcagatcgtcgactccactgcgggccaaataggacgtaatgttgaggcttatgttgatgacttggttgtaaaaacgcgcaaccaagaaaccttactctcagatctagcggaaacttttgaaaacctccgctccgcccgcataaaactgaaccccgataagtgcgtgtttggtgtacctgcgggcaagcttctcgggtttttggtctctgcccgaggcattgaggccaaccccgagaagattcgagctatcgagcggatgcgcccccccagcagacttagggatgtgcaatgcgtcaccggttgcatggccgccctaagtcgtttcatatcaaggctgggagagaaggcgctacccttgtttaagctcctcaagcgctcggggccgttcacttggacggaggaagctgaaaatgccctcgtccggttgaaggcatatctcagctctcctccggttctagtcgccccggagccaaatgagtccctgctactttacttagcagcgaccccccaagtagttagtgcagcgttggttgtggagcgcgatgaggacaatcctcattctgcgcacccccactctgtgccgacttggctcgggagcaggcagggaggagaggcccccgagtcaaacggtggcctaaggcccctgacgaccggagacggccctctgcccgcttgtcagacggtgctgggtgcccccgaccctcaggaaggccccgaggccactgcgggaaggccgcacttaacgccctttgaccccgaggctaaccctgtgctgactcgacccgggaaagagcagggagaagaggcccccgagccgaacggaggccagaggcccctgacgaccggagttggccctttgcccgcttgtccgacgatgccaggagcccccgacccccaggacggccccgaggccactgtgggaaggccgctcctgtcgtcctccgaccccgaggtcatcggcacagaagacgagtgcgccccgaggggccacttggacgaagaacgccccgggggtacggcccctagcagagaggaacggccccaccgaagggtgcagcggcctgtctactttgttagtgaggccctccgggacgccaagacccgatacccacaggcccagaagatgctttacgctattctgatggcctcgaggaaactgcgccattatttccaggcgcatcgggtcactgtggttacgtcttaccccctcggtcaaattttgcataatcgagagggtacaggacgagtggtaaaatgggcaatcgagctttctgagttcgatctgcactttgaaccacgccacgctatcaagagccaggccctcgccgattttgtggcagagtggaccccggctccagagaccgtcttaatgcccaaggccagcacgaacccctcacagctgcctcaaaccgcccactgggtgatgcagttcgacggttctctgtctcttcagggcgccggtgcaggggtcacgttgacctctccgaacggagacgtcctcagatatttggtccgtctcgactttcgagcgactaacaatatggcagagtacgagggactccttgccgggctcagggtggcagccgggctggggatccgccgcctcctggtgttaggcgactctcagctggttgttaaccaagtctgtaaggagtaccggtgctctgatccgcagatggacgcctacgtgcgccaaggcatcacggcccgttttggagtgcctaaccgtattattacggataatggcacccaattcactagtgaactcttcggcgactactgcgaagacatgggcatcaagctctgcttcgcctcacctgcccaccccagaagcaatggccaagtggagcgcgccaatgcagaaatcctcaaaggccttaaaaccaagactttcaatattctcaagaagcacggcgattcatggatcgaggagttgccagcggtgctctgggcgaaccgaaccacaccaagccgagcgaccggggaaacgcctttcttcctcgtctacggcgcagaagcggttctcccatctgagctcaccctgaggtctcctcgggccaccatgtactgcgaggctgatcaagatcagcttcgtagagatgacctcgactacttggaagagcgaaggcggcgcgcggccctccgagctgcgcgctaccagcagagcctgcggcgctaccatcagcgccacgtccgggcccgatcactctgcgtcgacgacctcgtcctacgccgcgtccaaacgcgtgctggattgagcaaactctcaccaatgtgggagggtccgtatcgagtggtcggtgtcccccggccgggctcggtacggctggccacgggcgacggcacggagctgccaaacccgtggaacatcgaacaccttcgtcgcttctacccctga

SEQ ID NO: 962 - DNA, 585 bp, Oryza sativa
  Clone ID: PAT_MRT4530_100874C.1
gagctcacttgtcggcggctgcccttttttttttttttttttcttatatggttttttttttttttgggacaaaattctgataaaatttccattgcatcaaaaggggaacattgcataaccaaaaaataaattgggagtaaagggagaaaaggaaaaaaaaaaaacaggttaagtattgatgagatgaccttaaacctatgaatgaagtagtagtagtcatggaacacgcaaattattcatccacacctagcaggacttccattgaagggagggtttaactttacaacaattttaaacttgaggcttataaaacttgagggggttcacaacttcccaggtgaagtcagggtcatcccttccaaagtgtccataagcagctgtcttgaggaacctatggccacccctgttaaggaccaagttaaaggggatcattccaggtctgaagacaaaattctccttcacaatttgaagaacctccttgagaagaatcttcccagttccataagggtgcacaaacactgacgagggctcagggacaccaatggcataggaaacttggacaatgcaccttctggcaaggccatt

SEQ ID NO: 963 - DNA, 6084 bp, Oryza sativa
  Clone ID: PAT_MRT4530_100875C.1
atggctgagcaaggaaaaacgcacgacctctcgccgagtgtaagcggcgacgatggggagccgaatccacgccgtcgagctcgtactcctccacctcctccgcgccaaagccctaagcagggggaggcgcttgagagggtcgacaaatccgcggcgtcaccagccgcaggtgatgcaggagaacggcgagatggggagcgtcgcctcctcgtctacggcgatggcagcacgcctcagggcgcgcttcaggctgctggcgcgctcctacgacacccgcctgtcgtccatgacccggagtctccagcccaacgatggctagaagacgtggccaacttggtcatgacggctcagcagcgcttgggtgctggtggacggtccgccaccaccaagacctccggcgccgctaccaccggctccgtgtcgtcaaggcggagggcgcggcgagcggcggcggctgcacgtcattcggctgctactccctcgtcgacaccttcgactcggaaggatcagcatggggagccggatgcacgcctcaacatcgagcgccggcgtaatagccggcgtaccccccgtgcaacggagggtgcctcctcgtccagagtgtcacctcgacatggacgtgaggaccagccctccgtgcccccggctggtggtgttggctgtagagcctttgtggcgagtcttcggaatgtccgttggcccccaaggttccggcccaccatcactgagaagtacgatgggagcgtcaaccccaccgagtttctccaggtctatacgaccgggatcgaggccgctgggggtgacgacagggtcatggcgaatttctttcccatggccctaaaaggacaggcgcggggttggctaatgaacctgccacccgcgtcggtccactcctgggaagatttgtgccaacagttcaccatgaacttccaaggcacatatccgcgcccaggcgaagaagcggacttgcatgcagtacagcggggcgatgatgagtcgcttcgctcgtacattcagcggttttgccaagtccgcaatactataccatgcatccctgcacacgcggtgatctacgcgttcagggggggcgtgcggcacaaccgcatgctcgaaaagattgcttccaaagagccccagactaccgcggagctttttcagcttgcggaccgagtggctcgtaaggaggaagcgtggacatggaactcctccggttccggagtagcagcttcggccgcccccggatccgccgctcagacagggcggcgtgacaggaggaggaagaagaggtcggaccgttccggcgacgagggtcatgtcctcgccgtcgagggcgctccgcgggccacccgaaaggggaggcctgcgagcgacaaaaagaaagaggctggtactcccagcaaggagcgccccgccggcaggtggtgctccgtccacaatacctccctccacgatctcgcggactgtcgcgcagtcaaaaatttggctgagcgaacgaggaagtgggaggaggacaggaggcaggaacgccgtgagggcaagtccccggcggttccttccggcaaacggcgaagtgaggccaagcagaaggcccccgctgttgacaacgatgatggtgatgatgacctaggtttccaagaacctggggccaccattgccaccgtcgatggaggagcgtgtgctcatgtctctcgccggagcttcaaggctatgaagcgagagcttctgaccatggcccctactcatgaggcgatgcgtcgggcgcggtggtcggaggtcgctctcactttcgaccagaccgaccacccaccgtgcattgcccggggagggcaggttgcgatggtggtttcccccaccatctgcaacgtgaagttgggacgtgtcctcatagatggaggagcggctctcaacattctttcccccgcggcctttgatgctatcaaggccccggggatggtgctccagccgtctcaaccgatcatcggtgtgacgccggggcacacgtggccattaggtcacatcgacctaccggtcaccttcggtggacccgccaacttccgcacggagcgggtgagcttcgatgtggcggacctcagtctgccctacaacgcggtcctagggagacccgcgttggtgaagttcatggcggcggtccactacgcctacctccagatgaagatgccgggccccggtggccccatctctgtccatggcgatcttaaagtcgcgctcgcttgcatggagcagcgcgctgaccgtctcgctgctgcgtccaagcccgagggtggtgacgagaggcttggcccctctgcccccaccgccccgaggcagcggatggccacatgcgacgaggtcccggaagacgcgctcgtctccttcctgcgggcaaacgctgatgtcttcgcatggagaccagcggacatgcccggggtccccagggaggtgattgagcactgtctcgccgtgcggccgggcgcaaggccggtccggcagaaagtgcggcggcaggccccggaacgtcaagccttcatccgcgaggaggtggcgagacttctggaggccggattcatccgtgaagtcatccatccggagtggctggcgaacccggtggtcgtccccaaggcgaacggcaagcttcggatgtgcatcgactacaccgaccttaacaaggcatgtcctaaggacccttaccccctgcctcgcatagatcagattgtcgactccactgcggggtgcgaccttttgtgttttctagatgcatactctggttatcatcagattcgcatggctagggaggatgaggaaaaaactgcgttcattacccccgtaggaacctattgttatacatcaatgcccttcgggttaaagaatgcaggtcccacttttcagcgtactactcgaatttctttgggtagccaaataggacgtaatgttgaggcgtatgtcgatgacttggttgtaaaaacgcgcaaccaagaaactttactttcagatctagcggaaacttttgagaacctccgctccgcccgcataaagctgaaccccgataagtgtgtgtttggtgtacctgcgggcaagcttctcgggttcttggtctctgcccgaggcattgaggccaaccccgagaagattcgagctatcgagcggatgcgcccccccagcaaacttagggatgtgcaatgcgtcaccggttgcatggccgccctaagtcgtttcatatcaaggctgggagagaaggcgctacccttgtttaagctcctcaagcgctcggggccgttcacttggacggaggaagctgaacatgcccttactcaattaaaggcatatctcagctctcccccggttctagtcgccccggagccaaatgagtccctgctactttacttagcagcgaccccccaagtagttagtgcagcgttggttgtggagcgcgatgaggacaattctcattctgcgcacccccactctgtgccgatttggcctgggagcaggcagggaggagaggcccccgagtcgaacggtggcctaaggcccccgacgaccggagtcggccctccgcccgcttgtcagacggtgccgggtgcccccgaccctcaggaaggccccgaggccactgcgggaaggccgcacttagcgccctttgaccccgaggctaaccctgtgctgagtcgacccgggaaagagcagggagaagaggcccccgagccgaacggaggccagaggcccctgacgaccggagttggccctttgcccgcttgtccgacgatgccaggagcccccgacccccaggacggccccgaggccactgtgggaaggctgctcctgtcgtcctccgaccccgaggtcatcggcacagaagacgagtgcgccccgaggggccacttggacgaagaacgccccgggggttcggcccctagcaaagaggatcggccccgccgaagggtgcagcggcctgtctactttgttagtgaggccctccgggacgccaagacccgatacccacaggcccagaagatgctttatgctattctgatggcctcgaggaaactacgccattatttccaggcgcatcgggtcactgtggttacgtcttaccccctcggtcaaatcttgcataatcgagagggtacaggacgagtggtaaaatgggcaatcgagctttctgagttcgatctgcactttgaaccacgccacgctatcaagagccaggccctcgccgattttgtggcagagtggaccccggctccagagaccgtctcaatgcccgaggctagcacgaacccctcacagctgcctcatgccgcccactgggtgatgcaattcgacggttctctgtctcttcagggcgccggtgcaggggtcacgttgacctctccaaacggagacgtcctcagatacttggtccgtctcgactttcgagcgactaataatatggcagagtacgagggactccttgccgggctcagggtggcagccgggctggggatccgccgcctcctggtgttaggcgactctcagctggttgttaaccaagtctgtaaggagtaccggtgctctgatccgcagatggacgcctacgtgcgccaagtacggcgtatggagcgccattttgacgggatagagcttcggcatgtgcccaggcgggataacatgatagccgacgaactctcacggctcgcgtcctcgcgagcccagaccccaccgggcgcctttgaagaaaggcttacccagccgtcggcgcgacccgatcccttaggggagacggatgcgcctgaccggcccccgaggcccgtcggagtccaggcctcgggacccgaagggagcgctccaagctcccttagattgattgcttggatctctgagatccaaacatacctcacagataagactctacctgaggaccgcgaagggagtgaacgcgtacaacgcatttccaaacgctatgtgctggtagaagggaccctctatcggcgcgcggctaacggaatcctcctgaagtgcattcctcaggaacaaggcgttgagcttcttgcagatatccatgagggcgagtgcggagcccattccgcctcgcgtaccctggttggcaaggcctttcgtcaaggattttattggccgacagctctcaatgacgcagtcgatctggtccggcgatgcagagcgtgtcagttccacgccaagcaaattcatcagccggcccaggccctgcagatcataccactgtcatggccatttgctgtctgggggcttgatatcctggggccgttcaaacgggccccgggcgggtttgagtatctgtatgttgcgatcgacaagttcactaagtggcccgaggcttatccggttgtcaagatcgataagcactctgctcttaaatttattaagggcatcacggcccgttttggagtgcctaaccgtattattacggataatggcacccaattcactagtgaactcttcggcgactacttcgaagacatgggcatcaagctctgcttcgcctcacctgcccaccccagaagcaatggccaagtggagcgcgccaatgcagaaatcctcaaaggccttaaaaccaagaccttcaatattctcaagaagcacggcgattcatggatcgaggagttgccagcggtgctctgggcgaaccgaaccacaccaagccgagcgaccggggaaacgcctttcttcctcgtctacggcgcagaagcggttctcccatctgagcttaccctgaggtctcctcgggccaccatgtactgcgaggctgatcaagatcagcttcgtagagatgacctcgactacttggaagagcgaaggcggcgcgcggccctccgagctgcgcgctaccagcagagcctgcggcgctaccatcagcgccacgtccgggcccgatcactctgcgtcgacgacctcgtcctacgccgcgttcaaacgcgtgctggattgagcaaactctcaccaatgtgggagggtccgtatcgagtggtcggtgtcccccggccgggctcggtacggctggccacgggcgacggcacggagctgccaaacccgtggaacattgaacaccttcgtcgcttctacccctga

SEQ ID NO: 964 - DNA, 1414 bp, Oryza sativa
  unsure (1)..(1414): unsure at all n locations
  Clone ID: PAT_MRT4530_100876C.1
gcacgaggagcgccttgaagatgaccctcggaacatttggtttgaagctgctactttggttgcggggcccccaccggtagagatatcagccgcgaggcctcgggccgctgccggcgcggggggtcttgctagtgcactttctacctccgtgatgcatcccattgattcaatgaagacacgtgtccaagcatcttcgctttcttttcctgatcgcgtatcaacacttccacaaattgggctccgaggactttatcggggttctatccccgcaattcttggtcagttttcaagccatggtttgagaacaggaatatttgaggcaagcaagcttgtgttaaaaagtgttgctccaacactttcagatattcaggtgcaatcactctcttccttctgcagcaccatcctgggaacagcagtccgtataccttgtgaggttcttaagcagcgtttgcaggctggaatcttcaataatgtaggggaggccattgttggtaccatgcaaaaagatggtccaaagggcttcttccgtggcactggggccactctttgccgagaggttcctttctatgttgccggaatgtgtctttatgcagaagctaaaaaggcggcacagcatgtgttgaacagagacttggaaccatgggaaactattgcagtgggagcgttgtctggagggcttgcagcagttgtcacaactccctttgatgtgatgaagactcggatgatgactgctccaccaggcaccccagtctccatgcagttgatagttttctccatccttcgaaatgagggacctctcggactgttcaagggtgcgatcccccgcttcttctggattgctcctctcggagcaatgaactttgcaggctatgagctcgccaagaaagcaatgatccaaactgagagtgactccacagactctgtacatgagaagagaaccacagtgggttccagaggatgacagatccaaattcacctggttactctatatggtgtaaagaaaggacaagccatgcaacagaaatgtttttgcccttgttgcaaagaattagaaccattttttggcattgccttcgtgatacatgtaccaaatgttaggtccttttatatccttcacatcctccccaacagagggaaatttgtcgaattcccattaccataggcctttattataccactgtatagtagatgacagaactacaggagtagacgtgctgccctttcttgcacagttcacttcatctgttgttatttctttagtaatccagagccttgatgacatgtttattaaccctcctcgtgattagttagctcagttgtgaccaaaaaaaaaaaaaaaaaactcgagactagttctccctcgtgccaatatcanagacagcattgttacaataagcatgagcatgttatgacg

SEQ ID NO: 965 - DNA, 930 bp, Oryza sativa
  Clone ID: PAT_MRT4530_100877C.1
ccaccgcaccacgacggccgcccccgcgtcgccgcccgagtagcccgtatctggacgcccggccacaagccgccctcgtcgtcgcccgacatctacctcgtcaggaggacaccgaagctgccggtgacgcggcctccccgtaccaagcaagctccgcccacagcgcccgcgcccgcgcctccgccgccgccgccgcagccggcgtcgccgaagacgaagacgaaggcgaaggcgaagaagccgaagaggaagagaagctgcgtgcactgcggctcgacggagacgccgcagtggcgggaggggccgacggggcgcggcacgctgtgcaacgcgtgcggcgtgcggtacaggcaagggaggctgctgccggagtaccgccccaaggggagccccaccttctcgccgtccgtgcacgccgccaaccaccgccaggtgctcgagctccgccgccagcagcggcagagcaccaacccctccactccaccgccgccgccggtgtccgccgccgagccaatccccgacgagcaaaaagaagaggtggtaagcgtgccagtcgccgccgccgcgcccgccaccgacggcggcgcggcgagctcgctggacgcgctgctgctcgacgggccgtcggcgccgctcatcgtggacggcgacgatttcttggttagttaggtagccagaaaaaaaaaagaggaataatttcagctgagaatgagatgaggaataccaatttttcgtttgatttttcaggaaaaacagttttcccacctgacattgtgattcaacgtcgatcctgggaaaaatctttgcgtgaaatttagctagttttgctgcccagatgaactagttctggtgcttggtagctgatgaagttgaaaccggttttaatggatcaagggggatggatgttcaatgccaaaaaaaaaaaaaaaa

SEQ ID NO: 966 - DNA, 6084 bp, Oryza sativa
  Clone ID: PAT_MRT4530_100878C.1
atggccgagcaaggaaaaacgcgcgacctctctccgagtgtgagcggcgacgatggggagccgaatccacgccgtcgagctcgtactccaccacctcctccgcgccaaagccctaagcagggggaggcgcttgagagggtcgacaaatccgtggcatcaccagtcgctggtgatgcaggagaacggcgagatggggagcgtcgcctcctcgtctacggcgacggcagcacgcctcagggtgcgcttcaggctgctggcgcgctcctacgacacccgcctgtcgtccatgacccggagtctccagcccaacgatggctggaagacgtggccaacttggtcatgacggcacagcagcgcctgggtgctggtggacggtccgccaccaccaagacctccggcgccgctaccaccggctccgtgtcatcaaggcggagggcgcggcgagcggcggcggctgcacgtcattcggctgccactccctcgtcgacaccgtcgactcgggaggatcagcatggggagccggatgcccgcctcaacgtcgagcgccggcgtaatagccggcgtactccccgtgaaacggagggcgcctcctcgtccagagtgtcacctcgacacggacgtgaagatcagccctccgtgcccccggcaggtggtgtcggctgtagagcctttgtggcgagtcttcggaatgtccgttggcccccaaggttccggcccaccatcaccgagaagtacgatgggagcgtcaaccccaccgagtttctccaggtctatacgaccgggatcgaggccgctgggggtgacgacagggtcatggcgaacttctttcccatggccctaaaaggacaggcgcggggttggctaatgaacctgccacccgcatcggtccactcctgggaagatttgtgccaacagttcaccatgaacttccaaggcacatatccgcgcccaggcgaagaagcggacttgcatgcagtacagcgaggcgatgatgagtcgcttcgctcgtacattcagcggttttgccaagtccgcaatactataccatgcatccctgcacacgcggtgatctacgcgttcagggggggtgtgcggcacaaccgcatgctcgaaaagattgcctccaaagagccccagactaccgcggagctttttcagctcgcggaccgagtggctcgtaaggaggaagcgtggacatggaactcttccggttccggagtggcagcttcggccgcccccggatccgccgctcagacagggcggcgtgacaggaggaggaagaagaggtcggaccgttccggcgacgagggtcatgtcctcgccgtcgagggcgctctgcgggccacccgaaaggggaggcctgcgagcgacaaaaagaaagaggctggtactcccagcagggagcgccccgccggcaagtggtgctccgtccacaacacctccctccacgatctcgcggactgtcgtgcagtcaaaaacctggctgagcgaacgaggaagtgggaggaggacaggaggcaggaacgccgtgagggcaagtccccggcggttccttccggcaaacggcgaagtgaggccaagcagaaggcccccgctgttgacatcgatgatggtaatgatgacctaggtttccaagaacctggggccaccattgccaccgtcgatggaggagcatgtgctcacatctctcgccggagcttcaaggctatgaagcgagagcttctggccatggcccctacccatgaggcgatgcgtcgggcgcggtggtcggaggttgctctcactttcgaccagaccgaccacccaccgtgcattgcccggggagggcaggttgcgatggtggtttcccccaccatctgcaacgtgaagttgggacgtgtcctcatagatggaggagcggctctcaacatcctttcccccgcggcctttgatgctatcaaggccccggggatggtgctccagccgtctcaaccgatcatcggtgtgacgccggggcacacgtggccattaggtcacatcgacctaccggtcaccttcggtggacccgccaacttccgcacggagcgggtgagcttcgatgtggcgaacctcagtctgccctacaacgcggtcctggggagacccgcgttggtgaagttcatggcggcggtccactacgcctacctccagatgaagatgccgggccccggtggccccatctctgtccgtggcgaccttaaagtcgcgcttgcttgcatggagcagcgcgcggaccgcctcgctgctgcgtccaagcccgagggtggtgacgagaggctcggcccctctgcccccaccgccccgaggcagcggatggccacatgcgacgaggtcccggaagacgcgctcgtctccttcctgcgggcaaacgctgacgtcttcgcatggagaccagcggacatgcccggggtccccagggaggtgattgagcaccgtctcgccgtgcggccgggcgcaaggccggtccggcagaaagtgcggcggcaagccccggaacgtcaagccttcatccgcgaggaggtggctagacttttagaggccgggttcatccgtgaggtcatccatccggagtggctggcgaacccggtggtcgttcccaaggcgaacggcaagcttcggatgtgcatcgactacaccgaccttaacaaggcatgtcctaaggatccttaccccctgcctcgcatagatcagatcgtcgactccactgcggggtgcgaccttttgtgttttctagatgcatactctggttaccatcagattcgcatggctagggaggatgaggaaaaaactgcgttcattacccccgtaggaacctattgttatacatcaatgcccttcgggttaaagaatgcaggtcctacttttcagcgtactactcgaatttctttgggtagccaaataggacgtaatgttgaggcgtatgtcgatgacttggttgtaaaaacgcgcaaccaagagaccttactctcagatctagcggaaacttttgagaacctccgctccgcccgcataaaactgaaccccgataagtgcgtgtttggtgtacctgcgggcaagcttctcgggttcttggtctctgcccgaggcattgaggccaaccccgagaagattcgagctatcgagcggatgcgcccccctagcaaacttagggatgtgcaatgcgtcactggttgcatggccgccctaagtcgtttcatatcaaggctgggagagaaggcgctacccttgtttaagctcctcaagcgctcggggccgttcacttggacggaggaagctgaaaatgccctcgcccagttgaaggcgtatctcagctctcctccggttctagtcgccccggagccaaatgagtccctgctactttacttagcggcgaccccccaagtggttagtgcggcgttagttgtggagcgcgatgaggacaatcctcatcctgcgcacccctactccgtgccgactcggcccgggagcaggcagggaggagaggcccccgagtcgaacggtagcctaaggcccccgacgaccggagtcggccctctgcccgcttgtcaaacggtgctgggtgcccccgaccctcaggaaggccccgaggccactaagggaaggccgcacttaccgccctttgaccccgaggctaaccctgtgctgactcgacccgggagagagcagggagaagaggcccccgagccgaaaggaggcctgaggcccctgacgaccggagctggccctttgctcgcttgtctgacgacgccaggagcccccgacccccaggacggccccgaggccactgtgggaaggccgctcctgtcgtcctccgaccccgaggtcatcagcacagaagacgagtgtgccccgaggggccacttggacgaagagcaccccggggatacggcccctagcgaagaggatcggccccgccgaaaggtgcagcggcctgtttactttgttagtgaggccctccgggacgccaagacccgatacccacaggcccagaagatgctttatgctattctgatggcctcgaggaaactgcgccattatttccaggcgcatcgggtcactgtggttacgtcttaccccctcgggcaaatcttgcataatcgagagggtacaggacgagtggtaaaatgggcaatcgagctttctgagttcgatctgcactttgaaccacgccacgctatcaagagccaggccctcgctgattttgtggcagagtggaccccggctccagagaccgtctcaatacccgaggccagcacgaacccctctcagctgcctcacaccgcccactgggtgatgcagttcgacggttctctgtctctccagggcgccggtgcgggggtcacgttgacctccccaaacggagacgtcctcagatacctggtccgtctcgactttcgagcgaccaataatatggcagagtacgagggactccttgccggactcagggtggcagctgggctggggatccgccgcctcctggtgttaggcgactctcagctggttattaaccaagtctgtaaggagtaccggtgctctgacccgcagatggacgcctacgtacgccaagtgcggcgtatggagcgccatttcgatgggatagaacttcggcatgtacccagaagggataacatgatagccgacgaactctcacggctcgcgtcctcgcgagcccagaccccaccgggcgcctttgaagaaaggcttacccagccgtcggcgcgacccgaccccttaggggagacggatgcgcctgaccggcccccgaggcccgtcggagtccaggcctcgggacccgaagagagcgctccaagctcccttagattgattgcttggatctctgagatccaaacatacctcacagataagactctacctgaggactgcgaagggagtgaacgcgtacaacgcatttccaaacgctatgtgctggtagaagggaccctctatcggcgcgcggctaacggaatcctcctgaagtgcattcctcaggaacaaggcgttgagcttcttgctgacatccatgagggcgagtgcggagcccattccgcctcgcgtaccctggttggcaaggcctttcgtcaaggattttattggccgacggctctcaatgacgcggtcgatctggtccggcgatgcagagcgtgtcagttccacgccaagcaaatccaccagccggcccaggccctgcagatcataccactgtcatggccatttgctgtctgggggcttgatatcctgggaccgttcaaacgggccccgggcgggtttgagtatctgtatgttgcgatcgacaagttcactaagtggcccgaggcttatccggttgtcaagatcgataagcactctgctcttaaatttattaagggcatcacggcccgttttggagtgcctaaccgtattattacggataatggcacccaattcactagtgaactcttcggcgactactgcgaagacatgggcatcaagctctgcttcgcctcacctgcccaccccagaagcaatggccaagtggagcgcgccaatgcagaaatccttaaaggcctcaaaaccaagaccttcaacattctcaagaagcacggcgattcatggatcgaggagttgccagcggtgctctgggcgaaccgaaccacaccaagccgagcgaccggggaaacgcctttcttcctcgtctacggcgcagaagcggttctcccatccgagctcaccctgaggtctcctcgggccaccatgtactgcgaggctgatcaagatcagcttcgtagagatgacctcgactacttggaagagcgaaggcggcgcgcggccctccgagccgcgcgctaccagcagagcctgcggcgctaccatcagcgccacgtccgggcccgatcactctgcgtcgacgacctcgtcctacgccgcgtccaaacgcgtgctggattgagcaagctctcaccgatgtgggagggtccgtatcgagtgatcggtgtcccccggccgggctcggtacggctggccacgggcgacggcacggagctgccaaacccgtggaacatcgaacaccttcgtcgcttctacccctga

SEQ ID NO: 967 - DNA, 234 bp, Oryza sativa
  Clone ID: PAT_MRT4530_100879C.1
atgggtgagagaaaagctggaatttgcttggttttggtacttcttctgtcaacacttgcgcaacatgcttatgctgatcatcaaccaagtgagattattaacaatggtgctggtatgaagtttccgtgtcgccgatctgtgccggtttcacttgcaagttcgactgctggtttttcgccaaagtcaacaaagccaaagtccagtctcacaagtgcttgggaaaaggatttataa

SEQ ID NO: 968 - DNA, 2065 bp, Oryza sativa
  Clone ID: PAT_MRT4530_10087C.1
atggacgacgaggacctcgtcgaggatctcctcgtcaccgtccgctcggcgcgggccttcgtcgagttccgccgcacgcagcgcaaggagtgcgccaacctcctccgctggctggagctcgtcctcccgctcctcgaggagctccgcgactcggcgccgccgctcaccgaggacgcctaccaccgcctcgccctgctcggacgcgccttctccgccgcgcgccgcctcctccggtcgtgccacgacggcagcaagatctacctggcgctggagagcgaggcggtgcaggggagattccgcgccgtgtacgagaagatgaactccgctctcgacgggatgccctactcggagctcgccatctccgatgaagtcaaggagcaggtggagctgatgaacgctcagctgacgcgatgtaagaagcgggcggacacgcaggacatcgagctgtccatggatctgatggtgatcctcgacaacaaggagggggagaggaacgcggacagggcgatcctggagaggctggccaagaagctggagctgcagacgctggcggacctgagggcggagacgatggccatcaagaagctcatcagcgagaggaacgggcagagcggcgatagcaccaagcagatcatcgagctcctcaacaagttcaaggaggtcgccggcgtcgacgagaagaacgtcctcggcgaggtctccgtgacgaaatccctcgacaagtgcccctcgttgatgatccccaacgacttcctctgcccgatcacgctcgccatcatgagggatcctgtcatcgttgccactggacagacgtacgagaggaggagcatccagaaatggctggacagcggggagaggacgtgcccgaagacgcggcagcggctgtcgcacatgtcgctggcgcccaactacgcgctcaagaacctgatcctggaatggtgcgacaagaacaaggtggagctgcagaagagggagccggagcccgtggcggagcaggacgacgagcatcagcgcggcgccgaggacatcccgtcgctggtggaaggcatgtcgtcgatccacctcgacgtgcagcggaaggctgtgaagaggatccggatgctgtccaaggagtgcccggagaacaggacgctcatcgccgacagcggcggcatcccggcgctcatcgggctcctcgcctgcccggacaagaaggtgcaggagaacacggtcacgtcgctgctgaacctgtccatcgacgagagcaacaagcgccacatcaccaaggggggagcactcccgctcatcatcgagatcctccgcaacggcagcgcggaggcgcaggagaactccgccgcgacgctgttcagcctgtccatgatcgacgagaacaagctcaccatcgggaggctgggcggcatcgcgccgctcgtcgagctcctccagaacggcagcatcagggggaagaaggacgccgccacggccatcttcaacctggtgctcaaccagcagaacaaggtgagggccacccaggccggcatcgtgccggcgcttctcaagatcatcgacgacaaggcgctcaacatggtggacgaggcgctgtccatcttcctcctgctctcctccaacgccgcctgctgcggcgagatcgggacgacgccgttcatcgagaagctcgtgcgtctcatcaaggacggcacgcccaagaacaaggagtgcgcgctgtccgtgctgctggagctggggtccaagaacaagccgctgctggtgcacgcgctcaggttcggactccatgaggatctctccaagatcgccaagaacggcaccagtagagcgcagaggaaggcgacctctctcattcagctggcgcgcaagtgctactgaagatgaggaccccgtttgtaattgtaactcattttttcctcccctctttctcagtagaaaaaattctgttgcttgccctgttctagctgaatgcatatgtggtgtatcgccagaatggggaattggtggtggaattgctgaaaaaaaacaccctaaatgtatttgtgccgatttcagtcaaaaaaaaaaaaaaaaaaccaag

SEQ ID NO: 969 - DNA, 322 bp, Oryza sativa
  Clone ID: PAT_MRT4530_100880C.1
gggcaatagtaaaaaagaaactgtataacccatgcatagaaggggtttatgattttaaaacccaaattgtcaaaggggctgaactatgtaacttttatgcccagaaggaaaaattttaatctccggaaggaaacccttaattttggggggaggacaccaaatttggacaattacaaaagggaccacctaaagcaatcaaagggaaacgatttcgggggcccctaaaaagggcaactttttgatgaaaaaatggtggaatttggcggggaaacttggaaaaatgggccctttttgacagcaccagcaccagttcaagcttaat

SEQ ID NO: 970 - DNA, 296 bp, Oryza sativa
  Clone ID: PAT_MRT4530_100881C.1
acttaaacaacttaatatcaaccataacaattccacatcttccttgttaaataattatggaggaaaacaacctatatcacaaagcagccgagccatgtacctatctatttgttcttccttgcacttcaaaaacaaccaggggttagctcttaattaaagctgtctcaatgcttcgcccactatatactttttgtggtcaattcctgccttttctcatctatacaatgaactcatgtcactaaagcttttttaccttaaattctactcttattttaatttatattcttttaaacctt

SEQ ID NO: 971 - DNA, 222 bp, Oryza sativa
  Clone ID: PAT_MRT4530_100882C.1
atggcggcgccgccgcgggccccctcgccggcgcgcgcgtgcacccgcagcggtggttgtgggcgatcccggcgaggtcgtggcgcggcggtggcgtttcccgtcactggctgcgccccctcgatcggattagggttttgtggggtggagttggcggcggtggtgaactttgtaccttgtgccgtgccggcctccacccctcttttatatggcgcagtgtga

SEQ ID NO: 972 - DNA, 210 bp, Oryza sativa
  Clone ID: PAT_MRT4530_100883C.1
atggcggcaacaagcttcccaaatccattcttccctagtggtggcgaaggcatggatctaggcaagccagcaacaaggaggcggagtgtcaggggctcggagttggagatgagatctaagcgacatagatcggagctgccctctgacaacgagctcgccggagagggaccacacgcgagggtaagtggaggcagggacgtggccgcgtga

SEQ ID NO: 973 - DNA, 138 bp, Oryza sativa
  unsure (1)..(138): unsure at all n locations
  Clone ID: PAT_MRT4530_100884C.1
ggatatcttatacatactaactacatgaatgaatgtcacgctttggtaaaattaacttnaaaaagctattttaggccttgctttgataaactagataaattcacgaataaaaagcatttcagaagatcacctccaaaa

SEQ ID NO: 974 - DNA, 373 bp, Oryza sativa
  Clone ID: PAT_MRT4530_100885C.1
gtcgtttcgttcctttttctctccccggtggaggaagcgaggtgtgcgccggcaccgagcggagcggtagccgcgcggcgccggcgacgagcggggctccacccatcctcctcctccgaccggcggctagcgggagcccgacagggcggatctggcgtgacgcggccctccccccccccccttccccgggggggcgccggcgtggcctcccgggacctccgccgatcctctcccctccttcggccgccatgcctctcctccttgtcctccgaccgccgtggtgaggtcggtgtggtctcgtcctgcgtctaagcgttgtatttgtcttttctgtctcctttggtgcgtcttttagcggatactttagctatta

SEQ ID NO: 975 - DNA, 189 bp, Oryza sativa
  Clone ID: PAT_MRT4530_100886C.1
atggtgagattgatgtccccgttgcggaattcggcgggcaagtggaggcgatggcagctcgcggaggaggggagctgtgggcggggcgaggagggaggagatgaggtggagggaggtggtctgagcgtgggtgtggcagcaagtggaggcaacggtggcgtcgaggtcggggacggcagctggcgttga

SEQ ID NO: 976 - DNA, 4035 bp, Oryza sativa
  Clone ID: PAT_MRT4530_100887C.1
atggagagcatgaacagctttctggagcacctggcgaggacggcgcctcccgacgggtcgcacgacgagcaggtgcagacgtggatgaagcaggtccggtacctcgcccacgactacagcaactgcatcgaccactacctccagcgtggtgacccggcgatccaccgcgccaggggtggcctccgtggctacttctggtgggcttactggttcgtgctggagaaggtcgcccagcacaaagcggccgctcgactgtgtgagctcaaggagcgggcgagcgacgtcgacaagcggcggatgagtgacattgtaagtgaaggtttgaccaaagcgggtgtacaattcaagcacacggttcggatcaacctcccatcagtacactacccatcagattatctaggacccaacgaggtcctctgctacatcttgcgtgtatgcacaatccagaaggataacaaagatccaaactatgtggataatgggattgttcggttcaaagcttggaggcaaagagaacagatgataagaatagtcagtaacaagtttgaagagcatgttccgagaaggattcaagatctcattagcaagattgaagatatggagagtaagatcaatgtaaaaacagtaggtagcgaaaaaacaagacaaacatatgaagaggacagcatgaatgaaggaacagatggtggaagcaagacaattgaaggaaacgcaggaggaggaagaaacacagctggagaaaaagggggggtcacaaagagtgaggaaaagggagggggaagcaagacagttgaacaaagaggtgggagcaccgagacccaagaaaaaacaggcggtggaaagacgactgaagaagcagtagataccgagtgctccctggttcttcaaactgacaaacccttatgtgtactctatcttgcgttgctaagtgaggaaaaatggaagcaagccaaggatgtgttagcattggaggagcaaactcttatcaacaacactgccaaagagtttaagcagcacatggaaggagatatgaagaccccaacaattaagctgcttgatacccaataccaagctattctgtgggaggtgttcctgaccagcaatcccgaggaagctactactgctgctagtgctactagtagtagtactaacagacgtgctgcacctgctacattgggcgacgatcaaaccaaagaaatcatggaacagatcaaaggaatcatccacctggtcaaacaagacatccttgaggagatacaggctattaaatcccatggccctagagaacaaaaactaggccatgatcaagtcgtcagtgccatccaagatgccaagaacaagattacacaaattggcctcaaaattaaggagcagatgataattaaaggaatgatagatagaataaatttatacttaaaagatggagacacattattcattatcgtggaggatgaaaacagaagacatgaacttaagtgggaggatatcatgaatgctttggaactgttgaagtgcgccaagggcagtgccgtgatagtgaccacaaagaacacccagaaggccagtgagttttgctacccaccaagtgagcctataacatattctcttgttggactctaccatgatattgtgctcaagctcacacaacaactggtgaataatgaagatgacaacaacaattcccagattctccgcgacatcttggacaagtgccatccacatgaattttgcatgaagatgttcgctcgtgctttgtatgctaatcccaacaggagcaataaagaactaggcaggctacgtgacacactacagatttcagaaaactcgttggatactaaagccaagaagatattcaagttctcctacagagatctgcatagagaacacaagacctgcttgctatacttagcaatcttccctcaaggcaccaacattaggcgatcaaccttaatagcacgatggcttacagaaggactaataacaaaggaagactggcctaccgcagttcgccatgccgagcgatgttttgatgctctcatcgaccggtgtcttgtttctccaggtgatattagtgctaaaggagagttcaagagctgcatggttggtgatcttatccatggcggtctccgactccgtgcctctgacagcatagacatgtttgtgaagaagcttcataattattcatctcaactatcactactcaagttgctagatctgcaaggttgtcaatgttttgacaaaagcagctaccttaaggccatctgcaacaacatagcacttctcaagtatttgagcctgaggaggacaaatatcacccatctacccagtgaaatcaacaacctccatgacctagagatattggatatccggcaaactaaggttcctgagaaggaaacaaagcttgtcctgctcctaaagctaaggcgcttgctcgctggttacactgatccaagtccaagctttaatgacaagggcacaaacaataggacattttcctgtgtccggattccttccaagattgagaaaatggaaaatatggaggtgttgtctaatgtcacggcttcatggtatggctatgaattgaaagacataagaaagctatggcagctaaggaagcttggtgtggttatcaaagataaagacagacacctccagaatttgtttcaagcggttggtgacttgaatgagtgccttcaatctatttcgatcactataactgacaccagaagtgagaccacctcaaaagattcaaaaatactatcagatgaactttacaaccgcttgatacatccaccgaagcttctggagagtgtaagcatcaacggatccacaaatctacggattctctcattattggcaaaagtgtcaggctccgacaatgatgcatacaatgaccctagcctaacgttcaagaaggaaatgtttgaacatctcaaatgcttacttgtcgacggagataacctgaagtgcatgacggacatcatctttgaagagggagcggctgttgagcttgagaagatcgtcttgtcctctaccaatgttaggtcccttcgtggggtcggtcgccttccaatgttgaaggagctcgagttgaaaggcaacaaatcattattttctttccatggaggtgttccgttgtctggagatggaggagctcatcaggaaagcaacgagccagtttcacattctaaagatggggctgctcctcagaaaaacaatgacgtacatgtttcaccttctgaagatggagcagctcctcacacaagtactgatggacaagttccaccttctgcagaaggaccagctccacagataaatactgaggtaaagattacattcaagaagggagaattccagcaactcaagtattttcttttcgaggactccaaaattgtcgacatcatcattgaaaatggagcggttcctgagcttgagaggatcatcttgttgttgactagaaaggagtcccagcttactgtgtctggcagccgagcaaaattgaaggagatcgaggtgaagggtgacaagtcaatcctcctttcgctacttaagaatgctaataaaattgaaaaggaaaattcttatgaagaaagcgagcttaccttcaagaaagatgagtttccaaagctcaaccttcttactgtccgaagttataagctgcatggattatatggcatgaagaaatttcagaataatgcggagattaccaatattgcaagtatagtgcaccggagcgcctctctagaaaaaatcatcttcaacaagggatctgctcctaaccttgagaagatcatctggtcacggccgtccttcgctgagttggagcctctccctggcattggcaatgttgagaaattgaaggagcttgatctggactgtgacaatgtccctaagcagttctctgcatgtgcaagaaggggacaaaaacagatgacagatcaggttaacccagaagaaaaacatagtgtcagctcgatatcgaaatgtcattatcatcgagaaaacataaaaacgatgctggacaatgatatttaa

SEQ ID NO: 977 - DNA, 2814 bp, Oryza sativa
  Clone ID: PAT_MRT4530_100888C.1
gcgtcgtcgctgtgcgtatccgcggtgctgtcaggcgccgcgagctggccgggccgcctggccagccaggggcaccagggcaagcgggccgtggcgcagcctctcgcggctagcgccgtgacggaggcagcgccgcccgcgccggtcgtcgcgccgccggcccgccccgtcgacgccccgcggcgccgtggcggacgtggcggcggcggaggcggcggcgagctcgtggcgtggaagagtgtacggcaggagaggtgggagggtgcgctcgaggtggacggagagctgcctctctggctggatggcacgtacctgaggaacggcccgggactatggaacctcggcgactacggcttccggcacctgttcgacggctacgcgacgctggtgcgcgtctcgttccgcggcggccgcgccgtgggcgcgcaccggcagatcgagtcggaggcgtacaaggcggcgcgcgcgcacggcaaggtgtgctaccgcgagttctcggaggtgcccaagccggacaacttcctgtcctacgtcggccagctggcgaccctcttctcgggctcgtcgctcaccgacaactccaacaccggcgtcgtcatgctcggcgacggccgcgtgctctgcctcacggagaccatcaagggctccatccaggtcgacccggacacgctcgacacggtcggcaagttccagtacacggacaagctgggcgggctgatccactcggcgcacccgatcgtgaccgacaccgagttctggacgctgatccccgacctgatccggcccggctacgtggtggcgaggatggacgccggtagcaacgagaggcagttcgtcggcagggtggactgccgcggcgggccggcgccagggtgggtgcactcgttccccgtcaccgagcactacgtcgtcgtgccggagatgccgctccgctactgcgccaagaacctcctccgcgccgagcccacgccgctgtacaagttcgagtggcacctcgagtccggcagctacatgcacgtcatgtgcaaggccagcggcaagattgtggcgagcgtggaggtgccgccgttcgtgacgttccacttcatcaacgcgtacgaggagacggacgaggaggggcgcgtgacggcgatcatcgccgactgctgcgagcacaacgccaacaccgccatcctcgacaagctccgcctccacaacctccgctcctccagcggccaggacgtcctccccgacgccaggatccccctggacgggagccagttcggcgagctggagacggcgctggacccggaggagcacgggcggggcatggacatgtgcagcatcaacccggcgcacgtcggcagggagtaccggtacgcctacgcctgcggcgcccgccggccgtgcaacttccccaacacgctcaccaaggtcgacctggtggagaggacggccaagaactggcacgaggagggctccgtgccgtccgagcccttcttcgtgccacgccccggcgccaccgaggaagacgacggcgtggcgatatcgatggtgagcgccaaggacgggtcgggctatgcgctggtgctggacggcaagacgttcgaggaggtcgcgcgggccaagttcccgtacgggctgccctacggcttgcactgctgctgggtgcccaggaaaaggaacagcaacctggtcttgcccacgcaacccgcggatcgctggagcgaccggagggaggtcggggcctcggggtgccacgtcatgcccctcgggcctttgcaccgcttcgccccgaggccctcgcccagccgccatgtggcggagggatcgagcgaggagggggcccaggctgagcctccattaatgcacacaacgccccaactgccccatgccgcatttaatgcagtaaggcagacgtgcggtccgttccagccgccgtgcgccgtcgcctcggccgtcgccgatcagctccaccacctccctcggctccgcaaagtcgagctctatcccggccgctggttcttttgcgccaaatccaaccggagattggccgtcatcgtgaaccggagcgccgccgtgcctccaaccgcgtcgtccgtcatcgccttcggtcgccgtcgtctccattggatttgcagctgcgaggagaagcccatccgccatttgtcatccgccgaagatcaccggaaagtcatcgccggccatctccttcgccgttcatcgctgcccaccgtcgccatctgtcgccgccaccgggttcgcacggcggaggagcaccctgtccaccccttcgcagccgccgaagaccaccggagcgccgtcgccgtcggggacccgagccgagccgagccgccgtcgaacctcgtcgccgggagtgattatgatccaggaacggtgcgctgtggtggattgtgttatgcgaggggtactgtcacagctcctttccgaggtaccgtggtggccaacggcaagctccggatgtgcatcgactacacggacctcaacaaggcatgccctaaagatcccttccctctaccacgcatagatcagatagtcgactccactacggggtgcgaccttttgtgttttctagatgcctactctgggtatcaccagatctgcatggctagggaagatgaggaaaaaactgccttcattactcctatagggtgtaatatagaggcgtatgtcgatgacctggtggtaaagacgcgccaccaggacacgttgctgcaggatttggccgagactttcgacatctcctcccgaggcatagaagctaatcccgagaaaatatgcgcgatagagaggatgcgcccccagcaagcttag

SEQ ID NO: 978 - DNA, 152 bp, Oryza sativa
  Clone ID: PAT_MRT4530_100889C.1
cttctccctcccggagccaaatgcagaaggggttctggtggctgatcgcgcggcgctggtggctcgctgctggtcgccggtgaacggcggcggcattgctccgggctccaagaggcgggcgccgccggcggcggcgggccagaggagaggaa

SEQ ID NO: 979 - DNA, 506 bp, Oryza sativa
  Clone ID: PAT_MRT4530_10088C.1
ctacacacaaatgttacccggtccaactgctataaggcacagtagcaatgaccaataacacaactggtgagtggcaactaaacggggcgtaaggcaacgtccagagtgatagaaccaatattggcgtaggggatgtcgttttgcttgcacatggcgtcaatacgctccagggtcttctcaatgataacagcgctgatagggccagcattgttattgccaccaccaccaccacgacgcgcacacctgcctccccgcatacagttttcgacctcttcggcaacgtcttgggggccaggcagcaaaaccgtaccatcaaagaacaccattggactctcaaaggtgccatcataagttaattgagttgctgtggaatcaacagggggatcaactgtaaccacaactgggcccttggcaacaagggtgagttcgcaaaggcttccatccttctcatccacgcggtagatgtagttagacccagatacatacttgctaccgtccggtgcagt

SEQ ID NO: 980 - DNA, 2406 bp, Oryza sativa
  Clone ID: PAT_MRT4530_100890C.1
atgtctcccgctatgctgcaggcgtcgtcgctgtgcgtatccgcggcgctgtcaggcgccgcgagccggccgggccgcctggccagccaggggcaccagggcaagcgggccgtggcgcagcctctcgcggctagcgccgtgacggaggcagcgccgcccgcgccggtcgtcgcgccgccggcccgccccgtcgacgccccgcggcgccgtggcggacgtggcggcggcggaggcggcggcgagctcgtggcgtggaagagtgtacggcaggagaggtgggagggtgcgctcgaggtggacggagagctgcctctctggctggatggcacgtacctgaggaacggcccgggactatggaacctcggcgactacggcttccggcacctgttcgacggctacgcgacgctggtgcgcgtctcgttccgcggcggccgcgccgtgggcgcgcaccggcagatcgagtcggaggcgtacaaggcggcgcgcgcgcacggcaaggtgtgctaccgcgagttctcggaggtgcccaagccggacaacttcctgtcctacgtcggccagctggcgaccctcttctcgggctcgtcgctcaccgacaactccaacaccggcgtcgtcatgctcggcgacggccgcgtgctctgcctcacggagaccatcaagggctccatccaggtcgacccggacacgctcgacacggtcggcaagttccagtacacggacaagctgggcgggctgatccactcggcgcacccgatcgtgaccgacaccgagttctggacgctgatccccgacctgatccggcccggctacgtggtggcgaggatggacgccggtagcaacgagaggcagttcgtcggcagggtggactgccgcggcgggccggcgccagggtgggtgcactcgttccccgtcaccgagcactacgtcgtcgtgccggagatgccgctccgctactgcgccaagaacctcctccgcgccgagcccacgccgctgtacaagttcgagtggcacctcgagtccggcagctacatgcacgtcatgtgcaaggccagcggcaagattgtggcgagcgtggaggtgccgccgttcgtgacgttccacttcatcaacgcgtacgaggagacggacgaggaggggcgcgtgacggcgatcatcgccgactgctgcgagcacaacgccaacaccgccatcctcgacaagctccgcctccacaacctccgctcctccagcggccaggacgtcctccccgacgccagggtggggcggttcaggatccccctggacgggagccagttcggcgagctggagacggcgctggacccggaggagcacgggcggggcatggacatgtgcagcatcaacccggcgcacgtcggcagggagtaccggtacgcctacgcctgcggcgcccgccggccgtgcaacttccccaacacgctcaccaaggtcgacctggtggagaggacggccaagaactggcacgaggagggctccgtgccgtccgagcccttcttcgtgccacgccccggcgccaccgaggaagacgacggcgtggcgatatcgatggtgagcgccaaggacgggtcgggctatgcgctggtgctggacggcaagacgttcgaggaggtcgcgcgggccaagttcccctgcgaggagaagcccatccgccatttgtcatccgccgaagatcaccggaaagtcatcgccggccatctccttcgccgttcatcgctgctttccgacgttccggaggagagcgtttttgttgaggaagctcctggtttggaatggtacatttctggtttggagatagatctatacagccggtggctggcgaacccggtggtcgtcccgaaggccaacggcaagctccggatgtgcatcgactacacggacctcaacaaggcatgccctaaagatcccttccctctaccacgcatagatcagatagtcgactccactacggggtgcgaccttttgtgttttctagatgcctactctgggtatcaccagatctgcatggctagggaagatgaggaaaaaactgccttcattactcctgtgggcactttttgttatacaactatgccttttgggttaaagaatgcaggccctacctttcagcgcatgactcgtattactttgagtaatcagatagggtgtaatatagaggcgtatgtcgatgacctggtggtaaagacgcgccaccaggacacgttgctgcaggatttggccgagactttcgacagtattaggtccacgcgcgtgaaactgaaccctgataagtgtgtgttcggtgtgccggcggacaaacttctcggttttctagtctcctcccgaggcatagaagctaatcccgagaaaatatgcgcgatagagaggatgcgcccccagcaagcttag

SEQ ID NO: 981 - DNA, 464 bp, Oryza sativa
  Clone ID: PAT_MRT4530_100891C.1
cccacgcgtccgagctcatctcaattggaacatgcttgctacagctgctaatgactggacttactagcttgcatataaggacccacggaggaattaattattttccaatgttgaggaacctagaggtattagccaacttgcacatgccatccaatgctctaaccattctttattaaaattcttatatgctaccacttgtaaccattacctacttccgaccccatccatgtgatgtggggtgtctcatgcctaggcaaacaaccggacaataaaggataggacaaatggaataattcttccctggccaaattaataaaagtagaaaaaaacctccaattactcctcaaaacaaaaatggacccatgggaccactgcgtttttttggaaagggcgggggccccccttaaaaggaacggattccaatactgagccttccaccttttaacgggcggatgggaggaccc

SEQ ID NO: 982 - DNA, 594 bp, Oryza sativa
  Clone ID: PAT_MRT4530_100892C.1
atggctaaatttggccagcccaaattgccttgccattcgtgggcccgatgttggagatgcttttctctcaccccgtactacctgctcgagtctgctcccacgccatctgcgcaactaccgccagcgatggctgcgacggatggggacggagcccaagcggcagaggatggcggtgatgagcccggatggcagcggatagcggcggagcccgagcagcggtggacgcggcgaccaacccaagtccctccgcctatcaccgccgtgtcctttctccctccgctcgtgcctgccactgccatgggaaggaggcgcgtcgtcgctcgctcgcatcctccacccgagctcgccgtcaacggctcgcccgcgctcaagatcggcggcaatgggatgtcggcatcgcacctccctgaggagaggattccggcatcgctcctccccaccttccacctcctcccaacgccggtgctgcccctctcaacctcctcgtgccgccgcatgtgccccagccacatccacctccacccccggccatccggcgcagcttgccatctattgctgccatgccacgggaaggtggggaaagaaaagaaatga

SEQ ID NO: 983 - DNA, 535 bp, Oryza sativa
  Clone ID: PAT_MRT4530_100893C.1
acggggaggatccccgtcatccatcatttaatagaggcggacttgggggcgcgcatgcgccgggaacatgatctggggcatgtctagagcggtcaagctgactccagacggttgagaggcgcagcgcctctcatcatcgcgatgggcgcagggcatacatggcgcacgccgcctaacacctggccagagcatgcctgcctttccgccgtcccatctgtcattcgaccggtcacgcaccggtcatgagctagtcaggcgtttagcacgccgcggcgtggcgcgcctgctctagcctcattaaatgcggtcaagtgggcgctggttggcgtccacccaacctcacttgcatgacggccacgtggtgaccgtcccaaggggtcagggcagcccgagccctcgggctagagaggggcggctgtcacccatccacgggcccgaccccctcgggggaaacgccacgtggacgttaggggcgacctctcccctttaagcatgctaccccgggtccatatcaccgacaaaagtcatggatgga

SEQ ID NO: 984 - DNA, 1467 bp, Oryza sativa
  Clone ID: PAT_MRT4530_100894C.1
atgaggaaggtgtgccctaaccttgaccgggaggacggcctcgacaccgtgctggaggtgccggtgccggagctccaccgccaggcaccgcggcggcgagggcggcgcggcggcggcggcacggtgaagtcgtgggtgcgggcgaggatggagcacgggcggaggcgcgacggcgcggcgccgtcgcgcgccgaggtgcagctgatgctcggcgtggtcggcgcgccgctggtgccgcaggccgtggaggcgaggaaggccatggtggccgggcggggcgtcgggggggagggggaggagcccctggacctggaggcgtccaaggcgaggtacatcgtcgagcagtacgtcgcggcggccggcggcgaggccgcgctgggcgccgcgacgagcatgtacgcgatggggaaggtgcggatgaggacgacgacgacgagcaaggcgaacaagggcaaggtgatgggcgtggccgccggcggcgaggtggccggcgggttcgtggtgtggcagaagaagccggatctgtggtgcgtggagatggtcgtcgccggtggcgtcaagatgagcgccggcagcgacggcaaggtcgcatggcgccagacgccatggcaggaagcccacgcctcccgtggcccgccacggccgctccgccgatgtattcagggcttggacccgaagtcgacggccgacctgttctcgagcgcggcgtgggtgggcgagaggtgcgtcgacggcgacgactgcttcgtgctccgcgtcgacgccgaccacgccgcgctgcgcgcccggagcagcggcgacgtcgaggtggtccggcacgccgtgctcggctacttcagccagaggacggggctgctcgtccgcctcgaggacagccacctgctgcgcatcggcctcgcccacgccgccgccgagagcgcctactgggagaccaccatggagtcctccatcggcgactaccgcgccgtcgacggcatcaacatcgcgcacgccggccgcaccgccgtgtcgctgtcccggttcgagagcgccgacgacgccgccgccgccgcgcgcggtagtaataagcggtcgtggggcaccaccaccatggaggagacgtggagcatcgaggaggtggacttcaacgtcgtggggctctccatggattgcttcctgcctccccgggacctagtgctcaacgactgcagcaagcagcagcagaaagaggacgccgccgccgccgtcgtcgtcaaggacgccgccgccgccgtcgacgtcaaggacgccgccggtgccgccgcgaacgccaagggcggtagtgacgacggcaagaccaacggcggtgacgtcggccgcggcgtggtggtgaagaaggcgcttgttccggcggtgaccggactgggttggttcggtccggccaaggtggttgccgtcgacgacacggtggacgacggcgtcgccgccgcagccgacgacgacaagtaa

SEQ ID NO: 985 - DNA, 1436 bp, Oryza sativa
  Clone ID: PAT_MRT4530_100895C.1
cggaattcccgggtcgaccacgcgtccgcttattcatttcatcccgtccacgatcacttcctagcaattaagatcatggtgcagcgcacttcatccgattcggcggcgtcggctgaggccatggtcatggacctgagtcccaagcgtcccgccaagtcctacggcggcgaaggcggctcgtactttgattggtccccctccgagctgcccatgctccgcgccgcctccatcggcgccgccaaactctcgcttgccgccggaggcctcgccctccccttctactccgattcggctaaggtggcctacgtcctccagggcaagggcacctgcgccgttctcctccccgagaccccctccgagaagatcctacccatcaaagagggcgacgcgctcgcccttccattcggcgttgtcacctggtggcacaacctgcacgccgccaccaccgaactcgtcgtcctcttcctcggggacacatccaagggccacaccgccggccgcttcaccaacatgcagctcaccggctccaccggcatcttcaccggcttctccaccgagttcgtcgcccgcgcctgggacctcccgcaggacgccgctgcctccctcgtctccacccagcccggcgccggcatcgtgaagctcaaggatggcttcaggatgcccgagggttgcgacaaggacagggagggcatggtgctcaactgcttggaggcgccgctggacgtggacatcaagaacgggggccgcgtggtggtgctgaacacgcagaacctgccgctggtgaaggaggtggggctgggcgccgacctggtgaggatcgacggccactccatgtgctcgccggggttctcgtgcgactcggcgtaccaggtgacgtacatcgtgcggggcagcgggcgcgtgcaggtggtgggcatcgacgggacgcgcgtgctggagacccgcgccgagggtggctgcctcttcatcgtccccaggttcttcgtcgtctccaagatcgccgacgacaccggcatggagtggttctccatcatcaccactcccaaccccatcttctcccacctcgccgggaggacctccgtctggaaggccatctcccccgccgtgctccaggcctccttcaacaccaccccggagatggagaacctcttccgctccaagaggctcgactccgagatcttcttcgcccccaattcgaattcgatttgatggacaatatccatcctccatctccagcacctgcccacctagcagcatcagcagattcagcttccttccttttatttagatcatgtcagtcgttagatttaattcggttctttggttgttagcatcacctacctcttttatttgataataacaataagctcgagatggagtggaatttgatagtcctattcatgcctatgtcctctttattttttaaaaccttgttt

SEQ ID NO: 986 - DNA, 174 bp, Oryza sativa
  Clone ID: PAT_MRT4530_100896C.1
atgagggcgggagcagcatcctcggctgccgagaacgacgaggaggaggaggaggccgacgatgacgatgaggaggcggcggcggcgccggattctagtggcatgagaggcggcggtgaattacgcagcgccgggacggccggaattatggttgagagagtacgtgattgctag

SEQ ID NO: 987 - DNA, 635 bp, Oryza sativa
  Clone ID: PAT_MRT4530_100897C.1
cgccaaagcgcgtatacgggcggagggaaaagcgacagcaaaaccagacaaccttggtgctcttggcgattggaaacgccctctctaagcaaaaaggccatgccggccactgcgttgggccctgccataaaagactccgatctatccatagcatttaggagcccttgcggacaaaacaaacgctcttggataaccacaacaactctgacgtgcactcaaacaggcacatagtccagcacgccatgttaaacgcctctatccataaaccaggggctgcggtaaaatgtacacaaatgctgtgatgagctgaagcacctgccatcaaccctgatgaatagcaatgttaagaaacggggggagacaacgatcttaacatcgaggggaaagatttgaagagtggaaaaaggggaagagacatagggtgaagatgagaaagggggcatcaaatacatgcaggagacgtatctcagtgacaccactaagaaatcaaacaagtagcaggggtatcgacacagatgtagacacctagcgatgttatatttcaaaactgctcaaaatgtaatggcatggatctaattaaccctggaaacaatgccgcttttcccaacatgtgtctctcgatggtcaggcgcatg

SEQ ID NO: 988 - DNA, 2844 bp, Oryza sativa
  Clone ID: PAT_MRT4530_100898C.1
aatgaaaaccacacctttgtatgatatatattatttatcaattgaccctacatgctacaaagtcagtgacaagcaaatgagctttctaaattaacatatgatagccaaaactgccaattttgactaattctgttagctatatcaggggtaaaaaaacaagtgtcaaaagaatgaatactcgctgcatcattatttacaccacacatgagcaagctagttcagtcaccttcagccattcaggaaactctcgtactgtgttcccatcaaagtactattaacttcagcccagttatctatatgatcacgcaaaagtttggtatggattttcacatgcctactggacagctttctcttaggcaatctcagaaaatccaggacatccatgagcttagtatcattgctgacaacatcctcataatacagaataatatggcgtgtctttttgaagtacagtaaagcatcagcggccaacttatcggatttcttaagatcggcgatcaacttctttgtgtctatttctggcttaaattgagcaagaatttgagcctcttcatgatgttgcactagaccctccttgtagacttcgcgcttgggttgactgtatccattgctggtaagtccatgagatgattctgtgtctaatgtgatcttcccaatgttcactccaggctcatttggctgtggcaacgtggcattctcactggctagcatcataacaacttctttccacaacatccatgcatatctgaggaggttgagattaatttcggattcacaaaagcctcgattcctcctgccggcgacaatctccagtactaggacgccaaagctgaagacgtcggatttcatggaaaacacaccgtccattgcatactcttcaaacattctcgcgatgccgaagtctgagacttttggtaccatgtttctgtctaataacacgttgcttgccttcagatccctgtggatgatcctaaaccttgaatcttcatggagatataataggccccgtgcaatccctagaatgatctcaaaccgtttgttccaacttagcagtttacgatttccttcgtcaaatatgaacgtgtctaggctcttgttgtgcatgtgctcgtataacagtatcctctcgtcatcatcaatgcagcaacctagtagcctgacaaggtttctgtgctgaagcttggcaattagtttgacctcgttcttaaattcaacaaccccctgtactgatcttttggacaacctcttcacggctacttcttgcccatcctcaagtcttcccatgtaaacagggccgaatccaccttccccaatcttattatgcgctgcgaatctgtctgttgcgttgaaaatcatctcaagatcaaacaacggaaggtcaagatcatcttcagcacccctgttctcatcaaaccattgatcccttgctgggctcaacgcagggcttttccttaccctgaacggaagatcatcggcatcactgcttttctccatttcagtgtgctgcttcctcctcgccttgttcctccaaaaacagtaacagccaacaactcctaaaatgccacagatagtcgtgaccacggcgatcaccgtgttcttgattaagcgccggcgtcttgctggtgcgttcaaggcgtcaatctcggactgagcgagtcggatgtacagatcctgcacgaccaccgtatactccctcatgtccagcaaatcgacggtccagaagacgcacccgcgactgtctccgccgctcacgttcgccgcggcgtacgcgttgcagctgcagttgcgcaggcacgcctgcctgcactggtccagcgtcatgccggcgtgcaccgtcgccttcgtcgcctccggcagcttcatcctgttcacccgccagaacccatcgccatccccgcaggtcaggttggccatcctggcacaacctttggacgagtcctggaagggccccggttgggactgactctcaaaccccggcaggcagctgcactgccgggactggtcgacgctgctgacgcagtagctgaacggcccgcagaacgcgtagttgtcgcatgggtctggagggtagaagtagctgttttcgctccaggactggccgttgttgtccgaccatgatcgctgtagtacgtctcgtcggggctcgacaagaccgtgaaggtgaatgcccgcctgctgtgacttgaggagaggcacgccggtgagcacctctccgttccacggcccgctcgcgtagatcctcctcgagttctcggagaggaagaactccggcagcccgccgaggaccagcccgaacgtgtacttccccggcgaagggtcggtcgggctgcgccaggatgtgatgtttctggtgatgccgttcttgaggtccaccccgagcttcatgtccgggagcagcgtgtccgtcgggtagtcgaagctctgccacgccatgccctgaggggagctcacgacgaagttgccggtgcccaagagccgagcagtggcgccctgggctacggttccagtgggtgcagcagacgaccatacggtgttgttctgcccatcgcggatgacaaggcggccgtcagctaagagtctgacgttgccgggtttgatgagcaccgggttctggcggttggcgatccacacgacggtctgcggcgagattttggcgtaccaaatcgcgaggtagtacgtgccaccatccgggctgaagaagccgagcttgaagatgccattggccgagacaagcgtctggttgccggtgatggacgcggcctggttgatgctgtcatcggcgatggatggctgataggacaaggccgtggcaactaggaggagggtgagtgaatgtgtcctcat

SEQ ID NO: 989 - DNA, 468 bp, Oryza sativa
  Clone ID: PAT_MRT4530_100899C.1
gtcgatgaaaatccattggagagaattacatggaagttccggaacttaaggacttcaaacttgagcgttgattttggcaaaatctcaagtatcatgtcaatcttttctttactgcgttgtgctccacagagtggacaactgaatattgaggttgatctgaaagaagcacagggagatgatgagattcatgaagggattctagaagcatatatgagtgaagatttggttagaagtctcaagcgtgtgaccctgtcttttatcaagtgcttcccaggggagatgagctttatcaagcttcttctatccaaggcagcatcccttgaatcacttaaagtcatgatgttctggcatcatataatgcccgtttcggatgcgtgtcttcttttcacgacatacaaaaaggagtcatctacccaggtgaagtttatagtggagcatggcatggacacattcgacatcggctcttaa

SEQ ID NO: 990 - DNA, 138 bp, Oryza sativa
  Clone ID: PAT_MRT4530_10089C.1
gtaaattttgggtattatggtcatggcctcgcgctggccgatcagcatacagaggtggggaaagagagctatggctatgggccatgggcctatggcaatggcagcggcgctgcttctcatgttgtccctagcgaggcg

SEQ ID NO: 991 - DNA, 511 bp, Oryza sativa
  unsure (1)..(511): unsure at all n locations
  Clone ID: PAT_MRT4530_1008C.1
agaagaagagatttcngccatggcgtcgtcggtgggcagcggcggcgacccacnttcctgggggaacgaagctggcggacccngcgccccagagcgggaaggatcgttggccaaggttcggggttcnggccgcnggganaaaaagcngccggccanaaaaagcngcgangccnttntgcgcccactaacggacangccgcttgtngttccccggcgcggtggcgccnggactaccttggacnggtcctcgtcnggcnactaccgcttcgaccccttcngcctccggaancccgcgganttactgcagttccagctggactccctggaccnaaacctggccnanancnaccccccgcgnanatcntccgcncccggttcgagaccngcgaagtnaaattcaccccntttccanccctacnccnnangtnnttcgggctccaaccgcttccccnaatncnaactcntccaccggccgctgggccatnctcnccacctcnggngcctctccgtc

SEQ ID NO: 992 - DNA, 344 bp, Oryza sativa
  unsure (1)..(344): unsure at all n locations
  Clone ID: PAT_MRT4530_100900C.1
cncacacagagagatcgatatcaacatgctttagtccatacacggattaaactaatggcatgcacatcacgttcttgccgatgagacgatgcgttgcaagttacaagtagtagagaggaaggcacaggcaggattgggtgttttggattgttgctggaaaaattcaggattatattggcgtcagtgagcttgcagaagcattcttcctgttcttgttttaggtagcattatcccaaagagagggaganattattggagctcatttgattggttgattgattgattggagtggtgaggtgagntgaagtaaccatnggttctttcgtntcgacgacgaggcggcc

SEQ ID NO: 993 - DNA, 1283 bp, Oryza sativa
  Clone ID: PAT_MRT4530_100901C.1
gaagggggacaacaggcattccaaaaagaggatattatggtcctctgatatctgcaatatcagtagtaccaaactttgaagttcctttggctgttgaaccaccgcaaattggaggtagcaaaaagctttcaaggatatctaaagcattcctggttgccatgccaattttagcaatgtgcgcagcactttttgtcggcatttattggattaaatggaggagaaagaactcaatgcataaagatctcagagcctttgacctccaaactggatcctttaccttgagacaaatcaaagtggcaacaaggaattttgatgcggccaacaagatcggcgaaggtggttttggttcagtttacaagctatcatcaaggtctaaacaagggaatcgagaatttgtgaatgagataggcatgatatctgcactccagcacccaaaccttgtcaagctttatggctgttgtacagaaggaaaccagctcttgcttgtttatgaatacatgggaaacaactgcctagcgcgtgctcttttcggtacagtcgaacaatacaggctgagcttggattggccgacgagacgtaagatttgcctgggaatagcaaggggtttagcatatctacatgaggagtctgcaataaggattgtgcacagagatatcaaggctagcaatatactgcttgacaaagacttgagtgccaagatctccgattttgggctagcaaagcttaacgatgatgatcacacacacataagtacaagaatagctgggactatcggatacatggctcctgagtatgcaatgcgtggttatttgacagacaaagctgatgtttacagttttggggttgttgctttggaaattgttagtggaaaaagtaacacaagctacaggccaaaggaagattttgtttatcttctcgattgggcttgtgttctacatgagcgaggaaatctcctggagctggtagatccagagttaggctccgattactcaacggaagaggcgctcctcatgctgaatgttgccctcctgtgcaccaatgcagcaccaacactgagaccaaagatgaccaaagttttgagcctgcttgaggggcacataccacttcaaccatttctgtcagacctcagccttgctgcaaacagcctgagctcaagcggtcagcgcaggaacttctggcaaacactaagtgatcagagccaaagcatgactgcagcacaagcatcatccagcaacaccaatgagtcatcatctttagatattgctggtagcctgagaccttag

SEQ ID NO: 994 - DNA, 3000 bp, Oryza sativa
  Clone ID: PAT_MRT4530_100902C.1
atgccatggaggttggtgccatgtggtcgggggcagctgttcttggtggttcttggtcttcttcttcttcttcttggtgaggtccatcatggctcaggggctagaacagcttccctccctaggctcctcccagctgaagtgcgtactcttcgtcgtatcgcgcagaagatggggatcttgcgttggaacttctccgttgatccatgcaactccggcggtaacggtggctttgggggcactgtgaattgtgactgctccttctacaaccatacattctgccatgttactaacataacactggaagggcaaaacttcactggtgagctcccaccggacttcgccgaattccccaatctcctccaactagatctaagcagaagcttattgcatggtggagtgcctgaccagtgggcccgaatgaagctacagggactgtcattaatgggaaacaatttgtcagggccttttcccattgctcttacaaagatcacaaccctgactaacctgagtatagaaggaaacaatttttatggcccaatcccgtccgacattggacatctcatgcaaatggagaagttaatattatcggccaatgagttctccggaccccttcctgctgctcttgctaggttaacaaatttaaccgacctaaggatttctggtaacaatttttctggaagagtgcctgttttcttggggaagttgaaaaagctcggaaaattgcaaattgaaggatctttattggaagggcctattccctcagaattttccaaattgataaacctttatgatctgaggattagtgatctgagaggtagaggatcagttttcccggacttaagggaattggtgtccatgaaaacaatcatactacggaattgctccatcaatggaagcataccatcttacattgggaacatggataatcttaagcatctggatctgtcttttaataaactgactggagaaataccagcttcatttgctaacatgggacatgtagatcacatatacctaacaggaaattcactcactgggagtatacctgattggatattgaagagaaacaagattgccaatatggtggagagctattcacctgaaatgagcagtttgactaatgttgagtcatgcttaaagaggaattttccatgcggttcttctaatggaaaatacaggtattcattgaacataaattgtggtgacaaagaagtaactattaacggaacaaaatatgaaactgatgtggaaccaaaaggagcttcattgctgtaccaaagcccaggatcaaactgggcatttagcagcactgggaacttcatggataataatatcaatgatgatagctacattgcgacaagcgcatcaaaattgacggtgcccaactcggagttgtatgcaaaagcacgcctttcacctctttcactgacatattacgggctctgcatgcataacgggagttacaccgttaagcttcattttgctgaaattgttttcacaaatgacagcacatactgcagccttggcaaaagaagattcaatgtgtttatacagggaagaatggttctagaggactttgacattgaacagtcagctggaggagctgcgaaggcagttatcaagactttcacggcaaacgtcacaaatcatacactggaaattcatttctattgggcaggaagggggacaacaggcattccaaaaagaggatattatggtcctctgatatctgcaatatcagtagtaccaaactttgaagttcctttggctgttgaaccaccgcaaattggaggtagcaaaaagctttcaaggatatctaaagcattcctggttgccatgccaattttagcaatgtgcgcagcactttttgtcggcatttattggattaaatggaggagaaagaactcaatgcataaagatctcagagcctttgacctccaaactggatcctttaccttgagacaaatcaaagtggcaacaaggaattttgatgcggccaacaagatcggcgaaggtggttttggttcagtttacaagggtctgttgtctgatggcaccattattgctgtcaaacagctatcatcaaggtctaaacaagggaatcgagaatttgtgaatgagataggcatgatatctgcactccagcacccaaaccttgtcaagctttatggctgttgtacagaaggaaaccagctcttgcttgtttatgaatacatggaaaacaactgcctagcgcgtgctcttttcggtacagtcgaacaatacaggctgagcttggattggccgacgagacgtaagatttgcctgggaatagcaaggggtttagcatatctacatgaggagtctgcaataaggattgtgcacagagatatcaaggctagcaatatactgcttgacaaagacttgagtgccaagatctccgattttgggctagcaaagcttaacgatgatgatcacacacacataagtacaagaatagctgggactatcggatacatggctcctgagtatgcaatgcgtggttatttgacagacaaagctgatgtttacagttttggggttgttgctttggaaattgttagtggaaaaagtaacacaagctacaggccaaaggaagattttgtttatcttctcgattgggcttgtgttctacatgagcgaggaaatctcctggagctggtagatccagagttaggctccgattactcaacggaggaggcgctcctcatgctgaatgttgccctcctgtgcaccaatgcagcaccaacactgagaccaaagatgaccaaagttttgagcctgcttgaggggcacataccacttcaaccatttctgtcagacctcagccttgctgcaaacagcctgagctcaagcggtcagcgcaggaacttctggcaaacactaagtgatcagagccaaagcatgactgcagcacaagcatcatccagcaacaccaatgagtcatcatctttagatattgctggtagcctgagaccttag

SEQ ID NO: 995 - DNA, 115 bp, Oryza sativa
  Clone ID: PAT_MRT4530_100903C.1
gacagcgggcagccgcccttttcaaggggttataatttaaaacggaggaaaaccatctataccgtcgtgaagtggttcagaagcaaatcttcctcgtgataaatgacgtggggaa

SEQ ID NO: 996 - DNA, 230 bp, Oryza sativa
  unsure (1)..(230): unsure at all n locations
  Clone ID: PAT_MRT4530_100904C.1
cttccagcaaagttcaccatcttcaanttnggtnctcaganggaagttaccaactggggcttntnctcctgngttgcaattngtctgtggnctgttctgatcatnnnggggngtgacagagtactacantagcaatgnatacagccctgtncaagangtnncagattcctgncagaactnttggctnccactaatgtcatattgtgggcttgctctgggatacaaagcag

SEQ ID NO: 997 - DNA, 587 bp, Oryza sativa
  Clone ID: PAT_MRT4530_100905C.1
acccggggatccccaggcttgccccaccgtcatcgaccaattaagcggagatgttgaaggaaaccggcatcccggtgcaggtgattttcagcagtggcaaagatgtggatttattgccccaacggagtaacaaaggtaacgccacccaatatctgcaacaacatttagccatggagccgtctcaaaccctggtgtgtggggactccggcaatgatattggcttatttgaaacttccgctcggggtgtcattgtccgtaatgcccagccggaattattgcactggtatgaccaatggggggattctcgtcattatcgggcccaatcgagccatgctggcgctatcctagaggcgatcgcccatttcgattttttgagctgatattttagttaacaattccgaatgggcaagcaaagtaagctacaatttgacattgttcaattttgagtacagggtgtaaagccgaggagggcgttattgctgagccactaaacttgacggtcagtttgcgcgggacattagaagtcaaggaaaagttacaaatcttccgtctgacgggtttgttggacgcattttccgagcctacct

SEQ ID NO: 998 - DNA, 212 bp, Oryza sativa
  Clone ID: PAT_MRT4530_100906C.1
gaaattctctagttcctcgtatgttggccggatgcacctgtcatttacaagaaaagtatttatatggaaacgcactaccagaatttgtactattctcaagtatcatgttgaataattggaattttttgtaatatatagtaactactagaagcattaaagattgaaaattctggtagtactatttatgtttgagatacacgaaggcaaagtga

SEQ ID NO: 999 - DNA, 477 bp, Oryza sativa
  Clone ID: PAT_MRT4530_100907C.1
ttttgtgttttttttttttttttttttttttttttttttttttttttttttttttttttttttttttttttttttttttttttttttttttttggaacaaaagccccataaaaattaacccaagggggggggcttgcttttgcctattggccaggtttacaaaaaaaaccctggaaaatacccgggcatatgccatttaaacaatatttaattggccaaaaggaacccccccccggggggatttaaccctaaaaacccttgggccccaaaaaaaacaaggggaaaaataagggttgccccgggaccagttgtttttggggaaaaccccgaaaaaaaaccctttgggcccggggggacacgggggctttggaaaaggaataggcccccagggctgggggggccctggcttaccattagccccgggcttagggggttttggttttggttacgcccctggttttggagggtttggcttcg

SEQ ID NO: 1000 - DNA, 456 bp, Oryza sativa
  Clone ID: PAT_MRT4530_100908C.1
atggcgagtgaaaggaaagcagctgcagtggacggacgcggcgaccccgatgccatcatcatcttttcgcccagcctctgcagacttgcagtgtggcgctttgttgccattgtcgctgtattttcctccgaagccaatgaagaggaggtgacgtggattcatagcatcgctttggcgttgcgggttctctccgagatatctggtggtggctcgtcggacctattagagctccattcctctccaaccaccaccactggttctcctctctcttcgaccaccacccctaactctggcaaatcctcgagcagccaagcagaggtcctagtagtagatgggtggggctacgggacaaacaacgtggctcctaggctgtaccttcaccgcgcagctctcaggcgtccgatttcgtgcgcctgcggctggattgacctgcctgagcgagaggcttcaggctag

SEQ ID NO: 1001 - DNA, 802 bp, Oryza sativa
  Clone ID: PAT_MRT4530_100909C.1
ccacaatctcgataggaaatgggaacaaaatcagtttttggacagaccattggctcgatggaagagcacctcaacacattgcaccctctattttgaagcttgccaaaagaaagggaaataatctccggatggaattgaaagacaactattggattgccatgcttaacctgattacatctattttagagattgaggaactggttcagctagggagcaaaatacaagatgtcgttctagataaacaaagaacaaacgacatctcctggaaggactgcaaatggagaatactcggcaaatagtgcatatcaaatgcaatttcaaggggaaataacatatgcaaatttatcaactctttggacggcgcattctgaaccaaaacaccgtctttttcggatggctgatcctgcaccaaagaacactaacagctgaaaaccttctcaagagacattggccatgtgattggatatgcagcccatgtagaagtgcttttgaacattcaaatcacctagaaaaagagtgtcttttcacaagcagggtttggcaccatgtctcaagctagatgggttatagttccttctttcctcaacatatgactcatgaaagcacagcagattagtgggattccctaagttctataacaccaactgctatgagaaaacaaatcctaggagtcgtgctaactacttggtggaatgtctggctagagcgaaaccgcaaaaatttccaacatgtttcacaaaatgagttgcaagtggcctttactataaaagaaaatataggccatcttattagctctagactc

SEQ ID NO: 1002 - DNA, 2573 bp, Oryza sativa
  unsure (1)..(2573): unsure at all n locations
  Clone ID: PAT_MRT4530_10090C.1
atgtctggtttatctaggctcacattaagctctaacaatttaactgggctgatacccagttctatttggaacaacatgtcagcactaatggcgttcactgtccagcaaaattcgttaagtggaaccattcctccaaatgcattcagtaattttcccagtctccagcttataggaatggaccacaacaagtttcatggtagtatccctacgtcgattgccaatgcttcccatctgtggttggttcagcttggtgctaacttcttaagcggtatcgttcctccagagattggaggcttaagaaatctcaaaattctacagctttcagaaacatttcttgaagctagaagccccaacgattggaaattcataaccgcattaacaaattgttcccagtttagcgtgttgtacttggctagttgcagctttggaggagttcttcctgattcactttccaatttgtcctctctgacaaatcttttccttgacacaaacaaaatttcgggaagcatacctgaagatattgataacctcatcaatctgcaagcatttaatctcgataacaacaatttcacagggcatcttccctcctccattggtaggcttcaaaatctgcatcttctctccatagggaacaacaaaattggtgggccaattccattgacattaggaaacctaacagaactatatattttacaactcagatcaaatgcttttagcggtagcataccaagcatttttagaaaccttacaaacttattaggactaagcctagacagcaataactttactggtcaaatcccaacagaggtagtcagcattgtcagtctctctgaaggtttgaacctgtcgaataacaacttggagggatcaataccacaacaaatcgggaatctgaaaaatcttgtaaacttagatgccagatcaaataaattatcaggtgaaatccctactacccttggtgaatgccaacttctccagaatatctatctccaaaataacatgttaactggtagtcttccatcactcctgagtcaattgaaaggcctacaaactcttgatctttcgagtaacaatttgtctggtcaaatacccacattcctatcaaaccttaccatgctcggttatctcaacctttcattcaatgattttgttggagaagtacctacacttggtgtctttttgaatgcttctgcaatttcaattcaagggaatggcaaactttgtggtggcgtgcctgatctacatttgcctagatgtacatcacaagcaccgcacagaaggcagaaatttctggtaattcctattgttgtgtctcttgtggcaacattactcctgcttttattattctacaagcttctggctcggtacaagaaaataaaatcaaagataccatcaaccacatgcatggaaggccatcctttgatctcttactctcagctggcaagggcaacagacagtttctcagcgaccaatttgttgggatcaggatcatttggttctgtgtataaaggagaattagataaacaatctggtcaaagtaaagatattattgctgtcaaagtgctaaaactccaaactcctggagcgctcaagagtttcacagctgaatgtgaagcactgcgaaatctacgacaccggaatcttgtcaagataattacagcttgctcaagcattgataacagcggcaatgacttcaaagcaattgtgtttgacttcatgcctagtggtaatttagaaggctggttgcatcctgccacaaacaacccaaagtacttaaatcttcttcagagagttggcatactacttgatgtggctaatgcgctggattatctacattgccatggaccaacacctgttgtacattgtgatctcaaaccgagcaatgtgcttttagatgctgagatggtagcacatgttggagactttggacttgctaagattctttttgaaggcaactcattgctccaacagtctacaagctcgatgggacttagagggacaatcggttatgctcccccagagtatggtgctggaaatacggtatcgactcaaggagatatttacagctatggtattcttgtgctagaaacggtaactgggaagaggcccacagataagaaattcatacaaggattgagcctccgtgagtatgttgagctgggtctacatggtaaaatgatggatgttgtcgacactcagctatctttgcaccttgagaatgaacttcgtaccacggatgaatacaaagtcatgattgattgcctggtttcattgcttaggcttggattgtattgctctcaggaaataccgtcgaatagaatgtcaactggagatattattaaggaattgaatgccataaaacaaaccctcttgtanggaatagataacatccttgaaccccttgtcagattttggagctcatccctggagtgttcatttcctacccttcccttgttggattatgcatggcactgaagtatgtctcacttgtaatttggacatctgagagcaaaaactgattggtatgctgttgtaattatgtctataaacgtatcccagattatgtttttccg

SEQ ID NO: 1003 - DNA, 218 bp, Oryza sativa
  Clone ID: PAT_MRT4530_100910C.1
ggggagtgcatctcaagaagtactcgagcaaagaaggagagagcttggtgagctgcagagatggccccctccgtgatggcgtcgtcagccaccatcgcacatgcctttcatgtcgctactgctactggtcgcactgtctggcttgctctcctttcctctgctgtcctccatccactaggcctatggatctctctaccgtcgaccgcatcccctattgc

SEQ ID NO: 1004 - DNA, 1827 bp, Oryza sativa
  Clone ID: PAT_MRT4530_100911C.1
gtggtaggaacaccaagttatatgtgcccagaactacttgctgatataccttatggtaccaaatctgatatttggtcactaggatgttgtatatatgaaatgactgctctgaggcctgcatttaaagcttttgatatgcaagctcttatcagtaagatcaccaagtcaattgtgtcgccattgccaactagatattctggtgcattttttgcatcatttttttccctacaggcagctgaactactcaagcatccacatctccaaccctatgtgctgcaagtccatttgaaatcttctcctgctcgcaacataattccttcccatcagtctccgattgacaaggttaagaaaatgacatttcccactgagtccatgtgcagaagcaagggcaggagaaactctttgggtaatgagagaatcgtgaccttcagcaaaccttctcctgaaaggaagtttactagttctattcagagtatcaaggattactcaactactcggagtgtcaaagatttatctatcgatgttagtttggtcgaggaggttagtagtaaaacaacttttaccacaagaacatcgagtattgtgaagactcccaagagaactccaagcaaaacaatcacaactccccagttagaacctccaaaggtatcttacaacagagtaaatcggagcgagctgctttcaagaacaccggtgaacagaagcgctcgggtaatccgcagagcttccctcccactcccactgccatcatccgagacaccgaagcgcggcgtcagcagcatcagcatcctcgagcagctggaatcccccgacgtatccgtgaattcgcctcggatagaccggatcgccgagttcccgctggcctcatccgaagatccaccgttcctcaagctccacggacgccgctctccaactccaacgccacagcattgcgtcatcgaccagtcgatcaccaaggacaaatgcatggtcgaagcgttccacatcatcgacgtcgatgacgacgacgggaggagcgactcgtcgtcgggccgtaacaacgccgcggcggctgcctcgagccgcgccggctcgtcggagtcgacgaggcagcggcggttcgacacgtcgtcgtaccagcagcgcgcggaggcgctggaggggctgctggagttcagcgcgcagctgctgcagcaggagaggtacgacgagctgggcgtcctgctcaagccgttcggcccggagaaggtgtccccgagggagacggccatctggctcaccaagagcttcaaggagacagggctgtaagcatatgcgatcactctccccttgctctagaaaacaaatgagcagaagcaaattaaattgtagctcaggaaagattagttgctgacagtgtgacaccatctcagtgttgcctcccccaactagcttatgaaagattattcagtgatcatctatggattaacaaggaagtagcggtagttctatacttctatgtggtgttggtctgaagcaggaagtagtagtagttcatgtttctaaccatgtaggagtacttgacaggtaaactgggcattccagcccggctgaagaatcatccagttgattgattttgtttctgtttgaatagcatttctcttgttcatgtaatcttgagttattgaaggtttagagagagagagagagctgcttgcgttgtattatccaaagtaggaattcagacaatggccatatctgatggagacaacaagaacaatttgaggagcttgtactgtactatgcacaaagataacgttcttgtcatattgttctctgttttaaaaaaaaaaaaaaaaaactcgagac

SEQ ID NO: 1005 - DNA, 456 bp, Oryza sativa
  Clone ID: PAT_MRT4530_100912C.1
taaccgggaaattaggataccctattatactaaatctggagtaataagttcaagtgtagtcatggtctgataccggacatataagttccgatactattggtctatctgatgtcaaactattccgttgttacggtatatcttaggtacgtcttcctcctaaaactaaaacatcctgtaactaaatacttaactaccagattagaccaggtttaatagtacgagctcactacttactattagtcaatgcctaaagctaacatgtatagtaggttagttataaggttatctttattttcttctttctctctctttctctcactatgaatttaatgcatatttcttgaaacttgtgtgtattagctcttgtatgagacccaacactctccatttttatttatctctttcttccacataagcatatactagcttgtttatagcttaaaaaaaaaaaaaaaa

SEQ ID NO: 1006 - DNA, 1310 bp, Oryza sativa
  Clone ID: PAT_MRT4530_100913C.1
aaaaatgagcgagaaggagacgctccaccaccaccaccaccgccgccgcctcccctccaccgcgccgtcgccgtcgccgtcgccgctcgacgacgacgacctcctccaggagatcctcctccgcctcccgccggacgcctccacgctccccaccgcctccgccgtctgcaagcgctggcgccgcctcgccttcgagccgggcttccgccgccgcttcgtcgcccgccacgagccccccttcctcggcttcttcttcccctacgacttcgatccggtcttctccttcaacgccggcttccgatccaccaccgcccagcaccacctccccgcccaccggttcctccccgagagggagatcgggctgcggtgggagatcgtcaactgctgcaagggccttgccctcttcaggatcacattccgcgggggatgcaaatgcaaggaattcatggtggttgatcccatctccggcgaccgccgcctcctgcccttcccgctcgtcgacggcaagttcctctccgccacggtggttcctgccgccgccgatcgccgctcgttccgcgtggtcgccgtattcgccgagaggaacaccttcaccagcgtgttcgcctccgtttattcgtcagatgccggtgtttggagtgattatgtctcgaggttgtgtctcccatgggaggtctgggtgttgcggccgagcgttcttgccggaaatgcggttcactggtttcttgatggctataatgtgctcatgtttgatttggagagtcagaagctgggattcagtgagctaccgctggatgcgaaggatgatgaggatttccctcaccggtgccggtgtcagatcataccggcgggtgatggccggcttggcctcgcggttatagttggatccacaatgcaattgtgggagagggagattggagatggcagtgatgccacatggttgctgaggagaaccctccagctgaactttcttcccctagaagcggaggggcgtaaactgattgtgggtgttgccgaggagaatagctccatacttctttggacgcgtgttggcctgttcatggtccacctcaagtttttgcaggttaggaaggtctacggagaaatctccgtcgacaactactacccctactcaagcttctgaactgcaggtcttatattgtctttcgagttaccatgttatttttggtactagggtctattgtttttatttttacatatgattcatccttgagggctgaggcgccaatatattcagtttgcaaaacagctttcaatgttaaaattcaccaatgaaactttgccatgat

SEQ ID NO: 1007 - DNA, 456 bp, Oryza sativa
  Clone ID: PAT_MRT4530_100914C.1
ttacgtgaaacacttgatttttatctttatctcaagtggatcagtctccccatcaagctcgaccataacaagagcattcatgcttatttgcaaggcagtgtaccaaggatgtgtgcacactcgtattttgtcatatacattgatgttttctatgggcgagccgtctttttcatattcctcaagtggatcagtctccccatcaagctcgaccataacaagagcattcatgcttatctgcaaggcagtgtaccaaggatgcgtgcacgctcgtattttgtcatatacattgatgttttctgtgggcgagccatctttttcatattccttgtcatatacagtatcctcattgttactatttcttcgcctgagatctgcaccgggtaggcgggtgatcaggtttttggggagtgcttcccgcacgactgctctgttcgttgttgtctcgtcgtccaccat

SEQ ID NO: 1008 - DNA, 399 bp, Oryza sativa
  Clone ID: PAT_MRT4530_100915C.1
atggggattcagaagacggcaagaccggaggtgcgaccgaaggctggaccagcggagagcaatggagcagcggcgctggcggaaggctggaccaccggtcagcgacggggctgtggcaccaacgaaaccctagaccagcgggcccgattgcggtggcgacgacggagccgccccggaggcagcgacacctacggagccctcggccgctgtggtgcgtcctcgctgttccgttgcgaggatgagggaggtccggcattgcgatggtgcatcgtcgctggcctggcggtgcgggacgcgtcggccctggcccggcggatggacgcgctgcacaaggaaacaaacacggccctccgacaggtgagcgtccggcactccggcccacgagaagtgctgaaatga

SEQ ID NO: 1009 - DNA, 393 bp, Oryza sativa
  Clone ID: PAT_MRT4530_100916C.1
tttgttgtttttttttttttttgggtttttttggccatgaagagctcatattatattttgaaccatgtttctagcgccagtgtgaactgggaaccaaacaccataagccgtataattctggcatccacaccaaaaaaaaagaggggaatttgggttaccaccaactaactcaaggatgcaatatgcagctaaaagaataggtgggggtcatcgggaagatttggcaaaattggttcagtttgcatttgggcacatgctggccacaacactatatgaagagctggatctaataaccggataagattacgttaaaaaggcttcttctaacaggcaatgggtaacctgggagccgctatgaaataacaacctgtaacatggcaggcagcaaagggc

SEQ ID NO: 1010 - DNA, 528 bp, Oryza sativa
  Clone ID: PAT_MRT4530_100917C.1
atggggtcagtctccgtcacgcacgccgcggaggcaggcggatcgcgttggtcattggtgacggcggtggtggtggtagcaggtagcgcgacgagaacggtaaaaatttctcacagatcggaatcgctctacgccgttggtcgatctcttcgcagatacgtcaagatcgtaagtatcttgcatagtgctggtggtgcctgccgttgcgacgagtccgtcgaccatggcatgcatgaggggcaagggctcccctatacccacgtcccaacacccatccaccctggcaacgttcgtgccagcctgcggctgactgctcctccctgccacctcggcgaatccactccccaccaccagcgatgtcaagcagtcgcacgccccgcgattcggaagccgttcgctccgcgcgccggtggtgtgcgcgccagcaaccgacaaccgaaggcactgtgctgccgtgccgtcccgcgcccccgcaataacttcaccgctccgaggaagcgcgtcagttacctcgcgccaaggcattaa

SEQ ID NO: 1011 - DNA, 450 bp, Oryza sativa
  Clone ID: PAT_MRT4530_100918C.1
ttagtcactgagctctcctgtcaccacactctgtcttatgtccttacaagatcccaacccctttacttcttcttgtgcggtggaatttgtgaggaacatcaatcacgaactttcaagctcacatccagcactacaaacgctcgcttagagctgagcagaaatctagcatagtgggattattacctcacgtgtttgttgaacgagatctcggataattgctccaatgcgcggaaactgaccaacacacctgctgttgcctctgtacccaactggtttgtgcgcttcgattcatacgaaaatgcacacccgtaccagcgttatctatatcacgagcactcccttgagaaaatagccgattacatcgacgagtccagactgctagaacgttctaccagcaactagatagataaattgtctgacttgcttgctcaatccctgatgaagaaacat

SEQ ID NO: 1012 - DNA, 201 bp, Oryza sativa
  Clone ID: PAT_MRT4530_100919C.1
atggctccggcggctcgggatcagcacaccgagacggcaccatcccggccatatggctggtcggtcagaccggcccgcacccgccggtcagaccggcctagaccctgcggtcagaccggctgccctggccggtcagaccggcacttgggccgcggtcagaccggccctggtcaggccgaaaacagtcattacccctcttaa

SEQ ID NO: 1013 - DNA, 333 bp, Oryza sativa
  Clone ID: PAT_MRT4530_10091C.1
gacaagccaaacatcgatatcagagataagcctaaataaaccctatctggtgcctgcggaggtcgacaagagggatctagcgccatctctgatctcggcgagtttatattcgaggaggaaaactatcctgtcgtcgactatgtgttgatgaatatagagcaataccggcttcggccaacaggatgtaaggctattacctgtcagataaggggcccgaacctgtataaaaacccttgtctccgtctcttttacttcaatctcgcatataccctggtaccaacgatccatatactatgcaaaataccgttgtcgcggtctcaaacgtcgacatat

SEQ ID NO: 1014 - DNA, 213 bp, Oryza sativa
  Clone ID: PAT_MRT4530_100920C.1
ggtacaacctttttttcaaaaaatctgggaaaagctggaactcccttggaaaaaatttttccctggttttacttttacacattggggcctcctggggcaaggtaacaaatttcaggggggaaaacaaattccccccagtttacaaaactttgggggggggtttttccggtttttgggggttggaaaaatttgggggtgttttacaaagaattg

SEQ ID NO: 1015 - DNA, 237 bp, Oryza sativa
  Clone ID: PAT_MRT4530_100921C.1
atgcacgttcttgtagttagacacaatcgcccacgtggcctggcaccctcggggggcgtcgggcccgagggtgatgtgttcgccctcctctttgtctccccgagggggtcggaccgctcccgcctcggccccgagggccgaggcgccccgaccccttgtgggttttgcgccgcgtatatgggcgcgctcgtttatccggtctatgaccagtcacagaccggtcagatcgtgggttag

SEQ ID NO: 1016 - DNA, 521 bp, Oryza sativa
  Clone ID: PAT_MRT4530_100922C.1
gtccggaattcccgcgtcgacccacgcgtccgcccgcgtagaggagggagccggacgccgccgcggggagagcaggggagagaaggagaggaggagatcgccgtcgctcgtcgccgtcgccgtcgccgatctcgagcgggagcggagatggggctcacgttcacgaagttgttttgccgcctcttcgccaagttgtagatgaggatccttattgtcggtgtgggttcgcctcgctcaattaccttcctctacaatctcatgctactcgagatcgttacctctatgaccatcttgacgtttttttgtatggacttacttgagttgcttgcaacattacatttgacccctttcgtttgctattgctgatggttctcaacctgcatatgagggcactatatatgttctgaggcgtattcttatgcgcgctgatcactttggtcatcaaaagttgtaagcaaagcaaggattttttaactctcttgtgcatgtgtttgtgcaactggtgggagatgtattacctg

SEQ ID NO: 1017 - DNA, 282 bp, Oryza sativa
  Clone ID: PAT_MRT4530_100923C.1
tcccgggtggacccaccccgtccggttttgtttcggccttcctcctgacccacctccggggcccatgccacccgaaccgggccacccaaggcggtgggaaacccaacccgggataaccctagatctctctccgttccgcctcgtggctcccccaaaccctagatccccgtcatgcaccaccccagggcgcgctacccgcccggctacacctccggcggcggcggcggaggcggaggcggaggaggaggcggccgtggtaatggcggtgggggatttggtgga

SEQ ID NO: 1018 - DNA, 318 bp, Oryza sativa
  Clone ID: PAT_MRT4530_100924C.1
atggcctgcccgtcggcgtacgcgtcgtggcgagtggcggccactcccggccagaccgcgacggcggggctatctcctgaagtggggcgccgcgccgacccgtccacgccgacgccggacggccggacccctaaagcggcgagagcgacaccccgctccattggggatcgcgagctggcgaagctgctgctgctcaggggggagcgcacggcgaacgcccgtgtcacgccgctctgcgtcgcgcgctgcagttcacggccgcagctcgcgacgcgaccgcgcgccatgcatgtacgctgcacggggagctcacgctga

SEQ ID NO: 1019 - DNA, 1503 bp, Oryza sativa
  Clone ID: PAT_MRT4530_100925C.1
gcacgaggatgtggccaattatctgaatttgcatctctctctctctcccttgattttacacaatgccccaagtcaagatccgtctcttctgctgctttgctttatatacaccccattagtccactccaccaccccatagtatattctctcctcacttaaactaatcatctctctctctctctccccctccaaattgtcaatctcatttctgaactcatgttcaggtttgaccttgcaaaatagcagtagctactattcatccaggaataggagttgcaggggaggcatgaggctgattgggagaggaaagagttccaaggccaagaagggctcttcaactccattgcaatccaaggagaagattgctgcaaatgtggagactgttgctgttggttccaacaacaggcaagtggcacctgatgataacatgcccctgggagaagctggctatgctagcagcagagatgaggttttctttgaagcttgcccttggttagagtctgactgcgaggatgaattctacagtatcaatggagatggcacccctgcaagatcattcagaacgaactccagtaaccatgcgatacaacctgaacctcgcaagctgcccacactgggtgccatcctgaaggccgagccgctgaggccgccaccaccaccgcaggagacgcagccaacgccgccgtcgccggcgacgacaatgcgactcgccgacctcctccgggagaggcaagaatcgttcacctgctacgacggccctgcctgcgccatctcccggacgggctcctcctgcggcgccggcaacggcgagcagtggagccattgctgcattccgagcttcgtcccgcgtaccagtgtgagctacgcgaaggggaggaggaagcgcaggtgaagaagcgatcgatcgagagagtgtgcaaagaaatcaagtggtttttgggatgataattgttcagaatgtgcagtgtctcagagagagtccacctgcttgtgtattgtaacaacaactacagtacaacgacgttaattagccgccaaatcaaatgtatatatgtgatgtgacatacctaccaaaatatggggcaatcaggcatgatgatctcgatgctgctgttgggcttagtatgcactgggatcgatttggtgtcacatggcatggacaggggtaaatgtcccaaagttcactttggaaatttcggtacctcttggtacctcatgaaattccctctgagatgtggagttgccaaaccaacaagtgtttttctttataacatgggtggtggcatgaggaggcatggtagtgacaatgcagcattttacatgggaataggaatagggtattcaacccctctcaacgaagaaacaggtggttttcacagtatcgaagtggtttcgtttgtgcggcagtcaatgccacttcttcctcctctcctctctgtttcatcgaaatggatagaatttggatggatagttatcatactatatcctaaaccatattattaa

SEQ ID NO: 1020 - DNA, 579 bp, Oryza sativa
  Clone ID: PAT_MRT4530_100926C.1
agaaaatgtgatatgcctcttaggttctcctcgaggatcataaaatcactcatcttactttgggacattcttacccctgtccatgccatgtgacaccaaatcgatcccagtgcatactaagcccaacagcagcatcgagatcatcatgcctgattgcctgacatcgcacccaagaggtggtctttcctatttggagtattttggtaggtatctcactgtcacatcacatatatacatttgatttgggcggctaattaacgtcgttgtactgtagttgttgttacaatacacaagcaggtggactctctctgagacactgcacattctgaacaattatcatcccaaaaaccacttgatttctttgcacactctctcgatcgatcgcttcttcacctgcgcttcctcctccccttcgcgtagctcacactggtacgcgggacgaagctcggaatgcagcaatggctccactgctcgccgttgccggcgccgcaggaggagcccgtccgggagatggcgcaggcagggccgtcgtagcaagtgaacgattcttgcctctcccggaagaggtcggcgagtcgc

SEQ ID NO: 1021 - DNA, 297 bp, Oryza sativa
  Clone ID: PAT_MRT4530_100927C.1
gccatcccgccggcaacgccgcagaaggccggcaggcacagcctctgcgccgccacaatccgcgccggctcaccgccctgttccgagcatctcctcttgttttcggacatgattaataatgtatatccggagatcgagagccttagcaatgggaggcccaagaagatgttgggagtatacatgcgcctcgggctcggagttgggttacgcgaaaacaacgctagttttagccagtccttcagcaacaagacacgagctgcaggaatcaggatgctcgcaagcctcaagaacagctaa

SEQ ID NO: 1022 - DNA, 161 bp, Oryza sativa
  Clone ID: PAT_MRT4530_100928C.1
atggcagtggctttgggcgccagctcatggtgcatcgggtccacggcccggggaaaggaggtgcaccacgtggcacacacgtggcgccgatgtggcaccgacgcagcagccacgcaggtgaccacgctggcggcggaacgggcagccccgatccactcggg

SEQ ID NO: 1023 - DNA, 4098 bp, Oryza sativa
  Clone ID: PAT_MRT4530_100929C.1
atctatcttgtacacacagtaaagctgccagcaatggacgcggcggcgaacggcggcagggatggcaaggagaagaaggcgaagaacggcagggacggcgaggacaagaagaaggaggaggacggcgacgccgggaagaaggtgtcgttcacggggctgttccggtacgccgacggcacggacctgctgctgatggcggtcggcacggtggcggcgctcgccaacggggtgtcgcagccgctcatgaccgtcatcttcggccaggtcatcaacgccttcggcgaggccaccaacggcgacgtcctccaccgcgtcaaccaggcggttctcaactttgtctacctgggcatcgcgacagcggttgtttcatttcttcaggtggcgtgctggacaatgactggagaacggcaggcgacacgcattcgatctctatacctcaaatctgtcctgagacaggatatagcattctttgatgtagaaatgacaactgggcagatagtttcaagaatgtccggtgacactgtgttagttcaggatgccattggtgagaaggttggcaagtttctacaacttgtggctaccttcgccggtggtttcgttgtagcatttgtgaaaggttggcttctatcccttgtcatgttggcctgcatccctcctgttgtcattgctggtggagctgtatcgaagatgctagcaaaaatctctagcaagggtcaagcatcatatagcgatgcagcgaatgttgttgaacagacaattggagccataaaaactgttgtttccttcaacggtgaaaagcaggctgttgcatcgtacaataaactcataaacaaggcatacaaggcagctgttgaggaaggacttacgaacggttttggcatgggctccgttttcttcatatttttctccagctatggtttagctatatggtatggcggcaagttggtagtcagcaaaggatactcaggaggagacatcataaatatcttgtttgctgtcatgactggggcaatgtctttagggaatgcgaccccatgtatggcagcctttgcagaagggcaatctgcagcttatagattgttcaaaacaatcaagagaaaaccacagattgatcctgatgacataactgggaaacagttggaggacatcaggggtgatgtggaattgaaggatgtgtacttcagctacccagcaaggcctgagcaactgatatttgatggattttcattgcatgtttctagtggcacgacaatggctatagttggggagagtggaagcggcaagtccactgttattagtcttgtcgaaagattctatgatccacaggctggtgaggttttgattgatgggattaacatcaagagcttgaggcttaattggataagagggaagattggtcttgtcagccaagagccattgctctttatgacctccattaaagataatataacatacggcaaagaggatgcaacaattgaagagattaggagagcagctgagcttgctaatgcagcaaattttattgacaaattacctgatggctatgatacaatggttggtcaacgtggcgcacagctctcagggggacaaaagcaaagaattgctattgctagagcaatacttaaaaaccccaaaatccttctgttagatgaggctactagcgcattggatgtggaatcagagaggatagttcaagaggcactgaacaggatcatggtggacagaaccacacttgtggttgctcatcgcttgaccacagtgaggaatgctgattgtatatcagttgttcaacaaggaaagatagttgagcaaggtccccatgatgaattggtaatgaaccccaatggtgtttattcgcaactcattaggctacaagaaacccacgaagaagaagagaagaaattagaccatcacatatctgattcaaggtctaaaagtagaagtttgtcattcaagcgatcaattagcagggattctgcaggaaatagtagcaggcattctctagcccttccctttggcttgcctggctcagttgaattgcttgaaggcaatgattcgactgtgggggaacagacagagcagggtggtgatggtgaggtccaacagaaagctcctattggacgactggctagactaaacaagccagaggtaccgatacttttgttagcaacactggctgcaggagttcatggagtgcttttcccaatgtttggagtaatgatttccaatgccatcaaaactttctttgagccagcagacaaactaaaaaaggatgctagcttttggggtttgatgtgtgttgtcctgggtataatttcaataatatcaataccggtggagtactttatgtttggaatagctggaggtaaacttgtagagcgtgtccgtgccttgtcattccggagtattattcaccaagaagttgcttggtttgatgatcctaggaattccagtggagcgcttggtgcaagattatcagtagatgctttgaatgtccggcgtttagttggagacaatcttgcattggcagttcaggtcgtctcaacacttatcacaggaattgtcatagcgatgatagcggactggaagctcactttgatcatcctttgtgtgattccacttgtgggtcttcaaggttatgctcaagttaagttcctgaaggggttcagtgaagatgccaagatgttgtatgaagatgcaagtcaagtggctactgatgcagtaagcagcatcaggactgtagcttccttttgttctgagaaaagagtgatgacaatgtatgataataaatgtgaagcttcgaagaatcaaggagttagaacaggaatggttggaggccttggttttggtttctcattcttgatgttgtacctaacatatggtctctgtttctatgtcggagcacaattcgtacgccacaataaaactacttttggggacgttttcaaggttttctttgcactggtgttggcaactattggaatatctcaaacaagtgcgatggcttctgattctacaaaggccaaggattcagctatctccatatttgctttgctagaccgcaagtcacaaattgactcgagtagtgatgagggtaggacattggccaacgtcaagggaaacattgatttccgacatgtcagcttcaagtatccaacccgcccagatgttcagatcttcagtgattttactcttcacataccctctggcaagaccgttgcacttgttggagagagtggtagcggaaagtccacagcaatcgctttgctagagcgattctacaatcccgagtcaggaaccatcttgttggatgaagtagaaatcaagaacttaaaggtcaattggttgagggatcagatggggttggtcggccaagagcctgtgctctttaatgacacaatccgtgctaacatagcctacgggaagcatggggatgtcactgaggaggagctcatcaaagctgcaaaggcatccaatgcacatgagttcatatcgagccttccccaaggatatgataccaccgtgggggagagaggggtgcagctatctggtggccagaaacagcgggtggctattgcgagggccatattgaaagatccaaagatactacttctagatgaggcaacgagtgccttggatgctgaatctgagcgcattgtgcaggatgcgttagataatgtgatggttggcaggactacgattattgtggcgcaccgcctctcgacgatcaaaggtgctgatatcattgcagttctgaaggatggtgcgatagcggagaaaggaaggcatgaggcattgatgaacatcaaagatggtgtctatgcttcacttgttgaactccgttcaggctcatcataatactcaggataagatttttgttttttatttaccctctctggggatgtaatatatcttccttgacccttttttgttttacaattgagggttgtagtagtattaattatttggattttaaagtgggatttgagaaggtgctctctgtatgtatctacgcggtgtcggtttattaagcaacgagaaagaaatattgtcctacagatgctgatatgtgggattgtccaaaaaaaaaaaaaaaaa

SEQ ID NO: 1024 - DNA, 354 bp, Oryza sativa
  Clone ID: PAT_MRT4530_10092C.1
cccacgcgtccggtttcctagttgtagttgcctctcttttcccgctaatcaaatcccaggaccgggttaacaagggaaagagagacagcaagaagaaaaccctcccgtgcagatcagatcggcagattgcttcgaagcaaacctttgactcctcgaccgatcgagcaagcaagcaactcgacctacctatttacggatcaccacgcgctcggacggatcgagcacggatcacctacctattgatcgatttcgtccgaagcctgcggctgtgtgcaagcatgctggagctactgctggtggggtgcagcatcgtggtgctgctccttcacggtgccaactttctttttcgtgcgc

SEQ ID NO: 1025 - DNA, 444 bp, Oryza sativa
  Clone ID: PAT_MRT4530_100930C.1
atggctctcctccatccgccaccgcccctacaggcgtcatccttgtcgcagcatttttcgttgtcgtcgtcgcgtcagcgctgtcgtcgtcgcgttgatgccatcgtcgcggcggttgttgtcgtcattgtcgtcgcgtcggcgccaccgtcgtcgcgcgtctcctccccctacccacaggcggcgccgtcgtcgtcacacgtcgccgggagaggaaggagccaagtcgccgtcgctgagagaggccggatccgcgcgcccgggctagctggcggcggatccataggcgtcggtgccatccgttacagctggtggcggaggcggcgagctgcaggggatccacactcccagggcgagccagcggtggatccccaggcatcggcgccatcatggccggcagcggaggcggcgccgcggccggcaactgaggcagcgacgagctga

SEQ ID NO: 1026 - DNA, 619 bp, Oryza sativa
  unsure (1)..(619): unsure at all n locations
  Clone ID: PAT_MRT4530_100931C.1
attcggctcgagctcacccgcaggttgtgctctattcccccactttctctctttttagttcacagnatatttcaccagccttatcttcatcttctttttcttttagggtttagagaaaatttaacaattagggttgcttctcctttgccgacccatggctcccaaagctgatagttcaaagaaggctgatccaaaggcacaggccttgaaaactgccaaggcagttaagtccggtgctaactttaagaagaagaccaagaagatccgaacatctgttaccttccatcgaccaaggactttgaaaaaggataggaaccccaaatatccacgcattagtgctccacccaggaacaagcttgatcactatcagatattgaagtttcctctcacgactgagtctgcaatgaagaagattgaagacaacaccactttggttttcattgttgacttgcgggccgacaagaagaagatcaaggatgcagccaagaagatgtatgatattcaggccaagaaagtaaacaccttgatcaggcctgatggaaccaagaaggcctatgtcaggttgacacctgattatgacgccctggatgtggccaacaagattggaattatctaaact

SEQ ID NO: 1027 - DNA, 438 bp, Oryza sativa
  unsure (1)..(438): unsure at all n locations
  Clone ID: PAT_MRT4530_100932C.1
tttttttttttttttttttttttttttttttattccaagaaataaatttaatgccttaatagttaccaatatccagagagtagtagttatatcctaacttggcacctcgcccttaaaaagctaccaactggtatacgtttcgagtccaactgtatgcgctgcagagccagacggctatccttacagcaccatggccaatctccggcctgtcgccttagcaatcgcctaaacaactggttgcaatggagcacttgtcacgtacgtctatccgaccgagaaaccgatggattcatccatggntgcttctgccgctgctatccgataatccgtctacggcgctgggtgcaacgagcgtacgcgcagggcgcgcgcgtgcagcctggtgagcgtgtgtcggaacctggagaggtcgagggtgacgttctggccgccgaggta

SEQ ID NO: 1028 - DNA, 342 bp, Oryza sativa
  Clone ID: PAT_MRT4530_100933C.1
atggcgttctccggtggtggtaggcagcagggcgacggcccgtccgacggcgacgacggcgtcccccggtcgttgatcggaggccgcccccgccccatcctggagcagatcaaacttaatgccacacagatgcacaatcttaggggcacaaattcccctgcagttggcacgcctggaatgtcgttggccgcggcggcggaggtggcagtggccgcagtgttggcagcagcggcagcgagagcggcatcagcagcagcagataatgcgaacgaagctgaaggttccggtggaaacaagcaggaggcggcggtgaccaccgcgcctacttcaccggagaactga

SEQ ID NO: 1029 - DNA, 465 bp, Oryza sativa
  unsure (1)..(465): unsure at all n locations
  Clone ID: PAT_MRT4530_100934C.1
attggcaggcatacgcaacgcaacagcagccgcgatggccgcggcgccgggcgaggttagcaggcggccaaggcaacggcggcgtcaccgccatcgccgagctcaccatctcctcgctgccgctggagacgcgatgcgcgccgttccccctgcgtcagcacggcggcttctggctgccggagacgttcctcccggggctcgaggccgcgcgcgcgcgcttcgagccgaggccgtccgacgtcctcctcgcgagcttccccaagtccggcaccacctggctcaaggcgctcgccttcgcgacgctcaaccgggccgcctacccgccctccggcgagggccacccgctccgccgtcgtggcccgcacgactgcgtgcagttcctcnagtcggcgcttgtggtgtccgacgacatgtttgcttcactcccttcgccgngtttactgtctacccacctgccttactccc

SEQ ID NO: 1030 - DNA, 272 bp, Oryza sativa
  Clone ID: PAT_MRT4530_100935C.1
gctaactccgacgccaatgaagactgggttcacttctacggttctgcccatgccagcggaagaaaagagctcgagctatgcgcatcccatgcgatgcatcgtagcaggcctgcatgaggaggaggagggcaaggagcacaacgcaacaggtgaacctgcctgtgccggaaggttggcaaccagaccacggtgtgccaagaacttgcgacccaacggcgaggagcgacgacggcagctgcctgtgtacaccggtgtaagcagccggcgtgacg

SEQ ID NO: 1031 - DNA, 1719 bp, Oryza sativa
  Clone ID: PAT_MRT4530_100936C.1
tttttttttttttttttttttttttttttgaacgaatacgataatatcgatcaccaacttccgttcctcaggcaaattagtcagcaaacgtcaagaaaatatctgcgacccgaacctgttggttttttgtttgtaacaaaagctaggaaaatagctagtacaaactatgcagttgaggttgaattacataatataatgatacaacatgccaagctgttcacaaaaatcaaaactggaaaacggcgcacccttcatgcagagcacgccaagctgtatcagcatttgtcagaacaatcgcccgaactattcgaatatgactcgggcacttttaccctaaatacagagtaacgatgatttaaacttttctccccgtgcaatctgtagacactgcccagtgctccagtaattggatttgggaaagcatagaagatacgtttgaatctttgatgtacaagtgccatcgcacacattgagcaaggttcccagactaggtaaatgtttaatcaaaacgaggagaatgaatactgatcagggcaacattggaaaggtagaaaataggagtaacaaagctcacatttctatccacctttagtcgttttgctgattcattaacagaataatactccatatttccatctgaatttggtttggttgatgatataattgaagggaacatcactttatccctctccgcagcattttcaatcgcaactatggcagcatgtctcagagggtgccatggaaaaccaccttcacagggcaatgacttctgctcagacggccttggtttcatccatccccaagggtttaaacatgaggcttccatattcaggctgttgcatttagaaacattggagtttgacaggaacaacctgctccctttcttctcagttacttcaagtgatgagaaggggctgtctgaattcaattcagcacatttgttactttttaaactatcatgttggagcgtttggtctgtagcctttgcaataatctgcatggttgatggattaacaacaacagcagcattgcccacctcagataaccgcagtgcagttctcatgcaattaaatattgatggcaattcacactctttgaatccagatacaccatccaagtcgtgtgggggatgataagatgttggccaaagtttgcattgttcctcccactcctcttttgaagtagcaggaaacctcgcaacctgagcaagaaaactatcaacaatgaatgttatatgatatgctgtatttttcaatatatcataactttcatttgcagatgtccaaacattccttgtgactggaaggattacttttgcaatgaaagtattcaattcgtaggtacctacaatcttttttacatcttgaggaaacatttcgctacaatgttcaggcccagttgcaaggcataagatgattgataactcagatttttccgttttacatgccgaagattctccaatgggcatgggagttgggttgcctgggacctcagggggttcccatgccatgaagaccaattcccaaggtaaaattttgcctcagtaatgctaaatcgtaggtcaaagaatcaaccgccccctgcatcctcttcctcccccccctcgccctggccgggggcccggccgccccccgtcctccccccgtgcccccccccccccgccgcctccgcccgcccccgtccgcccccccccccggcccgctcccccctgcagcccgg

SEQ ID NO: 1032 - DNA, 248 bp, Oryza sativa
  Clone ID: PAT_MRT4530_100937C.1
accaatcaccacaacatttttgttcctttcacatggttacaattctgacactaatccaaccagacattttacactttctaataataatttccattttatcaactttgcatatagacatttagtctcatgcagatttacataacacaagaaagcaggattagctaagcttgacagccatggttattcaaggctgcattcccttttttttgagcctgacccattattgccgtttctgcgttgtgaaggtt

SEQ ID NO: 1033 - DNA, 644 bp, Oryza sativa
  Clone ID: PAT_MRT4530_100938C.1
aacgggccgtgccgtcccaacccacgtgccgagccgccggcccaagcacggcccgtggatggccgggccgtgcccgtgccggcacggcatgcgtgtggcccgccgtgtcagtacgggcccgtacagtagccgtgccgtgccgtgccggcccgcgggctcggccggcggcccaagcacggcacggctactcgtgccgtgccggcacggcccgttactgtagcaggccgtgccgggccgtgccggctacaggttccgccgtgcctcgggccgcccgttttggcctggcccgtttggccacctctactatgccattggatttgggtgagaggagcgggaaggggggaggggggtgggtatacctggccaaacgggcggcccggcctagcacggcacgggcacgctggcggcacggcccgctagggcacggcccgttaggcacaactcctgtagcgggccgtgccgtgccggcccacgtgcctactccccggcccaagcacggcccgagggaacatcgtgccgtgccgtgccggcacgggcacgtcaatggcccatgggtcgtggtcggcccgttggcacgatcgactgcaggcaagctggcaagtggaacaattcaaatcaaagagaaaggtccgaaagttaactaa

SEQ ID NO: 1034 - DNA, 345 bp, Oryza sativa
  Clone ID: PAT_MRT4530_100939C.1
atggcgacgacggcggcggctcctcgcgcacgcgaggcagacagcgccggcggcggtggatcccccgcgcgcgaggcggacaacggcgaaggagacaaagacagtggcgtcgagtggcgacctcggcagcgtcgacgacgacgaggcggcctcggcagcagagggcaaccggcggcggtttcaacagtagataatggggcaccggcaatggacgatgacgcggcggcctctgcagcaaacgaaggccgcgccccgtcgccgtcgtcgtcgcccctaggctgccgccgccctctgtgctgcctctgccacgcgccgccccaccgccgctacgggaggcttagatag

SEQ ID NO: 1035 - DNA, 570 bp, Oryza sativa
  Clone ID: PAT_MRT4530_10093C.1
atgaggatcaaaagtattgtacaagcagcatccactgttactgaaaaacctttaactgttaaggtaagaactgctttctttgagggaaggaaccgtgctgattctatagtttccgacatctatgactggggctgctctaaaatatcgacaagcatgattgctcgaggtgcactcataaagccttggatatttactgaggttaaagaacaaaggcactgggatattacatctggcgagagattcaatattcttaaagattttgtgagttttggtctggaacactggggttccgattccaaaggtgttgaaacaacacgctattttttactagaatggctaagctacacctgccgctacataccggttggcctgttggatgtgatcccgcaacgtttgaactggaggcccccaagctactgtggccgtgatgatcttgaaaccctaatgatctctgattcagcagctgactggatcaggatctcagagatgttgcttggcaaagttccagaagggtttacgtttacacccaagcacaaatccaatgcttatgatcgagctgaaaacggctaa

SEQ ID NO: 1036 - DNA, 344 bp, Oryza sativa
  Clone ID: PAT_MRT4530_100940C.1
gtaatcccctccgttcccatgttgaccgacgcggccgccgctgtctcctccaaagcagcagcggtcctagccgaattggccatccccattgccaaacaccatcactggcgccggcagcctcaatccgcgtcgagtttttgtctccaccagcatagtggtctctacacatgaggttggtcttaggctgcaacttttaactcttattttccatgtggcttttatctctgccgatctcacggcaatctatcgacatgcacatttgtattttgtagttagataaaaaaaagtagcaatagttgccatctttttctctaggaaaaactgatttgtttatatgctttctg

SEQ ID NO: 1037 - DNA, 660 bp, Oryza sativa
  Clone ID: PAT_MRT4530_100941C.1
atgaaggtcaccgccgcacctaaggggcagtgggagcggcggctgcagacggacatccacacggcgcggcaggcgctgcgcgacgcgctctcgctcgacctcgacccctctccgacggccaaaacggagcccgcgtgcgcggcgccggggcgacgacatcaggctcggcggcggcggcttgatgcggccgggcggcggcgacggcgtcaagggccccgaggcgtcggggtcgacctccacgatggcgacgacgcagcatcagccacagtgctccggctagggcgcggcgtccgcgtcggcgagccagagcggtggtggcgccgccaggctgggtgttcttgcttacggcaaggcaggtgcattgcaatgtggtcaaagagcgggttcagttccagtgccttctgcgaagcggcgttggtggacatgtatgccaaatgtggtgatgtgcccaatgctcgcaaggtgcttgatgggattacttgcccagacacaatatgctcatcaagcatggttgcttgctatcatcgagttggacgctaccaggaagcgttggctttgttttctaggatggataagatgggctctgctacggatcaagtgagcaagatggccaccggcggcgccgggcccgcgccggcgttctcgatgctggagagctga

SEQ ID NO: 1038 - DNA, 293 bp, Oryza sativa
  Clone ID: PAT_MRT4530_100942C.1
agaagacatatttttccccattttgtttgcaggctctgcactctcaagaaactaccttgcacagtgcgtggaggcctgaagaagatgctcactactaatgtcacaatccacatgaatcatctatgcaggtcctgcactgattacaactgcatggaactggcagtacaacctgatcttaatggtctatttggcagtggagcttcattgtaggtaaagaggaacacaaacatattagaataattgtggagacacaatcaccttccttatttaactgaataccggcttgtttcttg

SEQ ID NO: 1039 - DNA, 225 bp, Oryza sativa
  Clone ID: PAT_MRT4530_100943C.1
tctgtaactcctggcggctagcccgcacagcagcggggcccataagcaaaagaagctcagatcactcaagaacctgtgaggcgacggcccggcggatgacatccaccaggaaaagcggcaacaggagcagcgcgccactacgctggctgagacagctcgcggctcgccggaggaggaggagacgaccgcgacggaccagccggcagcggcaagtgccggtcgccg

SEQ ID NO: 1040 - DNA, 333 bp, Oryza sativa
  Clone ID: PAT_MRT4530_100944C.1
atggctcaggttacacaagtagaaaataacttccttactgcccttttctcagaggaagaattaaaggaagcgatctttgcaatggagcataacaaagctcctgggtcagatgcgccggcgagcaatggaggccggcggagacacaagctggtgccgaagctgcagttgtctccaggccaccacttcgtggtcttggatgaggagctcgttgacttctacctccgcggcgagatcgagcaacagaaatacaagggttacggagagaatatatggtacttcttcacggtgaggaagccgtcgaagacgaagaagcaggacaagccaaacaaatga

SEQ ID NO: 1041 - DNA, 279 bp, Oryza sativa
  Clone ID: PAT_MRT4530_100945C.1
atgcgccatcccctcgagctcacctacccattccccatcgagcgtatcgccaagccgccacctccgcctcgggggacgtcctctaagcaagctcgagctcttgctggtgggatcgatgagccgccacctcagcccacctcgccactacccatcgtctccaacatcctcctcgctagtgcctgccacgccagcagttccttcctggccatcgacgtcgtctatctatcgttcaaggacgtagcattgggcattggcggtaggggtgaaaaaaaagcttag

SEQ ID NO: 1042 - DNA, 399 bp, Oryza sativa
  Clone ID: PAT_MRT4530_100946C.1
atggctcaggttacacaagtagaaaataacttccttactgcccttttctcagaggaagaattaaaggaagcgatctttgcaatggagcataacaaagctcctggcgtaccacacaaaatactacgtcgtcgtcagatgaaaacggagagcaatggcggcgactgctcggtggtggcagcgccggcgagcaatggaggccggcggagacacaagctggtgccgaagctgcagttgtctccaggccaccacttcgtggtcttggatgaggagctcgttgacttctacctccgcggcgagatcgagcaacagaaatacaagggttacggagagaatatatggtacttcttcacggtgaggaagccgtcgaagacgaagaagcaggacaagccaaacaaatga

SEQ ID NO: 1043 - DNA, 285 bp, Oryza sativa
  Clone ID: PAT_MRT4530_100947C.1
atggcgaacgccaccggcgggaagcacagcgtccagatacgaggtgagcaggtcgaagctgcaggcaagatggccaccccagaaaaatggctgaatcgcttcgttcgcgtggtggcgctgatagagaggacgggcaacgcgctcggcacgctggccttcacctgggctaccgtcatcctcctcggcggctaccccaccgtgctcgactcgaagaaggactatcggttcatcacagtcatcgtattcctcgaagccaccaggttgaaagcacttcaactgatttaa

SEQ ID NO: 1044 - DNA, 306 bp, Oryza sativa
  Clone ID: PAT_MRT4530_100948C.1
ataaaatcacctatttaaatagcattcatgtaaaaaaaaaaaaaaaaaaaaaaaaaaaaaaaaaaaaaaagaaaaaaatgaaaaaaaaaaaaaaaaaaaaaaaaaaaatacataaaaagtgaaaaattaaaaaagggggggggcgccataaagaaccaaagcttacggacgcgtgaatgcgaaggtataattaattgtaatgggtcaccaaaataaaattaaatgtcgaccggttaaaaaactaaaaaagggaaaaaccctttttaaaaaaaacataatttcttaaaaacaaacaccacattcctc

SEQ ID NO: 1045 - DNA, 273 bp, Oryza sativa
  Clone ID: PAT_MRT4530_100949C.1
atggtgactcgattggcggcgatgtgcagtggtagcggccttgataggggaggcgcagggctatgccctagggaattttcaggatgttacaagaacagagtatgcatcggctgcgaaggcatcggctggagtctgcataggctgagaaggatcggacagaggacagctgacacagctgatagaggtggtgcagccgattgcgatgaagatggtttcagggctgtttcagggattgatcaaagtgcttcacggggattgccacgatggagataa

SEQ ID NO: 1046 - DNA, 2491 bp, Oryza sativa
  Clone ID: PAT_MRT4530_10094C.1
ccccgggctgcaggaattcggcacgaggatggccgccaccgccgccgccgccgccgcggcgcctcccgccgacccgccggactcctccccggccgcttcctcccctccgaggcccagcccggaggagctggtcgcccgtgcagtggcccccgtcaagcccgccttcctccgcccgccccctgtccgcgacgccccccaaggatgagggcaaggccaacggcggcggcgcggtggtcgcggagaagaagtccaagcgccagctcaagcgcgagcgcaagcaggaacagaaatcttcatcacatctttgtatcgaagtagggaaaagtggaaatgtgagctcttgcaaatatggtgattcttgccgtttcagccatgacatagatgcctatttggctcagaaaccagctgaccttgagggcacgtgcccatttaccaatctggaccagttgtgtccatatggactaacttgtcgatttttgggtacacataaggacatccatgcagcttctggaaatctttcagagaaacatgagataaatgctttaaacaaagacattcaaaagctcttatggaagaacaaatataagttccccaaggccagtgcacagatcaagcttcttggtcttaaggaagtcattaagagcaaaccggatgctgcaaatgatgataagaaggttaatcatgataatctagacgggaatgatgatgaaaataaagaacctctttgcaatcctcctgtaaatgcggaatgtgattctactttgtgtgaagaattggatagatcagagggagaacctttgattgataactcaattccatgtgttgaaccaaggccaacaaagaagtcaaaggttgaaagtgatgaaattgacaaacatggagcgggtactctcaacactaacacagaatctgaagatcctaatttgagtaatggattggaaccctcaaataactcaagttcttgtagaactgacctaatcacaacacctcatttacgtgaaaagaagataatagattttcgggagaagttgtaccttgctcccttgactactgtcgggaatctgccttttcggagactctgcaaaaccttgggagctgatattacttgtggagaaatggccatgtgcacaaatcttttacagggacaagcttcagagtgggctttgctgcgacggcattcatcagaggatttgtttggggtgcaaatttgtggagcctatccagatacagtagcacgaaccgttgaacttgtggataacgaatgttcagttgatttcatagacataaatatggggtgcccaattgatattgttgtcaacaaaggtgctggatcatcattgctaacaaaacctatgaggatcaaaagtattgtacaagcagcatccactgttactgaaaaacctttaactgttaaggtaagaactgctttctttgagggaaggaaccgtgctgattctatagtttccgacatctatgactggggtgcgtcagccataacagtacatggtcgatcccggcaacagcgctacagcaaacttgctgattgggattatatttaccagtgtgcccagaaagcccctgaccagttgcatgtcgttggaaatggtgatgtattctcttttactgactggaacaaacatgtttcaggctgctctaaaatatcgacaagcatgattgctcgaggtgcactcataaagccttggatatttactgaggttaaagaacaaaggcactgggatattacatctggcgagagattcaatattcttaaagattttgtgagttttggtctggaacactggggttccgattccaaaggtgttgaaacaacacgctattttttactagaatggctaagctacacctgccgctacataccggttggcctgttggatgtgatcccgcaacgtttgaactggaggcccccaagctactgtggccgtgatgatcttgaaaccctaatgatctctgattcagcagctgactggatcaggatctcagagatgttgcttggcaaagttccagaagggtttacgtttacacccaagcacaaatccaatgcttatgatcgagctgaaaacggctaacaccattcatctctcttcaaagcttgtgcccagcccttggagctccatgctgcctgataatgtttacttgaaccggcggtgtaggggagcagcatgattttgcttcacccaaacgacacaattcatgtttatttaaacatagagagctgctactagtaatatgtgatgagggaattaccgtgacaagggattatgactcccttggaccgccaaaagaaaaaatccgcttcatttctgaaggaatttttatttcggtgaaaattctgttccctctatccccaatgaggactttcgtatgcacgcgacgttttctaaatagtttctgctgttatgttgggctggtttggtttgaggcctaaattagacttaccatatttagtaatttcaataaaaaaaaaaaaaaa

SEQ ID NO: 1047 - DNA, 177 bp, Oryza sativa
  Clone ID: PAT_MRT4530_100950C.1
atccccgtggctgctctgctctgagaactgtcactgaaccctgaaccctgcgcggacctccccgtctccctgatctgttgatgatctgcacctgcataccacaacccccatagtcagatctacgcaaccagatctgacgaacaccaccaccaaatcgcatcaaaaaaaacacagaga

SEQ ID NO: 1048 - DNA, 418 bp, Oryza sativa
  Clone ID: PAT_MRT4530_100951C.1
accctattcaatatatactgcagactaattaggagggaaaatagctagatatacaccggcaaaaacaatattccggctgaagatactacctgacagagagtaacaataaaaaaactcattgttcagacccttaaacaagcggacaaaaaggaatgaaacctgtgtcactcgctagacatgggtgcctgaatctatactgaatcagcacaatatagaacttctgccgcaggagactaggctgaacggaaagcatctaatgatgcccaagacatataaccaatcaatattcctggcttacataaaagggcagattgttatttagcagagattcctttaaagtgcttacctagggccctgctggatctggatctggaggtcagaaactgatgaaatcgtccttttgttccttactgtcctg

SEQ ID NO: 1049 - DNA, 129 bp, Oryza sativa
  Clone ID: PAT_MRT4530_100952C.1
cctcatcgtcctcctcggcctctcctcaacttggcaccgggaagtcctgtttcagggtttcaactgggagtcgtggaaggagaatggcgggtggtacaactgcttatgggcaagctaggtggacgacat

SEQ ID NO: 1050 - DNA, 205 bp, Oryza sativa
  Clone ID: PAT_MRT4530_100953C.1
ttatcgccatggccgcgtcgccgtcgccgccgccgctgcaggaagatactaagatcaggatcaccagacaagatgtcaccgaacaaactacgaggacaaccggcttcgatggattttccaaagctaagatgagtaatgatcagatctacttgtacatcgaagcaaacttgcagtattattatgggaccctgactttggagtacag

SEQ ID NO: 1051 - DNA, 934 bp, Oryza sativa
  Clone ID: PAT_MRT4530_100954C.1
atgtccaaattgtaataacagaatacgctaaaatatcaagttaatgtacaataaggccttgtaataattagaaaaaaactattagctggatctctatacatgcatataactccacatattgcacttaatgggaacataaacaacaaaccagatattagatgaacttttcacacatgcagatcgatctcccacatctatggaatgtgatggcaggctaacgctagctctctaaacacctggtaaaaccatctgtatttttgatctttagtttgttctggaacctttattctccattatctgtggtgcttttgggcacctaattatcaacaaagaaatatctgagtctaagatcgcaaggaaactaaacaaaataaatccattcctatcgtctatacgaagacagggaaccaagaagtaaaatcagatgtagcagaagtgcatctatacaaccaatataacgcagaaaaagaacattgatgggtcctcagataactttgatgattataactggtgagaaaaatgtgcatttgactactcactaattattgaaacatgtgactctacctcttgatgtcagtctccagagagactaattactatatgaaagcggtaaactatatccaaattccccaaaatcttggtaaacaggaatcagagaccatgccagatgacaattttagccctgtatggcatatgtatgccattcataagacatagctgagaaaagcatgaccatcttcactgcaacagattcaaatcatatcttgagaaaattaaaataaactaagacaatgagtaaatgtcaatgaccaatagtctattaacttcatcttgttacatgttctatgatttagctcagaacccatcacattatctcaacagcaaaaataaatcgatcaatatactccatgcctcgtgccgattcctgcagccc

SEQ ID NO: 1052 - DNA, 288 bp, Oryza sativa
  Clone ID: PAT_MRT4530_100955C.1
atgggctgcctggcccggcttggaccagacacgaccaacctgggccgagtgtcgtgccgggctggcccaccgtgccgaggaagcagcctaggcatggcccggctatcgggacgggccagcaaggacccaaccctagtcaagccgtgtcgtgcttgggctgggccaaattcccatgccttgggccaggctatcgggcctcgggccatatggccaactataccctggctttgtgggcttcgaactggcccatccagtcctgtggtagtccatgcctatgttagaacataa

SEQ ID NO: 1053 - DNA, 507 bp, Oryza sativa
  Clone ID: PAT_MRT4530_100956C.1
atggtgatgaagatgccaatgacatcggccgccgggacaagcatccaccagagcttgtctgatggggcgaggtggcccaggccatcgatgatggcatcactccacaccgtggcaaagagcgccgcaggggttccgacggtggctcagggttctggcgacagtgagttaatggatacatcatatctgatattgcagtttgaggatgaatttccgactgggcgacaaattgagagatcaaagggggccctcttcgcacgccccggtggccgcgcgtgccatgcggtcaaggagggtggggtcgctgcgctcgcctctgacgaggccgatgccatggtggaccggctgagggggctgtggcatgaccgggtcgccgcggaggagcagtcctcccgtgtcgtcgtcgccgccgcggtgtcgcctgtcgtctcctcctctctcgcctcacccgggggcctcctccccagctgccggccggcttacccagagaacaggagaagagaagagtga

SEQ ID NO: 1054 - DNA, 308 bp, Oryza sativa
  Clone ID: PAT_MRT4530_100957C.1
actgaaagataagagaacgtgcaacatttattatttcaaagggaagatacataaaattaatcatacaaggggcaatacaaattggagatttggagaaccacatagaaatcatatgcctggaaatggcttacatgaattttagatcagagtatttggagcctgattgaccttaattatacatatatataatgcattgaatggcttaattatgggccgaaagggcgacatggtgatacataacgagggagaaggaacaaaaccataaacaaaccaacagtatcgaatggagcaatggatttgaaagggac

SEQ ID NO: 1055 - DNA, 458 bp, Oryza sativa
  Clone ID: PAT_MRT4530_100958C.1
cgagctcacgctacactacacagcctggggcgctgtagcgcacagggggggatgctaacttgaggactaccatgggatggatgaggttgcgctgcagggggtgagctcttatggtctctacctatgctcatggaaacgtgtgtgccggtcctggcgatggatcgagccggcatgttaaggagaatactatcactcaaggcaatggataccgcgcaagaactccaatcacaagatcaacgcagtgggacgaaacttggatggccctgggccaagctgcatccgcaagattgccttgtgaacgaccgaggccgagcggtgcaacatggcaacactacccgcatacaacaacaacaacgactagtactatagcatgaacctccatgaggagcaacgacgacgtcaacgtgttcagggtcaacaagataggaggttgcaccaacagcgtcacctgtggcggc

SEQ ID NO: 1056 - DNA, 240 bp, Oryza sativa
  unsure (1)..(240): unsure at all n locations
  Clone ID: PAT_MRT4530_100959C.1
atctctgaacatgccctaaaaacattaaactctgcacaaatgggctggtgcacactgtgatcaaagtgacacgacttctttatgtttatatacatattcatggcccattttaactacaaccaaacaaagttngtgtttgtgtggaatttcaacagcatacagttaccaggttcatacataactttatactttttatatactcctacctcataacttgtcttagtgtgatattatctattt

SEQ ID NO: 1057 - DNA, 421 bp, Oryza sativa
  Clone ID: PAT_MRT4530_10095C.1
cccacgcgtccgatcaatactggtggaccatataaaaggtcgtctagtggaaatccaagcatcccttctacagaaggccattgcattccgtgatagtaacatagttgatgtaagctcatatggagaactgaaggaggccattgccgagggtaaatgggcgagagggccatggtcagctagcgatgctgatgagctgaaggtgaaagaagagaccagcgccaccatcagatgcttcccgttcgagcagccagagggcgctaagaaatgcttcatgactggcaatccagccgaggaagttgcaatttttgcgaagtcgtattagttcatgctttctctaatagtctggttccaaggatcaaagcattttttttccagctatattttctccattttcccagattctctgggatcttttctgatc

SEQ ID NO: 1058 - DNA, 1244 bp, Oryza sativa
  Clone ID: PAT_MRT4530_100960C.1
cccgggctgcaggaattcggcacgaggccggccggggcgaaattcccccccaccattgccgcggtcgtctgctccgattccgctcgcggcagggatccctaccgctctcgtcgccgtcgccgtcgccgtcgccgacgagatcatccgccgcgatgcctcggtactattgcgactactgcgacacctacctgacccatgactctccatctgtccgtaaacagcacaatgctgggtacaaacataaggcaaatgttcgaacctactatcaacaatttgaggagcagcaaactcaaagcttgattgatcaaagaattaaagaacatcttggacaagctgcagctttccaagttggtgctcctttcaatcaacatcttctctcatttccaggaggtgtgcctcgtcctcgtcttccaattctgccaacacctggcatgccacttggtgttcctcaagtacctggtgcacctttgatgccaggcgttaggcctcctattttgccagctcctggtattccaggttatcctggtgctccaaatgttccaaccatgccacaaacaggcgccccacctggttccatgccgcctggctctatgccacctggttctatgcctatgcagatggcacctctcccaaggcctccgacactaccacctccaacatctggagccccaggggcccccatccccaacagtggggcacctccagccatgtatcaaacaaatccaccgcaacctgcaggcccaacttctggtgctccacctccggtttctgctccacctccagcagcacctccacaggctcctttctcctatgcacaacctcctgagggcaaccactgattgtgttctttgggcttttatttaagaagcatatgaagtatgcccagtctgatccattggaatatgatgctgctatcgtttaaatgagatcaactgtcacttaatttgagggattgttgaagaaggcttcttgtaactgtatctgtgcatctggtgatggtattttagatatgtaacgttaattttgtaatctgctgaagttagtattgatttcagaacacatttaccaaagctggtaacgggatcgttcctcaaatatttggcatggctctgtagtactagtttctgtgatgatttgttcttcggtttggtgaacattaccccgtgtaatttgtatgaaaaaaaaaaagattttggttaatatcacacccgtgtaatttgtctgaaaaaaaaaaaaaaaaaaaa

SEQ ID NO: 1059 - DNA, 209 bp, Oryza sativa
  Clone ID: PAT_MRT4530_100961C.1
atggcgctgtaccagatgtccatgtcggcctatccttgctgcacggacgcgattaaccgacgggagccgggcgtgcgacgcaactgcggagccggggcgggggatgacagcgcccggcttgctggggggggacgcttggctgcgccgaactgggggcgggtctgctcggatgtgcttggtggccgcgccgtcccgggccctttgcgggg

SEQ ID NO: 1060 - DNA, 823 bp, Oryza sativa
  Clone ID: PAT_MRT4530_100962C.1
cactagtaatttccgaacttatttatgcataaaaccctcatccaggaatcagccgaggtacacaaactgacaatttaatatataaatccatcataaacatacttacagaagaaaagaaaacagcagcggaattaacggtctagcgatggcttcagctccactcccataggcagctcaactggggtataagccaaacgtcttctccttctggatcttttttcttcaacttgagcttccgcaaaggcttccgaacgtttctcaacgaaaacgctctcctccggaacgtcgaaaacggtgcaaagaacaacgacggacgacgacgaacgacggccggcgacgaggttcgacggcggctcggctctgctcaacgacggcgacggtgctccagtggtcttcggcggctgcgaaggggcggacggggttcctctcctccgtgcgcacccgacggcggcgacggacggcagcggcgacggctaccgcggcagcgcaacgcggccggaggatcgccggcaacggcggcggctagggcgacgcggcggcggcgcgacgggccacgagggagctcgggacttggggcaaacggaagaggacgtcaaggggatgctttatataggcttggactagagagatccgactccatacgagaggatttgagccggaaaatccgagggttagtttggagagataaactcgaaaacgaatttgattcggtttatccgggcaaaattaatctccgagcatttaagggaaagggagaggataaggtggagatgatttcccctcaactaattttgcaaacggagcacgggatgcggtggatttg

SEQ ID NO: 1061 - DNA, 255 bp, Oryza sativa
  Clone ID: PAT_MRT4530_100963C.1
atggagcagggccgcatcaacacgttggggacaagtggcagcgatggccacatcggcgcatcagggacaagcggcgggcaacaggtcggcatggcgatgaaggccctcccacgcaatggcaacgcaatggggcgagggttgtgcagcgctggtggcacggttggtggcgtggcggcggcggcggcggaggatgacgcgcagcatggtgggtcggtggcctcatgggcctgcctgagttgtggggtggtgggctag

SEQ ID NO: 1062 - DNA, 1750 bp, Oryza sativa
  Clone ID: PAT_MRT4530_100964C.1
aactagtggatccccgcgccgagggttttgactcctaaaccgccgcccccgtcctcccgcgccgccatgatgcagccgccgccgccgccgcagtgggcaatggggccgccgcctcctccgcagtacttccaggctggccctccgccgccgccgccacagtacttccagggggcgcatccacccgctgccatgtggggccagcccccgccgccgcaggctgcccctccgccggcgccggctggtggcgcagcaggggacgaggtgaggaccctgtggatcggcgacctccagttctggatggaagagaactacctgtacaactgcttctcccaggccggcgagcttatctcagcaaagataattcggaacaagcaaactgggcaacctgagggttatggtttcattgaatttggcagccatgctatagccgaacaagttctgcaaggctataatggtcaaatgatgcctaatggtaatcaggttttcaaattaaattgggcgacaagtggtgctggcgagaagcgtggagatgatggctcagattatactatatttgttggggatctcgcctcggatgttacagatttaattcttcaagatacattcaaggcccattaccaatcagttaagggtgcaaaagttgtctttgacagaagtactggtcgttcaaaaggctatggatttgttaagtttggagatttggatgaacagacacgtgcaatgactgaaatgaatggacaatattgttctagcaggcctatgcgtattggaccagcatccaacaagaaaaatataggtggccaacaacaaccaagtgctacataccagaatacacaaggaacagattctgatagcgatccaaacaatactactgtatttgttggtggtcttgatccaagtgtgactgatgaggttctgaaacaagccttcagtccatatggagaacttgtctacgtcaaaatacctgtaggaaagcgttgtggatttgttcaatattccaatagggcttcagctgaggaggccataaggatgctaaatggaagccaattaggaggtcagagcataaggctttcatggggtcgtagccctggaaacaagcagcctcagcaagaccagaaccaatggaatgctggctattatggatatcccccccaaggatatgatccatatggttatgttcggccgcctcaagatcctgccatgtacgcttatgcagcatatcctggatacgggaattatcaacaaccagcgccacagcagccccctcaacagtaagaacaagtgttggtcaagtgccctatcacaacatatgatgaaatagttttggcaactttggtgtaattggcatgaaaattttttgaactgttgcttgtgctatctttgttgaacgtcgtgtgcacgcccagcctatgttgtaacatgacattttactgaggcctaggtgacactagaatgacagcttttagggagggagtattggagtgaacatttttcgcttgctcaaaaagttttgtcgccatgggtaccattagaagaggagttgagcaagaaataataagtttgtaacattagacatcggcgtacattttaatcgggcactttggtattattgcactggagccgttttctgtttgcgtccctagttctccctcctgccggcccctgccgcccggatgttggcagcattccattgaactgaagtgttgatttgatttttatcaaaaaaaaaaacaaaaaaaaaaaaaaaaaa

SEQ ID NO: 1063 - DNA, 327 bp, Oryza sativa
  Clone ID: PAT_MRT4530_100965C.1
aaacaaaaaaaaaaaactttttcagctttaagtttttaccttattattaaggagtaggaacagaccccccagttagcagggaaaaagaatttacctccaataagaagggagggggcaaattcacagttccgttgaggaaagggaaaacaaactaaatgtttaaaccacatcgttccatattatttaaaaactttggggaatatttttaaatggcagttgaaactgtatcatgattaaaatgggaatcgccttcaggtaggtctgtaggcaagcctccttaagggcttcgctcactgttggatgcccatggcatgtccggacccgtgg

SEQ ID NO: 1064 - DNA, 327 bp, Oryza sativa
  Clone ID: PAT_MRT4530_100966C.1
tttaagtaattagtaattctgtttccgatcatttaatgttattgttaaatatatttttaggtatacatatagttttacatattttatatatacatatagttttacatatttcacaaagtaaactatatttcacacaaagtttttaataagacgaacggtcaaatatttttaaaaaaatcaacggcgttaaacactttaaggatggagggagtagtacagtccactactagctccaccagttcatctatagctaatctaataccaattcatataatagttgcttactatactattaatatatagtcccccctatcatacgaaaaaaaa

SEQ ID NO: 1065 - DNA, 2105 bp, Oryza sativa
  Clone ID: PAT_MRT4530_100967C.1
tctttcgcctgggcggaccccgggtcgacgcctccgcttgacggaaggaaacagaggggaagagagaggatcgtcgtcgacgatgatgcggcggcggctgggctgaaagagaaacagcatctcttgaggatcgtcgtttcgttgcatgggcaactactactcgtgcggcgcctcgtccacgtccagcccgacctcaccgtccttggtcgactactactactgctatcatcggtatccaagcagttgcagtagtacaagcacagcaacaagtagcggggggaggatgccgatccgcagccaccagcagaggctgtcgtccccgacggcggtgctggggcacgagacgccggcgctgcgggaggtgtacacggtggggcggaagctggggcaggggcagttcgggacgacgtacctgtgcacgcaggtgtcgacgggggcggagtacgcgtgcaagtcgatcgcgaagaggaagctgctgagcccggaggacgtggaggacgtgcggcgggagatacagataatgcaccacctggcggggcacgggagcgtggtgaccatccagggcgcgtacgaggacaacctgtacgtgcacatcgtgatgggagctgtgcgagggcggggagctgttcgaccgcatcgtggagcgcggctacttctcggagcgcaaggcggcgggagatcacgcgcgtcatcgtcggggtggtggaggcgtgccactccctgggcgtcatgcaccgcgacctcaagcccgagaacttcctcctcaaggaatcctcctcctcctcctcgctcaaggccatcgacttcggcctctccgtcttcttcaagcccgggcaggtgttcagcgacgtggtggggagcccctactacgtggcgccggaggtgctgtgcaagcactacggccccgaggcggacgtgtggacggcgggcgtcatcgtctacatcctcctcagcggggtgccccccttctgggcggagacgcagcagggcatcttcgacgccgtcctccggggatccctcgacttcgactccgacccatggcccaccatctccgacagcgccaaggacctcatccgccgcatgctccgctccccgcccagggaacgcctcaccgcccaccaggtgctttgccacccctgggtctgcgacgacggcgtcgcccccgaccgccccctcgcccccgccgtcctctcccgcctcaagcagttctccgccatgaacaggctcaagaagatggcgctgcgtgtcatcgcccggaacctctccgaggaggagctcgctggcctcaaggagatgttcaaggccatggacaccgacgccagcggcgccatcaccttcgacgagctcaaggaaggactccgcagatacggctccaacctcagggaggctgagatcagggatctcatggacgccgccgacgttgacaaaagcggcaccatcgactacgacgagttcatcgccgccaccgtccacctcaacaagctggagcgcgaggagcacctgctcgccgccttcgcctacttcgaccgcgacggcagcggctacatcaccgtcgacgagctcgagcacgcctgcagggaccacaacatggccgacgttggcatcgacgacatcatccgcgaagtcgaccaagacaacgacggccgcatcgactacggcgagttcgtcgcaatgatgaagaagggcgctatcgatatcatcggcaacggaaggctcaccattggaaggccaactacggctacttccgacgatccttctccaacaatctcttcttcctctagatgatgcatcaacgccaaacaaacaaacaatgcaaatatggttcccaattacttcaattcacaactccgactcacggatcgctcgcatggcatgctagctagtagcatatactctatactctcaagattcatcattctttttataccatgcatacagctgattatttcttgggatagaataaaattaagggcatatacctccagagatcgatcaatctatgcatgtatatggttttgttgcggatacatgcatgccaacggaagcaatttgtatatgtgggtacctgatccaagagagtgcatataaagcaatttttcctgtgt

SEQ ID NO: 1066 - DNA, 318 bp, Oryza sativa
  Clone ID: PAT_MRT4530_100968C.1
cgatcgatgggatcgatgggaaactgttttaaacactcggataaacgtctacccattttttacatgtcatcgatcaatccctgcataatgcgtggtagctcagttgccttatcagcaggcgacattgatgaggacgttttgttcagattcgtaaaagtctgctttttattgaacggaaatagtattagctatttgctagctaatactactattaagattgagaataataagggatgtaagtgacacactttgttggtcgtcacatgcatgtaagatcgagtttatacccgctagttaacctcaaaaaaaaaaaaaaaa

SEQ ID NO: 1067 - DNA, 119 bp, Oryza sativa
  unsure (1)..(119): unsure at all n locations
  Clone ID: PAT_MRT4530_100969C.1
canaaaattcagggtgcccaatcgggcgaggattaagctattttggcttataataccgcacgctgcaataattgtaacgcggccccaacatcattatgacttatagcgggtttcttaat

SEQ ID NO: 1068 - DNA, 575 bp, Oryza sativa
  unsure (1)..(575): unsure at all n locations
  Clone ID: PAT_MRT4530_10096C.1
ccctttggttgcaggattcggcacgagcggcacgagcggcagcgccggganggcaggatcagctgcggcgcggaagtgcaccccatcgacgacatgatgccctcngaagtggtggaagtnaaagtggatgaccaagaaaccaaccgtnccgaccaaatggccngtgacngcgatcacnccntggtccgaacngancanatcntctancctgacatggcccttgttgtggaaatttntctgattaacttananaactantantaattctcncntnttnaggtatancccnctactggtggttccccaacctnnncccnaacccnttttcntcccntncctttctanctnctagntnanacccccctcggcntantactttcnntatttncncccggcccantcttttctgggactgtttttggcncctgactcccctngttcntccctgcttncttcnnaaaaccnaccncanccnncnnncttnttttncctggccccacccnacccaantncctncttttttttnttaccccccccttccnnaangggggaattaaangggttttnggttttnc

SEQ ID NO: 1069 - DNA, 451 bp, Oryza sativa
  Clone ID: PAT_MRT4530_100970C.1
atcgcaagcatgaatccaccacttcaatcaggcaagttcctgtaaatttagaacacgtaaacccccatcaaccactacacgcctatttgactagcctttctctccactcctatacctgcccgtcaagattcccgaacgcacacgaagcacaatggccgctcctcccatacctgcaaacctgttcgtatacatccacgcgtacacacttcactacgtcctccccttcccgtacatgatctgccacctggatacctaactgacctccttggtcgccaggatgcactggccgcaccgagtatccttgccactacccaccgtaccatccgcctccatcctccttaagccacccttgagcgcacacccctaggtaggctaccttgggctgaatgccgtcatctattttccagacaactagctgctccttctattcgttcacaccggcgtttaactc

SEQ ID NO: 1070 - DNA, 598 bp, Oryza sativa
  Clone ID: PAT_MRT4530_100971C.1
atgtgccccaaagaaattgccccaaacctctttcagttggcaacaggaaaaaacaagaatctagcaaccgaacttgacgataaccactgggtgttttcgcttagacagattgacaatggggaagccatacacgagctggtgcaacttggcaatcttctatcaaacattcaactatcaatacagaatgaagattctataatctggaagagaaccagcacagggaatgtgatttcactagaagaacttggaacttgtagcggcaacacagggcatacaggggacaataaaccaaacctccttggcacactggatgatggatttagcacagggaaccaaatcttacaaggagtttgccttgaaggacttggagacttgcactacgttcttagtatagaggtgaaggcgttcaactagaggttttgctatctttctaggctctaaagtgtcatggagtgcaaagaagcaagcaactgtgtccaggtcaagcactgcagcagaatacaaggcgttagctgatgaaacagctaagattatgtggttgccgactctgttatgtgaaattggtatagatgcacctaaggtcgcgaatcatgtggtg

SEQ ID NO: 1071 - DNA, 339 bp, Oryza sativa
  Clone ID: PAT_MRT4530_100972C.1
accccccaatttaaaatacttttggtcctcacaaaattaaagcttgcaaagtcccaggggttcaagatccccccccccattcccccaaattttacacagggcctttggggggttgcagcacaacccccagttggggtttaaaagcaagcaagggaaacgggcgtttggcccacatgttagcctcccagggaaggggaaaccccctttgggtttggggaaagtttaaactttaaacaagctcaaacttttaaagtttagttcaacaaaatcgtcattcgaacaaaaaaaagggctgcctgaccaggggggctttgggcttaaacacctgccccttgggcc

SEQ ID NO: 1072 - DNA, 235 bp, Oryza sativa
  Clone ID: PAT_MRT4530_100973C.1
ttctcacatcaggcggtcgcggcgcgtcgctcccgtccggcgacaggaccactctygtctgcgcgccaaagcaggcgacgcgacgtytccgcgcgcgcgctcgcgctgctggccggagcgacgcggcggtgggrctgaaggtggcgmccrcgccgcsgmcctacggcgaggcggcgaacgtctycgssaagcccaagacgaacaaggagttcatcgcctacagcggcgaggggtt

SEQ ID NO: 1073 - DNA, 677 bp, Oryza sativa
  unsure (1)..(677): unsure at all n locations
  Clone ID: PAT_MRT4530_100974C.1
agcattcctctctaagattcccaaacattgaggctaaacatgacttgaattctagcaactctgacactgaaatatagaacaccatattttntnngggcnctngnncnnncnnncntcccttgaaaactttatttgtcaagctccagagattggctggctaacttaggagcaaactctcaactcaggcatacttgcaattgccagaactgggatcagtgatggtgatgaggccagtgccgttgaagaagcaattccatgagttcctccccctggcctggtagtaagcgttcatggtgaccgacgcccgcgtcggcaggctgccatcgtcgtcggggaaggagcatccgccggtgccctggatggcggcgcagtcgctctccgagcaggcgaactccaggttagccctcaaagcatcctcgctggctgctggatttgcgacacaccatgtcttggatgactggctatggtataggctgggtgctgctgctgctgatgatgctgcgttgctgtgcagcatgaagagtgcgagagcaaagaagcatgtgagcaatgaggcagtagctgaagccatctcttttccttctttctgaacctgagaatgcaatgagcttctttctctgtattatgatgcgtcagaagaagcagcagcagcgcgnacgcgtggncgnacgcgtggn

SEQ ID NO: 1074 - DNA, 333 bp, Oryza sativa
  Clone ID: PAT_MRT4530_100975C.1
atggagcatgcgcggcccatcctcgccgagcgcgagtgtgggagcggtggagaagaggcacttagtcctcacaccgaaacaaaagcagcagcagcggaaaaaggcgatactagcggggcttcagctccactccacaggcaaaactcaactgggctcagaagcactacacttctgaaaagggggaataatagcaaggttgagtacaaccaccgtactcagcaggccacaccaacgatgcagacgtgcaaggggattcaagaatggcttgtggctatttgcataaaggcggttgtaaaacattttgttgagcaaaacagtaaaactgttgaataa

SEQ ID NO: 1075 - DNA, 165 bp, Oryza sativa
  unsure (1)..(165): unsure at all n locations
  Clone ID: PAT_MRT4530_100976C.1
ctttggcggcggcggtttgtgagagcgacgcagacggacggcgtggtggtcttgcccttcggctatcttagctcgtgcgggcagccattgcgaggggattgatgaagcattttaagaggctcaaagcgcccaattatggttgcttgnaagcttggtgggcttttg

SEQ ID NO: 1076 - DNA, 300 bp, Oryza sativa
  Clone ID: PAT_MRT4530_100977C.1
agcgagaccacgtgcaatcatgaagttaccggagaggctacctggagtgcctataatagttactgaagaacctacaatcagcccacaagttcttgcattgtctatagcctcatttgcgtgaggaaggccatcggagatgttggtcaactgcttcatgtgattccatgtatttaaccactgaaatccttcaagagaggaatttccggaatccgagctgtttgaagctgaagcatctgctggtatcacttctactggtgtattaactgggatttgaggccactgaatttcccaatgaggtcg

SEQ ID NO: 1077 - DNA, 186 bp, Oryza sativa
  Clone ID: PAT_MRT4530_100978C.1
atggaggagggtgttgacagagccctagcctgcactgccacggcggggcgggaggcaggtgcagctgtcctgtccgaggcggagatccggcagctctacgtcgaggtcaagcgggtgctcctatcgcagcccaagtgcacaacctcctgcgcatccacgcccccgtcaagatctgcggacctttag

SEQ ID NO: 1078 - DNA, 1846 bp, Oryza sativa
  Clone ID: PAT_MRT4530_100979C.1
ctctgggcttatgtaccatttgctctcaggatttctgtgaggacctgagtcagaattgatacgaccataaagtaggccgtgactgacattcagttgttttactgaggagtgtatctcgtccacacggacaaaagcatcatcgtctgttttcatcagatatttcgctgatacagcaccagtcccgtagatgcatattgccagtgtcttccatgttatcagactgtagtaatcaacaaagggcagcacttgaatgtcgccatatgtgcgtgcttcattccagagttccttgtttacaatgaggtttgtagtgcaggccaacgaaaaaacggaccactactgctccttcgcgcaccgcatcatattgcatccatgtccgtcggatcgccatccttcgtttgaagttgtttgctgttgaaaagataccaatcaaaaggtccacatcttttccctctggaataggtgacgacttcaacattgcaagatcgaagctgttctccaggtcttctgatgtgggcaggccacttgcaattgcacttactagcttgaaatcaccagatactcctacttcagtaacgaaccatgcttccaagcccgctttatatggaaatgaggtaacatgttttccatcaactgtcatgtgaatcccttctagccctatccgaagagttgagatagcaaggtgtccctgcttaaatggaaaatatgtgcttgggtgttcatctttcttggcattcaggtgctgttttgagtttatagctctcttctcttctctacccaccatggaattacatcgctccaaatcatccacttgagttgcattattacagttactgcagggacatctatcctcataaccccagccattacttgcagtgaaggcattctgcactatgactggacctccagtaagttcatcacttgttagacgaacatcatagtgcagtacgatgggtttcccagatccccctggcaattctgtcccaacaagatcaatcctgaagttaccggagaggctacctggagtgcctataatagttactgaagaacctacaatcagcccacaaggtatatcgatggtaaaatctccagtgtctggcttggaggcattcattctgtggatagaatatggacactgcctctctttcttaatctgtttagaggttgaattgtgaactgatatcgtcaggttttcccatgcagttcttgcattgtctatagcctcatttgcgtgaggaaggccatcggagatgttggtcaactgcttcatgtgattccatgtatttaaccactgaaatccttcaagagaggaatttccggaatccgagctgtttgaagctgaagcatctgctggtatcacttctactggtgtattatctggattttgagccactgaatttcccaatgagtcgctcaaccaaccaaggagattagaatgtatgacttggtatcgagatggccctgacactgggctattcactatcagatgatgcacaatcagcagagggaagaggacgattagaaccgtaattccgagtcgctttgtcacccacatcaacggcgataacaagatggtgagagtaaaagctaataaacggaacacaaacactagcatgattgctgtatcggcggcgtgcgccatcagttatcgtggcaatcacctgagttcaatgaaaatgcagcccctgagtcttcaatccaagcttctggtcaaggtccagcatttcacctgccaatgcaattgatgttactgcttcttaggagtactacaatttgtgcatttccaatcagacatattttgatggactttcagtcaaagttcagggaggtatgtgcacttttttccttt

SEQ ID NO: 1079 - DNA, 1933 bp, Oryza sativa
  Clone ID: PAT_MRT4530_10097C.1
atggcgtcgctgctgcgcctcccctcgctgctcaagccgtcggcggcggcggctaggccgtcggcgctgctccgccgccggtgccgcgccgggacggcggcgagcgtgtccgcctcgcggagccaagccgcggcggcgaccacgggggcggcggcgcccgcgccgcctgagacccgcggcgggggggacagggaggggcaggtgacgccgcggtcggtggacttcaacgcgtggtacaccgatgtgatcgccgccgccgagctcgcggactacgggcccgtgcggggcaccatggtcatccgcccctacggctacgccatctgggaggccatccaggattatttgaatgtgaagttcaaggaaacagggcacagcaacatgtacttccctcagttcataccatactcatttatagagaaggaggccagccatgttgaaggttttagtccagagcttgcattagttaccattggaggaggaaaggaactagaggaaaagcttgtggtaagaccaactagtgagaccatcgtaaaccacatgttcaccaaatggatacagagctaccgcgatcttcctctcatgattaaccagtgggctaatgtcacaagatgggaaatgaggactaagccattcatcagaactcttgaatttctatggcaagaaggtcatacagctcatgccacccttgaagaggcagaaaaggaggcaatgcaaatgattgatgtatatacaaaatttgcatacgagcaagctgcaatccctgttattccgggtcgaaaatcaagagtggaaacgtttgctggtgctaatcggacctacactatagaagctatgatgggtgacaggaaggctttacaggctggaaccagccacaaccttggacagaacttctcccgtgcctttggaacacagtttatggatgaaaatagccaaatcgaacatgtttggcagacttcttgggctattagcactcggtttgttggtgggatcatcatgacccatggtgatgatgctggcttaatgcttccgccaaatattgcacccatccaggtggtaatagtgcctatatggaaaaagggagatgaaaagagtgctgttatggaagctgtgtcttcagttcaaaacacactcaaagaagcaggaattagagtcaaagtggatgactcggagttgcggacaccaggatggaagttcaatttttacgagatgaagggagttcctataagactagaaattggtccccgtgatgtcacaaacaaaagtgttgttatttctaggcgagatatccctggaaaacaaggaaaggagtttggagtgtctatggatccatcaatactggtggaccatataaaaggtcgtctagtggaaatccaagcatcccttctacagaaggccattgcattccgtgatagacaaacttcctctgaactaaacggtgcactttttactttcagtaacatagttgatgtaagctcatatggagaactgaaggaggccattgccgagggtaaatgggcgagagggccatggtcagctagcgatgctgatgagctgaaggtgaaagaagagaccagcgccaccatcagatgcttcccgttcgagcagccagagggcgctaagaaatgcttcatgactggcaatccagccgaggaagttgcaatttttgcgaagtcgtattagttcatgctttctctaatagtctggttccaaggatcaaagcattttttttccagctatattttctccattttcccagattctctgggatcttttctgatcataaattacccattgaatgcttgtgcttctgatatttctagtgtaaattagcgatcgagtagttaaatctctgtcctgcttgtcgtattaggacaaaactcacaacacggtgcaattgtataatcaaagttctcttactgaagttcacagctct

SEQ ID NO: 1080 - DNA, 473 bp, Oryza sativa
  unsure (1)..(473): unsure at all n locations
  Clone ID: PAT_MRT4530_100980C.1
aggatgaccgcggatatgtcgagaagcgacatatgagatctaaccacgagagcnctcggctgctgcgcggggtcgtctacaaaagaaagatttcnncnccccccccccccaggggntttgtgttgcactgcgaccanccangngacacnanannaaacncaagcnnggaggccggcagggcgacnccagaggagccccaccgaaggcggcaannnccgggaccggaaagaaccccgagagggnaaaagaggacgggggaagggaaaaaaccggggcgacccaaccggnnncaagacaaaaggccggaanggnaatgcaccncgggcggcaaaagcaagcaagagcaaaagcaagggggnngccccaancgggacaccnccaanatagaannnccacacggcagaaaacggaagaaggaggaaacaacaaanaagaaacccccggcgcngnnnnnnnnnnnnnnnnnnnnttaa

SEQ ID NO: 1081 - DNA, 581 bp, Oryza sativa
  Clone ID: PAT_MRT4530_100981C.1
gcggcgcgaacccgtcgatctcccggaggagcctctcctccacgcgcgggtggcacgacaccaggtacaccaccgacgacaccgtgaacgccgtcgtcttcgtcccggcgatcaggtgctcgtacgccagcgcccggacgtgccggtcctccagcgcgaagccgccgtgcccgccgccgccgctctctctcgcgtcaagcagcgccgcgatgaagtccagcgccgccccgtcgccggcgtcgcggtcacgccgccggccggcgatgatggcgtcgatgcggcggcacaggcggcgctcgttctggtccatcttgtagtccgccgtgccggggacacggcggagcagccgcttgcacggcgtctggacgcacggcaggaagaggcccaggatggtggacagcgagctggacaggtccatcttgatgaactccatggacttcttgtactccctcaagaactccttcacgtcgtcgtcgtcgtcgccgtctccgtcgtcgccggcgggggtgtcggcccgcttcctgacaggccgaactcgatgccgaacgccgtcttgccgatgatgtcgatgggcatgcaca

SEQ ID NO: 1082 - DNA, 3273 bp, Oryza sativa
  Clone ID: PAT_MRT4530_100982C.1
atggaaaacagcgatcgtttgttctcgtcggatgaatgcttagctcaagatgcatctcccctattctcaatgaacgatggttttgaggcctttgcactcgaccaggaggctgtcagtttcgctcctgcttcgccaggtgaactgcaagagcctactaaattcctggtggaggagctgatctctgatgagaaagtgaatgaggacgatgcatgcccctctgcgatcgtccaaaatttctggtcggacgtgggctttccgtctgcagcatcacgctggtgggagagtgatgcttctcggatggaaactgcgaggtcaacgaccaaaacactagaacagaatgtcaccgacgatcctgtctctagacctctggaaaaaccggtgaatcgacgaaagggatgggctgtccggccgtggaaagggccactgcctcgtccccggcgatcgccgccggtgattcttgctgactttttgccgcatgtaattacagttgtgggatcgagtatctcgccagattttcctgaaaccgctcggtcgcggggattgcgcgtggattctgaacatcgctctgtcattcctcacctgggcccggttggtcagcgaaaattcggggggcctcgtggtagagaccgagatcagccacggccaggatcgatcaaggctgagacgcagtctcaactgaaccatcgcccacaccagggcgcagggcatcagcagccacatcagaatccggtcatagcagtgcctgcaaaagcgaagaagcctcgaccacctcactgtcaccgctgcaaggtttcgggtcacacaatgcttgaatgcaaggcggaccttgactatttcgtgtgtaacaagaaaaattcacatcgagcagagaggtgcccagttctcaagctacccaagccgacaggaaatctttttggttttgggaagaccgagactggttttctccaaatccctgattttgatttcaagtttgacacaccatcacctgtcccaacagctcttgtctccattgggggtggccatctatcggcggacaacgtacagggagaacttgcacgccttgtccgcgctgattggaaatgggaggccattccacatgagcagaattcctacctagtgacattcccttccgctgaagagcttaaaagaatggatgacgtcgagttccgcttgaaaaatcatggagtgtcactgtctatttcagattggaaatcatcgacggatgttaccccagcataccaattggatgaagtgtgggttcatatcactggtgtccctcacaaatggcgtcattatttggcgttctgggcactagggtgtgtagttggtgtaacacaagaagtagacatgctcaccttccgccaaaagggaattattcgagtaagggtagctttgttgagcagagccgaccttccaattaccacagaccttctttttggtacaatgggttatccggtgacctttgcccttgaggaggagggtttcgaacctgcgatacctttgcatgatgacccaatggaccatgatgatgacggagtgggggacaaggatgacacaaataatggaggggatgaccagattgctaaatgtccgaagaaatcggaggcgtcttcctcctcgcagggacagcaacctatatccgatgtttcctcaatgcaactggctttaactccttttggatcatgtaggccaccaccaagcaagcttagtgttgtcgacagaaaaagtgatagtataaactttggtacagctggttcagtggcacgtccagaggctatccaagcaaatccaacagcagcagtgcatggagcggttggagtggatgttaagccacttacgggtgattcggcgagggcagcaaggcctgccctttcgcgggatcaggtggtgcgtcgtgataagtcgccggtcttggaggcaatgatggatagagtggcaaatgtgaaacaacagccggtgcagtccgctgtcttaatagcagcttcggcaacaacaagaggtgccaagcagagggttcacacagcggctgcagatgtggaccagcagtcggctcagcctgctgccttggtggctgcctcggtggcaatagaaagcatcaagcaaccggtacaagcagcgacaacaacagttcgtgttgcacgacaccaaccgtcgaccgagcagttgggggcggtagcagcagggaacatacagatgctgagccgagcggctgcatcaccaccagaaggagcgcaacatgtccatgataacgagggtgatgattatgacaacggcctactcactcacttagtcaaggacatttctgaggtcgatttggatgaaaatcacctaccaactttgttgggtggtgatttcaatatcctcaggaggagtacagaaaaaagcaatgaccgatatagtagccgatggccttttcttttcaatgctgtcatcgatagttttgacttaagagttgacctaacaggcagacaatttacttgggcgaactccctttcaagtcctacttttgagaagttggatagggtactcatgtctacggaatgggagtccaagtaccctcttgtgtcggttcatgctttggatagaggtctatcagatcatacccctctcctacttgacactggtgtacaggcatttacggggaatacaaacctcaactttggggtaatcaccttgatacccaaagtaaaggaggctaatcgcattcagcaatacagaccgatttgccttctaaatgtcagctttaaaattttcactaagaatgccactaacagaattaattcagtggttgaccgaatagtgagaccatctcagacagcttttatgcgaggtcgcaacattttggatgggttggttgtccttcatgagacgattcacgaattgcatcgcaagaagcacagtgggatcattctcaagattgattttgaaaaagcctatgacaaagtcaaatggcctttcttactacaaaccctccgaatgaaaggtttctcaccgaaatggatctcttggattgagtccatcatttcgggtggaagtgtagccatcaaagtgaatgacgatgttggacgtttctttcaaacaaagaaagatcttcgacagggagatcctctctctcccattctttttaaccttatagctgacatgctcgccattatgatacagagagcacaattagctggtcagattgatggaatagtgccacatctcatagatggtggtttgtcaattctgcaatatgccgatgatactattctattcgggaatatgatttag

SEQ ID NO: 1083 - DNA, 1968 bp, Oryza sativa
  Clone ID: PAT_MRT4530_100983C.1
ggatttaaacaagctaccccaaaggatgagtatccaatgccagtagccaatcagctggttgatgctgcttcagggtacaagatattgagttttatggatggaaatgcaggatactatcagattttcatggccgaagaggatatcaataagacggcttttaggttaaggcattacctattgtccaacgaatgcactgtcatctgcaaagccgatgttgttaagtacatgttatctggtccaattttgaaaggaagggttgaaaagtggatattttccttaacagaatttgatcttcggtatgagtcaccgaaggcagtcaaggggcaagctatagccgattttattgttgttcatcgtgatgattcaatcggctcggttgaggttgtgccatggactttgttctttgacggatcagtatgcactcatggttgtggtatcggcttggttataatttctcctcggggggcaagttttgagtttgcttatactattaaaccttatgcaactaacactcaagctgagtatgaggcagttctcaaagggttgcagttactcaaggaagttgaagccgatgctatcgaaattatggaagattctttgctagtgatcagtcaattggcaggggagtatgagtgcaaaaattatacgttaatgatttataatgagaagtgccgagagctgatgaaggagtttcggatggtaaccttgaagcatgtatctcgagagcaaaatattgaagctaatgatttggcccaaggggcatcgggatataagccgatgatcaaagatgtcaaggttgagattgttgcattaacagccgatgattggagatatgacgtacatcaatatttacagaatccatctcaatcggcttcttggaaactgcgatataaagcgttgaagtatactttattggatgatgagctctattatcggacgattgatgtggtgttgcttaagtgtttgagtgccgatcaggctaaggttgcaatcggtaagggatgtcaagattgtcagaaatttggagcaattcagagggcaccggcatcggctatgaatcctatcattaaaccatggccatatagaggttggggaattgatatgatcggcatgattaatccaccatcgagcaaggggcataagtttatattggtggcaaccgattattttaccaagtgggaagaagcgattcctttgaagaaggttgattctagggatgctatacaatctgttcaagagcatataatctatcgatttggtattcctcaaaccattacaactgatcaagattcaatcttcgtgtccgatgagtttgttcagtttgccgatagcatgggtatcaaattgttgaattcttcacaatattatgcacaagctaatgggcaagccgaggcatctaacaaaagtttgatcaaattgattaagagaaagatttttgattatcctcggcagtggcatactcgattggccgaagcattgtggtcttatcggatggctagtcatggttcgatccaagttcctccttataagcttgtttatggacatggggttgttttaccatgggaagttagaattggctcaaggagaacggagttgcaaaatgatttgacagccgatgaatattataatctcatggctgatgaaagggaagacttggttcaatctagattaagagcccttgcaaaggttaccaaggataaggaacgagttgctcggcattacaacaagaaagtggtgtccaagactttttcggaaggtgaacttgtgtggaagttgattttgccgattgggacacgggataacaaattcggcaagtggtcgccgaattgggaaggacagttccaaatctataaggttgtgtctaagggagcttacatgttgcaaggactcgatggagaagtttatggacgagcgctaaatggcaagtacttgaagaaatattacccaagtgtttgggttaatgcatga

SEQ ID NO: 1084 - DNA, 336 bp, Oryza sativa
  Clone ID: PAT_MRT4530_100984C.1
atgtggcgaggggagcgagcggggaggaggcccaggctgagccgccatcaatgcgcaacaccctaaccgtctaaatgcggtaggggcggacgtgtggtgcggtccgattgacccacgtcaatcgggcgtaaccagactgtgaccggcctgttgccggtcacgtctgatcggacgggcgaccgtgcccccacgttcgcccctgtacccagcggagtggaggcagagggaatgacagggctgtcccccatgttgagtggggggcggcgttgggtcccactcaaggacggactgctgcttgacttccgggcgaaggcaaggatcgtggtccggtcaagg

SEQ ID NO: 1085 - DNA, 1422 bp, Oryza sativa
  Clone ID: PAT_MRT4530_100985C.1
atggatgaagtcgggggtcgatggacattctccagggcaaatgaaggctacacgagctgcggcccgggatttaaacaagctaccccaaaggatgagtatccaatgccagtagccaatcagctggttgatgctgcttcagggtacaagatattgagttttatggatggaaatgcaggatactatcagattttcatggccgaagaggatatcaataagacggcttttaggtgtcctggtgcaatcggcttgtttgagtgggtttctaaagagatagaggaccacatagccgatttgaggaaggtttttgagagaactaggaaatatggcctaaagatgaacccgacaaagtgtgctttcggtgtatcagctggccagtttttgggatttcttgttcatgagagggggattgagatagctcaaaggagtgttaatgcaatcaagaaatttcagcctctagagaataagacagagttgcaggacatgatcggcaggataaattttgttagaaggtttatttctaatttgtctggaaggttaaggcattacctattgtccaacgaatgcactgtcatctgcaaagccgatgttgttaagtacatgttatctggtccaattttgaaaggaagggttgaaaagtggatattttccttaacagaatttgatcttcggtatgagtcaccgaaggcagtcaaggggcaagctatagccgattttattgttgttcatcgtgatgattcaatcggctcggttgaggttgtgccatggactttgttctttgacggatcagtatgcactcatggttgtggtatcggcttggttataatttctcctcggggggcaagttttgagtttgcttatactattaaaccttatgcaactaacactcaagctgagtatgaggcagttctcaaagggttgcagttactcaaggaagttgaagccgatgctatcgaaattatggaagattctttgctagtgatcagtcaattggcaggggagtatgagtgcaaaaattatacgttaatgatttataatgagaagtgccgagagctgatgaaggagtttcggatggtaaccttgaagcatgtatctcgagagcaaaatattgaagctaatgatttggcccaaggggcatcgggatataagccgatgatcaaagatgtcaaggttgagattgttgcattaacagccgatgattggagatatgacgtacatcaatatttacagaatccatctcaatcggcttcttggaaactgcgatataaagcgttgaagtatactttattggatgatgagctctattatcggacgattgatgtggtgttgcttaagtgtttgagtgccgatcaggctaaggttgcaatcggtaaggttcatgaaggaatatgtggtactcatcaatcggctcataagataaagtag

SEQ ID NO: 1086 - DNA, 3672 bp, Oryza sativa
  Clone ID: PAT_MRT4530_100986C.1
atggctgaaaaaccaccatcgtcaccgtcttcggctggttcttccaaggatggagaagtacaacaagttccggctggtacagctgaatcaggcggtaaaggtgctgcaaagggatcaggagataaaggtgacagctctcagagggtgcaagttgaggatcttggtccatatggcaatatagcacaactacaatttaataatttccaagatcggattgactacgccgtacaacatgctttgatcaaccaatctggagtgttagtcaataccttatcaaacatggtgaagtcaatggttgatggttcaatagttgagtatcaggtgataggaccagtcaatttaccaggtggtgttttcccaaactatcggcccttggtcacaaacaatcagccgagtacctccaatatgccaccagctcagctgacagcatcggtatcggctcctgcaccgtcatcggcttcaagacaattgaccaaccctcggttgttgactagagataagccgcagcatgctggacaaaatgttaatcggctgactcagaaacaggttgctgctatgtttttaccaactcagcctaccgtcgacccagtacagcaacagtcgattcagcagacgctaccaaggcagcagattactcagccgattcagcaacaaagtttgctaaatgcatcggttgggtttaggacgcctgataatcagccgaggcagcacatcgcgactcaagttgtccctgagcatttggttcataatgtgcaaccagatcaatcggtgatacctcaagttattcccgaacatttgtatcagcaaggaggatcagctcagccccagtttgctcctcagttcaatcaattcgaggctgtaccacaacaaacgcaaggggtacctcagcaaagaccatgggttgatttgattgcagatgtgatgagggagcaattcgggcttaagccgaaggacactggaaacttatatcggcatccataccctgagtggtttgagagggttcagctgcctaaccgatacaaagttccagatttttcaaaattctcagggcaagacaatgtctcaacttatgaacatgtcagccgattcttagctcagtgtggtgaggcatcggctgttgacgccttgaggaggcttgcaaaagccaagaagagcttcaaaaagatcaatcatgtctatccttacatgtatggatccgatgatgatgatgatgatgatcctgaagtagcggcagccgagtgggtcagaagcaagaagattataccatgccaatgggtaaagaattctggaaaagaagagatgtatgactttgacattagcaaggctagtaagatttttgatctgttacttcgggaaaaacagattcaactccctgctggtcacatcataccattgactgaggaattgggcaagagaagatattgcaagtggcataactctgggtctcattctactaatgattgcaaagtctttagacagcagattcaggtggctattgagggaggaaaaaacaagtttgatgactccaagaagctgatgaaggtcgatgacaatcctttacctatcaatatggtacatgcagctggtcgaacagtcgatgggggaaaaactcgaggttttcagatgaattcggctagaattattaacaagtatcagaggaaatatgacaagcagcaacaggagaggtattatgaagaagatgatgacggttttgaccctcattgggactgtgagtttttcagattttgctggaacgaaggtataaggctgccgtctaccgaagattgtcctggatgcaacaatgttgcagaaagttcaagccgatcttacaatagaagcaatcggctgaggcaagcaagggtttctgttcatcaaagattgggcccaatgaaccaagatcgtgaccaagagggtgatgaggacaggaaaactcaacggtgttcttctgctaagcaagccgatgttgatgaagttgaggaagcttcggctaggttggttttgtcaccagaacaagcagtttttgagaagctagaggggacagagaatcgacatcttaagacattatatgtaaacggctttgttaattggaagccgatgtccacgatgatggttgatggtggggctacggtgaatttgatgccatatgctacatttcgaaagctacgcagaaatgctgaagatctcatcaagacaaacatggttctcaaggactttggtggcaatccatcagaaaccaaaggggttttaaatgtagagctgacagtcggcagcaaaaccatccctacaacattttttgtcatcgatgggaagggttcctacagcttgtttcttggaagggattggattcatgctaattgttgtattccttcaaccatgcatcaatgcttgattcaatggcaaggcaacaaggttgagatcgtgccagccgacaaatcagttattgttgccaatgccgatttagctctttgggagatggacggtattgattgcttgtctggaaagacggagagcataaattattattttgaggacgtcgtggagggttcaaacgtctacaccaaggacacaatagatgatctcgatgacaagcaaggacagggtttcatgtcggctgatgatttggaggaaattgatataggaccaggtgatagaccaaggccgacattcatcagtaagaatttgtctttagaatttcgaaccaagttgatagatctcttaaaagaatatagagattgttttgcttgggagtattatgagatgccagggctcagccgatcaactgttgaacatcggctacctatcaaaccaggggttggaccgcaccagcagcctccgagaagatgcaaagccgatatgctcgaacctgttaaggctgaaattaaacgtttctatgatattggttttattcgttcttgtcgatatgccgagtgggtttccagcatagttccagttatcaagaaaaagggcaaagtcaggttggttgaggtctatattgatgatgtggttgttaagtccaaggaaatagaggaccacatagtcgatttgaggaaggtttttgagaggactaggaagtatggcctaaagatgaatccgacaaagtgtgcttttggcgtatgggctggtcagtttttgggatttcttgttcatgaaagggggattgagataactcatagaagtgttaatgcgatcaagaagattcaacctccggaagacaagacggaattgcaggagatgatcggcaagataaattttgttagaaggcattatctattgttaaatgaatgcactgtaatatgcaaggccgatgtggttaagtacatgttatcggccccgattttgaaaggaagaattggaaagtggatattttccttaacagaatttgatcttcagtatgagtcaccgaaggagatcaaggggcaagctatagccgattttattgttgatcatcgtgatgactcaatcggctcggttgagattgtgccctggactttgtttttcgatgggtcaatatgcactcatggttgtggtatcggcttggttataatttcccctcggggggcaagttttgagtttgcttatactattaaaccctatgcgaccaacaatcaggctgagtatgaagcggttctcaaaggattgcaattactcaaggaagttgaagcatgctgttga

SEQ ID NO: 1087 - DNA, 227 bp, Oryza sativa
  unsure (1)..(227): unsure at all n locations
  Clone ID: PAT_MRT4530_100987C.1
aagagnnnttgtaaaactatgcttgcacgcctgcaggtcgactctagaggatccccgacggctgggagcgagacaagtctcagctcagtcggggttaataaccttttgagagggggtacactatacccacacgacgtttctagccttggtcacccagcccgtgcagaaccaccacctttggtgactttggggctttcacgacagggtttttcgaaagccgaccacag

SEQ ID NO: 1088 - DNA, 2217 bp, Oryza sativa
  Clone ID: PAT_MRT4530_100988C.1
atggcgcagaaatacttctggtatattagggttacagagttcatccgcaagcgcacggatataccatttggggttcatgagatgaaattgtctgatttaacagcgattaagcaaaggcatgatgagcctgtgcaggactacattccaagggagaagttctcatcccaggactttgatagtttgtcgcatcttgcacagaaggtaaccctgcatgaacagaggtttgcagaagccagtaagagctttaaaaaggttaataatgtttgtccctacatgtatggatctgatgatgatggtgatgatgatgatgattctgaaatagcagcagccgaatgggttagaagcaagaaggttataccatgccaatgggtaaagagttctggaaaagaagaaaggtatgactttgacatcaccaaggctgataagatctttgatttgctacttcgggagaaacagattcaacttcatacaatcccatcggctgaggagttaggcaagaggaggtattgcaagtggcataattctgggtatcattctaccaatgattgtaaagtcttcagacagcagatccaagcggctattgaaggaggcaaaatcaagtttgatgactccaagaggccgatgaaggtcgatggcgatccttttcccgtcaatatgaaggttgagcaagagatcaaccatcggctgaaggaaacgaagccgaagcaggagtggcgcgttaagaatcaaattcctattgccaatgaggccacagccgatgaagcaaaaagattggttaaagggaaaagtgttgtgactgcatcggttaacatggtttttacactgcctgcagaaattggggccaagcaagccgatgttgatgatgttgaggaagagtcggctaagctgattttatcaccagaagaagcagtctttgagaagccggaagagacagagaatcggcatcttaagccattgtatgtaaatggctatgtcaatgggaagccgatgtctaagatgatggtcgatggtggggctgcagtgaatttgatgccttatgctacatttaggaagctaggcaggaatgctgaggatctcatcaagacaaacatggtgctcaaagactttggtggcaatccatcagaaaccaaaggagttttgaatgtcgagctaacagtcggcagcaagactatccctacaacattttttgtcatcgatgggaagggttcctacaacttgttgcttggaaaggattggactcatgccaattgttgtattctttcaaccatgcatcaatgcttgatacagtggcaaggcgacaagattgaaatcgtgccagctgacagccaattgaggatggagagcccaagttattattttgagggcatcgtggagggttcaaacgtctacaccaaggacacagtagatgatttggatgacaaacaaggacagggtttcatgtcggccgatgatttggaagaaattgatataggtccagagactgctttgcttaggagtattatgagatgccaggactcaactgatcgattgttgaacatcggctacctatcaaaccagggggatttaaacaaagctaccccgaaggatgagtatccaacgccagtagccgatcagctggttgatgctgcctcagggcacaagatattgagtttcatggatggaaatgcaggatacaatcagatcttcatggccgaagaagatatccataagatagcatttcggtgtcctggtgcgatcggcttgtttgagtgggttagtgctgaagctacatatcaaagggctatgaattatatatatcatgatttgatcggctggttggttgaggtctacattgatgatgtggttgttaagtctaaagagatagaagaccacatagccaatttgaggaaggttttcgagagaactaggaaatatggcttgaagatgaacccaacaaagtgtgctttcggtgtatcggctggccagtttttgggatttcttgttcatgaaaggaaaattgaaataactcaaagaagtgttaatgcaatcaagaaaattcagcctccagagaacaagacagagttacaggagatgattggcaagataaattttgttagaagggtatttttggccgacaatgctggaggattgtttcaaatattacaagggatgtcaagattgtcaaaagtttggagcaattcaaagggcatcggcgtcggctatgaatcctatcattaa

SEQ ID NO: 1089 - DNA, 2880 bp, Oryza sativa
  Clone ID: PAT_MRT4530_100989C.1
atggtgaagtcgatggttgatggctcaatagctgagtatcaggctacaggaccggtttatttgccaggaggtattttcccaaactatcggcccttgatcactaataatcaaccgactgctcaaccgattgctcccaatgtgccatcagctcagccaacagcaccagtatcggctcctgcacctgctggaccatcatcggcaccaggtcaactaatcaatcctcggttgttggtgagagagcagtctcagcatagtggacaaaatgtgaatcggctaactcaagagcaagttgcagctatgtttttaccaactcagcctactgctgacccagttcaacagcagccgattcagcagacgccaccgaggcagcaagttgctcagccgattcagcagcaaggtttcctaaatgcatcggctgggttcaggacgcccgacaatcagccgaggcagcacgctgcaaatcaagttgtcccagagcatttggttcataatgtgcaaccagatcaatcggtgatacctcaagttattcccgaacatttggaaccatgggccgatatgattgcagatgtgatgagagagcaatttgggatcaagccaaaagacactggaaacttgtatcggcatcgatatcctgagtggtttgagagggttccattgcctagccggttcaaggttccggatttttcaaaattctcagggcaagacagtgtctcaacctatgaacatgctagccgattcttagctcagtgtggtaaagcatcgactgtcgacgccttgaggggtatgatagctccaatcagggagaaattctcatcccaggactttgatagtttgtcacatcttgcacaaaaggttacctacatatatggatctgatgatgatgatgatgattccgaggtagcagcagccaagtgggttaggagcaagaaggttataccatgccaatgggtgaagagttctggaaaagaagagaggtatgactttgacatcaccaaggctgataagatctttgatttgttacttcgggaaaaacatattcaacttcctgctggtcatacaattccatcggctgaggagctaggcaagaggagatattgcaagtggcataattctggatctcattctaccaatgattgtaaagtctttagacagcagatccaggcggctattgagggaggcaaaatcaagtttgatgattccaataagccgatgaaggttgatggcaatccttttcctgtcaatatgaatcagaagagaagggttcaaaggttgaggaacagggaagaggttgagcaagaaatcaaccatcggctgaagaaaacgaagccgcagcaggagtggcgcgttaagaatcaagttcctacagccgatgaagccacagccgatgaagcaaaaagattggctaaagggaatagtgttgtaactgcatcggttaacatggttttcacactgcctgcagaatttggagtcaaacaagccgatgttgatgaggttgaggaagcatcggctaagttggttttatcaccagaacaagcagtttttgagaagccaaaagggacagagaattggtatctcaagccattttatgtaaacggttatgtcaatgggaagccgatgtctaagatgatggtcgatggtggggccgtggtgaatttgatgccttatgccacgtttaggaagctgggcaggaatgctgaggatctcatcaagacaaacatggtgctcaaagactttggtggcaatccatccgaaaccaaaggagttttgaatgtagagctaacagtcggcagcaagactatccctacaacgttttttgtcatcgatgggaagggttcctacagcttgttgcttggaagagattggattcatgccaattgttgtattccttcaaccatgaatcaatgcttgattcaatggcaagtcgacaagatagaaattgtaccagccgacaggtcagttaacgttgccagtgctgatttagctctttgggagatggatggcctagattgcttgtctggaaagatggagagcccaagttattattttgagggcgttgtggagggttcaaacgtctacaccaaggacacagtagatgatctcgatgacaagcaaggacagggtttcatgtcagccgattatttggaagaaattgacataggtccaggtgatcgatcgaggccgacatttatcagtaagaacttatctctagaatttagaaccaagttgatagagctcttgaaggaattcagagattgtgttgattgggagtattatgagatgtcagggctcagccgatcgattgttgaacatcggctacctatcaaaccggggtttaggccgcaccaacaacctccgagaagatgcaaagccgacatgctcgaacctgtcaaggctaagattaaacgtttatatgatgctgggcacaagatattgagttttatggatggaaatgcaggatacaatcagatcttcatggctgaagaagatatacataagacagcttttaggtgtcctggtgcaatcgacttgtttgaatgggttacgatgactttcggcttgaaaagtgctggagctacatatcaatgggccatgaattacatataccatgatccgatcggctggttggttgaggtctacattgatgatgtggttgttaagtctaaagagatagaggaccacatagccgatttaaggaaggtttttgagaggactaggaaatatggcttgaagatgaacccaacaaagtgtgctttcggtgtatcggctggccagtttttggaatttcttgttcatgagagggggattgagatacctcaaaggagtgttaatgcgatcaagaaaattcagtctccagaaaatagacggaattgcaggagatga

SEQ ID NO: 1090 - DNA, 396 bp, Oryza sativa
  Clone ID: PAT_MRT4530_10098C.1
atggctcagagcttggatgaatcatgttctgtcaaagatgttgatcaaaggcctttggtcgcccatatcaatgggatcacacgcattgctaaaactatcttcaacacaaacagcttctatcgaataagtgttacgcccgtgcggcgggaggggcggtggctgacggcccgtgcggcgggagggcagtggccggtgacacccgcacggcggggcgacgcccgcgcagctggagggcggtggccggcgcccctgcacggcgtgacggaggctggacgacggcgcgtggccggagggcggcaggacggcgcgttcggtcggaggacggcgggacgatggctcgcgcggcaggagggcggcgggatgtcggcgcgggactgcaggctggcggcacactga

SEQ ID NO: 1091 - DNA, 276 bp, Oryza sativa
  Clone ID: PAT_MRT4530_100990C.1
atgggtcagtgtgcactcatggatgcggctgagtatgaagcggttctcaaagggttgcaattactcaaggaagttgaagccgatgctgtggagatcatgggtgattccttgctagtgcatgtatctcgagaacagaatgttgaagctaatgatttggctaaaggggcatcgggttacaagccgatgatgaagtatgtcaaaatagaagttgccacattaacagccgatgattggaggttaaggttgcaattggcgaagttcatgaagggatttgtg

SEQ ID NO: 1092 - DNA, 1629 bp, Oryza sativa
  Clone ID: PAT_MRT4530_100991C.1
atggggccccgggagagctcgactgtggcagcggcagcgcccttccctcagctggatccagcgggaggggaggcggcggcggcggcctcccctccaccggatccagcgggaggggagccggcggcggcggctgatccaacagggtcggtgctgtggccgctaccccgatttggcgcagctaccgtcgcccgtcatggtagttcttgggtttgtgagactcccacagagagcatgattcactccggcggccgccgccgccgccaccgccgcggcagcaaagggccgtacgagcgcggcggcgacggggaggtggacggaagcccacgcgaagccaagggctgcatggacgcagcggcgacggacgcacaggcaggctccactttgggcagcggctgctgtgctgctatggctcacgcatggatggaggagttttccggggacaagctaagcataaacccattgaaagagactgacatgattttgcttgagaggggattctgccactgtgagaagggggaagaactaccaaaaaaaaatcaacaggaaccaccaccgcatcaacttttacagcagaagaaccatcagcaatgtcagcaacaagctgctcacactccaaagtcgatggtgcagaagcctgagtggaacacgcatgaggaggtgaaggaggtccatttgaaacagaatgtccctgaaccatcttcttacctgcataagtcctcgaacacgcaggaggaggtgaaggaagtccatgtgaaggagaatgtccctgcaccatcttcttacttgctcaagtcctcggggttaaaatcattatttgtgaaggcttctggtgttagtgtatccatacaagtagatgtatctaacacaaaagttgattatctgatcaattctgcctgtgaaaagttaggtgtcaaagctcaggatacctatgcagtgttgtgcggtaaagttttagactatgataaatcattgtcggagtacctattgtatcaaaactcaaccgttgaaatccgctatcgaggaagagctggacagctaaattgggatcaaaaattcaatgttaatgatacagttctgtattatgatgttaacttagatccagctcttcaaaatgctggaatccaggcattccaatatgcacggtttttctcggatttttcctcatacaatatattcagaaggatgaaacaattgatgattttagacaatgtggtacatagacaccctgcacatcttcaggctaatataaaagctatggcagcatatgcttcacacgctagtttaagagctagtatgggaccatatgcatatgcttggaaaggttctgcgcagcttgttcctgaactcaataatgttcttatctatcaaccatccgggaaaccattacaatggaaaaatcccttatatactgataatgcaaaaggttgtcttcattttgccaataattttttgaagcatgcaagaaacaggttcccagaagaacaaattgaggcagcatttgctctacacatgaaaaatttcctgccaaagatattacagggactagctgaacttgctgatcgcaccccaaacagacaatacatcaatgacatcatggtgggatggcgtcatgctggaatgcaaagataa

SEQ ID NO: 1093 - DNA, 694 bp, Oryza sativa
  Clone ID: PAT_MRT4530_100992C.1
ttttttttttttttttttttagtacactcaacaggtaactcatttccaccaaaatgtacacttgtacagtagttagaagaggattggtgagatgaaatcacaaccggaaattacaaactggagctttggagaataacaaactgattggctgctaatgcagcagaacatgaatggccacgggtgtaaacgctgtgtcaacaatttaacgaggctggtatgtacaccgaaatttcgtgaattatgcctgtttagccaattgcgatatcgcatcaggatacactgggtgttctttggtgtaccggttttatcgggctagaacatcacgagctactctcctcggtcacatgaatctcagaccaatgtgtgtctccagttggttgtttgtcggcagctgattgttccgcaggactgacacttctgtgtgtctgactaattggcgttcttgaactgcactaggatcattgtcatgttgtcgcatccttctccacccaaagcccacgcgtccaggcatctatctagcactctttcgcataccgcagaaaggctgctctctgtgtttatgtgttcgtggatgaaatcaaccagctgttggctagacatgccgtcccagatgccatcacatgctaaaacaagaaagtcatcatcatcacaaagctccactgtgtgatgtcagcctgcagcccggggatccact

SEQ ID NO: 1094 - DNA, 2253 bp, Oryza sativa
  Clone ID: PAT_MRT4530_100993C.1
tggactcacgaacactatccgtgttagtcaatactttgtcaaacatggtgaagtcgatggttgattgctcgatagctgagtatcaggctacaggaccggtttatttgccaggaggtgttttcccaaactatcggcccttggtcactaataatcagccagctgttcagccaattcctcacagtgcaccatcggctcaaccgacagcaccagtctcggctcctgcaccggctgcaccatcatcggcaccaggtcaactaattaatccttggttgttgcctactgttgacacaatctagcaacaaccgattcagcagatgccaccaagacagcaggttgttcagccgattcagcatcaaggtttggtgaatgcatcggctgggttcggaacacctgacaattagctaagacagcacgctgcgaatcaagttgtcccagagcatttggttcataatgtgcaaccagataaaatggtggtacctcaagttattcccgaacatttggtgcgtaatatacaactaaactttcagaattatcaagggggcaatttgaattatcagtatcagcctccatcaccacaagttcaatatcagtaaggggggtcgactcagccccagttcgctcctcaatacaatcaattcgagccaatgccacaacaagcgcagggagtgcctcagcaaagaccatgggccgatatgattgcagatgtgatgagagagcagtttgggctcaagccgaaggatgctggaaacctgtatcggcatccgtacgctgagtggtttgagagggttccattgcctaaccgattcaaggtttcatatttttcaaaattctcaggacaggacagcgtttcaacctatgagcacaaggtaaccttgcatgagcagatgtttgcagaagccaggaaaagctttaagaaggtcaatcatgtatgtccctatatgtatggatctgatgatgatgatgatgatgatgattctgagatagcagcagccgaatgggttagaagcaagaaggttataccatgccaatgggtgaagagttctggaaaagaagaagggcacacaatcccatcggctgaggagttaggcaagaggaggtattgcaagtggcataattctgggtctcattctaccaatgattgtaatgtctttagatagcagatccaagcagctattaaaggaggcaaaatcaagtttgatgactccaagaggccgatgaagatcgatttcgttttgggacgcgacagcaggagaggcgttatgaagaagatgatggcggttttggtcctcattggggttgtgagttctttagattttgctggaatgaagaacaagcagtctttgagaaactggaagggacagagaatcggcatcttaagccattgtatgtaaacggctatgtcaatgggaagcctatgtctaaaatgatggtcgatggtggggctgcagtgaatttgatgccttatgctacatttaggaagctaggcaggaatgctgaggatctcatcaagacaaacatggtgctcaaagactatggtggcaatccatcagaaaccaaaggagttttgaatgtagagctaacggtcagcagcaagactatccctacaacattttttgttatcgatgggaagggttcctacagcttgttgcttggaagggattggattgatgccaattgttgtattccttcaaccatgcatcaatgcttgattcaatggcaaggcgacaagattgaaatcgtgccagccgacaggtcagtcaacgttgccagtgccgatttagctctttgggagatggatggtttcgattgcttatctggaaaagtttgggatggagaatttctaaaaatggagagcccaagttattattttgagggcatcgtggagggttcaaacgtctataacaaggatacagtagatcatctcgatgacaagtaagaacagggtttcttgttggccgatgatttggaagaaattgacataggtccaggtgatcgaccaaggccgacatttatcagtaagaacttatctccagaatttagaaccaagttgacagagctcttaaaggaattcaaagattgctttgcttgggagtattataagatgccaggactcagccgatcgattgttgaacatcggctactgctggagctacatatcaacgggctatgaattatatataccatgatttgatcggctggttggttgaggtctacattgacgatgtggttgttaagtctaaagagatagaggac

SEQ ID NO: 1095 - DNA, 1663 bp, Oryza sativa
  Clone ID: PAT_MRT4530_100994C.1
gttaaggcattatctattgtccaacgaatgcactgtcatatgcaaagctaatgtcgttaagtacatgttatcagctctaattttgaatggaagggttggaaagtggatattttccttaacaaaatttgatcttcggtatgagtcaccgaaggcaaccaaggggcaggctatagccgattttattgttgatcattgtgatgattcaatcggctcggttgaggttgtgccgtggactttgttctttgatggatcagtatgcactcatggttgtggtatcggcttaattataatttctcctcggggggcatgttttgagtttgcctatactattaaaccttatgcaactaacaaccaagctgagcatgaggcagttctcaaagggttgcaattactcaaggaagttgaagccgatgctattgagattatgggggattctttgctagtgatcagtcaattggcaggagagtatgagtgcaaaaatgatacattaatggtttataatgagaagtgccgagagctgatgaaagagttttggctggtgactttgaagcatgtatctcgagagcagaatattgaagctaatgatttgacccaaggggcgtcgggatataaaccgataatcaaagacatcaaaattgaggttgcagcgttaacagctgatgattggagatatgatgtgcatcaatatttacagaatccatctcaatcggcttcccggaaattgcgatataaagcgttgaagtatactttattggatgatgagctctattatcagacgattgatggggtgttgcttaagtgtttaagtgccgatcaagccaaggttgcaatcggttggggaattgatatgatcggcatgattaatccatcatcaagcaaagggcataagtttatattggtggcaactgattattttaccaagtgggtagaagcgattcctttgaagaaggttgattctggggatgctatacaatttgttcaagagcatataatctatcgatttggtattcctcaaaccattacaaccgatcaagattcaatcttcgtattcgatgagtttgttcaatttgccgatagcatgggtatcaaactgttgaattcttcaccatattatgcacaagctaatgggcaagccgaggcatctaacaagagtttgatcaaattgattaagagaaagatttctgattttcctcggcagtggcatactcgattggccaaagcattttggtcttatcggatggcttgtcatggatcgatccaagtccctccttataagcttgtttatggacatgaggctgttttaccatgggaagttagaatcggctcaagaagaacagagttgcaaagtgatttgacagccgatgaatattataatctcatggccgatgatagggaagacttggttcagtctagattgagagcccttgcaaaggttaccaaggataaggaacgagttgcttggcattacaacaagaaagtggtgcccaagactttttcggaaggtgaacttatgtggaagttgattttgccgattgggactcgggataacgaattcggcaagtggtcaccaaattgggaaggaccgttccaaatctataaggttgtatctaagggagcttacatgttgcaaggactcgatggagaagttatggacgagcgctaa

SEQ ID NO: 1096 - DNA, 261 bp, Oryza sativa
  Clone ID: PAT_MRT4530_100995C.1
atggaggtggagtttgtggaggaagaggaggacggcgtggtgggtggcggcgtcagggtggggaaagataaggtgaaggagatggtaatgagcggcagcagcgacgggtgggaggccgtcggatctacagcatgggcggcagcgcacgtaccggtggtggtcgtcctcgccaatccggtcaaaagatggggtcgcacgcatcgcatcgcatgcaacctgcagcggcagaagcgcagcatctgcgtgcgtgcgtgcgtgtga

SEQ ID NO: 1097 - DNA, 711 bp, Oryza sativa
  Clone ID: PAT_MRT4530_100996C.1
atggacatctctagggcaaatgagggctacacgagctgcggctcggtagtcgagatgtcatgccacagggccggtgtcctgctgctaggggctcaaccttggttacctttctcgggaatcccggccgtagccagggttgggtcggtactcttgtttatggctaggatgggttgggaactatgtcacgtcttgcgtccgtatgccgtggtgtgggtttctagtatagttcctgttatcaagaagaacagcaaggtgagggtgtgcattgacttcagagatttacataaagctaccccaaaggacgagtatccaatgccagtagctgatcagctggttgatgctgcctcaggacacaagattttaagttttatcgatgagatagaagaccacatagctgatttgaggaaggtttttgagagaaccaggaaatatggcctgaagatgaacccgacaaaatgtgcttttggcgtatcagctggccagttcttgaggtttcttgttcatgagagggggatcgaggtaactcaaaggagtgttaatgcaatcaagaagattcagcctccggagaacaagacagagttacaggagatgatcggcaagataaattttgttaggaggtttatttctaatttatctggacggttagagccttttacaccattattaatattgaaagccgatcaaaagtttacttggagggcagagcaatag

SEQ ID NO: 1098 - DNA, 2850 bp, Oryza sativa
  Clone ID: PAT_MRT4530_100997C.1
atgccgcaacaagcacagggagcgcctcagcaacgaccatgggccgatatgattgcagatgtgatgagagaacagtttgggcttaagccgaaggatgctggaaacttgtatcagcatccataccctgagtgccgattcaaggttccagatttttcgaattgggccgatttggagaagcattttcatagctatttttatagtggggttcatgagattaaattatccgatttaacagcaattagacaaaggcatgatgagcctgtgcaggactacattcagaggttcagaaagatgagaaataagtgttacagcttgagcttgaataatgcccagttagccgatttggcttttcagggtatggtagctccgatcagggagaaattctcatcccaggactttgatagtttgtcacatcttgcacagaagttgaccttgcatgaacagaggtttgcagaggccaggaagaactttaaaaaggtcaatcatgtctgtccgtacatatacgggtctgatgatgatgatgatgatgatgatgattccgaggtagcagcagccgaatgggttagaagcaagaaggttataccataccaatgggtgaagagttctggaaaagaagagaggtatgactttgatatcaccaaggctgataagatctttgatttactacttcgggagaaacagattcaacttcctactggttatacaatcccatcggctgaggaattaggcaagacaaggtattgcaagtggcataattctgggtctcattctaccaatgattgtaaagtcttcagacagcagatccaggcggctattgagggaggcaagatcaagtttgatgactccaaaaggccgatgaaggtcgatggcaatccttttcctgtcaacatggtacacacagctggtcgatcaaccgatggaggaagaactagaggttttcaggaggttgagcaagagagcaaccatcggctgaagaaaacaaagccgaagcaggaatggcgcgttaagaatcaggttcctacagctgatgaagccacagctgatgaaacaaagagattggctaaaggaaagagtgttgtgactgcatcggttaacatggctttcacactacctgcggaatttggaatcaagcaagccgatgttgatgaagtggaggaggaatcggctaagttgattttatcaccagaacaagcagtctttgagaaaccagaagggacagagaatcggcatcttaagccattgtatgtaaatggttttgtcaatgggaagccgatgtctaagatgatggtcgatggtggggctgcggtgaatttaatgccttatgctacatttaggaagcagggtagaaatgctgaggttctcatcaagacaaacatggtgctcaaagattttggtggcactccatcagagaccaaaggagttttgaatgtagagctgacagttggcagcaagactatccctacaacattttttgtcatcgatgggaagggttcctatagcttgttgcttggaagggattggattcatgccaattgttgtattccttcaaccatggattatagccgatcgattgtcgaacatcggctacctatcaaactaggggttagaccacaccaacagcctccgagaagatgcaaagcagatatgctcgaacctgtcaaggctgagattaaacgtttgtatgatgctggttttattcgtccttgttgttatgctgaatgggtttctagcatagctcctgttatcaagaaaaacggcaaagtcagggtgtgcatcgatttcagagatttgaataaagctaccccaaaggacgaatatccaatgccggtagccgatcagccggttgatgctgcttcaggatataagatattaagtttcatggatgttgaagtttacattgatgatgtggttgttaagtctaaagagatagaggaccacatagccgatttcaggaaggtttttgagaggactcggaaatacggcctgaagatgaacccaacgaagtttatttctaacttgtctggaaggttagagccttttacaccattgttaagattgaaagccgatcaaaagtttacttggggggcagagcaacagaaggctttggatagtattaaggaatatcttatctctcctccagtgttgattcctccacaaaaggggataccttttcgattatatctatcggccgccgatgtcgttaagtatatgttatctgctccaattttaaaagggagggttggaaagtggatattctccttaacagaattcgatcttcagtatgagtcaccgaaggcaattaagaggcaagctatagccgattttactgttgatcatcatgatgattcaatcggctcgattgaggttgtgccatggactttgttctttgatggatcagtatgcactcatggttgtggtatcggcttggttataatttctcctcggggggcatgttttgagtttgcctatactattaaaccctatgcgactaacaatcaggctgagtatgaggcagttctcaaagtgttgcaattactcaagaaagttgaagccgatgctattgagattatgggggattctttgctggtgatcagtcagttggtaggagaatatgagtgcaaaaaagatacattggtagtttacaatgagaagtgccgagagttgatgaaggaatttcggctggtgactttgaggcatgtatctcgagagcagaatattgaagctaatgatttggcccaaggggcgtcgggatataagccgatgatcaaagatgtcaaggttgaagtttgtcacgcccagaaattcacaagtaatttccgaactaatttgtgcattaaaaccctcgtctag

SEQ ID NO: 1099 - DNA, 515 bp, Oryza sativa
  Clone ID: PAT_MRT4530_100998C.1
gtcatacccgctcctcctcacttgtccgcttccccctccactccactccactccagcacaagcgagtgactctctcactgagcgagtgacgcagcgccaccaccaccagagcagagcccagagccagacggttggcgctcgcacttaactccgccacctccacctccccacgcccgcgccgccgggcgcatgggggaccaccaccaccaccaccacccccgcaggggctcacgccacgccgccgccggggacctgcgccccccggagccgccgctcgacccgctcgagttcctctcccgctcttggagcgcctccgcctccgccctcgacgccccgcgcccgcccccgcccgcgccctcgccctccgcggtgctcggtatcggccccatcgccgaggacgcctcctccgccgccaccgacgcatgcgaggtggtcgacgacgggtccgccttcgccgcggcggggagctccttctacttcgcctccgctgccacctcgcagctcatcatggagcg

SEQ ID NO: 1100 - DNA, 824 bp, Oryza sativa
  unsure (1)..(824): unsure at all n locations
  Clone ID: PAT_MRT4530_100999C.1
tgtttatccaagtgatcgcgtgtgtgagggttttgccacaacaaggatcagaaggttttaacgaggtacgccggccatcacccatcgggttggctgcataggctgacacgcagcctcggccgctgccgattggagaggatctcggtcacaggacaggatcggtgatgttgtcgagggcttgcagttgcaatagcctggctgacttcaatgtcaacgccagcacgaccttatcgatgagctctacaaacttggcctataagcctgatctgcctgggaagacaacgaggtgatggaaaacaacaccgnctgccagatgcagtatgttagcagcgtgtatttgtttgacgaattgagtttgcagcgcatatgtgaaggatggttattgtaatgtgtgaaggctagggatcatggtcacttctgtacatgccacaacacgatcattttcatgggaacacattgggcaaggacttggtctttgcttcttaagggaaccgatgaagaaatagttaagaactattgcaaagtgttggagaagcatgtggtggaattcttctccgtgtatggctggaaccttagaagaagattggaagcctagtcttttcttcgtttgttgttcttaaaacctttgtttgtgctgtcatctcttatgtaatgggagaggtcagttgatgcattttgtacccttttattagggagagtcttatgtactcgtgttcggattttggctgtgtataccccacaaaggtgtagaggccgggtttgataatcctttatctaaaaaatgcaagctcatgtggttaattcattctaaaaaaaaaaaaaaa

SEQ ID NO: 1101 - DNA, 1488 bp, Oryza sativa
  Clone ID: PAT_MRT4530_10099C.1
atggagcatggcggaaggagagagatgtgtggagctcgatcgatcggcgacctcccactacttacacggcgacatggcgacgccaccggcgaggcctcgtcggtaaccgtcatgaagcgcctctccatccgcggcctcctcgccggggctcgccggacccgccacgccgttgccgccaaggccaccacgtccgtcccggctctcgtcgcgctcctcttcttcttcgccgccgccaccttctcggtcttctccctcggctccttccgttggcctggcgccgccgatgatggcggtgcggctgcctgcgacgccgcgctggcgcgggggcggggcgagtggatgcgcgacgccggcgcggcgccgtactacaccaacgcgacgtgcgggttcatccagaactaccagaactgcatgaagcacgggaggcccagcatggagttcttgcggtggcggtggcgtcccggtgacggcggcgaggggtgcgagccgctcgggccgttcgacgcggcgcggttcttccggctcgtgcgcgggaggtcgatgctgttcgtcggcgactcgctggcgagcagccacgtgacgtccctcgtgtgcgcgctgtcgcaggtggaggcgccggcgaggtcgcgcgacgcggcggcggggttcgagcactggcgcttcccggcgcacggtttcgccgtcgcctacttctggacgccgttccaggtccggtggcgcctgacgcgcggcccgccggagggcggcggtccggaacggcagggcgaggtgttcgccggcccgagcgacttccacctcgacgagcccgacgagcggtggacgtccgccgccaagagccacgactacgtcgtcctctccgcgtcgcactggttcgcgcgccccgccgtgtactaccagcacggccgcgtcgtcggctgccacgactgcggcgacagcaacgccaccgccacggccattgtcaagcagccagagcacgcgcagcgggcggcgttccgcgccgtgctcggggcgctggcgcggctggacgggttcaacggcacggcgatcctgcgcacggtggcgccgacgcactacgagaacggcgggtggttcgacggcggggagtgcaccgcgacgcggccggccagcgagagcgaggacggggcggcgccggagatggcgcgacggaggcggagttctaccgggcgcaggtcgaggagttctcccggcggcggcggcggcggcggcgaggaacggcggcaagcgggcgcggctgaggctgatggacgtgacgcggatgatgctgctccggccggacgggcacccggaccggcacgggcatggcggcggcgagcacgacggattcgagatcgactgcctgcactggtgcttgcccggagcgatcgacgtgtggaacgacctgctgcttcagataatcgcatcctcatgacaacgctacctgacgtgacactcagcaaagcacagacaaatatggagcaatgtagatga

SEQ ID NO: 1102 - DNA, 353 bp, Oryza sativa
  Clone ID: PAT_MRT4530_1009C.1
cccacgcgtccgcccacgcgtccgcccacgcgtccgcccacgcgtccgcccacgcgtccgcccacgcgtgcgaaaaaaaaaaaaaaaaaaaaaaaaaaaaaaaaaaaaaaaaaaaaaaaaaaaaaaaaaaaaaaaaaaaaaaaaaaaaaaaaaaaaaaaaaaaaaaagaaaaaaaaaaaaaaaaatagtctggcagcacatataatttaaagccagctggcgtatttaatgaagaggccggtaaagatagtcgtggcaacaaaaaaagcagtctgaatggagaatgttacgcgctctgaagcgaagaattaagcgcggagggtcgtggaggtacgcgcaaaaaaaacgataca

SEQ ID NO: 1103 - DNA, 263 bp, Oryza sativa
  unsure (1)..(263): unsure at all n locations
  Clone ID: PAT_MRT4530_100C.1
tctctctctccggggctctctgggcaggggancaaagcgncacgtcggcggganaggggagcaaggcngcanggcgaggggagcaaggcgtcggcggcggcngcctccgatctcccccaccctcttcgctctgggctgangccgccgtgctcnccccgtcatcttcgctctgcccaangcggcggcggggggagcaagacgtcggcggcggcngcctccgatctctcccgccctcttcgctctnggctgaggccgccgtgcta

SEQ ID NO: 1104 - DNA, 258 bp, Oryza sativa
  Clone ID: PAT_MRT4530_101000C.1
gcccccacaaattcaaggacccataccattcaggattaacatccataacaaaaaaagcccaagatctaaataaaagttttttaaaggataaaaaaactttccccttaaatttaaaaaacccttttccctcaaactaaacttcaaaggttgtagtacctaggcggggaggtggacggccccctcggaggtttttatttttttttgtggaaccttgaaaatgagcatggcctttaataccaagggcctttgatgaggaag

SEQ ID NO: 1105 - DNA, 437 bp, Oryza sativa
  Clone ID: PAT_MRT4530_101001C.1
gaaggtaactgttacaccacgtgcatgttcatgcactagcggtacatatgtacaacatgggaagggactttcaccccggctgcattagcctgggacacactgcatgaacgcacacatgcacaaaccctaccggcaggcacaacatcccgcaccggtttcaagattctggggttgacctttgtgcaagctgagtgtaggagcagcattgcatgcaaccacaacacgcagagctcacaacacctcagcatttctgaacgaaagggatgcaacagcagaacctcaagcacagctgctactgctgctgctgtgcaaaggctgcagcacatgcacgcatcatgcacacaacaacaactcatggttgtcaggaaaatgtacacgcacaacccacccttcaaggggcaccaaccgacacttccacaccatgcaaacttcaaact

SEQ ID NO: 1106 - DNA, 940 bp, Oryza sativa
  unsure (1)..(940): unsure at all n locations
  Clone ID: PAT_MRT4530_101002C.1
attctgcttgcctccttctgcaggccccccctttttttttttttttttttttttttttttttgcgtgcaacctttttttttttgacgattaagaaggccttgatttcttattggcctgaatcagttgcaattaacaatgataacagataactgaaattgaaacgcccaatcacacttcagacttaaaacacgttgcaaatgcataatggtagaataagaaacgtcatcaacccagaatgaataatatcagttctatgggtcgttccaactttcaaacgatagcatacgaaccacttaaaaagctaaggacgcattagaccattgaggcaatccagcacagggacatgctatgtacacaggaggttgaccatgacacctggccatccatgtttatttacagcagcagcaacagttgatgaattacgcagagccgaatgtgttctcgccactgtaagtcatgtagaggaagccgtcctcatccttgttctcttcgtagattgcagacatcaaagaagcagttggcggcaatgtgttcttcacaaagacaaagatggccttttctgggctaagcttaatcctcttccgaaccacatagacaaactggccaacagtaagatcagcagggacaaggtacttctttttgtcaatttctggaacatcggtcttgtcagccttctcaacgatcaccggaattctgtctgagtacttctcacggatcctggcagattctgcttgcctcctttccagtgggtgctcgagcttgaaggaagtcctggccatctccaaccgatcgaaggggcgctgccgcggaatcgatagatcgaggcggggggcgaatcgatttggggggcgagaagtcgatcggcggaagcaaccggaaggaaggaaggaagtcgcggtagggttttctttccggttttccggccgccggcggctcgnn

SEQ ID NO: 1107 - DNA, 225 bp, Oryza sativa
  Clone ID: PAT_MRT4530_101003C.1
atggctgtggtggccatggtcgtggtgaccggctgcatgctggcggcgggggtggccgtcgtcaacggcacgcttcctatccagaaccggtcagaccggccatgcaatgtcggtaaggccaccctatctacccggtcggaccggccatacaatgccagtcagaccgccggttaccaccagtcagaccggtcgtgcaatgccggtcagaccacccctggtctgtga

SEQ ID NO: 1108 - DNA, 374 bp, Oryza sativa
  Clone ID: PAT_MRT4530_101004C.1
ggtgggggggttttttttttttttttttatgatggtgggttttgatcactatctgggggcgtgcaacacagcaacggtgtgatcctactagctttgaggcaagccagctaagcctagtactggccggcggaaaaaataaaaaataagggttttgcccggggcatctaccgcagctgcccctcttcctgcctctccctgggcagccttccgcgggtcatccccggctgctgctgttgctcgccgttgttgccctccttcgtccacccctcgccgtagtccccctgctccctcgaccccccctctctcccgttttgctcctacgacttcttcttccttttttttttcctgggcttcggcttgctctcctgttggct

SEQ ID NO: 1109 - DNA, 387 bp, Oryza sativa
  Clone ID: PAT_MRT4530_101005C.1
atgggcggacgtgaggtgattcctagcgtagttttgtttgactactgctttgtgaaactgatgtcgtggaaaggattcgattgcccttgctgggtcaccctcgactaccgccaaggccacgccctccttgacgagttccccttcagcgccgacttcaccgtgtggcacctcaggacgggacgacggcgccggctcccccgtccgaacctcccctacttcaggtcctacgccaccgcggtgctctgctccgccgtcggatgtaaccacctcgactgccgccgtagcggccccttcctcgtcgtcaaaaccacccatatatactgccctgggacctttcgcccgccgcccgccggtcaccctgagttgactgaagaagagaagatatag

SEQ ID NO: 1110 - DNA, 1437 bp, Oryza sativa
  Clone ID: PAT_MRT4530_101006C.1
atggagaccatgtcatacccttgctcccttctcattcccttctccacacaatttgaagagatcagtagcagtagcctcctcctatggtctcctcaagcagaagaaaatcctcatgagaatgccaatatgtatgaatttgatgctgatcactctcatgatcagattcatcaagatcatcagttcttggacatgatggtcatccaagaatctgctaatgaatttgatggtgatcactctcatgatcagattcatcaagatcatgagttcttggaaacgatggtgatccaagaatctgctaatgaatttgatggtgatcactctcacgatcagattcatcaagatcatgagttcttggaaatgatggcaatccaagaatctgctaatgatttgctgcaactgcaagatgatttctctgtccccaatgctgatccattagcagctagctttgaatttgatgagagattagcagtggcagggcacgagaacggcaacgtggtggcaacccaggaggagagcgcaggtgaccttctcctcgccggcgccatggccgtggacgccggagacgctgtccacgcctcggcgatcatgtcgaggcttgacgacctcctcgccgacatcgccggcagaagaagctgtgaagcaacaagcccgggtgatcacctggcctactacttcgcccgaggcctcaagctccggatctccggtgcggccacgccggcgtcgtcgccgccgccgccggcggccaactggtcgtcgccggcgtaccggatgctgcaagagctgacgcctttcgtcaagttcgcccacttcaccgccaaccaggccatcctcgaagccacggcggatgacctcgacgtccacgtcgtcgacttcaacgtcggcgagggcgtccagtggtcgtcgctcatgtcagacctcgccgccgccggccgccaccgctgttccacctcacggacgctgaagcttctcctcctcggcacgatcacaatccttcaaccaaagctggtgatcctgatcgaggacgagctatcccgaatcagcaagaacccaccatcaccgtccctcgccgcgccgccgccgttcccggagttcttctccgacgcggtggcccacttcacggcggtgatggagtcaacggcgagctgcctcgtgagctacgacgacgaggcgtggctgagcctgaggcgcgtgggggaggaggtggtggggcccagggtggaggacgctgtggggaggtatgggtcactggcaggtggggcccagatgatggaagggctcagggctcgtgaggtgagcggcttcagcgttgctcaggggaagatgttggctgggctcttcggtggagggtttggggttgtgcatcaggagaaagggaggctcgctctctgctggaagtccaggcctttgatctcagtgtctctttggtgtcccaagtag

SEQ ID NO: 1111 - DNA, 306 bp, Oryza sativa
  Clone ID: PAT_MRT4530_101007C.1
atggaacctatagccacagtaaagaagatgccagatgaaaccatacctgtgaatgatcttcaccccaaagcaagctacggcaacatggtatttttgtgtgtcagcccctcggcgccggctcgaggtgaggcagcggaggtgcggatcaacgcggggggtgacggaggtgcggatcgacgtggcaacgatggatcgacagggcagcggtggcagatcgacgcggcggtgctcaaggcggcgaagctttccgatcctagtggagctggtgcaagtattcgcctcgggcagggtgagaccatgctctag

SEQ ID NO: 1112 - DNA, 389 bp, Oryza sativa
  Clone ID: PAT_MRT4530_101008C.1
gccggtgacccgcccgtcgccgcggccggctgccacgaccgaccagatggccgccgcgccgtcgaggtgcctcctcgtcaccggcccgccggcgaggtgagggagagtggggaaagggtcgggttcgaggacgtaacgctcgatgtgcgaaccgaaccgctcgactccttcaaggttttcagccgttagtctgatagatggtctactgttgagaggtacaaagtttatatagcttttctggaggctttatcattgccatagctgtaggtcaaggacgacactgatcttttcattattgatgaaatggttaaaatggatctgtttaatacgaaattgttaactgctttaatgaaatttattgaatggaacaatgcattacttgtcacaat

SEQ ID NO: 1113 - DNA, 882 bp, Oryza sativa
  Clone ID: PAT_MRT4530_101009C.1
atggccgcgcaggtgaccaggctgggcggcggcggcggcggcggcgtggcggtcggcgtggcgctgcaccacgccgtggcggacggccgctcggtctggaggttcatcgaggcctgggcggcgtgctgccgcggcgacgacgcgtggagcgccgcgccggcgccggcgttcgaccgcgccgccgtcgcgctccctgacggcgaggagctcgccagggacgtgctccggaagtacgtcccaaacctgccagtggcaacggtacccaagttcctcgtcaagggccgcctgcagctctcccgccggacgttcaccgtcgccgccgcgcaaatgctccggctgaagcagcgcatcgtcgtcgccggcgccggcggcctcacgccgccgtccggcttcgtggcgctcgcggcgctggcgtgggtgtacctcttttttttcatcgactgccgcggccgccgcgccgcgttcgacccgccggtgggggagggcttcttcggcacgtgcatctccggctgcctcgccacggccaccgcgcgggacttgctcggcggcggcgacggcgggctggtcgccgccgccaggcccgtgcaggaggaggtgcggcgagcggcggaggacccgctcgccggctgggagtggatgtcgctggtggggcggatcgcgctgagccggctggtgaacatgtcggggtcgacgaggttcccggcgtacgaggcggcggacttcgggtggggctcgccgagccggacggagttggtgacgatgaaccatggcgggcaggtggtgctcgtcgccgccaagggcggcggtgtgcaggcgtcggtgtcgatgaagccggagcacatggacaagttcaagtcggattttgagagctacttagaatga

SEQ ID NO: 1114 - DNA, 1626 bp, Oryza sativa
  Clone ID: PAT_MRT4530_10100C.1
atggtggtgtcgcgggcgcgggtgcaggacccggcgaccggcgagcaccgcgacgtgatgtacaagggcatggcgtcggagctgttcgtgccgtacatggacccgacggaggcgtggtacttcgagacggacatggacgccggcgagtacggcttcgggctgcaggccatgccgctcgtcccgctcaacgactgcccgcgccacgcccgctacctcgacgccgtcttcgtcgccgccgacggccgcccctacgtgcgcgagaacatgatctgcgtcttcgagcgctacgccggcgacatcgcgtggcgacactccgagagccccatcaccggcatggacataagggagtcgcggccgaaggtgacgctggtggcgcgcatggcggcgtcggtggccaactacgactatatcgtcgactgggagttccagatggacggcctcgttcgcatcaaggttgggctaagtgggatcctcatggtgaagggcacccagtactcccacatgaaccaggtccatcaaaatgacaatatgtacggcacccttctgtctgagaacgttattggcgtcatccatgaccactttgtcactttccggctcgacatggacattgacggcgccgacaactccttcgtcaaggtggcgatggcacgacagaacaccggcgccggcgaatcccctcgtaagagctacctgaaggctacccgacatgtcgcaaggacggagaaagatgcccaggtccgcctgaagctatatgagccatccgagttccacattgtcaaccccatgaagaagacacgagttgggaaccctgttggttataaggttgtcccagccggtactgcagctagcctgttggatccagaggacccacctcagaagaggggtgcattcacaaataatcagatttgggtgacaccctacaacaaaacagaggaatgggctggtggtctatttgtctaccagagcaaaggggaggacacacttgcaacttggtccgaaagggaccgtccgatcgagaacaaggacctggtgctgtggtacacgctggggtttcaccatgtcccgtgccaggaggacttccccatcatgcccacggtgtcgtccagcttcgaccttaagccagtgaacttctttgagagcaaccccatcctagggcagcgtccgacccaggagaacgacctgccggtgtgtgccgccgctgccacgacctcttgagacgacagcggatcaccgacatgtgtgcgtgcatggtcgatgcttcggtgtatcgatctactgatatggattgttcatagtgaaagaatgtatcggtacatctacggatttggagctagccatggctggctatctatgttgctctatatatgtatgagcggatgtatgtgcactgcagtggtatgaacataattgagaacctgaaaggagcaggcttcaaggctgcaaaaaaaaataccaaaaaaaaaagagaaagaaaaaagcgctgagcagcggccgaaggtggcggttgcttgggttagaggtagaatggtggttccggcggtggagggggaaaatagagtggagaccggggtgcggcgtggcgcggcaaagcaaacggcggtgacggcacggcgcgtcgacgaataa

SEQ ID NO: 1115 - DNA, 612 bp, Oryza sativa
  Clone ID: PAT_MRT4530_101010C.1
atgacgacggcgcggcgcggctcggggcacaaggcggcgcggcacgtggcagcggcgcggggcgcgaggcagcgggcgcgcggcgcgaggcgacgggacggcgcgcggcgcggcagcggcacggctcgaggcggcgatggaacgcgcacgcggcgacgggatggcgacggcgacggcgcggcagtggtgacggcggcgcggcggcaggcgacgatggcgacggcgcgcggcggctgggggcgcgaggcggcggcgcgtggtgacggtggcgacagagagaggggggaaaaggaggagctggggtgttacaatcggagtgtctgcattcttccaatggagttctggagaaaaagccggaattgtcggccttcttctctcgctttgtacctcggcggatgcttcctttatcaaacggaaaaacaaaagataactggggctaagcctggacttgaactgcagcgggaacaccactccacaggcaccctcgacagcacggacgaagcctactcctcggagaacccgccatcggacacatactcgcactctggggttgggaaaaatagagcaagactgagtactacccactgtactcagcaagtcatactggaatag

SEQ ID NO: 1116 - DNA, 1014 bp, Oryza sativa
  Clone ID: PAT_MRT4530_101011C.1
acaactgcttctaccattggtgagggtcgccgctggaggtagagattgaagagtggcgtgctccctccgtcgcgctcacaagtctggctggcgactatagtgtatcaatgcatgacgacaatgaccaacggcggggcacggctcgatgaacagaattaaacaaataaaatttctattgaaaatatgtcgagtgaatttaacattggtcattcaaatttgtcctcattgcacctgttgacggctgctgacctgatgttccaagtggaatttggataaaattcaaagcaatttggtaagcatataattaagttaaacaatcatatataactaaacattaatatacagctaaacaatcgtaatggccgtatatgtagaaaaaatgaggtcttgaggttcagaaattatctccaatcctagacagctactattatgttcctctgtaaactattcagcttgaactgtacatgttgtcatatagtgaagcatttgagatctcccaaacctatgacaaatcaggagtatgggatacagggagaaaaagcattgagctggaagaagcaaccatcagcaatacaggttgagatctattagaagtatatgacaaatcgctataaaacagaatacaaaaaatacattgagcagtaaaaaacaatttgagaagcaaaccatcaaaattttgcgagatcgagatgatatcaagatatatgagcagtacatacatgtgacatctgttctcatccaattagttagctgcaaaaccgatttgcaaatgaagcaaaatatggagtgtattgacctggccttgcagtaggtccggatgtagagcttactgcattgaccatggaagtggcctgaggggaggagccgattgacctgtggcagcgatggagtttgacggcggcgccggatggggacgacgtcggctccatccgcggccgatggggaagaccacggctgctagctgtggagtgcgcggcggcggtggcgatggcggtggaaggggccggtggtggc

SEQ ID NO: 1117 - DNA, 1513 bp, Oryza sativa
  Clone ID: PAT_MRT4530_101012C.1
caagctcttcgcaaaaactgcaccaatttttattttccttccaccaaccgagccgatcgcaggaagccgagcgagacgtctttccttcgtctcgccgccagccatggcgccaccaccatcggtcaccgtcattgaggacggccgcgtcgccgtgccgcctccgccgccgccagcttccggcgacgccgcgccgcctcctcaaacgacgctgttcaagctgaccgcgctcgacgcgcagtggatcccgctcccgctcatccagcgggtgctcgtgttcgacggcggcgaggggcgcataccgccgttcgaggacgtcgtcgccgccctccgcgcgtccctggcggagacggtggcgcggctactgcccctcgccggtaggatcgtccacctgccggagacgggggaggcggcgatcgactgctccgggcgcggcgtggccggcggcggcgtcaggttcgtcgtcgcggagtgcggcggcgccgacgcggcgcgcgtcgcccgggacgccgaccacgacgtggcgctgctggagcagctcgcgccggtgctcgacgccgacgcgctcccggcggagacgatggccgcgcaggtgaccaggctgggcggcggcggcggcggcggcgtggcggtcggcgtggcgctgcaccacgccgtggcggacggccgctcggtctggaggttcatcgaggcctgggcggcgtgctgccgcggcgacgacgcgtggagcgccgcgccggcgccggcgttcgaccgcgccgccgtcgcgctccctgacggcgaggagctcgccagggacgtgctccggaagtacgtcccaaacctgccagtggcaacggtacccaagttcctcgtcaagggccgcctgcagctctcccgccggacgttcaccgtcgccgccgcgcaaatgctccggctgaagcagcgcatcgtcgtcgccggcgccggcggcctcacgccgccgtccggcttcgtggcgctcgcggcgctggcgtgggtgtcgttcgtccggagcaagcacgcggcgggcgccatcgccgccggcgacgaggtgtacctcttcttcttcatcgactgccgcggccgccgcgccgcgttcgacccgccggtgggggagggcttcttcggcacgtgcatctccggctgcctcgccacggccaccgcgcgggacctgctcggcggcggcgacggcgggctggtcgccgccgccagggccgtgcaggaggaggtgcggcgagcggcggaggacccgctcgccggctgggagtggatgtcgctggtggggcggatcgcgctgagccggctggtgaacatgtcggggtcgacgaggttcccggcgtacgaggcggcggacttcgggtggggctcgccgagccggacggagttggtgacgatgaaccatggcgggcaggtggtgctcgtcgccgccaagggcggcggtgtgcaggcgtcggtgtcgatgaagccggagcacatggacaagttcaagtcggattttgagagctacttagaatga

SEQ ID NO: 1118 - DNA, 705 bp, Oryza sativa
  Clone ID: PAT_MRT4530_101013C.1
atggagccggaggaggaggaggaggaaccaaacatgtacaactcggaggccggggaggagaaccacgtcggcggcttctacgagtgcacgggcctccctcgcgacgcggatgggttcgtcgccgccgtccacgaggtgaacccggtgcagttcctcgccggcgtcttccgctacctgggcgaggacatggcgggcgagctgctccgctccgacgacgacgacgtgctgcactgcccgagcatcgccgcctcttcctcgccggaggagctcctcgcctgtgccgcccgcgcctacaccggccgcgaccgggagcgatgcggtggcagcgtcgtggagcacttgtacatgatctgctcctgcttctgcccgcacgcggcgacgacggcggctcatgtgtcggcgcccgtcgtcgccggcgctgatcacgtcccggccccgtgcgacgacaacggtgtcgacctggcttttacgcaggacgagttgaccgcggcggcggtgaccgtgggcgaagtggacgaggacgaggtggccgtggcggcggcggcggcgacagtggacgcggccgtagacgagatcgtcctgaatgcactgggattcaatgagtttgctcgcgacctgaaggagaccatcgaagcaaaggatcgtgaggacgcgttgcgcgcggagggctcgtcagtttctcccggcgttcgtccaccggtgtag

SEQ ID NO: 1119 - DNA, 344 bp, Oryza sativa
  Clone ID: PAT_MRT4530_101014C.1
ggtcgcaaaaacataaggatagacttttgtcatatagaaggattacgcacggtaacaaaacaacctgtgcatgatgtaatttaaaagtggcgtagcctgaacgggcataattacttatcaattaaagaaaaagaataaaaacaagaattgactccgctaatgaaagtataattataggaggatagagagcaaagaaagaggactacataaatcaaggagaacaaatgggaaaagactacctgacggttcatcagaaccaagccgactggagtggctgcttactatttacacaagatgatgccagatgaaggccaatgatacagctaatattaacaaatattatg

SEQ ID NO: 1120 - DNA, 527 bp, Oryza sativa
  Clone ID: PAT_MRT4530_101015C.1
ccgatgaagcaaaaagattggctaaagggaaaagtgttgtgattgtatcggttaacatggttttcacactacctgcagaatttggggccaagcaagccgatgttgatgaagttgaggtagcatcggctaggttggttttatcaccagaacaagcagtctttgagaagccagaaggagcagagaatcagcatcttaagccattgtatgtaaacggttatgtcaatgggaagccgatgtctaagatgatggtcgatggtggggccgtagtgaatttgatgccttatgccacatttaggaagctaggcaggaatgctgaggatctcatcaagacaaatatggtgctcaaagactttggtggcaatccatcagaaaccaaaggagttttaaatgtggagctgacagttgccgacaggttagttaacgttgccagtgctgatttagctctttgggtgatggatggccttgattgcttgtctggaaaggtttgggaaggagattttctaaaggtgtccgattgtgatatatag

SEQ ID NO: 1121 - DNA, 1286 bp, Oryza sativa
  Clone ID: PAT_MRT4530_101016C.1
tctttgagaaactggaagggacagagaatcggcatcttaagccattgtatgtaaacggctatgtcaatgggaagcctatgtctaaaatgatggtcgatggtggggctgcagtgaatttgatgccttatgctacatttaggaagctaggcaggaatgctgaggatctcatcaagacaaacatggtgctcaaagactatggtggcaatccatcagaaaccaaaggagttttgaatgtagagctaacggtcagcagcaagactatccctacaacattttttgttatcgatgggaagggttcctacagcttgttgcttggaagggattggattgatgccaattgttgtattccttcaaccatgcatcaatgcttgattcaatggcaaggcgacaagattgaaatcgtgccagccgacagccaattgaagatggagagcccaagttattattttgagggcatcgtggagggatacaatcagatcttcatggccgaagaagatatccatcagacagcttttaggtgtcatggtgcaatcggcttgtttgagtgggttgtaatgacttttggcttgaaaagtgctggagctacatatcaacgggctatgaattatatataccatgatttgatcggctggttggttgaggtctacattgacgatgtggttgttaagtctaaagagatagaggaccacatagccaatttgaggaagtttttcgagagaactaggaaatatggccaaaagatgaacccaacaaagtgtgctttcggtgtatcggctggccagtttttgggatttcttgttcatgagaggggaattgacataactcaaaggagtgttattgcaatcaagaaaattcagcctccagagaacaagacggagttacaggagatgatcggcaagataaatttcgctagaagatttatttctaatttgtctggaacattagagccttttatgccattgttaagattgaaagctgatcaaaagtttacttgggggctgacggagctcgtggctcctcaccgggagaccgcgcaggcccccctttgccagttcggccgggggcttagggttcgggccgctgagaagcaccggataaagggacgcgccgtgctgcactgcgtgcagcgtgacacgcttgaccagactgcaataaatgctgttaggaggagggcggacacctcaccctcgggcccgacgtccccgaaggtgccaggccacgtgggcgattgtgtctgcctcaagcctctagtcatgatactcccggtcccatatcaccgacagtag

SEQ ID NO: 1122 - DNA, 296 bp, Oryza sativa
  Clone ID: PAT_MRT4530_101017C.1
gcagtgcagctttaggtcgctggatctctgctgcaagaatggatatatgtttaagactgccagagattacacctgatcgatcgaattgatgcgggatgacgacgatgggtaaggggatcacttcggatgccattgcaggcgcggtagcgcttggaatggggtcgctggggggtggggactctggcactgggaccttctacacgcgccgttacgcttcggccgtggcgtacgggtccgtgggccagcgcgcgagggccgcggggggtggcgacggggcttggagcgggggggcgggg

SEQ ID NO: 1123 - DNA, 2044 bp, Oryza sativa
  Clone ID: PAT_MRT4530_101018C.1
cggaatggatttatcaggacgtgacactcagaagaacgacccggacatgcatggactcctgggtttctagtatagtttctgttatcaagaaaaacagcaaggttagggtgtgcattgatttcagggatttaaacaagctaccccaaaggatgagtatccaatgccagtagccaatcagctggttgatgctgcttcagggtacaagatattgagttttatggaggggattgagatagctcaaaggagtgttaatgcaatcaagaaatttcagcctctagagaataagacagagttgcaggacatgatcggcaggataaattttgttagaaggtttatttctaatttgtctggaaggttaaagccttttacaccattattaagattgaaagccgatcaaaagtttacttgggggacagagcaacagaaagctttggatagtattaaggaatatcttagctctcctccggttttaattcctccacagaagggaataccttttagattatatctattggccggtgagaaatcaatcgactcagtcttgattcaggagcttgaggggaagaaagagttgtattctatctaagtcatcggctcttggatgcggaaaccaaatattcccctgtggagaaactatgcttgtatttatatttttcttgtacaaggttaaggcattacctattgtccaacgaatgcactgtcatctgcaaagccgatgttgttaagtacatgttatctggtccaattttgaaaggaagggttgaaaagtggatattttccttaacagaatttgatcttcggtatgagtcaccgaaggcagtcaaggggcaagctatagccgattttattgttgttcatcgtgatgattcaatcggctcggttgaggttgtgccatggactttgttctttgacggatcagtatgcactcatggttgtggtatcggcttggttataatttctcctcggggggcaagttttgagtttgcttatactattaaaccttatgcaactaacactcaagctgagtatgaggcagttctcaaagggttgcagttactcaaggaagttgaagccgatgctatcgaaattatggaagattctttgctagtgatcagtcaattggcaggggagtatgagtgcaaaaattatacgttaatgatttataatgagaagtgccgagagctgatgaaggagtttcggatggtaaccttgaagcatggggcatcgggatataagccgatgatcaaagatgtcaaggttgagattgttgcattaacagccgatgattggagagtatttttggccgacaatgctggagggttgttttaaatattacaagggatgtcaagattgtcagaaatttggagcaattcagagggcaccggcatcggctatgaatcctatcattaaaccatggccatatagaggttggggaattgatatgatcggcatgattaatccaccatcgagcaaggggcataagtttatattggtggcaaccgattattttaccaagtgggaagaagcgattcctttgaagaaggttgattctagggatgctatacaatctgttcaagagcatataatctatcgatttggtattcctcaaaccattacaactgatcaagattcaatcttcgtgtccgatgagtttgttcagtttgccgatagcatgggtatcaaattgttgaattcttcacaatattatgcacaagctaatgggcaagccgaggcatctaacaaaagtttgatcaaattgattaagagaaagatttttgattatcctcggcagtggcatactcgattggccgaagcattgtggtcttatcggatggctagtcatgtttatggacatggggttgttttaccatgggaagttagaattggctcaaggagaacggagttgcaaaatgatttgacagccgatgaatattataatctcatggctgatgaaagggaagacttggttcaatctagattaagagcccttgcaaaggtaaagtggtgtccaagactttttcggaaggtgaacttgtgtggaagt

SEQ ID NO: 1124 - DNA, 237 bp, Oryza sativa
  Clone ID: PAT_MRT4530_101019C.1
atggattccaacagcttgccgacctttggcaaggcgcggagaatacttgccgacaagcgcctccattggcggcggccgtgctcacgtcggaagcccagaggggcggagaatgggtggagaggtgtggagtcgatcgcgcacaaagtgttcgaccgacgggcgatggaggagcggatgagctcggacaccgtcatcgccatggatgagctcaaactttggatacggctggggcggtag

SEQ ID NO: 1125 - DNA, 459 bp, Oryza sativa
  Clone ID: PAT_MRT4530_10101C.1
atgtcggtttggaaaccgaacttgggcggtcaagtcgcgagcaggcgctcggcgctcgcggccaaaacggcgacagaggcggatgacgccggcggggaagtgaaaaggaaaaaggaagggagaaaaggggcttgcccccttgccactttgggaaaaggaggagggagagagggcgataaggaggagccctgcctcctttccttggaagcgcgcacggggagaggcggggccgagtcgacgacgacggcgatgacggccgggcggtgtggagcggagcggcgacacggacggcaggcgcggacaggcgcggcagaggctgacggcggcggcgaccaggcggtcggccaccacgagcatgcccatgaggcaatgatctcaatgaaacctcatgactatcgactcatcattgtcaaatcagcttctgcgtctcagctcccagagatgaggctaacactataa

SEQ ID NO: 1126 - DNA, 339 bp, Oryza sativa
  unsure (1)..(339): unsure at all n locations
  Clone ID: PAT_MRT4530_101020C.1
atggcgcttccgtcgccgtcgccgcacggaatccccaccgccaacgaccaggcgccgccctccccgttatctggccaccacgcggtgtcctggcgccgcacccaccacgcctccaccgccggcatcctggaaccatcacccgcagcatcgacgccctccctgtcgtccgcccatcacaccttcattatggacgtcctggcgccgttgccgncgnaccgccgtcctggccacccgggggagctccgccgccacccacggaccagggagaaccccatcaccgtggcagcccctatctctggagagcacaagctgcagaacttgtgcatcacagtgttctaa

SEQ ID NO: 1127 - DNA, 4733 bp, Oryza sativa
  Clone ID: PAT_MRT4530_101021C.1
atgaaattgtctgatttaacaacgattaggcagaggcatgatgagcctgtgcaggactacattcagaggagatgaggaataagtgttacagcttgagcttgactgatgcccagttaaccgatttggctttttagggtatgatagctccgatcagggagaaattctcatcccaggactttgatattttgtcacgtcttgcacagaaggtaaccttgcatgaacaaaggtttgcagaagcccggaagaactttaaaaaggttaatcatgtctgtccctacatggatccgatgatgatgatgatgatgattctgaggtagcagcagccgagtgggttaggagtaagaaggttataccatgccaatgggtgaagagttctagaaaagaagagaggtatgacttcgacatcaccaaggctgataagatctttgatttgttactttgggaaaaacagattcaacttcctgctggtcatacaattccatcggctgaggagctaggcaagaggaggtattgcaagtggcataattctgggtctcattctaccaatgatggcaaagtcttcagacagcagatccaggcggctattgaaggaggcaaaatcaagtttgatgattccaagaagccgatgaaggttgatggccatccttttcctgtcaatacggtacatacagctggtcgaacagccgatggggggaaaactcggggttttcaagtgaacttggctaagattatcaacaagtatcagagaaaatatgattttgacgaaggtatgaggctgtcgtctattgaagactgtcctaggtgcagcaatgttacagaaatttcaaaccgatcgcataatagaggcaatccgctaaggcaagcaagggttcctgttcatcaaagattgggcccaatgaaccaagattgtgaccaagaggacaatgaaggcagaaagactcaatggtgtcctcctgcagaatttggggccaagcaagccgatgttgatgaagttgaggaagcatcagctaggttggttttatcaccagaacaagcagtctttgagaagccagaagggacagagaatcggcatcttaagccattgtatgtaaacggttaaatcaatgggaagccgatgtctaagatgatggtcgatggtggggccgcagtgaatttgatgccttatgccacatttaggaagctaggcaggaatgctgagaacctcatcaagacaaacatggttctcaaagatttcggtggcaattcgtcacaaactaaaggggttttaaatgtggagctgacagtcggcagtaaaaccatccctacaatatttttttgtcatcgatggaaagggttcctacagcttgttgcttggaagggattggattcatgctaattgttgtattccttcaaccatgcatcaatgcttgattcaatggcaaggcaacaagattgaaattgtaccagccgacagccgattgaatacggagagcccaagttattatattgagggcatcgtggagggttcaaacgtctacaccaaggacacagtagatgatctcgatgacaagcaaggaccgggtttcatgtcggccgatgatttggaggaaattgatataggtccaggtgatcgaccaaggccgacatttattgatagagcttttaaaggaatacagagattgctttgcttgggagtattatgggatgctaggactcagccgatcgattgtcgaacatcggttacctatcaaaccaagggttagaccgcaccagcagcctccgagaagatgcaaagccgatatgctcgaacctgttaaggctgagattaaacgtttatatgatgctggttttattcgtccttgccgatatgctgagtgggtttctagcatagttcctgttatcaagataaacggcaaagtaagggtgtgcattgatttcaatgatttaaacaaggctaccccaaaagatgaatatccaatgctagtagcctatcagctgattgatgctgcttcggggcagaagatattgagttttatggatggaaatgcaggatacaatcaaatctctatggccgaagaagatatccataagaccgcttttaggtgtcctggtgcaatcggcttatttgagtgggttgtaatgacttttggcttaaagagtgctggagctacatatcaaagagccatgaattatatataccatgatcttatcggctggttggttgaggtctatattgatgatgtggttgttaagtctaaggaaatagaggaccacatagctgatttaaggaaggtttttgagagaactaggaagtatggtttgaagatgaatccgacaaaatgtgctttcggtgtatcagctggccagtttttgggatttcttgttcatgagagggggattgagataactcagaggagtgttaatgcgatcaagaagattcaacctccagagaataagacggaattgcaggagatgatcggcaagataaattttgttagaagatttatctctaatttgtctgggagattagagccttttacgccattattgagattgaaagccgatcaaatgtttacttggggggcagagcagtagaaggctttagatagtattaaggaatatcttagctcttctccaattttgattcctccacagaaggggataccttttaggttatatctatcagccggtgagaagtcaatcggctcggttttgattcaggagcttgaaggaaaagaaagggttgtgttctatttaagtcgtcggctcttggatgcagaaacaagatattctcctgtggagaagttgtgcttgtgcttgtatttttcctgtacaaggttaaggcattatctactgtccaatgaatgtactgtaatatgcaaagccgatgtggttaagtacatgttatcggctccgattttaaaagggagggttggaaagtggatattttccttaacggaatttgatcttcggtacgagtcgccgaaggcgattaaggggcaggctatagccgattttattgttgatcatcgtgataattcaatcggctcggttgagattatgccctggactttgtttttcgatggatcggtgtgcactcatggttgtggtatcggcttggttataatttcccctcggggggcaagttttgagtttgcttatactattaaactatgcaactaacaatcaggctgagtatgaagcggttctcaaagggttgcaattactcaaggaagttgaagccgatgctgtggagattatgggtgattctttgctggtgatcagtcaattggcaggagagtatgagtgcaaaaatgatacattgattgtttataatgaaaaatgtcgagaattgatgaaagaattttggctggtgactttgaagcatgtatctcgaaaacagaatgttgaagctaatgatttggcccaaggggcatcgggttacaagccgatgatgaaggatgtcaaaatagaaattgccactataacaaccgatgattggaggtatgatgtgcatcattatctgcaagatccatcccaatcggcttctcagaaattgcgatataaggctttgaagtataccttgttggatgatgagctatattatcagacgattgatggggtgttgctctgaagtttgagtgccgatcaagctaaggtcgcaattggtgaggtacatgaaggaatttgtggcactcatcaatcggctcataagatgaagtggttgcttcggcgagcgggatatttttggccgacaatgctagaggattgtttcaagtattacaaaggatgtcaggattgtcaaaaatttggagcaattcaaagagcgccagcatcggctatgaatcctatcatcaaaccatggccatttagaggttggggaattgatatgatccgtatgattaatcctccatcgagcaagggacacaagtttatattggtggcaaccgattattttaccaagtgggtagatgcgattcctttgaagaaagttgattttggagatgctgtacaatttgttcaagagcgtataatctatcgatttggtattcctcaaaccattacaaccgatcaaggatcaatcttcgtgtccaatgagtttgttcagtttgccgataacatgggtatcaaattgttgaattcttcaccatattatgcacaagctaatgggcaagccgaggcatctaacaagagtttgatcaaattgattaagagaaagatttctgattatcctcggcagtggcatactcgattggccgaagcattgtggtcctatcggatggcttgtcatggttcgatccaagtctctccttataagtttgttcatggacatgaggctgttttaccatgggaagttagaatcggcataagaagaacggagttgcaaaatgatttgacagccaatgagtattataatctcatggctgatgaaagggaagacttggttcaatcaagattgagagccctttcaaaggttaccaaggataaggaacgtgttgctcggcattataacaagaaagtggtgcctaaatctttttctgaaggtgaacttgtttggaaattgattttgccgatagggactcaagataacaaattcggcaagtggtcgctgaattgggaaggaccgtttcaaatctataaagttgtgtctaagggagcttacatgttgcaaagacttgatggagaagtttatggaggagcactcaatggaaaatattttaagaaatattaccccaagtgtttgggttaatgca

SEQ ID NO: 1128 - DNA, 198 bp, Oryza sativa
  Clone ID: PAT_MRT4530_101022C.1
atgaccgacgtgactggtctgactccggtcatgtcgacagcagacagccacgattccacgtcgcatctgctcccggcgaaagtggaggagtacagtcatgttgggctgcggacagatcccgagctcacaactgcattacaaaagggaaacggaagccagggcttggaccaaacaacacaggcgcgacttgggaactag

SEQ ID NO: 1129 - DNA, 434 bp, Oryza sativa
  Clone ID: PAT_MRT4530_101023C.1
ttttatccctgatttctcgtctgtccagaacgtggccaatttaaaaattggtgggtggttcacacagccagtcttgtttgcgccgctctgctctcaacaattgcgtgattgtgctctagttcatcccgagacgcctcgtggcgataccgcgttgttctgcctgctgtcctggcgtggctgcctgaagcttctttgcatccacgcatccagtgcatgcagtcctccaacgcaatagtgcaatagtttttaaggactggtagagggtttgtgcggccgccgacaacagcctacaccagcaacagtacattacagccccccagtcgccacataggcaagacctacccagcatgtaggacctggaccccctggtgcagatattcaatgtctcttgagacgttggagccctccaccagcacccttgatttgcccttggc

SEQ ID NO: 1130 - DNA, 4773 bp, Oryza sativa
  Clone ID: PAT_MRT4530_101024C.1
ataaaggtgcagcagatggttctcaaggggttcaaggtgatggttctcaaggaacttaaggtgatggttctcagggatttcaatgtgagaatcttaaccatgatggcaacacggcacagctacagtttaacaacattcaagaatggattgactatgtcgcgcaacatgctttgatttatcaatctggagtgttagtcaacactttgtcaaacatggttgatggctcaatagcttaataccaggctacaggaccggtctatttgccaggaggtgttttcacgaactatcagcccttgatcactaataatcagccagctgtttagccaattcctcccaatgcaccatcggctcaaccgacagcacctgtatcagctcttgcacctgttgcaccatcatcggcaccaggtcaactaattaatcctcggttgttggtgggagagcagccacaacatagtggacaaaaatgtgaatcggctaatccaagaccaaggtttgatgaatgcatcggctaggtttagaacacctgacaatcagctaaggcagcacgctgcgaatcaagttgtccaagagcatttggttcataatgtgcaaccagatcaaacggtgaaacctcaagttattcccgaacatttggtgcgcaatgtacaaccaaacattcagaattatcaagggggcaatttaaattatcagtatcagcctccatcgccgcaagttcaatatcagcaaggaggatcggcttagcctcagttcgctcctcaatacaatcaattcgagcccgtgccacaacaatcacagggggtgcctcagcaacgaccatgggccgatatgattgcagatgtgatgagagagcagtttgggcttaagccgaaggatgctggaaacttgtatcggcatccataccctgagtggttttagagagttccattgcctaaccgattcaaggttccatatttttcaaaattctcaggtggggttcatgagatgaaactgtcggatttaacggcgagtaagcaaagacatgatgagcctgtgtaggactacattcaaagatttagagagatgaggaataaatgctacagcttgagtttaattgatgcctagttagccgatttggcttttcatggtatggtagctccgatcacggagaagttctcgtctcaagactttgatagtttgtcacatcttgcacagaaggtaaccctgcatgagcagaggtttgcagaagccaggaaaagcttttaaaaggtcaatcatgtctgtccctacatgtatgggtctgatgacgatgatgatgatgattttgaaatagcagcagccgaatgggttagaagtaagaaggttataccatgccaatgggtgaagaattctggaaaagaagagaggtatgactttgatgttaccaaggctgataagatctttgatttgctacttcgggagaaatagattgaacttcctgccggtcgctattgaagggggcaaaatcaagtttgatgactccaagaggccgatgaagaagaaatatgacaagcagcgggagaggcattatgaagaagacgatggtagctttaatcctcattggggttgtgagttctttagattttgctggaatgaaggtatgaggttgccgtctattgaagactgccctgggtgcagctatgttacagaaagttcaagccgatcgtataatagaggcaatcggctaaggcaaataagagttcctgttgatcaaagattgggtccagtgaaccaagatcgtggccaagaggacaatgaagacaggaagactcaatggtgtccttctggtatttttacaaagaatcagaagagaagggttcaaatgttgaggaacagggaacgctttcaggaggttgagcaagaaatcaaccattggctgaaggagacgaagccgaagcaggagtggcgcgttaagaatcaagttcctacagcagacgaagccacaaccgatgaagcaaaaagattggctaaagggaaaagtgtcgtgactgcatcggttaacatggtattcacgttaccttctgaatttggggtcaaacaagccaatgttgatgaagttgaggaagaatcagctaaattgattttatcatgagaacaagaagtctttaagaaaccagaagggacggagaatcggcatcttaagccattgtatgtaaatggctatatcaatgggaagccgatgtctaaaatgatggtcgatggtggggttgtggtgaatttgatgccttatgctacatttaggaagctgggcagaaatgctgaggatctcatcaagacaaacatggtgctcaaagattttggtggcaatccattagaaaccaaaggagttttgaatgtggagctgacagtcggcagcaagactaaccctacaacattttttgtcttcgatgggaagggttcctacagcttattgcttggaagggattggatccatgccaattgttgtattccttcaaccatgcatcaatgcttgattcagtggcaagacgacaagattgaaatcgtgttagccgacaagtcagtcaacgttgctagtgccgatttagctctttgggagatgcctggtctcgattgcttatctggaaaaggtgtcgtggagggttcaaatgtctacaccaaggacacagtagatgatctcaatgacaagcaaggacagggtttcatgtcggctgatgatttggaagatattgatataggtccaggtgatcgaccaaggccgacatttatcagtaagaacttatctccagagtttagaaccaagttgatagagctcttaaaggaattcagagattgctttgcttgggagtattatgagatgccaggactcagccgatcgattgttgaacatcggctacctatcaaactaggggttagaccacatcaacagcctccgagaagatgcaaagccgatatgctcgaacctgtcaaggctgagattaaacgtttatatgatgctggttttattcgtccttgccaatgtgggtttctagtatagttcctgttatcaagaaaaacggcaaggttagggtgtgcattgatttcagggatttaaacaaagctacccccaaggatgagtatccaatgccagtggccgatcagttggttgatgctgcttcagggcacaagatattgagttttatggatggaaatgcaggatataatcagattttcatggccgaagaagatatccataagacagattttcatggtgcaatcggcttatttgagtgggttgtaatgacttttggcttgaaaagtgctggagctacatatcaaagagccatgaattatatatatcatgatctgatcggctggttggttgaggtttacattgatgatgtggttgttaagtctaaagagatagaggaccacatagccgatttgaggaaggtttttgagagaactaggaaatatgacttgaagatgaacccgacaaagtgtgctttcggtgtatcggctggccagtttttgggatttcttgttcatgagagggggattgaggtaactcaaaggagtgttaatgcaatcaagaaaattcagcctccagagaataagacagaattgtaggagatgatcggcaagataaattttgttagaaggtttatttctaatttatctggaaggttagaaccttttacaccattgttaagattgaaagctgatcaaaagtttacttggggagcagagcaacagaaggctttggatagtattaaggaatatcttagatctcctccagttttgatccctccccaaaaggggataccttttaggttatatttatcagccggtgagaagttaatcggctcagttttaattcaggagcttgaaggaaaagagagggttgtgttttatttaagtcgtcggctcttggatgcagaaacaagatattcccctgtggagaagttgtgcttgtgcttatatttttcttgtacaaggttaaggcattatctattgtccaacgaatgcactgtcatatgcaaagccgatgtcgttaagtacatgttatcggctccatttttgaaaggaagggttgaaaagtggatattttccttaacggaatttgatcttcggtatgagtcaccgaaggcagtcagggggcaagctatagccgattttatcgttgatcatcgtgatgattcaatcggctcggttgaggttgtgctgtggacattgttttttgatggatcagtatgcactcatggttgtggtatcggcttggttataatttctcctcggggggcaagttttgagtttgcttatactattaaaccttatgcaactaacaatcaggctgagtatgaggcagttctcaaagggttgcagttactcaaggaagttgaagccaatgctattgaaattatgggagattctttgctagtgatcagtcaattggtaggggagtatgagtgcaaaaatgatatattaatgatttataatgagaagtgccgagaactgatgaaagagtttcggttggtgactttgagacatgtatctcgagaacataatattgaagctaatgatttggcccaaggggcgtcgggatataagccgatgatcaaagatgtcaaaatagaggttgccgcattaacattcgatgattggagatatgatgtgcatcattatttgcagaatccatcttaatcggcttctcagaaattgcgatataaagcgttgaagtatactttattggacgacgagctctattatcgtacgattgatggggggttgcttaaatgtttgagtgccgatcaggctaag

SEQ ID NO: 1131 - DNA, 1800 bp, Oryza sativa
  Clone ID: PAT_MRT4530_101025C.1
atggagagcccaagcttttattttgagggtgtcgtggagggttcaaatgtctacaccaaggacacagtagatgatctcaatgacaagcaaggacagggtttcatgtcggctgatgatttggaagatattgatataggtccaggtgatcgaccaaggccgacatttatcagtaagaacttatctccagagtttagaaccaagttgatagagctcttaaaggaattcagagattgctttgcttgggagtattatgagatgccaggactcagccgatcgattgttgaacatcggctacctatcaaactagggaaaaacggcaaggttagggtgtgcattgatttcagggatttaaacaaagctacccccaaggatgagtatccaatgccagtggccgatcagttggttgatgctgcttcagggcacaagatattgagttttatggatggaaatgcaggatataatcagattttcatggccgaagaagatatccataagacagattttcatggtgcaatcggcttatttgagtgggttgtaatgacttttggcttgaaaagtgctggagctacatatcaaagagccatgaattatatatatcatgatctgatcggctggttggttgaggtttacattgatgatgtggttgttaagtctaaagagatagaggaccacatagccgatttgaggaaggtttttgagagaactaggaaatatgacttgaagatgaacccgacaaagtgtgctttcggtgtatcggctggccagtttttgggatttcttgttcatgagagggggattgaggtaactcaaaggagtgttaatgcaatcaagaaaattcagcctccagagaataagacagaattgttaaggcattatctattgtccaacgaatgcactgtcatatgcaaagccgatgtcgttaagtacatgttatcggctccatttttgaaaggaagggttgaaaagtggatattttccttaacggaatttgatcttcggtatgagtcaccgaaggcagtcagggggcaagctatagccgattttatcgttgatcatcgtgatgattcaatcggctcggttgaggttgtgctgtggacattgttttttgatggatcagtatgcactcatggttgtggtatcggcttggttataatttctcctcggggggcaagttttgagtttgcttatactattaaaccttatgcaactaacaatcaggctgagtatgaggcagttctcaaagggttgcagttactcaaggaagttgaagccaatgctattgaaattatgggagattctttgctagtgatcagtcaattggtaggggagtatgagtgcaaaaatgatatattaatgatttataatgagaagtgccgagaactgatgaaagagtttcggttggtgactttgagacatgtatctcgagaacataatattgaagctaatgatttggcccaaggggcgtcgggatataagccgatgatcaaagatgtcaaaatagaggttgccgcattaacattcgatgattggagatatgatgtgcatcattatttgcagaatccatctcaatcggcttctcagaaattgcgatataaagcgttgaagtatactttattggacgacgagctctattatcgtacgattgatggggtgttgcttaaatgtttgagtgccgatcaggctaaggttgcaatcagtgaggttcatgaagaaatttgtggcactcatcaatcagctcataagatgaagtggttacttcgacgtgcaggatatttttggccgacaattgtcacaccctga

SEQ ID NO: 1132 - DNA, 3722 bp, Oryza sativa
  Clone ID: PAT_MRT4530_101026C.1
acaaaaagcattagttaccctctaattgtgttgtcattaacaccaaaataaatgaggggtcctagatgcactttcagtgagaatcataatcaagatggcaacacggcacagctacaatttaacaacttccaggataggattgactatgccgtgcaacatgctttaattaatcaatcttgggtgttagtcaatactttgtcaaacatggtgaagtcgatggttgattgctcgatagctgagtatcaggctacaggaccggtttatttgccaggaggtgttttcccaaactatcggcccttggtcactaataatcagccagctgttcagccaattcctcacagtgcaccatcggctcaaccgacagcaccagtctcggctcctgcaccggctgcaccatcatcggcaccaggtcaactaattaatccttggttgttggtgagagaacagccatagcataatggacaaaatgtgaatcggctaactcaagaccaaggtttggtgaatgcatcggctgggttcggaacacctgacaattagctaagacagcacgctgcgaatcaagttgtcccagagcatttggttcataatgtgcaaccagataaaatggtggtacctcaagttattcccgaacatttggtgcgtaatatacaactaaactttcagaattatcaagggggcaatttgaattatcagtatcagcctccatcaccacaagttcaatatcagtaaggggggtcgactcagccccagttcgctcctcaatacaatcaattcgagccaatgccacaacaagcgcagggagtgcctcagcaaagaccatgggccgatatgattgcagatgtgatgagagagcagtttgggctcaagccgaaggatgctggaaacctgtatcggcatccgtacgctgagtggtttgagagggttccattgcctaaccgattcaaggtttcatatttttcaaaattctcaggtggggttcatgagatgaaattgtctgatttaacagcgattcggcaaaggcatgatgagcctgtgcaggactacattcagacgttcataaagatgaggaataagtgctacagcttgagcttaactgatgctcagttagccgatttggcttttcagggcagctccaatcaggaaaaagttctcatccaaggactttgatagtttgtcacatcttgtacagaaggtaaccttgcatgagcagatgtttgcagaagccaggaaaagctttaagaaggtcaatcatgtatgtccctatatgtatggatctgatgatgatgatgatgatgatgattctgagatagcagcagccgaatgggttagaagcaagaaggttataccatgccaatgggtgaagagttctggaaaagaagaaagatatgactttgatatcacaaaggctgataagatctttgattttctacttctggagaaacagattcagcttcctgctggcagctattaaaggaggcaaaatcaagtttgatgactccaagaggccgatgaagaagaaatatgacaagcagcaggagaggcgttatgaagaagatgatggcggttttggtcctcattggggttgtgagttctttagattttgctggaatgaaggtatgaggctgccatctattgaagactgtcctgggtgtagcaatgttgcagaaagttcaagccaatcgtataatagaggcaatcggctaaggcaaacaagagttcctgttcatcaaagattgagtccagtgaaccaagactgtgaccaagaggacagtgaagacaggaagacccaatggtgtccttctggtatttttacaaataatcagaagagaagggttcaaaggttgaggaatagggaacgtttttaggaggttgagcaagagatcaaccatcggctgaagaaaacgaattcgaagcaggaatggcgcattaagaaacaagttcctacagccgatgaagtaaagagattggctagaggaaaaagtgttgtgactgcctcggttaacatggattttatactacctgcggaatttgggatcaagcaagccgatgttgatgaaattgaggaagaatcggctagattgattttatcaccagaacaagcagtctttgagaaactggaagggacagagaatcggcatcttaagccattgtatgtaaacggctatgtcaatgggaagcctatgtctaaaatgatggtcgatggtggggctgcagtgaatttgatgccttatgctacatttaggaagctaggcaggaatgctgaggatctcatcaagacaaacatggtgctcaaagactatggtggcaatccatcagaaaccaaaggagttttgaatgtagagctaacggtcagcagcaagactatccctacaacattttttgttatcgatgggaagggttcctacagcttgttgcttggaagggattggattgatgccaattgttgtattccttcaaccatgcatcaatgcttgattcaatggcaaggcgacaagattgaaatcgtgccagccgacaggtcagtcaacgttgccagtgccgatttagctctttgggagatggatggtttcgattgcttatctggaaaaggcatcgtggagggttcaaacgtctataacaaggatacagtagatcatctcgatgacaagtaagaacagggtttcttgttggccgatgatttggaagaaattgacataggtccaggtgatcgaccaaggccgacatttatcagtaagaacttatctccagaatttagaaccaagttgacagagctcttaaaggaattcaaagattgctttgcttgggagtattataagatgccaggactcagccgatcgattgttgaacatcggctacctatcaaaccaggggttagaccacaccagcaacctccgagaagatgcaaagccgatatgctcgaacctgtcaaggctgagattaaacgtttatatgatgctggttttattcatccttgccgatatgccgagtgggtttctagtatagttcctgttatcaagaaaaatggcaaggttagggtgtgcattgatttcagagatttaaacaaagctaccccaaaggatgagtatccaatgccagtagccgatcagttggttgacgctgcttcagggcacaaaatattgagtttcatggatggaaatgcaggatacaatcagatcttcatggccgaagaagatatccatcagacagcttttaggtgtcatggtgcaatcggcttgtttgagtgggttgtaatgacttttggcttgaaaagtgctggagctacatatcaacgggctatgaattatatataccatgatttgatcggctggttggttgaggtctacattgacgatgtggttgttaagtctaaagagatagaggaccacatagccaatttgaggaagtttttcgagagaactaggaaatatggccaaaagatgaacccaacaaagtgtgctttcggtgtatcggctggccagtttttgggatttcttgttcatgagaggggaattgacataactcaaaggagtgttattgcaatcaagaaaattcagcctccagagaacaagacggagttacaggagatgatcggcaagataaatttcgctagaagatttatttctaatttgtctggaacattagagccttttatgccattgttaagattgaaagctgatcaaaagtttacttggggcgcctatcagcggggcggccgcgggcga

SEQ ID NO: 1133 - DNA, 928 bp, Oryza sativa
  Clone ID: PAT_MRT4530_101027C.1
ttttttttttttttagtatgaatatgaatatatatgtttcaaatatttctgatgacaacaaaaattatactgaaagttcactaagccatataatatatgtaaaatacactatttattagacaagagaatcgacgagggtggtcagttggtaattcaaatagttaagactcacataataggcatcgaaggcatacagatgagacaaacgatttatcttgtagcacaactcctttaagtcaaaagttatataacagagcacacatgtgtcctgatatgtcctctggcaaaacacctgggcacctggctgatggaaacatgaaatacatgatgatcactttagatagcttttggccttctccttaacagtatgatatacggcaaaatgttagcccagagaagcggcgagggcggacaggaggtaattcaaatagttaagacttacataagaggcatcgaaggcatccagctgaggcaaacgagctagctcgaagcacagcgcccctaagccccaagcagcacaacagagcacacatgtgtcctgatatgtcctctggcaaaacacctgggcacctggctgatggaaacatgaaatacatgatgatcactttagatagctttttgccttctcctgcttattcattatagcaacttgcattagtacgattaccaacatcaaggcttaagcatgatggatagcagataactgtggaagcggaatatgtatatatgggaaacatccatgtatgaacagttgttgaagtggttgatcatattgaataagagaaaataatattatgtgacagttgatgagatggcaagtgagactgtaaggtacgtaagtgtgttatgaagcatgcggctgcgaaaacctaatgaatagcatgccatgaacctgtagcaagattaaattaataggagcctcgtgccg

SEQ ID NO: 1134 - DNA, 3203 bp, Oryza sativa
  Clone ID: PAT_MRT4530_101028C.1
atggctgagaaaccaccagcatcgccgtcttcagctgttaatgagagcaatatcgtgcctatcactctggacaagctgacacccgagcagcaaaaggatcttgaagctatgatgcagcaagcacggaaccaattcttgaactcattcatggagacacgtaagggaacaattgttcagaagtataaagttcgtccaaggatcgagaaatacagcaggttccagatggtgcaactcaatcaggtgataaaggtactgcggatggttttcaaggggtttaaggtgatggctctcaaggggttcaaggtgttggttctcaaggaattcaaggtgatggttctcagggatttcaaggtgaaaatcctaaccaagatggcaacacggcacagctacagtttaacaacttccaagatcggattgattatgatgtgcaacatgctttgattaattaatctggggtattagtcaacacattgtcaaacatggtgaagtcgatggttgatggctcgatagctgagtatcaggctataggaccggtttatttaccaggaggtgttttcccaaattatcggcccttaattactaataatcagtcagctgtccagccgattcctcccaatgcaccatcggctcaaccggtagcaccagtatcggcccctgcacctgctgcaccatcatcgacaccgggtcaattaattaatcctcggttgttggtgagagagcaaccacagcatagtgaacagaatgtgagtcggctaactcaagatgaaggtttaatgaatacatcagctgggtttgtaacacctgacaatcagctaaggcaacacgctgcaaatcaagttgtcccagagcatttggttcataatgtgcaaccagatcaaacggtggtacctcaagtttttccagaaaatttggtgcgtaatatacaaccaaactttcagaattaccaggggggcaatttgaattatcagtatcagcctccatcgccacaagttcaatatcagcaaggaggaccagctcaacccagtttgttcctcaatacaatcaattcgagcccgtgccacaacaagcacaaggagtgcctcagcaacgaccatgagccgatatgattgcggatgtaataagggaacaatttgggcttaagccgaaagatgctggaaatttgtatcggcatccttaccccgagtggtttgagagagttcctctgcctaactgattcaaagttccagatttttcaaaattctcaggtgggattcatgagatgaaactatcagatttgacagcaattaagcaaaggcatgatgagcctgtgcaggagtacatttagagattcagagagatgaggaataaatgctacagcttggccttgactgatgcccagttagccgatctggcttttcagggtatgatagctccgatcagggagaagttctcatctcaagactttgatagtttgtcacatcttgcatagaaggtaaccctgcatgaacaaaggtttgcagaggccaggaagaattttaaaaaggttaatcatgtttttccttacatatatggattggatgatgatgatgatgattctgaaatagcagtagccgagtgggttagaagcaaaaaggttataccctgccaatgggtaaagagttctggaaaagaggagaggtatgactttgatattaccaaggctgataagatttttgatttgctacttcgggagaaacagattcaacttcctgctggtcactattgagggaggcaaaatcaaaattgatgattccaagaggctgatgaagaaaaaatatgacgaacagcaggggaggcattatggagaagacgatggcggttttgatccttattgggactgtgagttctttagattttgctggaatgaaggtatgaggctgccatctattgaagactgtcctgggtgcagtaatgttatagagaattcaagccgatcgtataatagaagcaatcggctaaggcaagcaagagttcctgttcatcaaaggttgggcccggtgaaccaaggttgtgaccaagaagacaataaagacgggaagactcaatggtgtccttctggtatttttacaaagaatcagaagagaagggttcaaaggttgaggaatagggagcgctttcaggaggttgagcaagaaatcaatcatcggctaaagaaggagaagccaaagcaggagtggcgtgttaagaatcaagttcctgcagccgatgaagccacagccgatgaagcaaagagattggctaaaggaaaaggtgttgtgaccgcatctaacatggttttcacgttgcctgctgaatttggggtcaaacaagccgatgttgacaaagttgaagaagaatcggctaagttaattttgtcaccagaacaagcagtcttcgagaagccggaaggggcaaagaatcggcatcttaaaccattgtatataaatggctatgtcaatgggaagccgatgtccaagatgatggtcgatggtagggctgcagtgaatttgatgccttatgctatatttaggaagctgggcagaaatgctgaggatctcatctagacaaacatggtgctcaaagattttggtggtaatccatcagaaaccaaaggaattttgaatgtggaactgacagtcgacagcaaaactatccctacaacattttttgtcatcgatgggaagggttcctacagcttgttgcttggaagggatcggattcatgctatttgttgtattccttcaaccatgcatcaatgcttgattcagtggtaaggcgacgagattgaaaatgtgccagccgacaggtcagttaatattgccagtgccgatttagctctttgggagatggatggtctcgattgcttatctggaaaaggcgtcgtggagggttcaaacgtctacaccgaggacacagtagatgatctcgatgacaagcaaggacagagtttcatgtcagccgatgatttggaagagattgacataggtccgggtgatcgaccaaggccgacatttattagtaagaatttatcttcggaatttagaaccaagttgatagagctgttaaaggaattcagagattgcttcgcttgggagtattatgagatgccaagactcagctgatcaattgttgaacatcggctacctatcaaaccaggggttagaccacatatggaccctcatgcgcagtgtgccacatataaactt

SEQ ID NO: 1135 - DNA, 490 bp, Oryza sativa
  Clone ID: PAT_MRT4530_101029C.1
aaacagaagaacatctgagttcagcaaataatcaggagacatgctgccagataaatgggaacacatagtattttgtaaccaaatcacacacatgaaccgctaagctctagctacatacagagggttagtagccagtttctttttgccagtagcatccaccatgtatgccatgaacattctccacgcttatgaactctgaagggttcgtagcacagggcctgatgtaaacacaccgggagcccctaacaatttcagcacatgtggagctagagcgggttgcgcgctatttgtgttgggggactactctcagttgggtgggtgcgcttgtgatctgcactagctgctctcactaggaggtggacgttatcagctgttgcttcgtgcccgatcttacagcggggacctgctgtagcagtgcctctttggaaaaccatcccatgggctgtgactacttttagcatagcttgggcttctccggtatattgggctg

SEQ ID NO: 1136 - DNA, 281 bp, Oryza sativa
  Clone ID: PAT_MRT4530_10102C.1
gaaaaaaaacatacccagattgactccaaatgggggccagtttttgggccaatccggggtcaaattctgaaaaaggattcacccaaaaacatgggtaactaggggctaggaaacaaaaggggcaacgttaaacccaaaccaaacctttgttacccttgctaattaacggttttctcccaaaaaaaccctcttttaaaaaaaatgggatgggcaaaaaagggattttcccaaaaaaaaggggcccaacaggggccaaaacaggcccaatttgacaggctttt

SEQ ID NO: 1137 - DNA, 663 bp, Oryza sativa
  Clone ID: PAT_MRT4530_101030C.1
atgccacaacaagcgcagggagtgcctcagcaaagaccatgggccgatatgattgcagatgtgatgagagagcagtttgggctcaagccgaaggatgctggaaacctgtatcggcatccgtacgctgagtggtttgagagggttccattgcctaaccgattcaaggtttcatatttttcaaaattctcaggacaggacagcgtttcaacctatgagcacgttagccgattcttagctcagtgtggtgaagcatcggctgtggatgctctgagggttagggcagctccaatcaggaaaaagttctcatccaaggactttgatagtttgtcacatcttgtacagaaggtaaccttgcatgagcagatgtttgcagaagccaggaaaagctttaagaaggtcaatcatgtatgtccctatatgtatggatctgatgatgatgatgatgatgatgattctgagatagcagcagccgaatgggttagaagcaagaaggttataccatgccaatgggtgaagagttctggaaaagaagaaagatatgactttgatatcacaaaggctgataagatctttgattttctacttctggagaaacagattcaacttcctgctgggcacacaatcccatctgctgaggacttaggcaagacgaggtattgctag

SEQ ID NO: 1138 - DNA, 4452 bp, Oryza sativa
  Clone ID: PAT_MRT4530_101031C.1
atgaccaatttcaacaaggccgtcgacgacctccgcacgtggctcagcgccgcactcacctaccagggcacctgcctcgacgacttcctcaacaccaccaccgatgccgctgccaagatgcccaacgcgctcaacagctcgcaggagctcatggaggacatcgtcgccgtggtcgaccagttctcatcgacgctcggcagcctcagcatcgggcagtggctgctcgccgaggacggcatgccgacgtggatgtcggagggcgggaagcagccgctgctggaggcgccgcggcctgaggccgagccggaggaattcgagccaaacgtgatggtggtgctgcacccggacctggagaagttcacggacaaggtcgcgggagggacggggctgcacaaccgcattgtggcgccgcacccggatctggagaaggcgaagacgtacatggcgcggccgtggaaggagtattcggggaccatctttgtgcagaacgagctcgacgcgttggtggatccggtggggtggctggatgttaacgaccaaatttgtgaagcagatcttccaggcctcgtgtttttcatcaacacgcttttggcacgcctggtgggacccatcagaagtcagaatcacaacagcagttttccccatggccgagaaattgccagcatcgccgtccaggctggtcctagctctgttaaagaaaagatcctgaagctgggtctatctgagattgatgaagacaacattgtgcctatcactctggataaattgacacctgagcagcaaaaagaccttgatacaatgatgcagcaagcacggaatcagttcttgagctcattcacggagtcccgcaagggaacactggttcagaagtacaaagtaaagactgagccacaaactaagccttacccactagacatgtggaagtacggtagtgctttgcaacagaggcccgaagaccgctcaaccgagtataaaggtgctgcagatggctttcaaggaaatcaaggtgatggctctcaaggagttcagggtgttggctctcaaggaattcaaggtggaggccttaatcaagacggcaatgcggcacagttacagtttaacaacatccaggatcaggttgactatgccgtgcaccatgctttgatcaatcaatctggaatattagtcaacactttgtcaaacatggtgaagacaagggttgatggttcaatggctgaatatcaggctacaggaccggtttatctaccaggaggggtgttcccgaattatcggccattagtcactgataatcagccagctgttcaaccaattcctcccaatgcaccatcggctcagccgacggcaccagtatcagctcttgcacctgctgcagcatcatcggtgccgggtcaattagtgaatccccggttgttggttgtgcagccaattcagcagacgccacctaggcggcagattttgcaaccaattcagcaaacactgttaaggcaacaagttattcagctgattcaacaacaagcctcgatgaatgcatcggctgggtttgcaacacctaataatcagccaaggcagcatgccgcgaatcaagttgttccggagcatttggtccataatgtgcaaccgaatcaaacggtggtacctcaagttgttcctgagcatttgggaggatcggctcaacctcaatttgttcctcagtacaatcaattcgagctcatgccacaacaacctcaaggagcacctcagcaacgaccatgggccgatatgattgcggatgtgatgaaggagcagtttgggctcaggccgaaagacgctggaaatttgtaccggcaaccttaccctgaatgttgggccgatttggagaagcattttcacagctatttctacagtgggagattcagagagatgagaaataagtgctatagcttgagtttaactgatgcccagttagccgatttggcttttcagggtatgattgctccaatcagggagaagttctcatctcaagactttgatagcttgtcacatcttgcacagaaggtgaccttgcatgaacagaggtttgcaaaagcaaggaagaactttaaaaaagttaatcatgtctgtccttacatgtatggatcggatgatgatgatgatgatgactccggaatagcagcagccgaatgggttagaagcaagaaagttataccgtgtcaatgggtaaagagttctggaaaggaggagaggtatgactttgatattaccaaggctgataaaatctttgatttgctactccgagagaagcagattcaacttcctgctggtcatacgattccatcggctgaagaattgggcaagaaaaggtattgcaagtggcataattctgggtctcattctaccaatgattgcaaggttttcaggcagcagatccaagcggctattgagggaggcaaaataaaatttgaagactccaagaggctgatgaaggttgatggcaatccttttcctgttaatatggtgcaaacagctggccgaacagctgatggaggacgtgcaagaggttttcaggtgaattcggcaaaaattatcaacaaatatcagaagaagtatgacaaacagcaggagaggcattatgaggaaggtgatgacgtttttgatcctcattggggctgcgagttctttagattttgctggaatgaggatgtgaggctgccatctatcgaggactgtcctagtcatcagctaaagaaaacgaagccaaagcaggagtggcgcgttaagaaacaagctcctgtagccgacgaggccgcagccgatgaagcaaagagattggccaaaggaaaaagtgttgtgactgcatcggttaatatggttttcacgctgcctgctgagtttggggtcaagcaagccgatgtcgatgaagttgaagaggaatcggctaagttgattttatcaccagaacaagaagtcttcgagaagccagaggggatagagaatcggcatcttaagccattgtatataaatggctatgtcaatgggaagccggtgtccaagatgatggtcgatggtggggctgcagtgaatttgatgccttacgctacattcaagaagttgagcagaaatgttgaaggtctcatcaagacaaacatgatggagaaccaaagctattattttgagggcgtcgtggagggttcaaacgtctacaccaaggatacaatagatgatctcgatgacaagcaaggatatggtttcatgtcggctgatgaattggaagaaattgacataggtctgggtgatcgaccaaggccgacatttattagtaaaaatttatctccggagtttagaaccaagttgatagagctattgaaggaattcagagattgctttgcttgggagtattatgagatgccaggactcagccgatcgattgttgaacatcggctacctatcaaaccaggggttagaccgcatcaacaacctccgagaagatgcaaagccgatatgcttgaacctgtcaaggctgagattaaacgtttatatgatgctggttttattcgtccttgccgatatgccgagtgggtttctagtatagttactgttatcaagaagaacggcaaggtcagggtgtgcattgatttccgaaacttgaataaagctaccctaaaagatgaatatccaatgccagtggccaatcagctagttgatgctgcttcaggacacaagattttaagttttatggatagtaatgcaggtgctggggctacatatcaaagagccatgaattatatatatcatgatccgatcggttggttggttgaggtctacattgatgatgtggttgttaagtctaaagagataaaggaccacatagccgatctgaggaaggtttttgagagaaccaggaaatatggcttgaaaatgaacccaacaaagtgtgctttcggtgtattggctggccaatttttggaatttcttgttcatgagaggagaattgagattactcatagaagtgttaatgcaatcaagaagattcatcctccagagaacaagacagagttgcaagagataatcggcaagataatttttgttagaaggtttatttctaatttgtctagaaggttaaggcattatctattgtccaacgaatgcactgttatatgcaaagccgatgtcgttaaatacatgttatcagctccaattttgaaaggaagggttgggaagtggatattttccttaactgagtttgatcttcggtcagtatgcactcatggttgtggcatcggcttggttataatttcccctcggggggcaagttttcagtttgcctatactatcaaaccttatgcaaccaacaatcaagctgagtatgaggcagttcttaaagggttgcagttactcaaggaagttgaagccgatgctattgaaattatggggggattctttgctagtaatcagtcaattggcaggagaatatga

SEQ ID NO: 1139 - DNA, 486 bp, Oryza sativa
  Clone ID: PAT_MRT4530_101032C.1
atgggtcggaaaggcttcttcggcactcgcgggggcgaacttgctgtggcgaaggcttcatgccacactgccaacaagcccctcacgggcaagggtgagatcggagcttcggccgagaccgtgcaaaccatgtggtatgtcctttcgttcgctccctttgttcgccactgcacacactgttcgccactgtatacacccttcgtcatggctccccgcaagcctaacccctcttcggcgaaagggcccgatcttgaacggatcaacgacgactccaccgcttatttggggatctctctcatagacgacggtgaattggcgaagttggtcagctctggggcgctagtcgaaggacaggctttcgccccggggaaagccgttgtaccgaagcccgtcgacaaccgaacggtggtgttcgccgtgttttttgaggcggggctccggtttccgtgcagcgcgttgttgccggagatccttcgccttttctag

SEQ ID NO: 1140 - DNA, 411 bp, Oryza sativa
  Clone ID: PAT_MRT4530_101033C.1
tttgtttttttttttttttttgggaatggcaccatctctgttgcataaagcttgaagaaatgtagagatagttggcagtttctcttcttttgcattaagaagattcttgcatttgccgttcgtttacacggctcccggatgcgcccacgcgaaccgatcaatcgatcggtccggccatgtggtccggttcagttttcaggggacgtagtacatggggttggggatcttgaaaacgcggtcgccgacgtagtcgccctgcagggcgctccactggtcgccgacgttgccgcggatcctgtagcccttcttctccaccagcccgtttctcatcgccgacttgaacaccgacgagctttgcccccggtactccgggctccttatgatgagccctctcataccccaagaacccct

SEQ ID NO: 1141 - DNA, 1815 bp, Oryza sativa
  Clone ID: PAT_MRT4530_101034C.1
gcacgaggctctccctcgatcccctttcttccccctcgctggcgctgccgctggagcaagcctacatcggcggtcatcgaggcgagcagacaaatccaaggcgtcccgagcaaaggaatcgattccgctcgcctgatgcctcgtcctcccccattgaatctcccccaagcggcagcgcgtaatcttccgggagtggtggccaaaagttgccggaagagtgctgtaccccatcgatttcagtcgagctgcaacggagcagcccacagtgctcttgatctgttcgtgtcatcctcgaagacggccgccaatctggagtctggtgagggttcctgcgactcctacacctccgacgcgggcaccgccaaggctggagaggacaatgtgctacatgccgccaatgccctaactaaggtggtgccaattctccagaagcggttatcaagttcgttcagcgatagatgtcggatggccgtttccgctggagtgatatggagctccgcttgtttctggaaagttgcttggaggaaattgcagcttacaacatcaccaccagcaaccccaagccggtggcattggacaattttggctaagaaaatgtatgagaagtgtcgtaagaaggtgaacaggagccaaattcaatatatttggcatgggtgttggaagcggttgaacatgtgggtgtggcttgagtcgcaggctgccggccttggtcgtgatccgcacatgtctgccattgttgtcgacggtgggaaatataagataggtaccatttttagtacacaagttggcaatggctattctgtcaatgaaaactatatccatgagtacccttggatgaagaaaggtatgagcaccttcaaaaatgatcctctcaagcacattgagcttcaccacgcggtgttcaaggggtgcaccgttgtcggcaaccattccgacgttgatggagcagcaagcaccgtcagaagatgcagttcagtggcaaacagtagatgttgctcagctcacagccgcttacaggcctccatgccatctccaatacacctcaaactacgacaagggataagggagatagggcagtcactggaagtgctgcttcagaggggtcttcaaagaagtcctagcgactccaccgggatgagatttctggcaccgtacccacatgtacgataccacagggatcaacttggtgctgaaggtgcacccccaccggtaggaccagaagagacattcaaccaccaacactcgtcgttgcgaagtattgttgaaagaacatttggcatcataaaaaaacaatggaaaatactgaaggaaatatcttacttccgaggtgagaatgttccaacacgcataatatatgcagcttttgctatgcacaacttcaggatggatagtgttgatcatgtgtactaccatcaaaacaatcctttgtacaatggatatcctgtggcgccacagcacacatccttcgatcagatgtgttacgcaacaaatagcgagcagactatgagcgcctggcttgattgcattgcagatgtggtgttcaatcagtatcagccgaatccacctctcatcctgatagccgaggctaaggtgcacggctactccaccatcgtcagccgccatcaccgcctagctcttgagtccgatgatgatggatacacccctaccgagctcagcgatagtggatccggcactcctgagcccggcgatggcggatgcgcctctcccgacctcgctgaaggcatatcagtgtcgcccaagcttattgcagcccttgccgcggtagccgtcgccgtcccagccttgccatattaa

SEQ ID NO: 1142 - DNA, 258 bp, Oryza sativa
  Clone ID: PAT_MRT4530_101035C.1
atggggactagagttcatggaataggtgcgaaagaaaatcagaagcctatgaagccattaggtattaaacttaagaaaaaggaaattcgtggatcagcaagacctattggcggcttagacagagcttcatcacggaggaaaagaaagaagatcaatgatgtctcagcccaatcaccgcatcctcaacctgtagagatgcgagcgcaaccacaaccacaaccagtacatacatacagtaatggtatactcatcacataa

SEQ ID NO: 1143 - DNA, 350 bp, Oryza sativa
  Clone ID: PAT_MRT4530_101036C.1
gaacataatatattgtaatgattttattttgctacaatgccgtgttttttattcaccacgaatgagattaaatccctttgctcaagaaccggaaattcaaccttacccaaaaaactttggcttgaccaacccaaaagaaacaaaaagggctggaagggccacctttccttaagctacaaatcgatctttaaatacataaaactaaacctccaaagtaagttcaaggttttttaaaaaatatacccagggaaataacagcgtgttggacccgaaaagtgcttaatctgcacaagattgcccgcaccggaatgagaggatgatgcccacattgagaccatacagggcaagcg

SEQ ID NO: 1144 - DNA, 390 bp, Oryza sativa
  Clone ID: PAT_MRT4530_101037C.1
atgagcccatgcccgaggcggctcctgctcctgagcatactgctagtggtcctgttgctggcgaccaaatggatgacgatgctcaaagtggtgacacatagattctttactatagtgacgtctccggttgaacgcttgaacccccatataggcgacatctacgagctttcaaggaagtggctttcgcggcaaacagattcgcacatcgctggcccgacaggtcagtttcgtgctggctccactgctatcggaccacattggggccctttccattgtctctacccagcgccaccatcatcatcaacacctccgcccggggcggcaagtggaggcggtgggagggtgggagagggaaagatgtggtgggagaggaagaagtatagagattga

SEQ ID NO: 1145 - DNA, 288 bp, Oryza sativa
  Clone ID: PAT_MRT4530_101038C.1
atggggaaaggaagagggaaggaggaaggaaggatggggggtggggagggaggcgtcgtggctatgccgacaatggcaagacaaggtggaacaggagaaaaacgaggaagggaaaggaagagggaaggaggagggaagaaaagggtgggagttgccatcgctagcggcggcgacgctagtgggacgtggccggcaaacctcctctcggggctggtcggctcccgtgtctatttaggagaacggcacgatcatcccaattccgtccgtgcaatcgtgtggtctgattga

SEQ ID NO: 1146 - DNA, 978 bp, Oryza sativa
  Clone ID: PAT_MRT4530_101039C.1
atggctgctagggcattgggcaagggcatcagcagcagcaacaatggctgcgaaggcggcggcgacgagcccaaggcggcgtgggagatcgacctctcgaggctgcgtatccgccagggcgctcccgtcaagcacggcttccgcggctcgctgttccgcgcggactacgatggccgcgacgtcgccgtgaagctcctcgactgggggaaggaggggttctcgacgcccgagcagatcgcccacctgcgcgcgtcgctcaggggcgtggccgaagcctggcacaagatcgaccaccccaacatcaccaagttcgtcggcgcatccatggccaccgccgacctcaacatcccacaaggccagagcaccgcgccgccgctgccgccgccgccaccggacacaccatgctgcgtcgtggtcgagtacctcaccggagggactctgaagagctatctcatcaagcacatggagcgcaagctcgcctacaaggacgcgtccgcttcgcgctatagccgacttcggggtggcgcgcatcgaggcgtcggacccgagggagatgaccggggtgatgtggacgctgggctacatggccccgaggtgctcgtcggggagccgtacaaccgcaagtgcgacgtgtacagcttcgggatctgcctgtgggagatctactgctgcgagatgccgttcatggacctcagcctggccgacgtctcgtcggcggtcgtccacaaggacctgcggccggagatcccgcggtgctgcccgcgcgacatggcgctcatcatgcggcgttgctggcacgccaacccggcggcgcggccggagatggaggaggtggtggggatgctggaggcgctggacatgaagaaaggccgtggcatggtgccattaggggagaccgccggttgcttctgcatctccctcaggcgccgtggatcatatatcactggtggagaaaccctttgtagtcccggttcgtaa

SEQ ID NO: 1147 - DNA, 1763 bp, Oryza sativa
  Clone ID: PAT_MRT4530_10103C.1
ccttccttttctttggttcttgggcaggggccccgggttcccgccccccgctggccgcccccagaccatggcgaccccgggcgccttgccattggcgccgccgtggtccagcacgacgcccttggggctcgaagtagtcccggaggtgtaacccagccatctccacagaaagtcattcttctatatacaggttgcgggctaactttcaagttctgatcaggaactcagcgtactcgatcgctccatctcccatgagcgtactgcagaggcttcggatacgcaggcagggtcgccgatgacgatcaggatagggggcctgaacgagcatttcctcttctcggccagtatctccagggactcttcagctagggtgaagaattcctggtccaccatgacgacctctgccactgagtggtcaaggaggaaggcaattgtctcggcgtttaacctgatgtttacgcagttcaccaccgctccagacatggggacgccgaaatgagcttcatacagtgccgggacatttggagcaatcacagcgaccgtgcagccggggccgacggatcgctgcgcgagggcggaggcgaggcggcggcagcggcggtaggtctccgcccaggtgtacctcaccgggccgtgcacgacggcggccctgtccgggtggaccacggcggcgcgctccaggaaccagagcggcgtcagcgccgtgtagttggcgtcgttccgtgggagatcgtcgatgtccctctccgccgcatccccatgccccggcgagcccatcgctccgctctcgctcctcccccctcccctctcctcccccctctcgcgcgaggagaatgtgccgaaagcgtgggggtactggagtgtgtgtgtgggcggcggcctcgccgccgccgccgtctcctccctcctctccgcctccgccgccgccgccgccgtcagcgcgcggcgcgcctcctcggccgacaccttgccgcgggtggtggccggcagcaggacgtacaccccgccggcgcccagcacgtggtcggccggcagcggcgcgaccttgccccctggaggaggaggagccccagctttccccttctccgccaccgacaccggctcgctgagcgcccgcacgctcccgtccgccatcaccaccttccctccgccgctcgcgcccaccaccgcgcccgacgagatcagatccacggcgtcgtcatcgtcctcacctccaagatgtacgcacagatcgagacgacccgacgccgacggcagcgcgcggttacggcggcgaggggaagatgaaggggccgctgcgggcctctacccaccaacctccgagagcccgtcactcccaccgccttcacatgccacacagggggcccagccgccacgcgcgccgccacacgcgtcgttgcccgccaccggccacgcgctgtccgtcgccccgcccttgtccgccatctggcagatgacgttcctggcgtcgccgaccgccaccttcacctccaccttcatcttatggccagcctcaccgtcgccaccgacctcctgcaagcaccaaatcgccacgctaaattccgtgcagagcttctgcgccttctccaccaccgcctccgccacctccttgctgtacccgtcaatggcgggggccacctcgtcggagaacacgtagcctaccatagctagtacaggtctgtcaaacaacgccggcgaaagaaggggggaaaggggaatgtacgagcgacatggcgcgcgcacgtacgtaccggaggcgtcga

SEQ ID NO: 1148 - DNA, 211 bp, Oryza sativa
  unsure (1)..(211): unsure at all n locations
  Clone ID: PAT_MRT4530_101040C.1
agcaaataatatccaaaccagattaatgtattctttactacatctgcagatacaccattacaagcacantacctgaatatttaaaccaatcacatagcacatctattaacacatcacacacacacacacaccccatatatatttgtcaaccaccaacccaaatggtctaactactttatttttcagcattacaattaacacgcacacatga

SEQ ID NO: 1149 - DNA, 379 bp, Oryza sativa
  Clone ID: PAT_MRT4530_101041C.1
accatcagacctgctcttgcttttttatcccaagctatttgctgtacataataaacccacttgtttgtattgcgcaaagcacaaaccccactggtggtgggtacctttgggatcgttgtacttgctcttttggtgtaaactaactaatattcacggacatcagaaaataataaacgatggtatagagttgaagcctcgctacttaaaatgcaaacttcttaatttgagcacaaaatgcttctacacatgcattgcctggagcagtatgcctacgatctggaccacggttttttaagactccgcagtttatagctcgaggtaccaatggtataattgctcttaattaaaggcaaaaacgttaaactttggatgatgggag

SEQ ID NO: 1150 - DNA, 410 bp, Oryza sativa
  Clone ID: PAT_MRT4530_101042C.1
gaaaccctttcagcacctgttatgtggtcaaggtgacggtcagatgtcattgttgtgaagttgagctgctgctgtgttacgttacaggaaggatgaagaaatccgtccaggttaggttagcatccacgagctagtacctcaaagtggctgcccatgtggtgcatagtggctgatcatgtagatcaattggtaaaatgattgttatgtggcatagtagctccctctgagcatagtgctggatcttgcaccattcagtgtttcaagtggtacacctagaaatagtgcctggatcttgcccattattagtgttttagtagagagtgtacactgttgttgttacaaaaaacacaagcctgtatgttggcatccattaatttatctagcattttggatttaaaaaaaaaaaaaaa

SEQ ID NO: 1151 - DNA, 203 bp, Oryza sativa
  Clone ID: PAT_MRT4530_101043C.1
atgggctgcaaggcctcccaagcctatagtccaagcctccaaggccccttctgttcgagcaaaggcctcttgcttcaccttatagccttcgcccttagcagtgacttggccaagtggcgctttgccctatggcttcagtggtttcggcaggtccggtcgaaggtcctcgtgacatgcctccaacaagcctctcacgggcaagg

SEQ ID NO: 1152 - DNA, 504 bp, Oryza sativa
  Clone ID: PAT_MRT4530_101044C.1
atgtcgagaagacaaaccacaagctccagaaagataacaagtgttgagttttgtaggtggaagataggtttcagcaggaacatcggccgaaagggggcgcctcatgccataccatatattttgcacggtctcagccgaagctccctactcacccttgcccgtgagaggcttgttggaggcatgtcacgaggaccttcgaccggacctgccgaaaccactgaagccatagggcaaagcgcctgggcaaagccgaacggtgaagatcgaagggcgaagtgttttgggcgaagccgaacgatgaaaaccgaagggcgaagcgttttgggcgaagctgaacgacgaaaactgaagggttcgtccccaagctcaccacttggccaagtcactgctaagggcgaaggctataaggtgaagcaagaggcctttgctcgaacagaaggggccttggaggcttggactataggcttgggaggccttgcagcccatggttcctatcgccattag

SEQ ID NO: 1153 - DNA, 623 bp, Oryza sativa
  Clone ID: PAT_MRT4530_101045C.1
gtttgaaatctcttcgtctgaattggtcgactggaacaatttcccgcctataggggagttgtcattggttaatgagcatggtcataaatccttggattgtacaacagatcggagctttccgaatttaaaaaggttggagctagttgccataccaagattgtcaaaatgggctggaaatgatgcttgccatgtgttctccctgctagaggtgctcatcgacaaagccgagaacactgtcagataccaatttcctgttgagaaacttaggatctttaactgtagttgtagcgggaaggaattgacactgttgtcatcccatttccccaagctctcaatgtttgtaataaggggatgtgagaatataagagggcttggtgtggcgaagcaggggatgacagcaatgtcagcatcgtcattgccgtctgctggtagtaagttggaggatgaatgtctcggacaggagcagcaagaaccaggagaggaggatgagaaagcagccgcagatggagggctgctgctcttacctcagcaacttcagtatttgactatcggggaaatgtcagagctggcattagtatttgacacggcaggaggcctcagaggcgtaggagaaggattacaag

SEQ ID NO: 1154 - DNA, 1830 bp, Oryza sativa
  Clone ID: PAT_MRT4530_101046C.1
ggatcccccggctgcgccctccgttggtctccgcccacccagaggaaaccacccgcccccggtccccggaggaaagcttcggccatggcggcggcggcggcggctcggaggggatgcctggtcgcgcttctggcggtgctcttcttggcctgcgccgctgaggggggtgcggcggcggcgtcggcggcgcagcagcagcagcagcagctacggcggcggaggcatctgctgcggcggcagcggcaggtgcacagccacctcaggcggctcaacaaggcgcccctcgccagcatcgagagtcctgatggagacatcatagactgtgtgcacatctccaaccagcctgcctttgatcaccctttcctcaagaaccacactatccagatgaggcctgattaccacccagaaggcctgtatgatgagtccaaggttgcatcacagcagaacacccagacaatcacccaaatgtggcacaagaacggcgtgtgcccggagaacaccataccaatcaggaggaccaagaaggaggatgtcctaagggccagctccatcaggagatatggcaagaagaagcacaagagcaccccaaaccccatgtctgtcgaccctgatatgctcaatgagagtggccaccagcatgcaatagcatatgtggaaggtgataagtactatggagctaaggctaccatcaatgtgtggcagccaagaattgagcaggccaatgagttcagcctgtcccagctctggatcttgggtggttcctttgggcaggaccttaacagcattgaagcaggatggcaggttagcccagatctgtatggggacaacaacactagactcttcacctactggactagcgatgcgtatcaggcaacaggatgctacaacctgctgtgctcggggttcatacagataaacaatcagatagccatgggcgctagcatctccccactctccaactatggtggttcccagtatgatatcaatattttggtctggaaggacccaaaggagggcaattggtggttgcagttcggtaatgactatgtgttaggctactggccatccttcctcttctcctacttggcagacagtgcctccatgatagagtggggtggtgaggtggtgaactcggagcctgatggcagccacacctccacacagatgggcagtggccacttccctgaggaaggatttggcaagtccagctacttcaagaacatacaagtggtggattcatcaaacaatcttagggcaccaagtggtattgggtcattcactgagcaatccaactgctatgatgtgcagaatggcaacaatggtgactggggcacatacttctactatggagggccagggaaaaacccaaactgtccatagtagaaatggaaaaattctatccatgcccctaacaaacccttgacacctctgtattatgcagtaaattagtttacacctcttctctttttctcctcttggtttttgttttggtttcaccattttcccaccaggttattaacttctaggtaagtgtttgacatgtgaaatttgttctcttcctcaaagatgttggtctggctcttgggaggagtgcggtcaagtttttgaagagaaacaggcctgtttggttggttggtttgtgcacttgtgcctcatgttttgtcaaatattttttgttttctcccatgcatgccttcaacttgattgttggagccttggaggtactgcacttgttaagttgaattcaattaattaaactgttggggcatgtgtgtggccaatggttaaaaaaaaaaagggggggggcctcgtgccgaattcctgcagccc

SEQ ID NO: 1155 - DNA, 1166 bp, Oryza sativa
  Clone ID: PAT_MRT4530_101047C.1
gccgcaccaacaacctccgagaagatgcaaagccgacatgctcgaacctgtcaaggctaagattaaacgtttatatgatgctggtttcattcgtccttgtcgatatgccaagatacaatcagatcttcatggctgaagaagatatacataagacagcttttaggtgtcctggtgcaatcgacttgtttgaatgggttacgatgactttcggcttgaaaagtgctggagctacatatcaatgggccatgaattatatataccatgatctgatcggctggttggttgaggtctacattgatgatgtggttgttaagtctaaagagatagaggaccacatagccgatttgaggaaggtttttgagaggactaggaaatatggcctgaagatgaatccaacaaagtgtgctttcggtgtatcggctagccagtttttgagatttcttgttcatgagaaggggattgagataactcaaagaagtgtcaatgcgatcaagaaaattcaccctccagagaacaagacagaattgcaggagatgatcggcaagataaattttgttagaaggtttatttctaatttgtctggaagattagagccttttgcacaattgttaagattgaaagccgatcaaaagtttacttggggggcagagcagcagaaagctttcgatagtattaaggaatatcttagctctcctctagttttgattcctccacagaagggaataccttttaggttaaggcattatctactgtccaatgaatgcactgtgatatgcaaagctgatgtagttaagtacatgttatcggctccaattttgaaaggaagagttggaaagtggatattttccttgaccgaatttgatcttcgatacgagtcaccgaagggaatcaaggggcaagctatagctgattttattgttgatcatcgtgattattcaatcggctcggttgaggttgtgccctggattttgttgtttgatggatcagtaggcactcatggttgtggtatcggcttggttataatttctcctcggggggcgagttttcatatcaccatgggcgatataacaattaggctgagtatgaagcagttctcaaagggttgcaattactcaaggaagttgaagccaatgctattgagattatgggggattctttactggtga

SEQ ID NO: 1156 - DNA, 479 bp, Oryza sativa
  Clone ID: PAT_MRT4530_101048C.1
ccgccgccagcttccgccccttcggccagactaggaagagagtggaggggctgtggtggaaagggaagtggaaaagcttgggaaggaggtggccggcggcagaggtcggtaaggccagcggcttggggaggaggtcggcggcggcaaaggttggggaggccggttgtttcaggaggacgacggccgcggcggaggtcggggaggccggcgtgagcgcgaggaggagaggaggcggcagcggcccagatcttgatggcgagaggaggagaggagtagaggaggaggcagaggtggtggccggagaggacgtcgccagcatgaagggcgaggaggagaggagccgacagcagaggtggaggctggtgaggcgaggaggccaccggcggcgtttcgggctcagcgaggaggcggcggcggtggcggcaaacaactgggcagcgtcggtggtaatttcgcccacccgccccgtgcttatgtaa

SEQ ID NO: 1157 - DNA, 393 bp, Oryza sativa
  Clone ID: PAT_MRT4530_101049C.1
gggcccaacacatatcaaattccatatttggtgcataaacatatgtgctaggatgacagacagcatgagcaacactgatacattcttttacggaagcgcacattaccatcgtagtgaccaaaacgatacatatggccctagggggtccaagcagcgcacaggtgaatgggacccatcccacctctggattttactgagcaccgtcacctggatgcttccaagatgttgctagatttcgagcttttcggtctagttggacgatttctagagcacttgatgctggtaacactacttcagagatatgatgagcatcatatatgcagatgaatacatgctttcttgcattggaagccgaatactctcctcttaggtctgacatatgcgacgattgga

SEQ ID NO: 1158 - DNA, 316 bp, Oryza sativa
  Clone ID: PAT_MRT4530_10104C.1
agaaggtctggtactagattttatggacatatacttatgtgtagtaacatatatcggcacaaacccctccggcgcgtgcacacaaatacatacggaccgtcgtggggcatatatacatatacgatgcacaggaattttatgtaaacacatatgtacgtgctggcatacacattgttattattcaatatacacttggattaggtgatgcgtactttgcaagggagacttaggagctgccgtacctacgtacgacatgacgatcgcttgagacttaattagggtgtgcgcctccgggcggtacatggggtccggtttt

SEQ ID NO: 1159 - DNA, 447 bp, Oryza sativa
  Clone ID: PAT_MRT4530_101050C.1
atgggatttgtttcgggcatcgacgacttcgccttccctcccgggcaggcataccgatttggcagcctcaacttcatcaccgacgacttcgacaatatttctcttctcggctcagattcgaaccagtcgggaggggatgccatctttgctccattatgtctcccaaactcggctgaaatctattctaagaccatctcatctgagttggattcaaaccactcggatgaggtctcgtcaacttcttcgcaatcaaatcaaggagaggcaacttatccgtcaatcttgatgtggcttcccgacgatctggctgctgtttttactacaagagcgtcttctccccgtaggtccagattaaactcggcttcgacctcagttcaatctggctctagggaagtcggcgtgatacttcaacgactcggaactcactacaagaggaaccctctttag

SEQ ID NO: 1160 - DNA, 1142 bp, Oryza sativa
  Clone ID: PAT_MRT4530_101051C.1
actagtggatccccgggctgcggccgccgcccccgccgccgccgccacctctgtctgccgccaccgccgccgccgccgccatggaggccctccacgaggagatgcccttcgacctcgccttccacccgtcctcccccctcgtcgcaacctccctcatcaccggcgagctctacctgttccggtacgccgcggagtcgcagcctgagaggttgtttgcggcaaaatctcacaaggagtcatgcagagctgtccggtttgtggagtcgggaaatgtgattttgacaggatctgctgattgctcaattcttgcctctgatgtggaaactggcaaacccattgctcgcttggaggatgcacatgagaatggcataaatcgccttgtgtgtcttactgaaactactgttgcttcaggtgatgatgaaggttgcattaaggtatgggatactcgggaacgttcctgctgtaacacctttcactgccacgaagattacatatcagatatgacatatgtatctgactcaactcaaatactggcaacaagtggcgacgggactttatctgtcagcaatcttcgtaggaataaagtaaaatcacaatctgaattttcagaagatgagttactatctgtggtggtaatgaagaacggtaaaaaagttgtatgtggcaccccaagtggagctctgttgttatattcatggggattttttaaggattgcagtgaccgctttctggggcatgcacagtctgttgatacaatgctgaagctggatgaagaaactctaatatctggtgcatcggatggtgtgatcagattagtgggtatcttacctaacaggatcattcagccactcgctgagcattcagaatatccaattgaggcccttgctttctcaaatgacagaaattatctaggcagcatttcacacgataaaatgttgaagctctgggacttgcaagacctcttgaatcgccaacagttagttcaggatgataaacttggtgaacaagatagtgatgacagtgatgatgacggtatggatgtagacatggatccgaactcttcgaaaggatcaaggagtacaaagacaagcaagggtcagagttcagatagacccacatcagacttctttgcagatttgtag

SEQ ID NO: 1161 - DNA, 1581 bp, Oryza sativa
  Clone ID: PAT_MRT4530_101052C.1
atgagccgacgcaacagccgcaccatctatgtgggcaatctccccggagacattcgcgagagggaagtggaggatctcttctataagtatggccgtattgtggatattgacttgaaaattcctccaaggcctcctggttatgcttttgttgagtttgaagaccctcgtgatgcacaagatgcaatttatggccgtcatggatatgactttgatggccacaggttgcgggtggagttaggggatggtggcagaggccattattttgatcgatcaagtagctatagcagtgctaggatcagtggtgccggtaaacgtactgatttccgagttatggttactggattaccttcgtcagcatcatggcaagacctcaagcaactattggaattgttgattataccaactatgaggattgaaacaagcgatacacctgacaagcagttttttgttaccttacagataagaaagcttgatgactcagagttccgtaatgcattttcacgggcatatatcagggtgagggagtatgattctgctaagcgcagccgctctcgttccagaggtagaagccacagccgctctatctccagaagcagaagccgcagccgctcgatctccagaagcagaagccgcagttatagcagaagcaggagtccaagatctaggtctgcttctcggtctcactcacctgtgaaagaaagatctaggtcggcttcacagtctcgctcacctgtgaaggaaagatcaccatcaagatccccaccccctgctacttctcctcctcgtgaaaagtcagcaagcaagagccctgtcaagagcagaagtttatcccgatccccatctcctgtccgtgacattaaccaaaaactctgtatttttaggcttcaacaacaacgccatgtttgggaccatgatcatcccccttatcgctgccgccatgaggacaacattagggcagcgccagtgctaaatccagaatgtggagctccggctgattggaaagggaggtaccttggcatcattgattactcggctatcctcctgtgggttctagaaaatgctgagattaccgccgttgctctatcagctgggtcagcaaccgtggcaggagttggaatgggtgctgtcggtgcagtgggagtggcagcattgggtgcaataggggctgctgttgctggtgggttaacagcagaaaagggtgtggcaaaggatggactaactgctgctgatcatttaggagaagatttctacaaagttctgcttcagcaagaacatttcaaatcaaccacagttcgatcaattgtagaatcctaccgctggtctccttctgtctccattacactggacacttccatgcttactgtactaccgttgctaccgaagtacaggcaacttactgtcatggagttcatgaagaccataggctccaccgttcttgattcagggaacggcctggtgaagccacctctcacctgttcgcctgacgcttctcttggcagcgtgattgacagcattgcatcaagaataacccaccggatatatacgtcgtggacggtgacttcgaggttgttggtgtcgtga

SEQ ID NO: 1162 - DNA, 1001 bp, Oryza sativa
  Clone ID: PAT_MRT4530_101053C.1
atggcaaatggctcaggcctggggtgcccaattatgagtagcggcgtcgggagagagcgccggcggctccggcaaagaggggtggcggcgacggttccagcgagtacgggtggcggcggcatcttggaggtgagccccggcggctgggcgtagcggccggcgtttccggcgttgggggtggcggcgtttccgcctctttcttccacacccatcgcgggtacaaaattgtccccatacccacacccgtgcgggtaacgggtatccaacgggtacccatacccatataattgacttgtagtatttatagttttgtactgattgttcaactgagcaaaaatggccttaacgtcttcgaaaacttcatctacctgtcggttaccatcaacctttctgagtttcccccttttctcatagtactgaataactggaagagtttgctgctgaaaaacatcaaagcgtctcctaatagtgtcgatgttgtcatcatctcttccaagcaagtaaaatgcctggtttcggttcaaaatgcgccgctccatctcttcctttgagcagtcaatgaacagcaggaactctggctcaatgtggataatattttcatacgcatgtcgattttcttcatttcgtggaaatccatcaacaaggaacttatcattcccactttctcgcatggccttaaatagtagcttaacgatgagatcagatgacacaagcttcccttcattcatgagattcttgatcattgtaccttgttcagtatcatattttgcttcttcacgaaggagatcaccagcactcagatgtgtaaagccaaactgcttaacaattttggcacattgagtgcctttgccactgccagggccacctatgacgaacacgattgttatctttttcccaggaggtggaaatgactcaatgtgattgtcgatgccgtcgcaggaaaccgccgtctcggagaaatccctaaacccatgtcgccgttgccgccgttgacctcccat

SEQ ID NO: 1163 - DNA, 1890 bp, Oryza sativa
  Clone ID: PAT_MRT4530_101054C.1
cgcgccccccggccccagacgtcgcacaccggcccggcctcctcctcctcctcctggattgccgccgccgcccacggtttccagcaatcgccgcggttcgcgccgccgccgccgagcggagcagcgccccgatcgatccccttcccctcccgcgagcaaccgacgccgccggaagtcacagctgcttgccccccttctcccgaaatggatcgacctgatgaaaccgtgaaaattcccaagctgtgatgcgtattttgacactatacagtccaagaagaagctgcccctctctttgcaagaatcgctcactgctgcctttgctcagattcctgtctcgtcttttcctgatgttcctaatggccgagtgattgaaattccaggagacacttccgttcttgacgctgtgagaattctctccaaacacaacattagggcagcgccagtgctaaatccggaatgtggagctccggctgattggaaagggaggtaccttggcatcattgattactcggctatcatcctctgggttctagaaaatgctgagattgccgccgttgctctatcagctgggtcagcaaccgcagcaggagttggaatgggtgctgtcggtgcagtgggagtggcagcattgggtgcaactggtcctgcagctgttgctggcttgactgccgctgcagtaggggctgctgttgctggtgggttaacagcagaaaagggtgtggcaaaggatggactaactgctgctgatcatttaggagaagatttctacaaagttctgcttcagcaagaacctttcaaatcaactacagttcgatcaattgtagaatcctaccgctggtctccttttgtccccattacactggacacttcaatgcttactgtattactgttgctatccaagtacaggttaaggaatgtcccagtgattgagcctgataagccaattattaagaacttcattactcagactggtgttgttaaaggacttcagcagtgcaaaggaagggattggtttgattatatttcagcgctccctctctcggacttgggacttccatttatgtcacttgatgaggttatcactgttaacagtggtgatctaatcttggaagcttttaagtgcatgaaggacaacaaaattggtggtgtgcctgtagtagaaggtcccaacaaaaaacttgttggcagtgtgagcataagggatattcgctttttgttacttaggcctgacttgttttcgaatttcaggcaacttactgtcatggagttcatgaagaccataggttccaccgtttctgattcagggaacggcctggtgaagccacctctcacctgttcgcctgacgcttctcttggcagcgtgattgacagcattgcatcaagaataacccaccggatatacgtcgtggacggtgacttcgaggttgttggtgtcgtgacactgcgagacgtgatctcttgctttatctatgagccacctggttactgtgacaactatttggcatcagccatggataagcttgaggagaaaggtgcaggttctgtggacacaagttgagcctttttctgtaacgcgaacaccaaaataacagactgaattagggagcagtagcaactctgatgtattcaggtttaatttgtggtgttgctgcagtgaaagtgtgtagaacaagagtgatgctgttgctccatggtctcttaatgtagtttgcttggtgttactaaattactatatagggagaagtcaatataccctcagtaaaagtccatctaacacctcatactttgaagtcggataaccaactctatcaacttcataatactgttcgtataaaaaaaaaaaaaaaaaaaaaaaaaaaaaaaaaaaaaaaaaaaaaaaaaaaaaaaaaa

SEQ ID NO: 1164 - DNA, 333 bp, Oryza sativa
  Clone ID: PAT_MRT4530_101055C.1
gcgcagcggaagaaagcgctaagaaggcaaaggaaccctcgcaaagtagcgcacgtcgatgtagaggaagtagtcgatcgtaccggctcgatcttctcctcctcgtgcgttctcctcgctgtaatcccacgccgatcagcaccgcaaagcagcggcacctctaccagtatccacacgtacagggacagaatactacgcgcagatatgctagtacccgcgtgcggttcatacacactcggctataacccgaaaactctttttcggtccacgtgtcaacagcggtccctagtagaacatattgatccactgggcatacataaagatcatatcggc

SEQ ID NO: 1165 - DNA, 577 bp, Oryza sativa
  Clone ID: PAT_MRT4530_101056C.1
agcttctcgagccctcctcctccgccgccgccgccgccgcctccgcctcgccgccggcgcagagtcgcaggaacgatgagccgacgcaacagccgcaccatctatgtgggcaatctccccggagacattcgcgagagggaagtggaggatctcttctataagtatggccgtattgtggatattgacttgaaaattcctccatggcctcctggttatgcttttgttgagtttgaagaccctcgtgatgcacaagatgcaatttatggccgtcatggatatgactttgatggccacaggttgcgggtggagttagctcatggtggcagaggcccttcttttgatcgatcaagtagctatagcagtgctgggcgccgtggtgccgctaaacgtactgattaccgagttatggttactggattaccttcgtcagcatcatggcaagacctcaaggatcatatgaggcgagctggtgatgtctgtttctctgatgtttaccgtgagggtggagcaactattggaattgttgattataccaactatgaggatatgaaacaagcgaatagaaagcttgatgact

SEQ ID NO: 1166 - DNA, 1618 bp, Oryza sativa
  Clone ID: PAT_MRT4530_101057C.1
aaaaaatatctcctcctcctcctctccgactaaaagcgtcgccgccgccgcgtcgtctccttcctcgcgccttcctctctctctctctcctcgcttccccgcgccgccgccgccgccgcctgagctcggcggcagcagggggacgataggtggtgtggtgctttgctccggcgcagcgtgctgctgatcgcgcgcgcgatgcccgcgtggtggccacggaagtcgaggtcgaaggcgaagggcgtggggaagccccccggggcaggggcggcctccgcggcgtcgtccccgcgcaagtcgctcgacctcgttgacctctccgcctccccctcggtgaccccccgggcgagggagaaggcgcgcagcctcgactcgccgtcggccgccgcgccgcggcatgggggcgggcggtgtggtggggggttcggggaggtcgggtacaagctccccgtgcccgtgggtgacgcggggccgggggggcaggggcaggggcaggagccggagttggagccggctcctgtaaggttcgaggagaacggggatgtggtgggcggcgtcgccggcgacgcctcgtcggaggagttgagcgtgtgctcgcatgattcgtcggacgaggcgacggatcagcaagtatgtaggtctacggatccggcgtcttttgtcaggggaagaaatatgccatctgactcacataagatcctaaatgaagacaatcatttcatgtcctatagcatgccacgggagcatcggaagttcttcgaggttcctgtcactaatatgggagaacttcatttgcattgtgatgatctgtcaactagcgaaactagttcacgtggcagaatgttgcccgaggattttcttgctccaagaacaagaagcctctcccctggaccgaaaggccatacttttgctgtaaataatgtaaattcaagggaatttggttttagtccaaggtcaccagtaaaaatgatggatggattgaagagcccacctcatcctttacctcttcctccaggtcctgctacttgttcacctcttcccccatctcccactgcttactcgcctcaccctctaggtcccactacttgcttgcaatccgaatcacaatggaaaaaaggcaaattgttagggagcggtacatttggccaggtttaccttggatttaacagtgaaaatgggcagttctgtgcgattaaggaggtccaagttatttcggatgatccacattcaaaagaacgactcaagcaattgaatcaggaaatagatatgcttaggcaactttcgcacccaaacattgtgcagtactatggaagtgagatgactgatgatgcactttcaatttatctggagtttgtttctgggggctcaattcataaatcgcctcgagggtatggtccttttaaggaacctgtgatccgtaattacactggacaaattctctctggtcttgcctacttgcatgggaggaacactgtccacagagatattacaggtgctaacatacttgtcggccctaatggtgaagtcaaacttgctgactttggcatggctaagcatatatcatcttttgctgaaatacgctctttcaaaggaagtccttactggatggctcctgagg

SEQ ID NO: 1167 - DNA, 117 bp, Oryza sativa
  Clone ID: PAT_MRT4530_101058C.1
atggagaagaaggcagctatatatgctgatatccttagagacccctttgaacttcagagaaggttcttgcttggtttgcctaatgaagatcttccagttgaagaaaaatattgttaa

SEQ ID NO: 1168 - DNA, 1286 bp, Oryza sativa
  Clone ID: PAT_MRT4530_101059C.1
atgacaagtgctgacgtcagcaaagggccggcgccgacaggcgggccccacacgtcagcgagccaagggggcggcccacggtggactcggtccaccgcggcacaggcgcgggcgcaccacgtggacggccacgtggcggccacggcggacatgcggcagaggtggcgccgacgtggcgccacgagggcaccgacgcgggcggcgccgaacggccacgtggaccggccgaccggggagcggcggagtgcggcgggaaaagggagggggagctcaccgagtagcatacgacggaaggaggtggccggcggcgagatggcaacgcgaggcggtgacggcagagctcgggacggacggaaacaacgacgctccgacgacgggcggcgctcgggaagaggcggatgagcggcagctgcaccctaggatgggaggggaggtgttagggaggggcgtgggtctgcaatgactgtagcagcggtgcgacgcggctggagtcggccagtggtggtggtggctcgggttgacgggggaggtgtggttacggtggcgatttgggaaaacggagcggaggccggggtagagcttggcacggcgttgccgacggcgcaagcggcgaggtgcagcgacgactaacgcggcggcaacggccggctgaaggcggtgtgtggcggtagtggctcggcctcgcgatgggagggtggttccggcggtggaggagggagatggagtgaatgccggggtgcggtggggcgctgtgatgctataggtggctgcggcgcagcgcggcagcgacgggagcggcggtggcgggcggctggagatcgccggcgagcggcggctagagggagcacggtggggaggtgtctagggggcgcggggtgctcggggagaggggaaacgaatgaagggaggcacgtgagtcgtttatataggtttagtttggactgaactgttgaggttagcaattttggtaaccttgtagctttcaactgaaccattgattggtgactttaattgatcttatctctgacactgaccatccgttgatcttcgcagaacgacgactctgaactgatcttctcactccttgcacgaagcttgaggctcgaattgacttgacttccgaacagacatgaagctgacagctggtcctctaggtttgacaacctcgcctgggtacgtcggctagagaaaagctacactacaagcccagccgttgcccacgctggcttgtgataagtacgataaattcttccagggcatcccgcgaaccggtccttaactgccat

SEQ ID NO: 1169 - DNA, 3621 bp, Oryza sativa
  Clone ID: PAT_MRT4530_10105C.1
agggcagacaaatatgtgtcgttggattttaagaatgaaaaatgagtaaaaacagttggtgcattgtagggtagaagatacaattaagaaaacaggtaaaatgaaaaatggatgtgatacaaagaactatataaacttacaatcagtatatgaacaaagaatatctacgcacaatcaatatctgtctatagtttaagctctacacatgcaaggcgtaagggggttttcccagaggtcgtagtgtgggaatgtggactcagggaggccagttcgtgtctggtgagtgatcatcacatcagccacgaaagttgcccatggcatgtagggatcgccgaagaacatggacatgaggcccttgtcaggcttgatagacttgagccgatgccgacccatatagcggcggaaaccgatgatcagcttggcgaaatcgccactgtgtgtcatgacgaacacgtccgatttcaggcaaaccaggaagtccaatacagcaaagctgtcctcatacttcttgaattgttctatctcctcttatcctgctagatcttctgttgaaaacaagttggattcaatatctcagcaaggagcacatcttttgcttcagccataaactggacgtgaaatcccccatctgtgagattactattattaccacattgcacgtaaaatggtacataattccacaggctctcgaggcgggcgtccttcttttcttttctccagtgctaatgaccaaaggtgagatccattattgaagcgtcttggccattgtttgggtctataatcagccttcattgctttctcctctctagttcccgcaaaatcgcaaaatgaaagacccaccattcctttctcaaacctaagatgaagagccatgtatggatttacattgcccgttcggttcctcatccttgttgctagcttctcagccatttcttcgatttcaggtaaaaacttcaaggcatggtaattaactctgcatctgagccggttaatctccattggaacattatcataccccagcctatcaacaaatggcttgatagacattatctttttatctttgatcctcggaagtacattgtcaatgtagaactgcgccgatgcatactttggaatatttttcacagttcgctttatactggtgaaaagttcatctttttctgtgaaccattcaggaatatctcgaacaatgcgtacatcatccttcaagtaatttatgaaataatctacatcaaagatatcttcaaatttcgtttgatctttccagatttgatcctgcttcagcacaggtaaaataagtgtggcattcattatcttagcaattgcaacagcattacatatggctattcgctgctggtttaatccaccctcggcatgaataaaaatatacccagaggtttcattctctggtacaagatggcgctcggcgcagggcttccaagatgccgctgcagcatgcggattctcccagagagattcccgctcgttcacgatgcgtgaccagacggaaggagcggagacgagagcggcgacgaagaggcaggcgacgacggcgaccaggatccggtaggacgccgaggcggtcggcgacctgggatcctcgagcgcgaggagtgaccggagcggggaggggaggtggtacttctggtggtggagtggagcggacgagcggggcgccccgtccttgccgtccccgcctccgccgccgcgcggggaggaggaggaggccacgaagggggaggacgaggcggaggactccgcgtcgcgcttggccggcgagctcgacgcgcgcgtcgccgccgccgccgccgtggcgtgccgtagctccgccatgccgctgtcggcggtgacgggagtgtcgttggattggctccgctgcgcttcctgggccagattttctggttgcggccttacggcccaacatgccgctggcaaaagcttcttgatgtggttgatgacagcaaccttgtctctgataatggcatacccctgaggcctcatgatgcggtccatctcaatcagcagatcctccacactgcacccttgtttctctatctcagaaaaaagaagccaggcgtgaacgagatcataggtgcgtgggtatgttgagaatgactcacaccaattatggatggtccccaataaaccacgatcatagatgatcttcagttttccagattctgtggaaggaactacattcatcacccagacatcctttttcctcagggatgctgcaaatccaccaagatttgcattcatatccataacatttctaaatgaatccttttgtatctcagatttcatgagtttccagtactgaataactctaaaatgccaaatctcactgtcatcagaaaaattgtttgaactgattccgagctcttcaagacgagggggtggtgctgtaagcctttgcggccagggaagcagattactgcccttaaccttgtggactctttccgagtaaggagttacacatgctttcatgggcacattccaagcagcatccggatcatcatcacggtcacacatatttggaagtgttcctggctctctcttcatatagcactcattagtcaatggtttgatccatatcactgtctgatcctccttagatgcaatctgccaacacattcttcgagcaagatcactcatctttctccatatgttccggttgatgggatccatagcataagcttctggcgatgaatatacgaaatacccgccaggcctcaaaaccctatcgacttccagcaacaagatcccatccctctgcagccagtcaatccgacaacgagagcagtgcgcaagctcaaatgagtggctggggtatggcagcctccttgtgcccagcacaccgagggttgacggaattcctctctcaagggcaaactgaatttggttctcgtgcacatcgttaggagcaagagacattgcaattatatcaagaggaagaaggtaggctccgaagcttgcaaccccacaaccaacatccagcacattcctgatgttccctccattgtttagcttaccattcggaaaattcagcatctgagcaaggtgcacaatgtacttgtcagcaccagtgtggaagtgggtacccccaccggggaagttgatcttgtcaccattcaccaccatccaccgctgatcggacttctcagaggcaaggtgggtgtgtggtatgttagccttccacacctcgtcccggctcctcggccacctgatgggcacccggtagccggcgggtggcgggatgaggcagttgaggcggcggtgcgcgggtgggcagtggcgctcgtagtgctgcatgagggagaggttgagcctgaggcggagctggttgtggaggccacggtccaggcaagggatcagctccgagtacctcgcgtcgcacaccgggagggaggagagcgcgaggtcggcggggacagcctcgaaccggcgctggagaggaaggcggcgggagcggagggtgggggcgaaggcggcgccgtagaagaggcagagcagcgccagcgcgatgacggccgccgcgagcagcgccgcgaagccacgccgccccagcgcgccaccgcctccgcctccccctcctcggctctgcggcggcttcgtcatcat

SEQ ID NO: 1170 - DNA, 441 bp, Oryza sativa
  Clone ID: PAT_MRT4530_101060C.1
tttgtttttttttttttttttgtttttttttttttttttttttttttttttttttttttttttttttttaaccacaaaccccaaacttggattttaaagaagccccaaaaaagggtcacataaacaccccaggtcacaggagggaaaggtacaagcaaaccctggataatcgaaaaggaaatgtttttaaaaaccagacacccaaactgttagatagaagcccccccgggccgatcataggatagcagcagtaatcaagctttggcaagggcccaggcaagaaccctgaacctttttaggactcgggaccctaataacccttgttaccatcggggaactcggagccgacccccttggagtccttttccaggggggggagggccccccgggcccaagagaactcccccttcttcatgcccttggcaacaaaccaatggaaaa

SEQ ID NO: 1171 - DNA, 291 bp, Oryza sativa
  Clone ID: PAT_MRT4530_101061C.1
gcaggcacatagggattcttgtcaggaccaagtctatccaggtattagatccagtatatagcccaaagctattccacaagtatgccaagctcgacactatcacgtgcgtcgtcaggccatcagtattctagcatggatgggggtgaatattcgtctttcaggtctcggtgaatatggtcatctttaccaggtactaacgcaagttagtcagataggcttgttgccgccctgtactccatcacagggcccatccttgtacggagccacaccaatagatgttttgatggcatt

SEQ ID NO: 1172 - DNA, 246 bp, Oryza sativa
  Clone ID: PAT_MRT4530_101062C.1
atgcggctgtgtagcaaacagcgctcgcgcggcggcgaggcgcacgcgcggcagcgcagcggcgcggcgctcgcatggtggagcggcgcttgcagggcggtgcggcacacacgcggcggcgaggcgcactcgcaaagcttcgatctggatgcaaaggtgcagatggaggccaacgctgctaggcacaaggaacatatgggagtaatagggaagcaaaaggatactggaaatgctaatctactgtga

SEQ ID NO: 1173 - DNA, 420 bp, Oryza sativa
  Clone ID: PAT_MRT4530_101063C.1
ttcctgctgcacgccgccgcgacggagctcctcctcggactagatgatgaggacatcactccttcagatacatacaacaatcctccaccggtcattcaaggaccaataacaagagctcgtgcgcgacaattgaatttagaggtgagctcgttcctatattcttctttatatgattttgagaatagattgctacctaatgaatatattgtgattaggaataaaggagaggacaaggacttagagagggacttagaggcatggaggatcatcaaggacgtccaagtcaatatggaggcccaaaccaggtcgacttcgagtacgattcagagtccaggaccagtctgcactaaaacaggcgcccaagtcgcatatgtgcacggattggggcgttccttatatggatggaaaacttagaacata

SEQ ID NO: 1174 - DNA, 404 bp, Oryza sativa
  Clone ID: PAT_MRT4530_101064C.1
gcgaaagatgtcgtacgtgttcagcggcgatgagacggcgcccttcttcggcttcctcggggccggctgcgccctcatgttctgggcatgggtgcggcgtacgggacggctaacagcggcgtctgcgtggcgtacatgggcgtgatgcgccctgcgctcgcgacggagtccatctcacccacgagcacggctggcgtgccgagcatatagtgacttattgtcactagaatcaagagcgcaagggtctactccaagggatacctgcactagcgtttggaccggtactctcatgtgccattcggtctcggctgtagacgctggagtcttgacttacgaatgaccagccggatatccgggtattgttgtttgagggggcaggaacaatatccaaaactgtaatgggg

SEQ ID NO: 1175 - DNA, 1582 bp, Oryza sativa
  Clone ID: PAT_MRT4530_101065C.1
caggactagaatacttgctgactactgaggcgaaaggataccgggtggcgaagatggctgaccttggattcggcgatgccaggagtggcaatggcagcaggagccaatgctccagggggaaggcgatgctgctcgccctcggcaagggcctccctgagcaagttcttccccaggagaaggtcgtcgagacctacctccaggacaccatctgcgacgatcctgcaacaagggcaaagctggaaagactttgcaagaccaccacagtgaggacaaggtacactgtcatgtcaaaggagctcctagacgagcacccagagctcaggactgagggaactccaacactgacgccacggcttgacatctgcaatgctgcagtgcttgagcttggtgctactgcagcccgtgccgcccttggtgaatgggggcgtccagcagctgacatcacccaccttgtctacatctcgtccagtgagcttcgcctcccagggggtgaccttttcctggcaactcgccttggcctccatccaaacaccgtccgcacttcccttctcttccttggctgctccggtggcgctgccgcgctccgcaccgccaaggacattgctgagaacaacccagggagccgcgtccttgtagtagccgcggagacgacggtgctgggattccggccaccaagtcctgaccgtccttacgatcttgttggtgctgccctgtttggtgacggcgcatcagctgcgatcattggagcaggccccattgctgctgaggagagtcccttcctagagcttcagttctcaacacaggagttcctaccagggacggacaaggtaattgatggcaagatcactgaggaagggattaatttcaaactggggcgtgatttgcccgaaaagattgaaaaccgtatagaagggttctgcaggacactcatggatcgggttgggataaaggagttcaatgatgtattctgggctgtgcatcctggtggtccagcaatactgaacaggctagaggtttgccttgaactccagccagagaagctcaagatcagtagaaaggccctgatgaactatggtaatgtgagcagcaacaccgtcttctatgtgttggagtatttgagggatgagttgaagaaagggatgataagggaagaatggggactgatcttggcttttggcccaggcatcacatttgaaggaatgctagttcgaggcattaactgagactgaaaggggtccaagaagactttcagctagatggaagaatcacaaacataccatttccaggttaagtatatagtatgaacttgaaacatctcataaggagcatagatgtcttgacagcatctgtgcactacatagttattgttttactgtaatctatgttttatgtatcaaacaatgtgaggtactctagtttgaatgcaagatacttgaaaaaatatcaggcaatacattgcatcctgttacattgtcatgtatagtaattttccagagtatctatttaaaaaaaaaaaaaaaaaaaaaaaaaaaaaaaaaaaaaaaaaaaaaaaaaaaaaaaaaaaaaaaaaaaaaaaaaaaaa

SEQ ID NO: 1176 - DNA, 181 bp, Oryza sativa
  Clone ID: PAT_MRT4530_101066C.1
ttcgcaattccaccacgcctacgcgtacgcttgacgaccgagatcttctggctatagacacgctcgttcttatattcatcgtgctcgccgtccttgccgtctgtgtggcaacagaatgccgcttcaacaattaaacatcacagcatccttggtgttaaagctagtactaatcaactttgca

SEQ ID NO: 1177 - DNA, 582 bp, Oryza sativa
  Clone ID: PAT_MRT4530_101068C.1
atgctcgccgccggccaccgcgcctccgccgtccgccgctacccgccgggatgcggccgcgaccaccgcgctgcgcacccaccggggcagcccggcccctccaccaccgccaccaacctcctccgaccacctccgaacgcatcggcgcgcgcggcgacgaaatcccccaagctggcaaggcagccgctcctcgcggtcgcgaccgaggggcccgatcacggcgaggggaatgggttggtggccggaatcgaggtccccgctgctaccaccgaggtggtgctcgtgcgccgcgcctccgccgtgcggaggtaccctccgggctgcgggaggggtgccgccgcgtccaaacctagtaaggcgcaatcggcaccgcgcaacggcgaggcggagtcaatcgctggtgatcagaaggtggagatggatgctggctccaatggttggatggattgcggaggagatgccggtggtgtgcggcaggaggaaggtggtgggcggccttgggacctgactgggctcatgttaccaccattcctgccatgggcgcggcatgggaggagatcgcagcgacagaagctgctgtga

SEQ ID NO: 1178 - DNA, 612 bp, Oryza sativa
  unsure (1)..(612): unsure at all n locations
  Clone ID: PAT_MRT4530_101069C.1
ccctctgggtcccccgtcggttgcntccgtccagcgcgagcgtcccntcgaccccggcgcggaagggagtgcgacgcggcccaaaccgcgcgcgcgctgttctacgccaagcctggagcaggagatcgctcccttcgcgagacgctgcagctccagagcatcggctacgtcgacatctacggcgtcctggacgacatgatcccgaccccggcaaatacggatttgatgtgtcgacgagaggatgctgcggcaccggagagttcgagtgacgcttctctgcaaccagctgacggcgacgacgtgcgccgatgaccggaagtttgtcttctgggacagcttccatcctactgagagagcttacagcataatggtggattatctgtaccaaagatacgtggataagctactctaaggttttgctacttacactatttacttactacttggttatcaaccgagaacacaatctcgtgctgtaaaaattaggagggtaattatgcaaccttagcacagttccagcacatgtcacatggaaaactaccaagagatgtgagacccttttgttctgataatggaattatgaaagtanaacttcttaaaaaaaaaaaaaaa

SEQ ID NO: 1179 - DNA, 493 bp, Oryza sativa
  Clone ID: PAT_MRT4530_10106C.1
gaggatcccaggtcgccgaccgcctcggcgtcctaccggatcctggtcgccgtcgtcgcctgcctcttcgtcgccgctctcgtctccgctccttccgtctggtcacgcatcaacgcgccctatctgtgccgcaaggacgggattcggctccactgccccagggtgaacgagcgggaatctctctgggagaatccgcatgctgcagcggcatcttggaagccctgcgccgagcgccgtagtgatgagatctcagatcttgtaccagagaatgaaacctctgggtatatttttattcatgccgagggtggattaaaccagcagcgaatagccatatgtaatgctgttgcaattgctaagataatgaatgccacacttattttacctgtgctgaagcaggatcaaatctggaaagatcaaacgaaatttgaagatatctttgatgtagattatttcataaattacttgaaggatgatgtacgcattgttcgagata

SEQ ID NO: 1180 - DNA, 319 bp, Oryza sativa
  unsure (1)..(319): unsure at all n locations
  Clone ID: PAT_MRT4530_101070C.1
nnnnnnnnnnnnnnnnnnnnnnnnnttggaagggggatgttcgtgaagataggcacatatatttattgtacaatgtccttttcggttgtcgaaattcaaattacattattgggggattttattattaatttacgagaaccgagggagaaacaaaagcttaaaatttaaaccatttacaggcccgttgaattttgatttatttattcaaaaattggaagctttctttccttttttcatttattgatatattaaaccgggcacgcacaaaacatttttttatttccttattgaggttggcgtaccaaaaccctttgatttt

SEQ ID NO: 1181 - DNA, 321 bp, Oryza sativa
  Clone ID: PAT_MRT4530_101071C.1
atggggaggaacgggagggagaaaaacgcgagagggggagagagaagcatacgagtagtatgcggctgggaggagataagcgtgagcagcatcccagccacccactcggcctgcagctgcgccggcgccgccgcgacgcgccagcgcgtggttcccaccttcacgagcaatcaagatcttggtgaagtccctgctatcccggcggcgatctcgctgcctcatggctggccgcgtcccagcggctacgactctgagaaacgacaccccgccgacgattcctcccacgtaagtggagaacggaacatggacggccccacctag

SEQ ID NO: 1182 - DNA, 1083 bp, Oryza sativa
  Clone ID: PAT_MRT4530_101072C.1
cgagggagagagagagagacacctctctctgtgctgcgtcacccagcgcggcggcggtgagctcatcggcgccgccgccgcctcggtcgaccacggggtcaccactccttcacgtacgccggtgtacggcggctcgcttcgacggagcaggagcaggcgctcctgacctgatcatccggacatcaagtagggacgagctcaggcaggggaggatcgatcggatcgtgattcatttggtttcttcagatcgtgtctctgctcccacgcacactagctccacacttgacaccactcaacgcgcgcggcgccaagataatcctcctcctcctcctcaattcctcatcgtgctcatcaatctgtatgggggagttgggaactccaggaaacgaacagagcctaagtgtttacaccaaaacggttaactgcagcattatcagagcacccgcaatgactagattaatagtaaaccacttcaatgacacttgtatatttcactcactcggggctgctactgagtcccattacaaaaggcgtggtgctttatctatccccaaggaggattttgaggtgactttatccattgatgactacgtcagccagtacaataagatgatttcaggagagctcggaacagaaccaggtggaggtagaggtcaaagccgaatgcatgtggcactaagagtgctacaagaaattggtattgctgcagaagatcctggccttgagggcatgcgctataaaatctataactggaagatgattaacaaggaggatgttaaattcaaggaaattgccgaagagatcgggataaaagctagggtcatggctgcaggattcaagatatctagcaacttcaggaccaccaagccaggcgagatttactcctacgagcctaacaagagggagaaaaacgaggatggagtcacacgttcccattgtgtcctggtggtcggatttgggcgacgagaggggcaagagtacctggtgtatcagaatagtgctggcatagagtttggagaggagggctttggccgtgtctatctcaaggacgtgctgaggatggcaaccttgaacgtcatttga

SEQ ID NO: 1183 - DNA, 433 bp, Oryza sativa
  Clone ID: PAT_MRT4530_101073C.1
ttcttcttgcaggtttctctggatgcactttcccttccagtgccaggtaacatgatgaatctctttgctcctcctgcattaagttgtggcatactctttattttaccattttagtttgtaattagctattagtactaccacggaatacggtcaaattattctggaagattagtcaaatgtagtacacctgctgaatcagcatcttggaaccattgattgatcatgctccatccaccgacaccagtaaattaaactagtactaatagcgaaatgcaatatactactataataatattctttgcagctcgattagtctagatcaacttgatgtgataacctaccctcgcactaattacttcaaagatttactgacaagtttgttgcaatgtctgaactggagtgatgttcctgtgtctttcctttgaagaatctg

SEQ ID NO: 1184 - DNA, 2727 bp, Oryza sativa
  Clone ID: PAT_MRT4530_101074C.1
atggcggagctggtgccgcaggtcgtcggcgccgtgagccgcagcatcgccggccgcctgctcgccgacatcgacctcgccagcagcgtcggcacgaacgtcgaggacgtcaccgacgcgctcacacggctgacgtcgatacgggccgacctcgaggcctccatggggaggctgccgcagcggcggcggccggaggaggtcacggactggctgtcgcgggtggacggcgccgagaagcgggtggccaagctccggcgagagtaccagcgccggtgttgctcctgcggcggcggcggcgccttctcgctcaacctgttcgcgagctacgccattagccggcgcgcgtgccacgagcgccaccgtctcgccgcgctgctcggggagtgcgacagggtgaggagcctcgccgccggggcgccccggccgtcgtccggcgccatggtcgtgccgtccacggtggtcggcatggagggctacctcgaggaggccctggcgtgcctcgacgaccgcgacgccggtgtcgtggccatctgcggcatggccggcgtcggcaagagcacgctgctgcgacgcatcaacaacgtgttcgtccaggaccccgacaggaggcacgagttcgactacgtcatatggctcgacgcgccgggcgactgcgccgccgtgggcaagatgcaggacgccatggctcaccggctcggcctgtgcgcgctcccggacggcggcgcgccggaccaccgtgcgcgtccgatctttgaagtcctcagggactcgagcttcttgctgctgctcgacggcgtaaccaagcctgtcgacttggtggacatcggcgtcccgcacctcgtgcacgacgatcgccggaggcagaaggtcgccatgaccacccgaacaaggggagtctgcggcaggatgagctcgtcgcgaaggattgacatgcaatgcttggacagtgaccattcatggcgtctgttcagagagatcgcccgcgacgagacgatcaacgctgacccgaggataccggacttggcgaaggaggtcgccgggaggtgcggcggcttgccgcttgtgctcaccgccatcggcggcgccatgaggtgcaggaggcagccagaggagtgggtgagcacggtgaccgcgctcaggaacttggagctcgccaagatccccgggatggacgccggcgagaagccaggcgccatgctgcgatcgctgcaagagagctacggcgacctgcgccatcccgtgctccagaagtgcttcctcgccacgtccctgtggcccgagggccacgccattgacaagggcgagctcgtcgagtgctggatcggcctcgggctggtgggcgagtcgctgccgatggacgaggccgtgcgcacggggctcgccgtcctcaacgagctcgaggaggccaacctgctgctgcccggcgacgccacgggcgaggtgaagctgcacggcgtcgtgaggggcgcggcgctgtggatcgcccgtgacctcggcaaggcgccgaacaggtgggtggtgtgcaccggcggcgtctccctccggtcgaggcagaagctagtggagttcttcgagcgcgcgcgcgacgcggagcgggtgtccgccatgcgcagctcggtcgagcggctgcgggcaatgccgccgccgtcgtccccgtgccggagcctctccgtcctcatgctgcagcacaacgcggcgctgcgtgacatccccggcggcttcctgctcggcgtgccggcgctcgcgtacctggacgcctccttcaccggcgtccgcgaggtcgccccggagatcggcacgctcgcgtcgctgcgttacctgaacctgtcgtcgacgccgctggagtccgtgccgccggagctggggaggctgcggcagctcaggcacctgctgctgcggcacacggcgcgcctctcggcgttccccgccggcgtgctgcgtgggctgccgagcctggacgtcctcgacgtgtgcccgagcaggtacaccgagtggtgcggcgcgggaggaggaggaggaggagcgagcctggacgagctgaggtcgagctcggcgttcgtccggtccctcgggatctccgtcgcgacgctcgccggcctacgcgcgctgcgcggcctcgacaacgtgcgcacacggcggctgaccgtgacgcgggtggcggcgaccgcgccgtctgtcgcgctgcgcccctccatgctgggcctgctcgaggccctgcacgagctcaccgtcgccaagtgctccggcctgcaggagctggaggttgtcgccggcgaggaggacaacgcatggtggcgccttccggagctcaggaagctcgagatcgatgagctgcacgagctggcggccgtgcggtggacgcggacggacgtcggggcgttcttgccggcgctccggtgggtgaagatctcacactgcaacaggctaaggaacgtgagctgggcggtgcagctgccatgcctggagcagctggagcttcgccattgctcggagatggttcacgtcgtagacattgacggcgacgacgaggagcagcgacgagagcacccggagacgcgcacgttccgctgcctcaggaggctgctgctggtggagcttccgtcgatgggcagcattggtggtggtgcagcgttgagcttcccttggttggagaccctggagatcgccggctgcgacagcctcggagagctacctgttgagctgcaaaaaaagttgaaggagatttga

SEQ ID NO: 1185 - DNA, 198 bp, Oryza sativa
  unsure (1)..(198): unsure at all n locations
  Clone ID: PAT_MRT4530_101075C.1
gactagttctagatctntatcgntttantctctctgtcccnggnttttttcgtntcntttcatgtngccggcacatatccaccaccggctccaacccnccccaaccgtggcggagcccctcccnctaccccggcgcccgtccctccgggctccggcatcctcctgcctatgcngctcggccngtgcttcgtcgcaccg

SEQ ID NO: 1186 - DNA, 255 bp, Oryza sativa
  unsure (1)..(255): unsure at all n locations
  Clone ID: PAT_MRT4530_101076C.1
cgncacgacgcntatagagagagagagaggcangatgcagatcttcgtnnagacgntgacgnggaagtcgatcacgctggaggtggagagcagcgacaccatcgacaacgncaagnncaagatccaggacaaggaaggtatccctccggaccagcagngnctcatnttcgnggggaagnagttgcaggatggccgtaccctgtncgactacaacatccagaaggagtcgacgctggacctggtgctccgtctccg

SEQ ID NO: 1187 - DNA, 453 bp, Oryza sativa
  Clone ID: PAT_MRT4530_101077C.1
ctactcgttttctcttgaccttggccaagagagctccctgtcaacctcgccgaccccatcttctctcgagctaggacaaagggtgggcagtgggctcccccaccggctagcggcggcggcgatggcgtggccatctgcggaccattccagctccttgcagcgctgcccgtggagatcgccgaaggtctccgctgcaaccccgtgcccctcctcaagaaccccaggaatggcgcctattacctccgcgtcaccagcatcgccgttaacctcaaggcggtgcctatcccatcccgcgtgccgcccgtgaaaccgttcaagatgtgctattaggtgtctgcgctcggcacgacgcggctcggcttcgccgtggcgaacatcaaccagagggccgtgcatcatctgggtgacgtaggactccaccgactcgtcgtcgacggtcttggtagcagccat

SEQ ID NO: 1188 - DNA, 1734 bp, Oryza sativa
  Clone ID: PAT_MRT4530_101078C.1
atgccaaaggcatcacctttcctctccctcctcctcctcctcctcctgatcaccatctacattgcccatggcgccgccggtgacgccatcggcggcgacccatggcaggagcccgaggtggcccagcagccagccgtcgtcctcgccggcgagtggcagctcctgcaccagaacaccggcgtctcggcgatgcacatgcagctgctccccggcgactacgtcctcatgttcgaccgcaccgactccggcccctccaacatctccctcgacgcgctctcgccgtgcgccgccgcggcgaccaccgccctcgccgccggcggcggcggcgccgttgactgcaccgcgcactcggtgctgctcgacctccggtcgaacgccctgcggccgtacccgctcgccaccaacccatggtgttcgtccgcggcgctgctccccaatggcacgctgctgcagaccggtgggttctccaatggcgaccgcatcgcgcgcctcttctcgccgtcgacggggtgggtcgatctcccgtcgttcttggccgtccggcggtggtacgccaccgacatcctcctcgccgacggccgcgtgctcatcctcggcggccggcggcagttcaacttcgagttcttcccccacgacgacgcgccggcgccgcagccgaccttgttcccgttcttggaggagacgaccgacatggacgccgaggacaacctctacccgttcctccacctcctccccgacgccaccgtcttcgtcttcgccaacgaccgcgccgtcgtgttcgacccctacaaccgcgccccgctccgccgcctccccgccatccccggcggcgtgccgaggaactacccgtcgtcgggatcctccgtcctcctcccgctccggccggactcgccgtcgcacgccgaggtgctcgtctgcggcggcgcgccgcgcggcgcgtaccgcctcgccctccgcaacggcacgttcgccccggccgaccggacctgcggccggatcgcgccgaccgacgcgaacccggtgtgggcgatggaggagatgccgctgccgcgcgccatgggcgacatggtgctgctccccaccggcgacgtgctcatcgtcaacggcgcggcggccggcacggcggggtgggagctcgggcgcgagccggtcacctacccggtgctgtacaagccggacatgcagctcggcgcgcggttcgaggtgctcgccgcgtcaaccatcccgaggatgtaccactcgtcggcgacgctggacacgctcggccgcgtgctcgtcggcggcagcaacccgcacgtcggctacgtgttcgacaacgtgacgtacccgacagagctcagcctggaggcgttcctaccaccatacttcgacgcacggctcgacggcgtgcggccgcggctggtggcggcgccgtcggaggtcgggtacggggaggcggcggcggtgaggttcgaggtgcccggcggcgcggtctccggtggccccgaggaggtgcgcgtggcggccgtggcgccggcgttcgcgacgcactccttcgggatgaaccagagggtggtgtccctggccgtgggcaccgtcgcgcagctggccgccgggctgtacgaggcgcaggtggccgcgccgccgtcgccgtcggtggcgccgccggggtactacctctggttcgtgctccacgccggcgtgcccagcaccgcggcatgggtgcgcatgcggccgctcggtgcagcgacgtga

SEQ ID NO: 1189 - DNA, 128 bp, Oryza sativa
  Clone ID: PAT_MRT4530_101079C.1
tcggaccgccaacgccactccatcctatcgacttatcctctcatcgaaagatcaggccaacaacagccttgagtgtcgagtgaaactcaagcgttggctagaaggtctcttgcaagaacagtgcgatg

SEQ ID NO: 1190 - DNA, 824 bp, Oryza sativa
  Clone ID: PAT_MRT4530_10107C.1
cccgggctgcaggcacgcggcgcgagggagagggagactcgggcggggtccctcccccggcccgcccccccgcgcctcggcgacctccgccccgccccctaccgccgctccgtccccctcttcgtccccatcccgtgctggtacctatcggtggagaaggctcgatatgtatacgtgaggctgttcccggagcccgggcgggtggccaaggaacggcccccgctcgcccgcttccttctccgagcttgctggtccggcccgccacgccgctcctgcgtctcccctgtgcatgagcatctcctccgaagcagcgaagactttttctggcaacttgatacgatgtacgctgggcgtttcactattgatgttgagtttttggacctgaagatagcctctaacaatgctgcagaatcatctacctcgatttggccaaatgaaagcatagcggtgcagaacattgctagtaagagcagtctcggatgcctttcgcgcatgctcacggagtcgatacatgcagacgtcaccataaatacgactgatggtgtcctcaaggcccataaggccatccttgcatcatgttctcctgtgtttgaaagcatgttcctccatgatctcaaggaaaaggagtcctccacaatcaacataaatgacatgtgccttgagtcttgctctgctctgattggcttcatctacgggaccataaagctagaccagttctggaagcaccgcctctcgctgctcgccgcagcgaacaagtacagcatttctgatatcaaggactgctgcgaggagagcctcctggaggatataaactctagcaatgt

SEQ ID NO: 1191 - DNA, 2754 bp, Oryza sativa
  Clone ID: PAT_MRT4530_101080C.1
atgggtggtgttagtggtaagctggtgtgggtgttgctcgtgatgtgctcctcatggctgatcgccgctgttcatgcccagcaagcggcaacaactgatccaatcgaagtggcggcgctggaggcgatcctggggagatggggcaagacgacgtcgccgctgtggaggatgagcggcgagccatgccgcggcgtccccgtcgacggcagcaccgacctcgacggcaaccccaagaacaaccccggcatcaagtgcgactgttcctacaacagcggcaccgtctgccatattacccagctgagggtatacgcattgaacgttgtcggtcagatacctgcagaattgcagaacctcacctacctaacttacttgaacctggatcaaaattacttgtcaggccccataccatcattcattgggcaattgactgccttgacagaattgcacgtgggattcaatccactctcaggatcacttccaaaggaacttggaaatctcacgaacctcaatttgctaggcattagtctgaccaattttacgggtgaactccctgaagaattgggcaacttgagcaaacttaaatatttaggcattagtttgaccaatttttctggtcaacttcctgaagaattgggcaacttgaccaaacttcgacaattgtatactgatagtgctgggttgagtggcccattcccttctacgctctcaaggcttaagaacctaaaactcctgcgggcatcagataacaattttactggaacaatacctgattttattgggagcttgtctaatttggaagatctgcggattggtgatattgtaaatgggagctcttcattggcctttatcagcagtctgacatctctggataccctcgtactgaggaactgcaagatatctggagaccttggagcagtagatttttcgaagttcgcaaacttaactttcctggacttgagttttaacaatatctcagggaatgttcctaaatcaattctgaatctacaaaagcttatattcctgtttcttggcaacaacagcctaacaggagaattgccagatgggataagcccttcgctaacgaacttagatttctcatacaaccagctcactgattattcctttgcggtagactgtggtagtaatagatctatcagagtttcggataatactatgtacgaattggattccacaaaccttggggactcatcatattatgttacaagtcaaacaagatggggcgttagtaatgtaggaaaattattccaggccccaaatgacagtaagataatacatagtggtgagaagatccagaatgcagtggattcagaactattccaaactgcaaggatgtcgccgtcgtctctgagatactatggccttggacttgagaatggaaattacaccgttctgcttaaatttgcagagttaggttttccagacacgccaacttggcaaagcttaggaaggagattttttgacatatatatccagggtgaactaaaagaaaaggacttcaatataagaaagatggctggtggaaaatctttcactgctgtttacaagagttacacaacaactgtgtcaaaaaactttcttgaaatccatctattctgggctggaaagggcacttgttgtattcctattcaaggttactacggaccattgatctcagcattaagcatcactccaaattttagtcctactgtgcgaaacggtgtacccaaaaagaaaagtaaagcaggtgcaattgttgggattgtgattgctgcctcggttttaggatcagctatcttattcggaatatttatggtcataaagaagagaagaagaatggcaaaacagcaagaagtttatgagtatcttaagaatggaagcttggataaagcattatttggaaacggtagcataaaactggactgggcaacacgcttcgagatcattttaggaattgcaagaggcctaacttatcttcatgaggagtcgagcgtgcgcattgttcatagggacatcaaagctagcaatgtcctacttgacacagacctcaccccaaagatctctgactttggactcgccaagctttatgatgagaagaagactcatgttagtacaggaattgcgggcacatttggttatctggctcctgagtatgcgatgagacgacatttgactgaaaaggttgatgttttcgcattcggggtggtagcactagagattgttgctggtcggtcgaacaccgacaattctcttgaggaaagtaagatctatctctttgagtgggcttggagcttgtatgaaaaggagcaagcactcgggattgttgacccaagacttgaggaattcagcagggatgaagtgtatagagtcatccatgtcgcactcatctgcacacagggctcaccctatcagcgaccaccaatgtcaaaggttgtggcaatgctaactggagatgttgaggtggcagaggtagtgacgaagccgaactacatcaccgagtggcagttcaggggtgggaataccagctatgttaccagccactcaggatcaactacccctaagctcagcaggcagaaagagattgatcctctcactcaatcaccaacaatcaccggagttagccatgagcatgagggaagatcacgtttagatcagtttgtggagccgtgcaggttgctgtctatggcgaagcaaggagtggcggccaaattggaccacgtgcgagcatctacggtgtctgatgttgatgttttatga

SEQ ID NO: 1192 - DNA, 321 bp, Oryza sativa
  Clone ID: PAT_MRT4530_101081C.1
atggcaccgcccacgcccggcctctcggccgccgctcgcctcgtcatccgccgcttcctcaccaccggcgcggaggccgcggaggcggtggctccccacgccgcgagggcgaaggggaagaaggacaagcggccgctgggtcggcggctgctggagctcggggacgcggcgggggaagggagcgtgtcgcgggtgctggacgagtgggtgcgcgaagggcgggaggaggcgatcgccgcggcggatctcgccaagtgcgccagggatctccacaaggtcaagcgcgacgcccacgccctcgagggcccctttgaatcgtag

SEQ ID NO: 1193 - DNA, 173 bp, Oryza sativa
  Clone ID: PAT_MRT4530_101082C.1
gcccgaattggtgaatgctgcgaggatggaaatgtgaatgctgggatctggagatgagatgctgactgcgcttggtgggcgaagtatggatggcatgcagatgccattgaggtttgttgtactgctcatttccatcgattggatccattctgatctccaaaaaaaaaaaaaaa

SEQ ID NO: 1194 - DNA, 452 bp, Oryza sativa
  Clone ID: PAT_MRT4530_101083C.1
ctctaacgactcaatagggaaagctgtacagccagcacgtaccggtacccgatatttcaaaatcgacccatctcgttaggctactcatgagtaaaaatcgggcctgtttagaggcttttgataatcatagaactggcatgtttagagaaaaaaaaaaaaaaaaaaaaaaaaaaaaaaaaaaaaaaaaaatataaaaaaaaaaaaaaaaataaaagggggggccgttttaaagaaataaaacttaacaaaacggggggacccgactaaagaactcaattttagtgacccctaaaatgcaaattaatggcccttatttaaaaaccccaaaattagaaaaaccccggggtttcaaaaaaaaattgcctggaaaaaaattccctttccccaagttaaataattagcaaaagagcccctttttaacgccttgttaaaaataaaaaagcctaaaatgg

SEQ ID NO: 1195 - DNA, 320 bp, Oryza sativa
  unsure (1)..(320): unsure at all n locations
  Clone ID: PAT_MRT4530_101084C.1
cgaaacacaaaaacgacacgacccgaacgggagaagagccaggacgacgnagccgccacgggcggggaggcgcgcgncaaggccgccggcggacacccggacacgcacggcgacggcccacgcacgaagaggaggccgcggacccgggaggagaagaaggcgcccgacgagaagaagcgcaacgacgcccagaacaagcccgaccggncncggaagaccagcccagaggggaaggcgcccgcgancaacggcggagacggcaaacggacccccgacccggacgcgatcactcaagccaccgaggagaagcacccaacccc

SEQ ID NO: 1196 - DNA, 2400 bp, Oryza sativa
  Clone ID: PAT_MRT4530_101085C.1
atggaagaagatgaagcagaaaaggagaacattccggactgggctcagttcggtggatttgatggaaatacaacgggcgagttggatgaggctattgaagataacgacgttgcagatgatcttggtcagatgttgcgggacgtcaaggatgactgcgaaagttgcgaacaggggcacaaaaagttgggtaccactctagaattcttgcaatggaaggcaaaaaaaaatggtgttagtgacaaggcatttggcaagttattgaaactcctaaagaacattcttccggagggaaacaaattgttcgaaacaacatacgaagctaagaagttagtctactctctaggactagaagttcaaaagatacatgcatgtccgaacgattgtatcctctatcgctgtgaggagtacgagaacctagaagtatgcccggtttgtaaagcactacgatacaagattaaacgagatgatccaggtaaagttgatggacaaccttcgaagaagagagttcctgctaaggtgatgtggatcaaatcagctggcacgcccttagcactcgagccaagccttggacatgcactggagttaagcagatctcccaggctgcgcgtgtttttgcatcgacacgcctttttggcacgcccggtgggactaagactttcactcacaatgtcgacaactaaagtcagcgagaagaacatcatccttgtaaaagttgaagatctttctgaggaacaaagggcggatatggaacaaattatacaacagttcagagatacctatctaaattcttacttcataaacccgcaaggggaagtcgtccaaaaaggaaagtttacgttgctaaaacaagaagaggaagaaacgaacgacgtcaaggttgaagtgaagatggaagaagaactgcatacattccaagatcgtgttgactcgaccatcttcgggggcaacattcccaccatatggaatgtccagggacagcatgggaactggcccgcttcaaggaaacccagcatcggctctaggaaaaacaatgccctcttcagcaacctttcaaaagccgatgtctggggtacaagactcgaagatccccaatccaggacaattggtgcgagcttcacagatgcagtccggcggaggaattggaacatcggctcttcagctacttccaagccaacagatgttggccaatcagccgatggtgcatcaaacactaacaatgcccagccagggcaatcacagcagacgcaccaaccacagctaccaatcggcaacgtgccgattgggccgcagtacgttaatgtggaccccaacattactccttaccagcaaattccagggtttaacattggtggccagtatcaacctctgtcaccaatgcaatattggcaagcatcttcaccgtttgcccaggttcatccccaaccggtttacaaccagtatgaacaacaatatcagggaggggctcagcaacaaatggccgatgtaattgcagaggtggtcagagagcaatttggcatcaagccaaaggacagcagggatcaaatcaactggtacgcttgcatacccgaaggcgagttttcgacctgcactggagttaagcagatctcccaggcctcgtgttttacgtcaacaccagaatactttgacaaggtgccattgcccaaccgatacaagatcccaggcttctccaagttctcagggcaggacaatgtttctacatatgagcatatcagccaatgcctagcgcagtgcgacttcgagagcctggcacacttggctcaaaaggtattggctcatgaacaacacttccaggaggccaaaaggttcaagaaggtgaactatgtctacagatatgcttctgactccgacgatgatcaagacactgaaattggcttagccgaatggtccaaattcaagaagacgatgatgtgtcaatgggtcaaggatacaagcaaggaggagaagtatgattttgacatcaacaaagccgacaagatatttgatctactgctgcaggagaagcaaattcagttaccagtaggtcatattctgccatcggctgaggagctgaagaagaggaagtactgtaagtggcataataccggttctcatcacaccaacgaatgcaaggtgttcagacaacaaatccaatcgtccattgaacaaggaagaattaagtttgatgatggaaaggagccgatgaagatcgatggacatccgtttccggtgaatgtggcgcatgccacagttgatagtagtaggttgattagcaaataccagaggaagcatgacaggcgagttcgaagttttagacgtcaccaagatgataactgccacagttttgccgtcgtcggacgagacgcatttgagaagtatcccgtttgccgccttcttgtatag

SEQ ID NO: 1197 - DNA, 358 bp, Oryza sativa
  unsure (1)..(358): unsure at all n locations
  Clone ID: PAT_MRT4530_101086C.1
acacttcattccacacgagcancangnngtcggnnagctaannttagnnnacgtaagttatctngnaanancanntgcgncgaagaccanancncancagnacantntatgtngtngattnggccaaatggggctannctgnngagcnaganactcnncgcaggtnctatttancactcagggagtacnnaaaataacgnnaaangtagtatcatttcacncaagtnatggtctncatacttgtnccnacaatttctcannccattntgnnanggntngngctagnagtcanggntaacagggtnccannataggcaangggnttcngccantnngtttcgnaanatccncgttttca

SEQ ID NO: 1198 - DNA, 191 bp, Oryza sativa
  Clone ID: PAT_MRT4530_101088C.1
actgctgctgtgaggtgacctgaaatgaggcaatgataaaatggtggtgggtgctgaaaaagacactgcgtgaataggtatgaacctcataagttcgttcgttcgttctttgttgttgtttctacccggctatctaataataatacagagacccgaagaacccctcggggttcccaaaaaaaaaaaaaaaa

SEQ ID NO: 1199 - DNA, 436 bp, Oryza sativa
  Clone ID: PAT_MRT4530_101089C.1
atggaggaggaggagatcgagccgagggagagggagagagatggaggtggtgggggtggaaaccagggagcctgtgcaaccttggaaactctcaatcacatccacaggctgtgcatccgccacgccatcgctagggatagagacccagccgcgccgcctcatgagtcccgcgttgggctgcgccagccacgcagtggtggtcggaggtggccttgctggcggccgccagggagatgtcctcgacggtggtggtccggttcaggatgtcctcgacggtggcacctctgcccagttctgtagggcacgaattggagccacgggcagcagcgtggcgcatcatcatcggcagcaacgcttcaccggcacctgcgcatcaccggcaaaaaatgagaaggggcttcactgccagcaattactaggactccatcagcagtga

SEQ ID NO: 1200 - DNA, 414 bp, Oryza sativa
  Clone ID: PAT_MRT4530_10108C.1
atgcccaagcggcttgatccagagctcgtgcactctttatatctcaactgcaagaaggatcaaagacagggcgtgccatgcgatccgccgctcggcgatgctgcacctgccgagctgcgtgctcttctgtccattgaatcgattggttttgaggcgagaggagaccaccaacgccgggcggaaattgtttggcaactcgtgcaagattccaggtccattgaatcggtaggttttgaggcgagaggatcccaccaacgccgggcagaaattgttcggcaactcacgcgagattccagatttgttgcgcctcaggcagctgctgatctgaccagcggtgcttcaagtaaaggtttagcgtttgagcacatcaaattatttggctataaaaattacagacttttgatattggcttaa

SEQ ID NO: 1201 - DNA, 646 bp, Oryza sativa
  Clone ID: PAT_MRT4530_101090C.1
cattctcaaaccaaacacctcaaatcaacaacaacaacaacaacaacaagaacaagaagatttaattaaaaaaaaaactcaccgaggtggccggtgggtggggatggaggaggcggtatctgtgcatccccggcctcttggaggtcggatccggcggctagcgcggttggtggcgttggtgagggaggcatcggtggcgttggcggccgggaggtggggggaggcaccggcggaggtggaggcataggtggcggccggctatcgcgggcggaggcggaggcggaggcgcggctggaggcgtcgccggcagaggcggcggaggtggagaccgttgccgccgttgggcctcggccgcctccactcccgccgtcggccgccaccgcgccacggctccagatccatcgtccgccaccgcgcctcctcccgcccctgtcggatctggcggccgggccgccgccgctcctcccctcccgcccttgccggatctggcagccgggccgccgctgccaccgcgcctccctcccgcccctaccggatttggcggctgggccggcgccatggccccagccgaaccagggccacctcgctatccgtacagaccttactggatcgggagcgtgactcaatatccataatttttagaatt

SEQ ID NO: 1202 - DNA, 378 bp, Oryza sativa
  Clone ID: PAT_MRT4530_101091C.1
ctagccgcctccccacgctcgccttctctctccaactccggccgccatctccagccgccttttcccgtcgcgccggccgttcccgatcagtgccgccacttccctctgctccgcaaggttgatctctaccacggccgccagttcttttgcgccaaatcccgccggaaggttgccgtcaccgtgaacccgtgggttgttgccatggtttgatctccactcgcaccgttcgtcgtcgccttcggtcgccgccgcctccattggattcgcagcaccgaggagaagcccgttcacccctcggttgtcgtctcctgtcgctgaaactccgccgccatcatcgatcagtaccccgtcgtcactcccgttctcgtcgccggccat

SEQ ID NO: 1203 - DNA, 271 bp, Oryza sativa
  Clone ID: PAT_MRT4530_101092C.1
atttatttttttgcacatagaatacgaaaacattaacgacgttcacaattatatttgcgtatacgtacaaataattcacacagtacgccaacatttgagtgaaaggactagctacgtacggtacggttggcacaccaacaccaactacaatttcccacgagagtaccagacgtggccatgtctgtgctcaattgaaggcagatgcttgccactctgccagcttcatcttggcgtactcagccaacctaccgagtttccggaaacaaccgcc

SEQ ID NO: 1204 - DNA, 466 bp, Oryza sativa
  Clone ID: PAT_MRT4530_101093C.1
ggtttcacctagtcaatatggaaattgttggcgcctccgaaagtgcaagttattctcatgactcgtcattcaaaatacagtgtggacgacggacagattggaacgaagagggtggcaaaatcagaaggtttgcccgttatgctatatggccgacgagtatgcggatcatctactggcgaaatatagggccacactgacatacaattggataagtgggatgaccgttactcagtcaaacactggtggaacctagtgcttgagtcccctaataaccccgtctaccatttcgaactccggtgatcctagtatcttgggaagtatggtgcaagcgtaatgcaacaatcttccgccacaaagcctcaacgccggcctcaatcctagccaagagattaaggaggaagctggagcataggcgaaagtagaagcaactagactctaagagtttggaattttaggagatatcatc

SEQ ID NO: 1205 - DNA, 1244 bp, Oryza sativa
  Clone ID: PAT_MRT4530_101094C.1
gatcatattgaaaacatggcttgtgttctttttttttttgaagaggataataccatttgttgaccattttatttggatttacaagccataggtccgacaggcatcaatccgggtgcatggatccttacatataagatcagcatgcatgaaaaaattcttcaaataatcaaagaattctcaaacaaacagataagctgacagattaatttaaccaatcatagctgctacctagctactaattcccccggaagaaaccaacaactgttgcaaaatagtaagaaatggggaaaaacgatcaataatacacggttccacactttccacagacacgtggaaatcaaatggtaaatcaatacagtactactagtagtagtaattaatttttccttgtttgatccagctatcttcagtttcttcggctcacaggctgagagtggggttcacctggagccacgacgcgccgccatcgtctttcttggcacgcttgctcgactccgcctccttcttctccgactccggcagtggctccgccacgacgatcctgttcttcctcttctccaggaacctctgcagcgacaccttcctcgcgatgggcatgtctggtaggcaaggctgccccgctgcggcgccggcgtctgagacggccgccgccgccgtgctgtcgcgggagccggcgagtttcatcagctcgccggccttctcggcggggaaatcgtcgaacaccaccacgctcccgccgtagaagatggtcagctgcgccttctcggtgatctccttcctttcttgcgtgtctttcagcgtcccagcctgctgagggaagagctccatggtcttcctcacctccggcgcctcctcctccgcatcagcgccgccggtcatgaggctcatggccgtcaccgccggcaagaagccaccgccgccgttgcttccactgtgctccttcatgtactgcctgagcaagccacacgtcaccgcgaacctgctcccgttcccggccaccgtcgtcgccgccgcgttggcgaccagctgctgctcgctactaccggccatgttgtagctctagcaaaatcagctagctcacatcaaagctcgggaaatacactttggcttcctgctgcaagaaacgaaacgaggacgaaacggccgcgtgggacgcgtgggtaaaaaaaagaaaaagaaaaacaaaaaaggagaacacaatgtacgccatggcaaaaaaagaagatccacaggatccgactgaa

SEQ ID NO: 1206 - DNA, 155 bp, Oryza sativa
  Clone ID: PAT_MRT4530_101095C.1
atgcggattggcgcgcaggactatcgatcgtccggagattttcttgtagagttcgggcagattggtgaattggtgacgtccagtttgtctgtgaagagctttatcactgatccttcatcaatgatcttcatcatgcttccgttgtgttctagagg

SEQ ID NO: 1207 - DNA, 240 bp, Oryza sativa
  Clone ID: PAT_MRT4530_101096C.1
atggggaggtcaggggcggcaaacgacgagatgaggcagggagtaggagagacgacgagcgagggagagtgcgccgacagcgaagaggccaacgaggtagtgggcgacaaggcgaggccaatgtcatgcaaagcgcatcggatagtcgggggagggggaaaggggtgggatccagtgacggggaagaagcggagtggaggttgtcgtgatggagaaggtggggacagggttgttggctga

SEQ ID NO: 1208 - DNA, 526 bp, Oryza sativa
  unsure (1)..(526): unsure at all n locations
  Clone ID: PAT_MRT4530_101097C.1
nnnnnnnnnnntttaatgtaatatggaaaatttcattgcaagtcgatctgcatccatgatccatgcatggtaattaatcaagcaaaaaccaaacaaaataaaacacagtgacacacacaaacattaattaattacaacaagttttccatgatacaaatatagctaggccacttgattatattactggcctctcatgagaaatgcatgcatgcatggcttgtttttttttttttggttttcttttgtttgagaatatatggaaaattaatcaagcgacgattaatttatctaaaaatctcgtataaatttctcgattatagaattaaatgtaccctagctagagagctcgactaatgcttgctatggcagccatggtggcaaggggttgacttgtcggagtcggagtccgacccgcatccgccgccgccgccttccttcttcttcccggagtccggccagtgcttgacgatctcggcgacgagcagggcgacgccggcggcgagggagacgtacatggcaatgtgca

SEQ ID NO: 1209 - DNA, 513 bp, Oryza sativa
  Clone ID: PAT_MRT4530_101098C.1
cagccaacccccctcctcccagggataaaaattgagcggacacggaccgataatgcttgtaccatattcgttttcattttttttatcggatatgaaaacgaatacggatagttcgaatacggaaacaaatacggattatctcgaatatgaataagaatcgaatataatcggacatgaatacggaaacaattttttctcggaacacgaaaaccaactcaacttcatatccgtatttgtatccgggagaaaatatccgtatccacatccaaactatccgggaattatctgatccgaaaggtatccgtatccgtttttgtccggagcagacggaaactatccgctccgttttcatccctattcgtgagggcggaagggtataaatccccgcctttccccctgaagggattcacaagtcgatgtcaccgtgaagaaacagggggcaaaatctcaaataggtttggaatatatcataccaccaaaacaaataatctaaacaaaatgtgcatcatccct

SEQ ID NO: 1210 - DNA, 894 bp, Oryza sativa
  Clone ID: PAT_MRT4530_101099C.1
atggagacaggaggcatagcggagcgtttcagagacaagactatactcatcaccggcgctactggcttcctgggaaaattgctggtggagaagatactgcgagttcagccggaggtgaggaagctatacctgctagttcgtgctccggacgccatagccgccgaggagcgtgttctcactgaggttgtaggaaaaggtctatttgatgttctacgagaacaatacggtgctggattcaactccttcatcaaggaaaagatatatgctctacctggagatgtgatgcatgaaaactttgggcttgagagttatgaggtcctgcagttatcccagaaggtagatatcatcgtcaatggagctgcaacgacaaactttatggagaggtatgacgtagctttggcaacaaacgctgcaggagtcatgcatttatgtcagtttgcaaagcagtgtgataatctcaagatggtgcttcatgtttccactgcaaatgtactgttgggagggatatacaccaagaactactatgagtttaaccgagactacaacattttaatgactgtggcaaagctgtttgccccgtttgatgacaccaacctgaggaaactgtggaaggcgacggctatggaccaaaatgatgatgcatccatatttaattttgatcctaagtgcattaactggagctcatacctcgtgaacacccacattccagctgctataaagtatgccaatgaccagaaggcgaaagcacgcaattccgtttttgtggtcggtggcgagagaagcgccggtggtgaggctggcggcggcgggcagaaacgggaggcggaggcggccatggcggcggcatctctggtgaattccgggaaggggtggcggcctggtgaggttcactga

SEQ ID NO: 1211 - DNA, 419 bp, Oryza sativa
  unsure (1)..(419): unsure at all n locations
  Clone ID: PAT_MRT4530_10109C.1
cccattagttgaaagggatagaaagataagtgaacacctcgatgacctcatttggagaaatgatataacttgtatcaacatgcttagacttagaaaatcatctttctttcgattttgtaaactttttagagatcgtggcttgcttgaagataccatcaacgtgtgtgttgaggaacaagttgctatgtttttacatacaattggacacaatcttagaaatagggtagttggtgctactttccgtagtcaggagaaatagttagtcgatattttaatttggtacttcatgcggttggagagttatgaaatgatcttatcaagcccccatctttggacatcgcacctaaaatagcaggcaaccacagatgggatccatacattagggattgtattggngctattgatggcacacatgttag

SEQ ID NO: 1212 - DNA, 129 bp, Oryza sativa
  Clone ID: PAT_MRT4530_1010C.1
atggcggacaaggcaagcacagatcaggagtcgacctcaccgtcccttcctacctcacgcatatcaggggacatggagctcggtgggacagtgtggaagagcttgacagcaacaaagaaggggcagtag

SEQ ID NO: 1213 - DNA, 399 bp, Oryza sativa
  Clone ID: PAT_MRT4530_101100C.1
acaggactacaactgctcggtggagctctgtgcatgtctgagccacatatgtaatcagaactcttagaaaggccctgcttgtcattcgatgtacggatctgataaataaacgaacactggttagttgaaaacaatgaaaaaaaagaagcagaccttacatcaagatcaagcctgacggcctccaaaaaggcctgaattgcacacatcatcaaaaagatcggggaagcccccccctacccgagtttgatgccctttatgaaggccaacaggccccttgcacaaaatcatgatgacaacctttccgaggggcaattgtttccccggtcgcagttccacagcatatcggacccggaccgataaacggtaagcccagggggcccaacagatggatcaaacccc

SEQ ID NO: 1214 - DNA, 623 bp, Oryza sativa
  Clone ID: PAT_MRT4530_101101C.1
tcactcattccactgccgccactccctcccatcgcccattccaccgcctccgcccgatcccccgccgccgcccgcctcgccgatcggccaaaaggcgtcaacggcgccggcgatcgccccccgccggtccaccgcccgctcccgaccccacggtttcggcggcaccgccgctgcctcgccgcagctcccgaccccacggtttcggcggtgccgccgctgcctcgccaccgggctgtcgcctcctacggccatccctttaaagccggcgaactcccccctctttctcctcccacccccaccccacccttgggacagcgagctccagcaggaggagtcagcggcgatgcaggacctcagccgcgccccggccaccgcgctgtgcaggggcatcagcgtctccagccccgcggacgccgccgccgccgacctgcggaggatgcgggcggcccgggcgggggccaggggcgtggggagcggcgagccgaggacgcggccggcgagtggcgccgggcggagcgcggccctcgcggcggaggcggcggcgcgggccagagacgccattatctttggttggagacggagacgagaggcggcggcggcggtggagtgcgcgagggcgagga

SEQ ID NO: 1215 - DNA, 459 bp, Oryza sativa
  Clone ID: PAT_MRT4530_101102C.1
atggacctgcataatcaacaaccggatgctctcaccgatgaggatgccactgttgttgctgaggagagatgtactgttcctgttaagttaattaaaagggacattaatttttcagttgctggggttgtattgagagttatattttctcatatcaaattggggctcatccggtccgaatggtccctcaaaatggactgtaatatgaacaatacaatatgccaagattcattcatgatgcctgctgttcttagcatgccctgctttccgaaagtaatatgcaccatggttattgctggtggcggtaagctctgccaaagaccaaaggccagtaaaggtgtgccattttctccggcggctgacaaccgccagcatataaatatttttgctggcgggcgtcataaggtagccgtcatcaaagaaactaatcccttgcggttgcccttcaaaggttaccagtga

SEQ ID NO: 1216 - DNA, 419 bp, Oryza sativa
  Clone ID: PAT_MRT4530_101103C.1
aggagggaacgggggtactttatataggcacagaagggccgatcgtggccggggtggccgcgatttcgccagcggagttaggagaggtggggaggagagaaaggcgagattctaaaatcgaatcccggctgtctcgagcacgggcgcgggtgagggagagggggagtgggtgcggaaggcgcgggcgcatgcgtaggcgtggccgacgtggcccggagcaggcggggcgtggacgcggcggcggttgcgggcgcggtggcggcggctggtggttagggaaggacccgttaggtgggccccacctgtcggcgaccccgggagagaggaggaaggcggccggcttagctgggcctcggcctgtgggccggcccagcgggaaggaaggggggaagagagaatgggccggcggcccatgctga

SEQ ID NO: 1217 - DNA, 210 bp, Oryza sativa
  Clone ID: PAT_MRT4530_101104C.1
atggatgaggttgaagaagataacaagtgcggtgggaaggaagagaagaggacactaccaccacggacaccgtcgagttcatcactacatctgcggatgctgctcaccttgatttgctcattgccaggtggcgctgccttgatctgcaccattgagattgctgttcaatctttgctcgccgatgagggaggagaagaggggccgacttga

SEQ ID NO: 1218 - DNA, 274 bp, Oryza sativa
  Clone ID: PAT_MRT4530_101105C.1
gttttaattttattatagaaacaaccgcggccaacatcaggggggccacgtcagggaaaatcgcctattaagatgggacaaggacgcgcgggccgggacaacgagagcaaggaaaagggagcacaaatgagattgcctgaggcgtgtctacacacaatgtgcatgcgccagagcatattatgctggtgcatacagaggacggtgtttcgcctcaccggaaggagaacatacgccatggggagctgaggctactaacggcccatgttggtgcggc

SEQ ID NO: 1219 - DNA, 208 bp, Oryza sativa
  Clone ID: PAT_MRT4530_101106C.1
gcgaggtgttattgggccatgccgcctctttctccgccatccagcccagagcccaaatattgatcgttgccagtgcctgggccgcctatcggcaattggcccatcagaagcctgcggcccggagcccgcacgagcacacgcagccgcatccggcccagcaaaaacactactctcgtaatattgtgggccgtggctcccaggtcgggag

SEQ ID NO: 1220 - DNA, 1536 bp, Oryza sativa
  Clone ID: PAT_MRT4530_101107C.1
tcaacctaatggaccacggtagaccaagtatacagagacggtccacgggtcgacggaagcagaccccgtgtgccaaccgagccgagtagccgacaaacggactccactggacaccacgcgggcttctctctccaccgccgccaccaattccagccgccgtcttccgcttctctggtcgtcgccgacttgcgccgccacttccatcggcttcgcaagggtgagagctccccgaggctgtcgtcggcatcgcaacgccaagccgaagcctgtccaccccttcgccaccgctgcaaaccatcggagcttcgtcgtcgctgtcaacccgaggcaatcttccgtcgactcgttttcagccgtgccgctcgtcgccgtccatcgccgccttcgctcgccgtcgcgtggacacagccacgccgccgcctcaatctcgtcgccggccatctcccatcgtcgtccgtggtcgtgccgacctcggtgagggcgtctcgtcgtcctctccgcgttggtgttctcggatagcccggccgagcttcctagtgcttcagcggcgatccttggacgaaggcaggacgaggctgactcagggcttgacgatgcggagccgaggacgaagacaacgacgaggctgcaacagacttgacgaaacacgggcgacgaacgaacgcggcttgacagagggacgaacgccacgacgaccgagaacgacgggaggacgacaaccggaaccggcgaggaggcgatgagggcagtcggcagcagctgcacgaatgcgaggacggtgcggaacacgccgctgcgatgatgacgatggaggcggcaccgcgggacgacgagccggcgaggatgaacggtgaagacgatgacggacaccagcggtggggttcggatggaggggaggcgatgccgaggatgacgttgccggctcgccgctgcgatgccggaggtggtggtggcgtggccgacaacacacaggaggaggaagggcagaccagggaaattccggcgaggcggatggagaggccggcgcggcacgacggtgttccggtgaaatacgggcgacgccatggcctggacggggaagaggacggcgtttcggtgctgggagaggtggtggcgacgtcggccggcgcacaagagacgcgacagaggcggccgaaggcggaacagtggcggcaacgccattgttgccggcggggatgcacttctggaggtctccgcgggaaacggagagcatgccggggaaggggaggcgactgcgacaccgggggaggcgacggcacggccggccggcgtgctgacgcggcggcagggcggctggagttggccggcagcgtaggagagagaggagtggagcgggatcgaaggatggtggcgctagggttcgggagagtgatagagaggagcggccggctggaggttgaagacgacaggatggaatcttcgtttcacctggcttgtccctggttgcaccttgagctgacttcgactgggatgcggcacttgaagacggggcttcagttccgggacttctcataa

SEQ ID NO: 1221 - DNA, 629 bp, Oryza sativa
  Clone ID: PAT_MRT4530_101108C.1
gaatctgattacacattttatttcgccatttcgtttgcattgctaaaatgattcttttatcaaatgttaactgaaaaggttttgatttgcaggaagtgggatgtacttggactggaagaagaggctgaggatcgcgcttggctcggccagagggcttgcctacctgcacgagctcgctgacccaccgatcatccaccgcgacatcaagtccaccaacatcctcctcgacaacaacctcaaggccaaggttgccgacttcgggctctccaagctcgtggccgacactgagaagggccatgtctccacccaagtcaagggaacactggtaaattcccctcactatccgctcatgccaatctcctgacagaactggacccggagtactacatgacgcagcagctgtcggagaagagcgacgtgtacagcttcggggtggtgatgctggagctggtgagcgggaggcagccgatcgagaaggggcggtacgtggtgcgggaggtgcggctggccatcgacccggccgaccacgaccaccactacggcctccgcgggatcgtcgacccggccatccgcgacgccgcgcgcaccccggtgttccggcggttcgtgcagctggcgatgcggtgcgt

SEQ ID NO: 1222 - DNA, 429 bp, Oryza sativa
  Clone ID: PAT_MRT4530_101109C.1
cggacgcgtgggcgacgagatgggcacactacgactcacctccgtaaacctccgacccgccgcctggcgcttgtacgccgccgcaccgggaaccaccaactttgcccgagccgtggaacgcggatttccataaactaagcctcgtgcctccgggaagcagataggacttgacgagatgcacctgggaaaaccaaagcttagcaacggtgaacaaaaaaaaaaaatacatgggctccaacaagaaaagcacgaaattcggctacttacaagagcagatgccacacgttgtcatcacttcaatcttaatcaagtgaagaagatgatatttcatcattaaaccaaaaactgttgtgcaagcgatgaacactttttatactgaaaaattaaataaatcggcctgtgttcaacgatggacacaacagactttat

SEQ ID NO: 1223 - DNA, 396 bp, Oryza sativa
  Clone ID: PAT_MRT4530_10110C.1
atggtgctgattttactcacgtttgtggacagtcaattcaatgcgattgcaggaacaggataccacatggctggctgcaagcctgcaacccagttggcacctgcagaggaattgacggacgcaaaccacaatttcacacttcgacggcagccgaggtcgttgggaaaaccagccggacgtgggctccatctacacggcgacaacgtcgcggtcgccggcgccgcggcggggtccggagtccggaccgggcgcgatgggtggacggagagcgtcaagacaagtgcacatattactgtagcattttccaggtctctgggagctctcagctctagcttctcccttcctcttctctggcggcacaacaagaggttccgacagcctgaagctccagcgtga

SEQ ID NO: 1224 - DNA, 911 bp, Oryza sativa
  Clone ID: PAT_MRT4530_101110C.1
aacgaggagtgcgatggactactcctcttcactatgtcggacctggactccatgatgccaacacaatcgtagccaccgcgttccctcctcatccccagcgctggccaatgttgcttcctttatgaccccagcatcaatcgtcgccttcacttccccatccagagtagacgttgtcatgccctcacaacccagctgccaaccttcagtatctcgctagcctggcgctcccgtactctctcctctccttcattcccaatcaccagctcctgcccccacatctccggtgcgccgcgtgcggatgccaccgcagcttccaccgccgggtggtggtggtgcagcaatgctgcgcctgcgacaccgcggcggcggcggcggcagccgggggatgggagtggcgggactgctcgccggagtcgtcctcctcggcgtccagcaccacggccagctagcaagagccccccccccccccctcccccatcgaatcaccccatgccgcctccacagtgcccgctctacctccacacccatcgttgcgacgccgagacgccaacctcaacatccaccgcagagacgcccgccttcgcatccaccgccgagacgcccgcctccgtgccaaccgccgcggtgcccggcttcgcacctaccgccgccacgccccgccccggctttgcctatgcgcccaccacggcgcccgtcgacgcccaccgtcacgtcgcccggccctgcctccgccacctcgtcgcccaccgccgcagcgtccgtcgcgtcgcccagccccacctccgtcgcctcatcgcccaccaccggacctcctctcccgcctcaacccgacgaccctctccccacccgtcagccggctgcccatttaccgccacgtcagataaaaccgaggtcaaaaccaccaaatgacc

SEQ ID NO: 1225 - DNA, 648 bp, Oryza sativa
  Clone ID: PAT_MRT4530_101111C.1
atggcggctcatgattggggcattctgaaaggcacagaaaaaaagactgaattttgcaacagcgagagcacttcactggaaatgtgcaccaattctgagcttccttgtcaccagattaaaatcagcagtgaaagtctccagatcttccaaaagaaaactggcacgctggtaaaggggcttgacgctttcaaaaagagccagaattggaccccatcagccggcgctgacgaggaacaacagctggctcaacggctcagaggagttgagttgccggagcatcatgagctcgtggaacgcagtcgatgcagctgtagggtcgtcttcctgaccgagctcagccattgtgccatccacgacatggacgacgatgcgcaggttaattacgtcaccgccggggagaggatgaggtcctgtgctctgtcgtctctccaggtgaggcttcgaagaggacccgacctccccgtcgcttcccaacggcgtcgtagccaccccctccaccttctcgtccttgttctcagtggctcgccaatacgcacacactcgacgactcctttgcctgcttcgcctgtgagctggcttggtcgcagtggttgggctcttgcgctccgcgacgcttcctggggacgacgtgtttggcgacagggatga

SEQ ID NO: 1226 - DNA, 267 bp, Oryza sativa
  Clone ID: PAT_MRT4530_101112C.1
atggtggtgggtgggaagacaaggtggcgccggccctcaccccgccggtccaacctccaccactattcgttggactacatggcccaaccgaccgagcagtcccatggcagcacagaggatcacgtagtgtgcgtgcccgtctgcgaacagcttggccccgcctgcatcgaggagcacgcggtagtcaccatcgccaacaccattgagatccctcatctccgccgtctcttagtcattttgctggttggacgtgatcttttcaactag

SEQ ID NO: 1227 - DNA, 615 bp, Oryza sativa
  Clone ID: PAT_MRT4530_101113C.1
atggggttccggggggtgattagcggcaaccaagcggcggccaaggagcgcgacggcggcggctctagcagcggtggcgccgcggccggagtacggtggcaggcggcggagcggcggtcggtcacgcttagtggcggccagtccgatgctagtcttctcctaggtctatatgttggcgctgtcggcattggctctcctctgatctaccaaactgagtccagcctacggctttatgatgtacctgaacgtggagggatacaaagaacggacagggatatcaccacctgccacttacctcactttccgtggagcacacaacaaacaaagcctagcgcagaaacttccttctttacccagagtcatagtactagagcacttaataataatactaagcacaaacccctaacaatgggaatctcacttaagcaggtgagcactatggcggttggcagtggatgtactcaaattcaatcggttttgactgacatgtggtcccttcaatccttatgctcgcatatgattggagcaagagttgatggttcaagtttacacttaacgaccgtcaaaatggtcggtgtacccgtcgacagcgaggcgcacgtgataacttcgtga

SEQ ID NO: 1228 - DNA, 136 bp, Oryza sativa
  Clone ID: PAT_MRT4530_101114C.1
gacccaaagctgattgcattaccacgggggggaatattaaagagaaccactcggtcaaatatttaactgcagcgtgatcaaggcgaatgagctgcgtcagatacaagagctgataccacgaatcctgtcagagaca

SEQ ID NO: 1229 - DNA, 534 bp, Oryza sativa
  Clone ID: PAT_MRT4530_101115C.1
atggcctgcagggcgtcaaagggaggcggcaacgacatcatgagggggaggccgcagggtttggggagggggggtggatgggcggcgcactactacctgtgttgcctaggcgacatcatcgtcctcttccccctgggtgagctgaggacgatggcttggttgtcgaggccagctctaagccagcgaaatagggagagcttcggtgatgagctcctcgattatagtacggggaagctatcaccgattggttggtgggcatggagcgggaacaacctcgatgttggtggcctctccttgatccggtgctaccgggtgttgatccagtgggctagcgcctcgagtaggaaaaatctagggtggtatggtcctgacaacaagcttctaggctatgtagacgtcgggcgtggcggccacctccccctcgtgctgtcgttgtcgcctccgcctccccatacagagtaccgttgtcacctctgcctccttgacatgcgaagtggccgttggctctcccgacgcccattaatgttgttgtag

SEQ ID NO: 1230 - DNA, 1282 bp, Oryza sativa
  Clone ID: PAT_MRT4530_101116C.1
gcacgaggcctagaggtacttgttcttttccttcttcgcgaagcagggatgaagctggtgtggtgcccggagatggcgtccaaggcgtacatcgacggcgtcagggcgctggccggccacgacctggccggcgccgcggcggacgtggcggagctcgtgtcggccatggccggcggctggaacgcgcggctcatcgtcgaggcgccggactccgcggctccggcggcagccgccacgagcctcgcgctggccgcagccgcgcggcgcacgggcgggcgctacgccctcgtgctgccggaccgggatgctgcggcggcctcggcggcggaaacggccgaagtcgttgtcggggaggcggacgaggcgatggcggggctacacggcgtggacctcctggtggtcgacgcgcggaggagggacgcggcggcggtgctcagggcagccaggcccggggccagaggtatggtggtggtgcgccacggcgacgggaggcagcgcggcgccaaggacctggcggcgtccatggcggcggggacgcgggtcgtgcgctccgtctacctgccgatcggcaagggcgtcgaggtcctgcacgtcggcgtcggcaaggggcccagcctgcagaaccaccgtgaccgccggagcaccagccggtggatccgccacgtcgaccacgacaccggcgaggagcacgtcttccggcggcagtgatcagtcgtcgtctgttattccgtccaggtgaattaaatcggatgtaccacggggagggtagttaattaggtgtagcgtgtgttgtccagattcgttgaatctgcccgttaataccatgatgatgtataatcatcggatgggtggaaagtgtgacgaatcacgaacaatgtaaatacctcaaacttgtagctcctcatatctcttccttctacctactgtgaaagctttcttttgagttgatctgctagttcattctttaaaaaaaaaaaaaaaaaaaaaatttaaaatgggagggaaattataaatttttatatgtttgtttttgtggaaaatttttttgtttttctttattttttaaaaaaaaaaaaaaaaaggggcggcccttttgggggtcccggttttccttccccgggcttgcgctttttttttttttttttggggcccccttttttctttccctggcccgctttttcccccggttttgccggggaaacccctgcgtttcccccctttattgcctttgtggcctttccccttttcgcctgttgggtttttttccctttggggccctccc

SEQ ID NO: 1231 - DNA, 466 bp, Oryza sativa
  Clone ID: PAT_MRT4530_101117C.1
catcgccgtcgtcctctctcgctttttccccatttcgccgcactctcccgtgctccccatcgctcccgcgccgtgcaaccacccgccgccgccgtttttgctacttcggccgccgctagccgccgctagggtcgccgccgcgccgcgccgtcgtcgccgtcgggttcgcggggtcaagatctacctcggccgccccttccccgtcgagggcacgccggagctcgtccgccggtcgccgtcgcctcccgtggcttgccgtcgccgttcgccatcatcttcctccgcgccggccaccctcggtgaggcacctcctctcccctccttccccgcttccccgtgcgtcgccgccgcccgcgctcgccgtcgctttgggtcgttgccgccgtccgctgccgccgctttcgcgtcgcctccgccgccggatgccgtcgccggcgacgtgacgcgcacgcgccgccgccgctag

SEQ ID NO: 1232 - DNA, 304 bp, Oryza sativa
  Clone ID: PAT_MRT4530_101118C.1
cctgtacccgccgctcgatcgccgccgttctcgcccgaagaaggaaagcgccatggcgtcgatgaagcggaagtgccccgatgacgagacggcctgcggctccggcgccggcgccgccatgtgcgtcaccggctgcggattcttcggctccgaggccaccaacaacatgtgctcccggtgctaccgcgagcactccgcggacaacgacgccgtggaggaggcggcggcagccaacagcgacctcgagctggttggcgtggcggagacgacgacgaagaaggcaggatgagcgccgtcgtccccg

SEQ ID NO: 1233 - DNA, 1166 bp, Oryza sativa
  Clone ID: PAT_MRT4530_101119C.1
gcgcgcgggcccactgtcagcggcacgggaggtggaaggggcggcggcgccacgtggcggccgaaccgacggccccgatctacccaagggtagatcggacggcggcgggagctcgcggtcggggcgcgcgggcgcggcgcaagccgaaccggcgaccatggcgccggcggcgcggcgctcacgcggcggcagcgcgcatgcggcagcggcgcaaggcgacggccgacggcgaccgaccggcggcggagagcggcggctagaggaggagcggcggctacacagctaggcggcggtgcggcggttaaacggtgcgggagagagagagaaaacgaggaggagggtctcaccgacaacggtcgacgacggcgggcgtcggaggacgatgacgacggcgggacgagctccggagcctcctaacgaacaaaaggagaggggttagagagggagggaagggcgcgagagggcgagggcgccggccgaaggcggcggccatggcgtcactcaccggcgcacgacggggttgggtctccggcggcgaacctcagcggaggaggggtggacgaggtagatctcgaccgcgcgaagctaacggcgacgacggcgcaaggcggcggcgagcctagcggcggctagcggcggccgaagtagcaaaaacggcggcggcgggtggttgcacggcgcgggagcgatggggagctcgggagaggggagagagggccggacgtggccgggagcggcgggaatcgccggccgacgcgggggagtggggaggagagagaggcgggattcggttttcgaatcccggccatctcgggcgcgggcgcgagcgggagagagaggggaatgggcgcggagggcgcggcgcacgcgcgaacgtggccgacgtggcccgggggaggcggaggcgtgggcgcggcggccgttacgggtgcggcggcgcgagcgggagaggcgggaggtgggagacgggtccgacaggtgggtccccctgtcggcgaccccaggagggagggaggcgggcggccggctgccgggctgggcctcggcctgcggccggcccaacagagaggggggggggaaaagaaaggagaaatgggccgacggcccatttgacaaaaaggaggaaaaaagaaaaagaaaaaggaaaaaggattttccctggaata

SEQ ID NO: 1234 - DNA, 133 bp, Oryza sativa
  Clone ID: PAT_MRT4530_10111C.1
tttaataatacagattgaggctgggtggtccaccgcggcccccacgcgccccacctacaacacaatacgcgaaaggccacgcggcgtacacgcgcaagacacgtacacgtgccaataccgagaagcccattaa

SEQ ID NO: 1235 - DNA, 200 bp, Oryza sativa
  Clone ID: PAT_MRT4530_101120C.1
gttaattccacttgcaccatgtgaacaagaatgggaaaaggagacgtcgcacagctaggaaggcaacgggcctcatgtatgtgaacgccatttattaaaagctctttaaggccaatcaccacaaaaggtgatcaagcaatgaagatcaagaaaaggagcatcatcatcaggcacaagcgtgattttaatgatgaccagaa

SEQ ID NO: 1236 - DNA, 324 bp, Oryza sativa
  unsure (1)..(324): unsure at all n locations
  Clone ID: PAT_MRT4530_101121C.1
gaaagctataagccgcgccatccgccgagcgcttgttggccttaatatcccaaatcggcctattgctagctacatttaccatggaccatctggggcctgctacatcagagttagaaaagggctttagcagactactcctttggctcataatgggccaggatcggactacaaatgagtgtgtttatcggaaggcttacgtnctccacgctattggggtcaccttcaggttatgttgtttacactgagggttgcacttctgacatatgcgtttcgccggcaaccatacattgtggttttttaaaaagggatcgaaaaggctcatcc

SEQ ID NO: 1237 - DNA, 695 bp, Oryza sativa
  Clone ID: PAT_MRT4530_101122C.1
atgcggggcccaccggtcagcggcacgggagagagagaaaggggcggcggcgccacgaccatggcgccggcggcgcagcgctcacgcggcggcggcgcgcatgcggcagcggcgcaaggcgacggccgacggcgagcgcgggcggcggagagcggcggctagaggaggagcggcggctacgcagctaggcggcgacgcggcggctaaacggtgcgggagagagaaaacgaggaggagggcctcaccgacaacgacggcggcgacggcgcaagacggcggcgagcctagcggcggctagcggcggccggagtgcgggaagaagcggcggtgggtggttgcacggcgcgggagcgatggggagctcgggagaggtcggcgcaatggggaaaaagtgagaaggagtgccggcgatgcttaaatagggggagagggaaccggacgtggccggaagaggcgggaatcgccggccgacgcgggggagtggggaggagagagaggcgggattcggttttcgaatcccggccatctcgggcgcgggcgcgagcgggagagagaggggaatgggcgcggagagcgcggcgcacgcgcggacgtggccgacgtggcccggggaaggcggaggcgtgggcgcggcggccgttacgggtgcggcggcgcgagcgggagaggcgggaggagggagacgggaccgacag

SEQ ID NO: 1238 - DNA, 784 bp, Oryza sativa
  Clone ID: PAT_MRT4530_101123C.1
atgggccgtcggcccatttcccctctctttccccctcctctctgctgggccggccgcaggccgaggcccagcccggcagccgggcgcccgcctccctccctcccggggtcgccgacaggtgggacccacctgtcgggcccgtctccctcctcccgccgatcccggcgcgccgccgcgcccgcaaccgtcgccgcgcccacgtctccgccttccccgggccacgtcgaccacgcccgcgcgtgcgccgcatcccccgcgcccattcccctctctctcccgctcgcgcccgcgcccgagatggccgggattcgaaaatcgaatcccgcctctctctcctccccactcccccacgtcggccggtgattcccgccgctcccggccacgtccggccccctctccccttatttaagcatcgccggcaccccctctctctttttccccattgcgccgacctctcccgagccccccaacgctcccgcgccgtgcaaccacccgccgccgccgtttttgctacttcggccgccgctagccaccgctagggtcgccgccgcaccgttccgtcgtcgccgtcgggttcgcggggtcgagatctacctcggccgccccttccccgtcgaggttcgccgccggaacccccgtctcctcgcgctccgggcacgccggagctcgtccgccggtcgccgtcgccccccgtggcttgccgtcgccattcgccatcgtcttcctccgcgccggccaccctcggtgaggcatctcctctcctctccttccccgtttccccgtg

SEQ ID NO: 1239 - DNA, 491 bp, Oryza sativa
  Clone ID: PAT_MRT4530_101124C.1
atgggtttgacctactaagatgtgcttatagtcataaaactaacctgcctttgattgccattaagggtttcatcggggttttagccgataagttatttagacgttgcatcggcttacaaggattacatacaagttggttttagccgattacaacaaaggtttcattgattatttaatcttgtgaatttaaccttcgtatcaagcaattattctatcatatcattattgactgattggtttctattggattatattattgttctattacattatcatcagctgattatctttatatcattatttactcaagtgtcatgattatctttatattattatttactcaagtgtcagaatctacattggacatatagctgattgctcaaaaccttatcgacatttgctggtatcgagtaacaccctaaaaattcgacgacaaaatctaaactctaataatacgtatcttcaaaaactttttaaataaagttgcatca

SEQ ID NO: 1240 - DNA, 460 bp, Oryza sativa
  unsure (1)..(460): unsure at all n locations
  Clone ID: PAT_MRT4530_101125C.1
atcttggattgggaaggtcaggttgcaagttcagttccattaccagaatcgctgctactagttgctagaccatggagatgcgtcgccttcttgtcttgttcgctctcctctccgtcaccgccgtcgtcccggtgttcttatggcccgacaagaagggcggtgctagtgacgtcgccgtcgtcgtcgcggcgcctccgttcaatgcgtccagcgtcaccattatctcctggaaaccgaggatatttttttacaagggcttcctttcagatgatgagtgcgaccaccttgtcaagttggggaaggagaagctgaagaggtccatggtggcagacaatgagtcgggaaagagtgttatgagcgaagtgcgcaccagctctggcatgttcttggacaaacaacaggaccctgttgttagcggtatttaggagagattncagcttggaccctgctttccgaaaga

SEQ ID NO: 1241 - DNA, 954 bp, Oryza sativa
  Clone ID: PAT_MRT4530_101126C.1
atggggctgacgtcagcacaggcggctcggcgccgacatgcggggcccaccggtcagcggcacggggaggagagaggaggcgtcggcccgcgggcccaccggtcagcggcacggggagggcggtctaccgtggaccgggaccacgcgggtgatccaccgccgatccacgggaccgacggcccggatcgccctcggccgatcggacggacggcggcggcggcagcccccgggctcggatcggcatcaaagccgatcggccgacccggggctagcggcggcggtgcgtgcgcgtcgcgtcgccggcgacggcatccggcggcggaggcgacgcaaaagcggcggcagcggacggcggcaacgacccaaagcgacggcgagcgcgggtggcggcgacgcacggggaaacggggaaggagaggagaggagatgcctcaccgagggtggccggcgcggaggaagacgatggcgaacggcgacggcaggccacgggagggcgacggcgaccggcggacgagcttcggcgtgccccgtgcgcgtggggatgagggctccggcgacgaacctcgacggaggaggggtggacgaggtggacctcggccgcgcgaaggtggccgggagcggcgggaatcgccggccgacgcgggggagtggggaggagagagaggcgggattcggttttcgaatcccggccatctcgggcgcgggcgcgagcgggagagagaggggaatgggcgcgggagacgcggcgcacgcgcgggcgtggtcgacgtggcccgaggaaggcggagacgtgggcgcggcgacggttgcgggcgcggcggcgcgccggaatcggcgggaggagggagacgggtccgacaggtgggccccacctgtcggcgaccccgagagaggaggcagcggggcggcctggctgccggctgggcctcggctgactgacttggtgaatgccat

SEQ ID NO: 1242 - DNA, 552 bp, Oryza sativa
  Clone ID: PAT_MRT4530_101127C.1
atgaccccgctcctcgaccgggacatcgctggctcgccgcgtgccctcgggccacggtgcctgcgagcctctgactgccgccttgtccctcgccgccgatgcgctgaccgcctgacgccacgagcccgcaaccgagccatctgcgcccgcctcctggccgcgtgctgctccgcgccgccgccttttctggctccacgccgccgccgcgccatcgccatggtttaccgcacactccgccgcctctcctctggacaatgctcctgctttggaatggtgggccctcttctccctctatctttgaaaaaaaacagcagagcaaccgctgtcggcggcaatggcgatggcggtggtgcgggcggcagcggtggatggcgatgcgatggctgtctgtggcgccgcttcgcctcgtcgccctcctcctcctccttcgtggccgactgctgcatcgcgcgccccgcccttgtggagcgcggcgccgctctcgccgaccgcctggaggtggcgcgctcgcttctcggcgagaacggctacaccatcacgcactgtagatga

SEQ ID NO: 1243 - DNA, 480 bp, Oryza sativa
  Clone ID: PAT_MRT4530_101128C.1
atggcgtcactcaccggcgcacgacggggttgggtctccggcggcgaacctcagcggaggaggggtggacgagggggagagagggccggacgtggccgggagcggcgggaatcgccggccgacgcgggggagtggggaggagagagaggcgggattcggttttcgaatcccggccatctcgggcgcgggcgcgagcgggagagagaggggaatgggcgcggagggcgcggcgcacgcgcggacgtggccgacgtggcccgggggaggcggaggcgtgggcgcggcggccgttacgggtgcggcggcgcgagcgggaaaggcgggaggtgggagacgggtccgacaggtgggtcccacctgtcggcgaccccagaagggagggaggcgggcggccggctgccgggctgggcctcggcctgcggccggcccaacagagaggggggggaaaagaaaggagaaatgggccgacggcccatttga

SEQ ID NO: 1244 - DNA, 403 bp, Oryza sativa
  Clone ID: PAT_MRT4530_101129C.1
cctgaaactttgccatcctcctgcgataaatctaaactcgggtgaaatagatgtatgagtttctcttctcccattggatcaattgaacagcttgctagttcgtggacttgaggaagatagggctgaaataatttcttaggaaggaggaaacataagaaccggcagaaaggagtagttcgtaggacattttaccagacttgttggcgccaattggcaccagcaaggatgtatatataattccgaggttaaattgtagaggaacatagctgaggttactagttttgtttttctccgtttattttgcaataaatgttatgtaatttgtttatatatatgcatatccttgttctgtctgaaaaaaaaaaaataaaaaaaaaaaaaaaaaaaaaaaaaaaaaaaaaaa

SEQ ID NO: 1245 - DNA, 978 bp, Oryza sativa
  Clone ID: PAT_MRT4530_10112C.1
atggcggcggcggcgggtggcatgagttcgaggtcgtcgtcattgctggccatggtgttcgtcgccgtcgcggtgctcgcgcgggcgcaggatgagcgcgcggcgacgttcaccatcaccaacaactgcgcctacacggtgtggccggggctgctgtccagcgcggggtcggcgccgctgtccacgacggggttcgcgctcgcgccgggggcgtcgcaggcggtcccggcgccgtcggggtggtcgggccgcatgtgggggcgcacgctctgcgccgccgacggcgccggggcgaagttctcctgcgccaccggcgactgcggctccggcgacgtgcagtgcaacggcggcggcgccgcgccgccggccacgctggccgagttcaccctcgacggcagcggcggcctcgacttcttcgacgtcagcctcgtcgacggctacaaccttcccatgctcgtcacccccagcgccacctccggctccggcaagtgcgcggcgacggggtgcgtggcggagctgaacggcgcgtgcccggccgacctgcgcgtggcgtcggcgtcggggccggcggtggcgtgccggagcgcgtgcgaggcgttcgggtcggcggagtactgctgcagcggcgcgtacgggaacccgaacacgtgccggccgtcggcgtactcggagttcttcaaggcggcgtgccctcgcgcctacagctacgcctacgacgactccacctccaccttcacctgcgccgccggcgccacagactacgccatcaccttctgccccgccgctcccaccagcgtgaagtcgtcggggcagaacccgcaggccgccgggctgcagcagctcaacgacaccatggtctacttcggcggcggcggcggaagcccgcaatccagcggcgcgacgaccacttcggcttactcctccattgccgccgccgtattctcggtcgccgccgtcgctctcgccgctctgctttga

SEQ ID NO: 1246 - DNA, 870 bp, Oryza sativa
  Clone ID: PAT_MRT4530_101130C.1
tcagccagagcgatctgaccagtagatgtcggtgaggacatggtcggcgagggcgtacttgctgagggtgacgaggagaagcctgcgccacttggtgtagttcccagagttgatgtccaggttgatgggcacaacggccttgatgttcaggacacggctgttggcggtggcctggaagatctgcttaacttcagtgcaggtccaaaatcttgcttttagattcatgagcgtgccagttaatttgatcctgagatacaaaatatgtccttgccggaaaacctcatgaaatatcctaacaaactctaagataccataagtctttgcggcagacttttgcccaaacatatcaaatttggtcgtcaacagtcttaggcccacaaactctttgaaataccagaaaatgggcccaaccatcatgccactgggctgaggatccattaaatgtggtccaaatggtaggactgggccagggaggcctgcctggggaggcctaccgggggtcgaccgaccccggcctagctccgctggcctgtcggtcccgtctccctcctcccgccgatctcgctcgcgccgccgcgccgaaaccgccgccgcgccctcgtctccgcctctcccgggccacgtcggccacgtccgcgcgtgcgccgagtcgtccgcgcctttccccctctccctcccgttcgcgcccgcgcccgagatggccgggattcgaaaatcgaatcccgcctctctctcctccccactcccccacgtcggccggcgaatcccgccgctcccggccacgtccggctccctctccccctttttaagcatcgccgttctcctctctctctttttccccatttcgccgcactctcccgagctctccat

SEQ ID NO: 1247 - DNA, 1566 bp, Oryza sativa
  Clone ID: PAT_MRT4530_101131C.1
atgccggctgacgcaggccgacacggggaggatccccgtcattcaccatttaatagatgtggatttggggtgtggaagtgccaggaacgctatcccgggggtcggggtggcccaacccctcaggctagagaggggcggctacggcccgacccctcggggaaaagccacgtggatgtcgagagcgacctttcccctttaagcatggtacccccggggccatatcatcgacaaacacaccctccgtatgacaattacatggatggaaagaacctccatagagtaagtgtcaatgcccaaagaaagaaagaaagaaagcatgaagagatagtaacgagtgcagagaaagacagaggaggaggaacagtgagaaagaggaagaaagaatctaaggaggatccaagcgggccaatccaacaacacatccagttccaatcgatatacttcaatattcatgcaagcgggaagaaaaaggtcacagtgcatgcatgcacagtgttgtccaaagacacaagtagtaggaggagattagagagagagggaagggaacaccgacccgcatcgcatctgatcggcatcggcatcgtcctcgtcctcggcatcagcagcagcaagggaagggaaggattcgccgcccgcgaggtcgtcgcctccccttccggcttccgtccaggattttccatggacggcgcggccgactccggcacggcgggcgccgcggcggcggcggccaagtggcggaccgatgcctcgcgggcgttccagtactacctggaccgctccaccccgcacgccacggggcgctggatcggcaccctcgccgtcgccgccatctacgccctccgcgtctacctcgtccagggcttctacatcgtcacctacggcctcgggatctacctcctcaacctcctcatcggcttcctctcccccatggtcgaccccgaggcccacgccgctgcctcctccgacggccccgccctccccacccgcggctccgacgagttcaagcccttcatcaggcgcctccccgagttcaagttctggtatgcaatcacaaaagcttttcttatagcttttgtgatgactttcttctctgtatttgatgttcctgtcttctggccgatacttctctgctactgggttgttctttttgtcctcacgatgaagcgccagattgtgcacatgataaaatacaaatatgttcccttcagcgttgggaagcagcaattgttttgttcctcaccatttatcccaaattgttctgctagaaatatggcgggaagaagagcgcaggcagcagttcttcgaaagactgattggcagcctacccactctgtggtacggcaaattgtagacccaattgcacttggcggtgagctgctttgttggagcaacagggcactgtctgcttgcgtggatgaaaagctgagtcatctgaagctagtgaacattttttcgctggctcgctgcgtgtgttttttctctgattgtggcccggttgattatgaaaatgaccactttcgttttcttgaagagttggaaggtgtcagcttagcttcctgtgcgtac

SEQ ID NO: 1248 - DNA, 339 bp, Oryza sativa
  unsure (1)..(339): unsure at all n locations
  Clone ID: PAT_MRT4530_101132C.1
tttgttttttacttccagtatcaaacaatagtttaacagcaagcaacaaaaatttgtgtagcagaaccaagctaccaacttgtccaagaatcacacaacattcaagtatacccaattttggttcaacaaactggtgaaaacacttgcagcaccacaaaaatcagcagcaaaaaattgctgaaccaaaaaatcagcagcaaaaaagttgctggtccaagttcaggttccccccaccagcaggacctgcagcacctgaaacgtgttgtttgattccagaagcaaaggaagttgtagtacccatgctaaaagattgctctgttcccccnanaggctctaggg

SEQ ID NO: 1249 - DNA, 451 bp, Oryza sativa
  Clone ID: PAT_MRT4530_101133C.1
atggggagcacgggaggggtcggcgatatggggaaaaagagagagggggtgccggcgatgcttaaataaggggagagggggccggacgtggccgggagcggcgggaatcgccggccgacgtggggagtgggggaggagagagaggcgggattcggttttcgaatcccggccatctcgggcgcgggcgcgaacgggagggagaggggaaagagcgcgggagacgcggcgcacgcgcgggcgtggctgacgtggcccgggagagacggaggcgtgggcgcggcggcggtttcggcgcggcggcgcgccgggatcggcgggaggagggagacgggcccgacaggtgggccaatttagagcaagggaggggaacttcagggcgtgacaaacctaccccccttaaacagaatctcgaccccgagattcagaagagctggcgaagaggtgcggatgg

SEQ ID NO: 1250 - DNA, 1019 bp, Oryza sativa
  Clone ID: PAT_MRT4530_101134C.1
ccgacccgcatcgcatctgatcggcatcggcatcgtcctcgtcctcggcatcagcagcagcaagggaagggaaggattcgccgcccgcgaggtcgtcgcctccccttccggcttccgtccaggattttccatggacggcgcggccgactccggcacggcgggcgccgcggcggcggcggccaagtggcggaccgatgcctcgcgggcgttccagtactacctggaccgctccaccccgcacgccacggggcgctggatcggcaccctcgccgtcgccgccatctacgccctccgcgtctacctcgtccagggcttctacatcgtcacctacggcctcgggatctacctcctcaacctcctcatcggcttcctctcccccatggtcgaccccgaggcccacgccgctgcctcctccgacggccccgccctccccacccgcggctccgacgagttcaagcccttcatcaggcgcctccccgagttcaagttctggtatgcaatcacaaaagcttttcttatagcttttgtgatgactttcttctctgtatttgatgttcctgtcttctggccgatacttctctgctactgggttgttctttttgtcctcacgatgaagcgccagattgtgcacatgataaaatacaaatatgttcccttcagcgttgggaagcagaaatatggcgggaagaagagcgcaggcagcagttcttcgaaagactgattggcagcctacccactctggtaggaaaaatggaaggggcaagaagatacagtcgatgatatttgatgtgctacataccaattgtaatatttcattcatatctagagctagaaggatattcacttgtatttcagactctggttcacggtttaaattgatattgtggtagaatgctttcttggatgggtatatagtgtgactcgttaaaaaaatgacaaaacggttcagctactctttacaagtggtacggcaaattgtagacccaattgcacttggcggtgagctgctttgttggagc

SEQ ID NO: 1251 - DNA, 443 bp, Oryza sativa
  Clone ID: PAT_MRT4530_101135C.1
ccggccgggactcacccggccgggactcgagatcgagagacgcgagcgcgactctcctcccaggcggcggccaagatgtttgacgatcaagacttgggtttctttgccaatttcttgggcatcttcatatttgtcttggtcatcgcttaccactttgtgatggcagacccgaagtatgagggaaactgatgccatttttgttgagcaaagggatcatatgatcctcagatcaaaatagtgcgatgtatgccagttaatgatagcaatagtgcttgactgttattgtaagttcttacgcgaaatctggacctgcaatttctggcattttgacattacacatgtttaatcgattgaaatagtgaatccaggatattccaaaaaaaaagattatacttatctagtaaaaacaattctgcatgaaaaaaaaaaaaaaaaaagcggcc

SEQ ID NO: 1252 - DNA, 510 bp, Oryza sativa
  Clone ID: PAT_MRT4530_101136C.1
atgggcacgtctagcaaaaccatgcacccacagcccaccatggctgacgtcagcaaggggtggggcggcgccgacatgcgggacccacggggggagaaggatggggcggcggcgccacgtggcggccggatcgacggccccgatctacccaagggtagatcggacggcggcggcggcggcagcccccgggctcggatcggcatcaaagccgatcggccgacccgggctagcggcggcggcgcgtgcgcgtcacgtcgccggcgacggcatccggcggcggaggcgacgcgaaagcggcggcagcggacggcggcaacgacccaaagcgacggcgagcgcgggcggcggcgacgcacggggaagcggggaaggaggggagaggaggtgcctcaccgagggtggccggcgcggaggaagatgatggcgaacggcgacggcaagccacgggaggcgacggcgaccggcggacgagctccggcgtgccctaaggaaggagaagagaggggttag

SEQ ID NO: 1253 - DNA, 1286 bp, Oryza sativa
  Clone ID: PAT_MRT4530_101137C.1
atggtttctctaccagtggtcccgggtgaaaataccggggccgccgcgccggccctccgcgccccgcctccagccgccgcctcaccgcgcgccgcgccggctggccctccgcgacccgccgccctcgcgatccgcggccctcgcgcccctgccagcgcagcgctcccatcgcccagggcaacgccacgaaacctagccccaccgactcgcctcgcctcgcctcggaatcccccaaccagcgcggccggcgaccatggagccctcccccgttggcggcggcaccaaacccaaaccacgcgcagcccgccctcgcccagggcagcgccccccgcccgcgccccccccgccccccccgccgccccccggcctcccccaaccccggacggcgccgccgaccccggagctgcgtccgccccggggtcggtggaccggtggcgcactgaggcgtcgcgggcattccagcactacctggatcgcgcagcaccgcacacggcggggcgctgggccggcacgctcgtgggcgcggccgtctacgccctccgcgtctaccacgttcagggtttctacatcgtcacctacggcctcgggatctaccgcctcaacctcctcatcggcttcctctcccccatggtcgaccccgaggcccacgccgctggcctcctccgacggccccgccctccccacccgcggctccgacgagttcaagcccttcatcaggcgcctccccgagttcaagttctggtatgcaatcacaaaagcttttcttatagcttttgtgatgactttcttctctgtatttgatgttcctgtcttctggccgatacttctctgctactgggttgttctttttgtcctcacgatgaagcgccagattgtgcaccgagcctggagcagcgcggcctcctccaggacatcccctcgacgtgtcaggctccggctgggcggtcgcccgcctgcaccaccacgccgtcaggcccgacggccggccgctccacgcgcccccggtcgcggcggcagggcacttcacaggtcacggccgtccagtcccatccccactcgcggcgagcacggcggcctggcgcaggcgcggcggcggtgagcctcctagctggctcgcgcttgaggcgacggccggatacgggcgaggcgaaacgtcgatgcgagcgcgcgcgggaaggattgggggagggcgccgtttcggacgcaggaaagctgaatgggcggcgggcggcgatatttcgacctgcaggtgggcccaagcgccatctccgttggatgtgttttag

SEQ ID NO: 1254 - DNA, 239 bp, Oryza sativa
  unsure (1)..(239): unsure at all n locations
  Clone ID: PAT_MRT4530_101138C.1
tattcgcgcacgaggccgacttgtctgtngattgaagctgcatgcacaatgctaccactctttttctcctcattgataaaagaaaaggagacaaaaggagaaaaangannantccattncccctttnggatncaanaaggttttccngntccccntnntccttnncatncnccttnggnntcntttgnattnnccaatattccgnttccntatccnaancttantgntgaacccanttt

SEQ ID NO: 1255 - DNA, 163 bp, Oryza sativa
  Clone ID: PAT_MRT4530_101139C.1
caaaaaaaaattcaagattaaaaaaaatttaatttcgacaacatgattgggaatgggccattgaaaagagtccttgcctccatgcacttattgctccccccaggtttttaaaattttgggccataaccatgaaagattggatcaaccgatgtggttaccttac

SEQ ID NO: 1256 - DNA, 1350 bp, Oryza sativa
  unsure (1)..(1350): unsure at all n locations
  Clone ID: PAT_MRT4530_10113C.1
gcgcgctagtgtgaaaccgccaccgccaacccaaaccaaacaaagccgcgccgccgatctcgccatggcgcagcagcagccgcggcgagttctccgcgtggcgccgccggggcgaggaggggcgcgcgcggaggcggagcggggggaggagggggaggcggtgttcgcgacggtgcaggcggcggtggacgcggtgccggtggggaacagggtgcggacggtgatccgcctcgcgccggggacgtacagggagcccgtctacgtcgccaaggccaagaacctcgtcaccctctccggcgaggccggctcgcccgaggccaccgtcatcacctgggacaacaccgccacccgcatcaagcactcccagtcgtccagggttattgggacaggaacgtttggatgcggaacaattattgtggagggggaggatttcatcgcagagaatatcacatttgagaactcagctcctcaggggtctgggcaggcagttgctctccgagtaacagcagataggtgtgccttctacaattgcaggttccttggttggcaagacacattatatttacattatggaaaacaatacttaagggactgttacatcgaaggtaactgtgacttcatcttcggcaactctattgccctgttggaacattgccatattcattgcaaatcagcgggttacattactgctcacagccggaaatcctcatcagaaactactggttatgtgttcttgaggtgtattattactggaaatggagaagctggatatatgttcctgggtcggccttggggaccgtttggaagggttgtctttgcgcacacttttatggatcgttgtattaagcctgctgggtggcataattgggacagatctgagaatgaacgaactgcttgcttctttgagtacaggtgctcagggccaggtttccgcccatcaaaccgagtggcttggtgtagacaattgcttgatgttgaagtggagaatttcctttctcactctttcattgatccagaccttgataggccttggctcatccagatgatggcaataaaagtaccagtctcagcatagtctaatcccaggattgtagttcatccctcctccctagtctatcttataaataattttggagggtgtattataagtgtaacatttggtcaacttgtgcccacgcaattgtattgaggagagatatttgttgttttccatgagccttgtcccttgaggactataaaggaatacgaaattaaattaaaaaaaaaaaaaaaaaaaaaaaaaaaaaaaaaaaaaaaaaaaaaaaaaaaaaaaaaaaaaaaaaaaaaaaaaaaanggggggggcgatttaa

SEQ ID NO: 1257 - DNA, 420 bp, Oryza sativa
  Clone ID: PAT_MRT4530_101140C.1
atgcaggtgcatgcgcgtgcggcgctgttaaggtcgcggtcgatctcacctctctacatcacgcaattacctcccttagcggccgtggacgtttggcggcgggggcggtgggatccggtgatggcgatgcgcggggtcgacggatcggcaatggtgaggcgcggggtcagcggaatgacgaggagtgggggtggcgatcaacgacgatccgatctcatcctcttcccctcccctctcgtcccccccttcctcctcctcccctccactccccctcctccctctgcgcgggcgagcggcgagcggcaggagcgggcaggcggcggcggccggcgtgggcaggcggcctgcggcggcggcggcggcgggcacgcggcgggggccggcggcgggccaagcggcaacggcggcggccggcgcggg

SEQ ID NO: 1258 - DNA, 154 bp, Oryza sativa
  Clone ID: PAT_MRT4530_101141C.1
aatttatgtaaaactagggagtcaatgtctacaacttaatgtgtccactggggagggtgaatccaatgatcgggtcatttctgtattcctccccctcccttcaaatattttgctgagcttctgaacgtgtcatatcttcaggacaagagctttc

SEQ ID NO: 1259 - DNA, 398 bp, Oryza sativa
  Clone ID: PAT_MRT4530_101142C.1
gaacaaaagagtctcatgcatccaaagacacacgagcgatcagctgatcaataagagtacatcagtgtatagccagacccaagaagacggatcataaataagagcgatacctcctgccacagccaccagtgcgaaaaagaacgtcaccacacgggcgaacatgcctagcgtacaaacgtgtacatgttcatgacccaacacaagagcatgaactgagaacgagtaaactcctaccagctagcttggcatttcaagcatttggaaacaggacccatgtagggattggttccttaaaaaatgccaaaacccaacaaaataggccaacccggtatgacgggatcatcccaacgggcaccccatagatagcaagccctgatgaaaaaatgacgatgctgatc

SEQ ID NO: 1260 - DNA, 1187 bp, Oryza sativa
  Clone ID: PAT_MRT4530_101143C.1
ccggccgggccccttcttcctcctccggattccggccgctgctgctgctgctgttctcccctcccggattgaactgttggcaagttctgaaggactctccagttattggagaaatgtggggacggcttgcaggctgatgagcatccagacatgctgacgctacatggaaccgctctgttcattaggccgagtgcttaccaagaggtcaagtcatcaccaaagcatgccatagttcctcataacaacctattaggttgcagtgcgttttataatccagtggaagggcatcatgtgcagaagccgcacatcgttcctagctgcaaagttaactttaccagggcgagccattatctctatagaagtttaagtgaaagaactacaaggcatttgctgcaccggtctgaaatttacgcttcgtcggatgaggacttccgctcatcacgcaatatagcaatcagcctattcaagcgatataaaaatgtcattgaccgaggaggtggagataacctgaaggagtttgttagtgctggggtgaatgcatatgctctaggctgtactgaagaggggctcaggaaggaacttatggatattgaagattctggccttgagattgaagctctgcggtccaatggaggaggaaccagcttgaccttcaaagttcactcctttgaggtccgtgaatgcatcctgtggctcagtatagtattcattacaatcctgtgcacaccacaaccaacgatcatcagatggtctactaccccaccagtgtcagctgacgttttgcatcagtggaaaggattttgtgccttaatagcgaacgcttactataccaaaggaatggcatggttaccagtgaaaactttgcagctggaacaaatggctgtcacgggcagttcagaggagccatcagtagtagctagtcgcatgcaattagttttcagtacattagaggtagttagtcctcaatggccaagagtgtgatgaactgaaactgaaagcacgtgtgcagttttactacatgctcatgtctggcaaagaggaaaaaatggcatcaggaacgaatcattttttttccttccaatttgaataaaattccagattccaaatgtatactacaacagatctccttatatactgagatattgatcatacatgtacatttactttttaaaaaaaaaaaaaaaaaa

SEQ ID NO: 1261 - DNA, 582 bp, Oryza sativa
  Clone ID: PAT_MRT4530_101144C.1
atggcagagccgccaatggttgatgggacttctagaaaaggcggaacacccaacagacgcagctctctaatggaacagaaggagtcctcgctgatcatcacggttgatctctgttgctgccgctccctcacaaagatacggaaaaccctgtgcaagttgcaagagagtgaggacatcagggcgatcatgtacgacgacaaggccgggacggtggcgatctccggtggtttcgacccactcgtgctcccctgcaagcttcgccgcaaggccggtagcgtgatcaaggacatccacctcaagaaggagagagagaagaacagggtgccgccaccgccgccgccaccaccacctcagccggcgcccgcagccagggcggcgttcggcaccatatgtggcgccggggtggcgccggggcgcgcctgcctctgtctcggtcagtgccgctgtcactgcgggggaggctacggctgccgctgctgcggcgcggcaccgccgtgctactgcgtgccgatcggaggaggaggctgctccgtcgtccagttcacctatgatgaaccatctcctgcttgcagtatcatgtga

SEQ ID NO: 1262 - DNA, 1333 bp, Oryza sativa
  Clone ID: PAT_MRT4530_101145C.1
tgttttatgatgctgacattggaggagctccgatgaactttcgagatgtgtttctctatagccaggcacttgaaggtattacgttgtccatgattcttcaagctcctaatgaagaagaggttccccatgcttttggaaattttcggcctatgtcttacaggagggaaagaaatcaataatgcgatcatgagcagtatacaggacttggcaaaatcattctcaaattaccatgatgaagtcctggtgaaacgtgaagagttgcttcagtttacccaaagtgccatttctggactaaagaggaattctgacattatgagaatagatgctgaagctgtagagttgtggaagaaactaaatgagaaggagacatcaagagttcaacaaactcaagaagaccatgcaaaaactacggaaaggacttctgctacaactgttgagtcattcaaagaagcactctctgaagtccgattctgctctagaatggaagagcttttactgaagaaaaaaacatctactgccggagactcccttgagattcgttcccaaaaggttgacaaattaaaggtcttagcaacttccctctctaattcatcttccaaggctgagaagcgtattttggatcacaggcgccagaaagaagaggctcttaacttccgtgctaaaaaggagaatgaagtgagtgcagttgaaaaggagttgacggctgagatttctgaattggagaagcaacgtgacgaacttgaggctcggttgaagaaggtcaacatttcactgaatgctgccattggacgtctcaagcaaacaagggaagagagggatcaatttgatgaagcaaacaatcaaatgatatttagtttaaaagcgaaggataatgaactttcaaaatctattacctcatgtaatgtggaggctggcgtagtcaagacttggatcaatttccttgaggatacgtggcagcttcagtcatcatataatgaccaggagggaaaggggaccccattgatgagcttgagagatgtacagacaatttcctgaaattgactaaatatcacctttctacattcaaggaaattctgagcccatcaattgagcgaatctgcacatacgtggataatttggcggttctgcagtcaagggacgtgtcaacagaacatgacaatgaggaactatcagaaaagacacgtccacagagatcccttgcggaagaatcttgggcaactgataagaagattgtaattgcctttatcatcactgatcacatgaagaagctcttttattctgaacatggggttaagtttaagagggatgatgaggacgacaggatcttattttc

SEQ ID NO: 1263 - DNA, 1679 bp, Oryza sativa
  Clone ID: PAT_MRT4530_101146C.1
cttcgagctcatcactcatcacctcgtctcgccgccgctcaccacaccaccttccgatggatgccaccgccttcgcctccgctccgaaccctagccacgcgccctcctcctcctcctctctctccgcctcgtactcgcgggttctccgcttctccgtccgcgacccgtggcggcggcggcgggggcagcgcctcccgctccacgcgctccgatcgcagcgccccgagccggcgcccgcgtccgcgtcccaccacgacgtggtggttgttggcgccgggatcatcgggctctccatcgcgcgccacctcctcctccacaccccgctctccgtcgccgtcgcggacgccgccgtcccgtgcaccggcgccaccggcgcagggcagggatacctatggatgtcacaccggacgcccgggagtgacacgtgggagctggcggtgcggagcaagcagctgtgggaggagctcgccgccgaggtggatggcctcgggggcggcggtgcgcgggagaggctggggtggatgaggacaggaagcttactagttgggagaacttccgaagagatggctacattggaggaaaggaccaaagctctatctcaggcaggaatacgtgcggaatgcttgtctgctgcttcattgcatgcattggagccggaactctatgttggacatgatgggggtgctatgttcttgcctgaagactgccagattgatgccttccaggctgtctcattgattgaaaagaccaatggttcatattcctcagaaggaagatatatggagatctataatgatcctgccatgtcattagtaagatcagagactactggaacagttcaaggtgtccaaacatctaagcacatcctatatggcagaaaagctattgtaattgcttctggtgcctggactcgaaccttattgcgtagttttcttgaaccgaatcctacattggacattcctgtgatgccacgtaagggtcatttgcttgtgttggataaatttgacaagcttaaactaaatcatggactaatggagctaggatacgttggccatcaagttgctaaatcaagcggcacacccctatcttcagaatccagtgaagatgagcatggtgctttatccatatcaatgaccgcaacaatgaatacaaagggaaatttaatcctaggaagcagtcgagagtttaaaggattttcaagagaagttgacatgtccatccttaaatgtatatgggaccgtgcagcagagttctttcctacgctgaagaatgttcatcttgatattgatgaaaacactgaaatcaggatcgggcaccgtccctttatgcctgatgggaagccagttattggatctgttcctgatctgccaaatgttttgattgcgacaggacatgaaggaagtggacttgctttggcattaggcactgctgaaatggtcaccgacatgattcttgggaatcctggaaaagtggacttctcgccattctccataaaagacaggttttcagatgttaatgaatatagacacatatatatgtctagattcattaaaatctatatgaatatgagtaatgctagaaagtcttacattgtgaaacggaggaagtatgagggaatattgatgaatatcactgttttttttttacggactggcaagacgaatatcactgtgaagtga

SEQ ID NO: 1264 - DNA, 189 bp, Oryza sativa
  Clone ID: PAT_MRT4530_101147C.1
atggcagatcttcactggcgaggggcacgagtcgcgccgtgggctacggatccgtcctccggaggggcgcggccgatggttccggcggcgggaggcaccttgggcaatgacaacgagtgggtggcgaggctcccggcggctgaccagcggccgaacttgggagccgcagcaggtcgatggcgaagctag

SEQ ID NO: 1265 - DNA, 1770 bp, Oryza sativa
  Clone ID: PAT_MRT4530_101148C.1
atggcagctgcagaagtagaacacagcggcagctccctccccaagaagctcgtcacttttgctctctgcgccatcttcaccttgtccctcatctacttctcctcccctcctctcatcatctcctccaccaccaatcttctctcccaattccaaacacgcgcacgagctagaaccaccgatttttctactcatctcccagactcatttcccagattcatctcccagactcatctcccaggggtagctgtttggaagcaatgcgactacagtgatgggaagtgggtgtgggacggcgaccatggcggcgccgccgccggcggcggctcgaggtacgacagcgagaactgcgacatgaagatgacgtacaagtgcgtcatcaacggcaagccggacggcggctaccttcactggcggtggcagccggcgtcgtgcaacctcccggcgctcgacccggcggcgttcttgcggctcctccggggcaagcggctggcgttcgtcggcgactcgacggcgcggaaccaggcggaggccctcgtgtgccacctcgccacggcggcgcggccggggcactcggaggactacggcatggcgcacgaggtcgtcgtcctcgacgcgctcaccgagccgtgggcgtccgacctcgccgccatggacgtgatggtgatctccgcggggcactggttcccccacagcgccgtctactacgacgacggcgagatcgtcggcgtgcacggccggccggacatgaaccgcaccgagatgagcgccccgtccgtgtaccgcaaggtgttgcgccggacgctggagcacgtgatcaacgccaccatggcggacaagctcgagctcgtcgtggtggagacgatcgcgccggcgcacttcgacggcaggtacagctggaaccaccgcgacgcgtgctcgcgccagaggccgtacgacggcgacgtcgacggggaggcgaaggtgggggacaccgaggccgagctaaggaaggccgtgctggaggaggtggcggcggcggccacggcggcgaggcggcgctgccctgggctgcggttcgaggtgctcgacgtgacgaggctggccgccatgcggcccgacgcgcacccgggcgtgtacatctacaagaacgcctacggcggcggcccggtgccggagacggcggcgaacgactgcctgcactggaggcagcatccttatgcgccatttcgtcgaacaggttgcaggcaggccacatcggcatgcctgggcatgtatctggtaggccaagcgggcatcgcagtagctgaggacggagcaggtgagctcgttggcggcggcggtggccgggtggacggtgagagcgcggcggagggtggcggccctggatccggaggcagagcaacggaggcaaatatcaatcgatcgtggcacggattctatgtggcggcggctctcttcggaggaggattctatgtggcggcggctctcttcggaggaggattctatgtggcggcggctctcttcggaggagaggtcgatggtggtggtggcggtgttgttctactgggtggtggtggtgaagccggagaggatgtgcgccggacttggctggggacagaggcggcggtgccggatgtggacacggacggaggcaacggcggcggttgtggccggggacggaggcggcggggatgggctgtgcgggaggcgagagcgaaggaagaggggagcgagacatgtgggagggatagtgcgtggggccacagttggccagttccatgggatctttag

SEQ ID NO: 1266 - DNA, 1026 bp, Oryza sativa
  Clone ID: PAT_MRT4530_101149C.1
tctcggcgggtacaccattgcttcatttcatattccttgtcgagctccatcaaccgttctcgagtaatcgagaaggtgcaaagtctgcgacaaagccttgaaaatctgacttgacaattctgatgtctgactttctagaaatcaatacttagaacagaatattcaatagaaatagcccccgagcaaacgacaaatcgcataggtagtgggagaatcgctacatcgctggcggaagaccagttgtagtcataactcgaccacttttctcaaatagtccagccgtatgcggcgctatacatgagataagtcgtcagtctttgttggtcggttgggtgcgacaactcagcattattcgagaacgttcttgataatggggtgtactcgaccacatcctactcgagtgctcaattgttcctgaaaaatatttcctgtgtagatacatgccggatatatctacgaaatagtagattaaacttaatctaccaaataccttggatgattgggtcacgttctgttttggtacatgtatgtgtagtgatactatttagatgtgaatacatctaacagtacagccgcacctactgacgcgcaactgtcgacgtttgatatcgcgactacgacattttaatggtacggggatcgttggtaccagggtataatcacaccagtacaatatttagggtagcctatctaactattgtagacttggcggtctgaaattctaactcgtatcgacaacagggtagtcttcctcctcgaatccgtgcccggcgagatcagagatagcgctttcgtctctcctgacagtatccggagacaccgtaggggactagccgtgcttatccctgaagtcgatatccggcgtcttgtcttggcttatgttggcttgtatgttgtggcttctgttgttccgtctccactctcctcttaggaggtcttatatttatacccataggtgtccccttgtccaagtagaactagggaaaccaatatggatacaatccgagtagtccttgtcgttttcat

SEQ ID NO: 1267 - DNA, 464 bp, Oryza sativa
  Clone ID: PAT_MRT4530_10114C.1
cggacgcgtgggcggacgcgtgggccaccaccaccctctatgccccgcacgcacccctctcccctcctgtctctcgcacacccaccgccaccgccggcgtcgatctgtcgcagattcccatctccagatcgacgccactagcgcccgctcacgccgcaagaacgctgtcgcctcggctcatcgatctccgacaacgccgccgcgcgcgcacgtcgatctaacgccgcaagaacaacgtcaccccgcctcaccgagctcctccgacgatattccgcgtcaattaatcttcagagcaataagggacatcaatttccaccttgctgatatcgcggcaccgttgataccgggcaccagagagcgtctatttcacctgcactgctcctgttgtcatccacgaccacactgcatcaatgtcctggacctctacctgtcgctgacgaccatccaggaaggtcgccctcggc

SEQ ID NO: 1268 - DNA, 2652 bp, Oryza sativa
  Clone ID: PAT_MRT4530_101150C.1
atgtcgtcgtggctgcggagcgcggtgagcaaggccgtcgaggcgggcggccggagcggcgtcgcccgcgccgtgctgggctacgccgacgccgtcgcccaccacgccggccaggccgtcgccgagggcgcgaagatcctcaacgaccggatgagcactcaaaactacaaaagtgtcaagaaaatggtgaagcgcttggaagaggccgcggtttcatcacgcggggaggataggcttcaggtgctaaggcactggctcagggcgctacaagaggttgaggctcaacttggaggtctagatggggctgccgaacagaatgcccattcaagtgaaccgaacacctcaaaaccaccatttgcaagagttttgttttatgatgctgacattggaggagctccgatgaactttcgagatgtgtttctctatagccaggcacttgaaggtattacgttgtccatggcaatgctattttttgctaaagcactcatagaagttaagcacagtaatccttatcattctcagattcttcaagctcctaatgaagaagaggttcccctgcttttggaaattttcggcctatgtcttacaggagggaaagaaatcaataatgcgatcatgagcagtatacaggacttggcaaaatcattctcaaattaccatgatgaagtcctggtgaaacgtgaagagttgcttcagtttacccaaagtgccatttctggactaaagaggaattctgacattatgagaatagatgctgaagctgtagagttgtggaagaaactaaatgagaaggagacatcaagagttcaacaaactcaagaagaccatgcaaaaactacggaaaggacttctgctacaactgttgaggatacaacattaatcccattagctttgcaggttgacaaattaaaggtcttagcaacttccctctctaattcatcttccaaggctgagaagcgtattttggatcacagagatttacatctggctggttgtcgttattctggcatttatcaacatcttcttgtctctgagctgtattcattgctggccacaactcaaaagcatataatgttggtcgctagtgtggttaaactttgtggtgaactggtggtgacctttcaagttgtattgtgccatacggataataggcgccagaaagaagaggctcttaacttccgtgctaaaaaggagaatgaagtgagtgcagttgaaaagaacataagtgcctgcacatgtaatacatatattgcatatgtttacattgtaaaaggaatgcatatgcgggagttgacggctgagatttctgaattggagaagcaacgtgacgaacttgaggctcggttgaagaaggtcaacatttcactgaatgctgccattggacgtctcaagcaaacaagggaagagagggatcaatttgatgaagcaaacaatcaaatgatatttagtttaaaagcgaaggataatgaactttcaaaatctattacctcatgtaatgtggaggctggcgtagtcaagacttggatcaatttccttgaggatacgtggcagcttcagtcatcatataatgaacagaaggaaaagagaaccaatgatgagcttgagagatgtacagacaatttcctgaaattgactaaatatcacctttctacattcaaggaaattctgagcccatcaattgagcgaatctgcacatacgtggataatttggcagttctgcagtcaagggacgtgtcaacagaacatgacaatgaggaactatcagaaaagacaagtccacagaaatcccttgaggaagaatatttggaaactgaaaagaaggggtgcgccgagcacatcgtcgtccacagccggctgaggaggctggggaggcatggtacaaggtaccaaggtctgatacctaggtaccagctcgatacccagggtaccaagtatcagtcgataccaaggtaccaggggtaccagattgtaattgcctttagcatcactgatcacatgaagaagctcttttattctgaacaaggggttaattctaggagggatgatgaggacgtcaggaacttattttctgagatagagaaacttagagagagattcgagtctgtagaacgaccgacgttagacattgaagtccgccgagcaaaggttccaacaaaggagagagctgagtcaagcccttcaccagttcaggtaccttctacacctaaagctgaaactgtggtctccccaaaatctccagcgaaacctgaccagccgctggatcttgattctgaacttgcaaagttagaattagaatttggtcaagttaacaaatactcacctgaagagataagtgggtgggagtttgacgaacttgaagaggagctgagagctgacatctccaaatcgcaataaaaaataatgactgcatgttacccacttcgccgtgttctggctctacccgcagttgtatagttgaatgtatagaactttctattgtgttcattgatattgtgttactgtatgaatgcacccaagttaacaaggaattccctatttgtttgttattgtcatggttttatgtaacgtgtacagaaaatatttcagtacgtcacatttgaatgtgcatataaaaagatttaagcttgatatttaaaaaaaaaaaaaaaaaaa

SEQ ID NO: 1269 - DNA, 903 bp, Oryza sativa
  Clone ID: PAT_MRT4530_101151C.1
atgagcgttgagcgagatgggcgcgaccagcccaacatcgactcgttctcgcagctgccgttcatccgccaggcggcccgcgagaagccgccgtcgtcgtcgtccggcggctccgtcgtcgtccctcctgcgcccatccggctgttcggcttcgacgtgccgccggacgcgtccaccaccgccgatgtgctaggagagaacaaggagagcgccgccgccgtcgtcgccgctgaggggagtaaacaaacggcgtccggtctggacgcaatcggcggcggcggcgggagccggaagttcgagtgccactactgctgccggaacttcccgacgtcgcaggcgctgggcgggcaccagaacgcgcacaagcgggagcggcagcgcgcgaagcacgcgcagttccagacggccatggccatgcaccacggccacggtcagtactacccgctcccggacccctacgcggcggcgttcgcggcgtaccccggccaccaccaccaccaccgtttcgccgccaccgccgccgccgccatgcctccgccgccgcactacccgtcgtgggctgcaggctccaggtactacagcggtccaggatccatctcgcagccgatcaacgggagcccggtggcgccggccgggatgtggcggctccctgccgccgccagctgcgtcggcttggcgacgacgacgactacggcggcgccgctgcccgcgcggcgccaagagcggccggcggcgacaattccttcgctgctcggaggcggcgaggagcccgtggtgctgggaggagctggctccacctcgttctcgccgtcgacgtcctcctcctcgtcgtcggcgtcgccgcacgagcggcgcgcgcagccagcgcgtaaagagaatgtgagtttggatctgagcttgtag

SEQ ID NO: 1270 - DNA, 813 bp, Oryza sativa
  Clone ID: PAT_MRT4530_101152C.1
atgggggctgatgagtgccgttgctcgttcgcgcttagcgacagccgcgcccgcctcgtccccgaccaccagtgcgtcgataggatccacgccgtgtatcgctgcgacgccgacgccgtcgacaccgacctcctgcgcggcacggcgttccaagcgtccgagcatgagcagacgcggttccccgtggtggtgatcatcggtgtcgtgtccgccaagaagccgacccgctcgccgttgtgcctctgcggttggcgccgcgccgccggcaaacggccggtcctctcgacgcggtacttgatcctcctcgaggagaagaacgacacgcaggtcgcgttccgcatcaagcttggcgactaccagtggagctgcgaccactgcaaccaccatgccacccacccatcactatccccttccacctccccaagaacgcaccgagccggcagcatcctccgcctccgcctatccacccgcgtgcagtggagcagcagcaacggcaagaagaagaagaagctctccttcaccgccgacgtctcggttgaccgggaggacctcacgccgctcgtgccagcagcggtggcggagataaggcgcaggggcatttcgcaatcgggagagcagatctccggaaccttcgccttcgacgtcctatatcgggagaaggcggcaataaggtttttggaaagtgccttgcgcaactgcttgctggtcttctacgacagctcgtcttcctctatgctcgagggctgtgcaccaacgataacattcggcactgcacgttgttcctgcagcgcgcgttgctcctcatcaacttga

SEQ ID NO: 1271 - DNA, 525 bp, Oryza sativa
  Clone ID: PAT_MRT4530_101153C.1
gctggatgcaaagactctgcatcacatcgttgtgcatgtccaagttctaggctttttcagctgaagcggcatgaactgctacagattcttgtgctgatccaatatggtgaggcagagaggtagtttcaagatttagcgaggaagaaccttgtattagccttgcatggtgagtgcacagactagggaggcagatcatgtcgtgcgtacagatgagcacttgtcggcacatcaatgctgcactatcatggacatgtgacatcacgtgaccgccactaggcgcgatgactacatttggcagagtgttggtcatctctattatcatcctaatgcagatgacgatgatgctctagcggctctgaccgtgctatatgatatggtatctaccttaagtactatggcgcacacaatatcattaccacccttggcaacatctcggaatgatccataacacgctagtgctacagcagctaaaaataaactgatatactacgatctgtacacatgtgaaacttggcgtgatctaaa

SEQ ID NO: 1272 - DNA, 261 bp, Oryza sativa
  Clone ID: PAT_MRT4530_101154C.1
atgaggtcgtgccggggagcttggtggagggagcggatcaggagcttcgcctcagctgcgataagctcggtggagggagcggatcaggagcttcgactcagctgctgcttgctccgctcaagctccaacacagtggtttggtggtgcgcgaagcgccagccgtcggaccgctcgacgatggcgaaatccttggcatttgaattgaaaaggctgttccttggcctcgcgctctctgccctctgcttcagcttcttccgttga

SEQ ID NO: 1273 - DNA, 669 bp, Oryza sativa
  Clone ID: PAT_MRT4530_101155C.1
atacttttgaatatatacatagtggtaaagtttctggttcatggggtagatgtaccttcagcttcaggagatactacaaagtaacaaatatcttctcccaatcaagatgctatcataaggatatcctttgaggaacaggatttgtaatcttaatatagtctattttgtcaaaatatctttatggaaatctttgtgttttcaacaaaatttccccttccttcttccctcccttcgtctcttccttcctagcttctttccctcttcctttttctctttattttctgcaatagctattaatgtcttctaaggtgaattaagattgaggtattacatttgcctcaataaacatctataaggtgcaattccattctggggaatatgctcattatgctctgtctctggagttaagtcaaaagaaacatgaataactctatcaaaaattttaatcaagcttatgatagcccttcacaattaaatctacttctacctcaatagaaaataattatgttgtaagactatcacacattatttaggagccataactctccatttgccataatctgtcccttacttcaaaacatttaagtagttattttgtttaagtacaggtgatttacagtgttgtgccagtttctgctgtacagcaaagtatctcagtcatatatatat

SEQ ID NO: 1274 - DNA, 2073 bp, Oryza sativa
  Clone ID: PAT_MRT4530_101156C.1
gctcgtgggttcttgtctcgactgttcgtccgctttttttttttttttttaggaaatccatcacatcttttaatattaattaatcggtcgctctgcataaatccaagctattggaaggttcaacttaaagagaaattgttgttacaatttagcaaactggcgcaaaagaaaaacaaaagactagtgttttacatagcgggataatctacgcgtcatattccgcactagcaaacttgttctcagggtagaacactgcaacaactggatttccaccgaacttccttccatgcattgccgtctttgctttggtggcgccgtccacatctgcatactccaagaaaacctttccaactccagcaactggtaatccactaggatcagggcgagggatgacaaccttaatcagattaccatatttgcctgcttccaatctcatgtcctccataatgtcttcatactcctcgtcatcttttaattcatcagccgaaaccacctgggtcaggcatacaacctttgtagggagtgctccaacttgatatacaagtttctgtaattgcacttgttgctgtgcctgcaacaggatactttcctgttctggtctaggctgagccgctccctggtttgcccttctaacagttagggttttgtctcccatcttgatgccattcagagcagcacaggctatgtcagtgacattgagatcttggtagacacagaatgcatagccctttgagttaccagtttccctatccttcacaaggtcaaatcctcgaagaggcccaaaggattcaagcaactcccggacttgagcctcagtgaagtaatatggaaggccacccacgaaaatacgatctgggccttctagccctccagctgaaccaggtgttaagccaactgcagcaagattcagattggggcttggctggctggggcccaaggcagctgccagagaagggttatagtctgttggtctcctaaccttcactggagccccttcaaacaaaatgccatccagtgccattgcattgcttgcttcctccacagacctcatttccacaaaagcaaatttcttgtcatggtttatgtagacattaagaacagcgtcacctggaccagcagtatttcctccaatagcagccatgacttgattaaagtatattgcaactgactgttcattagcagttggaggaagtccaccaacataaacacgtctcgcgtgtcgagtagcctgttgcgtcattgcttgcggctggataacaaggggattgaactgtccaacacccatcgggagcatgtttggaaacattccaggaatagcagtgcccggaaactgacttggggttggaatagcaggaaattgtggaaccacagcttgagctggaggcgccatatcaaatccactaactcgcttgctttttgaacgagagcgagacctagatctgcgatccctgcccctagaacgagagcgtgagcgagaccgatgcctgcgacgcccatcccgttcatggtctcttctcctttcagaatcacggcttctgtggcgatcatgatcatcagagcgatctctgtgttctcttctttcatggtgatgcctatggtggcgcagaatcacggcttctgtggcgatcatgatcatcagagcgatctctgtgttctcttctttcacggtgatgcctatggtggcgatcccgatccttgtccctgtccctatccctgtccctttctttgtctctgtctttttccttgtccttgtcccgatctcggtctcttcctcgatctctgtcacggtccctgtggcgttccctgtccttgtctttttctctttctctatctttatctcttggttttgataatccgtcttcacgtgaatgcgtatcgcctgaacaagcgtcagtgagaacatagaccaatagaaaaaagcatggcatcatattatatcataatcataaagctgataaagcaaagtaaaattggaattgtgtgtcctctgtaggctatgcccgcctgccaatattgcataaggtcggactataaaagcggacgcgtgggcgcacgcgtggccggacgcgtggc

SEQ ID NO: 1275 - DNA, 2544 bp, Oryza sativa
  Clone ID: PAT_MRT4530_101157C.1
tccttgtttctttttctttccttgccactgaaacgtgcttccaacagaatcggtgtgtttccaacaacatgaggtttgatacacttctcaaattttggatgtacccttgacccttgtataatccggaggagaccgtccaaaatgaaacagatcaaaatccagagctctatgtataaaaatcattccaacatccatcctaaacgaacaacacgagacgtatctacggatattgagggacctaaggcaattttcttctatgtactcaaattgatctttacatcaaaactggatgttatcctgtttgtctctaggagcaacacactgccataaagctctgaatgtttcgatttcccttgcatctattcctattgcacgaagattccgtgcatattcctgaatgtcaagaaatagctgcatgcagatcttgtcagtatcagaaatgatgttatccgaggtatcggtattagctcctactcgtctttgtgcaccttgacgtagtctttgcaatgatgattcagttttccttgccacagtgactacttcagacaccatgtcataataaattgaagtgatcttatctgtcgatccacggcgcagctttgctttatcatcttctgataaatagtgaatacggtcaccttcaagaaaaaccttaagtggatgcaaaatcccagatacatatggagaatgccttactggaagcttattggtcattctatatgttgctgttattccctttaggtgcttcaagtcctcattagaccttttaactatcaccataatcatgacattcattatagcaggcaacaactcctttaaaggctcaacagcttgcagtatactgtgtttcacgagagcaagtacttcggttgggcatgatgctagcaattggtttacatgttccacaaattggcctgattccaaaagctcgcttattacagcatttacatcatgcattacataaatgaaatcctccacaggtacagatagtgcccattcagcatccgcaggagaacttgagcccccatcagaagctttccgtgcagccaaaccagaagaaagccatgttgtataccttgaaataagctgcaaagacaagcggaggaacttatcagagtgggagaaaacaagaacatcgtcactccagcaggcctgcaaactttctaagagcttaacgctttgtttcaacaacagtgtctgcggcttcgcttgattgtcatgcattccagcaggagtaattgtggctgtaagcacagaatcaagaccaccagcaatgtcctgaaatttcaatgtgaagtagacagcaacatgccactgtcgcatgaaatcggcataagcaggctcggagcggaactttgttacagcaggcttagatgaacagtaaccttccagaaaatcaaggaatcttaagcttgctttgtagtttttgaggaactgtttaggttttccaggagaggtcgccccgggctttcccttctggattgccaaatggacttctttgagtattgaattggccagaaaatcaaaaacatgaagcccagagtttgccaacgaggatatctccaaaataaatttgcaatctttttctacgcattgcattatctgctcataatcatcttctaggtcatcagaagataccccagcaaccacttttgcatagttttgaggaacaatcttctggatcaacggcgacaccactgttgtacggaatatctcttcagctgaagatgtgttgtcaatagcagcataagcacgcaaacagttgtatattactttgtcatcacgatgttctagaccatccacaaagcaacgctccaagctaccatcaagtagttttgtagcaccttgggccctcttctccatgttttcaataaaagggaggttctgtgcatgactgatgtagaatttgagccggttcatctcactggcgattctttctaagagaatgctttgtgtctccctaacatctgtcccatcatccatgtttggtggtgtggcaacgttgcctgagtagcccttatcaccagaaacagcctcaacatttgatgaatcagatggggcggatggtagttccttgatcagtttctcaaccttagagacgacgtgggaggtgtcgagcagcagctcgagaagctcccgtgcagccgtggcagccgcgcgctgctcgagtccggagcggagtgcggcgagcccggcggctgctgcggcgcggaaggaggcgaccttgtccctgagctcggcgagcgggggccgcatgcgcgcggcggcggcatcgacgcccttgaggcgggcgctgaggccgacgaagtcggcgtagtcgcggttgatgaggccgacgagctcggcgcggagggaggcgaggtgggagcggagctcggcggcgaggctgtcgaggggcacgtaggagcggaggtcggcgacgtaggcgtccgggtcgaagtcggggcggaggaaggagtcgggcttgaaccacggcgggtgcgcctcgatgggctcgccgaagaggtccgtcggcggcggcgccgccacggcgagatccgccat

SEQ ID NO: 1276 - DNA, 789 bp, Oryza sativa
  Clone ID: PAT_MRT4530_101158C.1
ccacgggtccggtattagcagctactacaaagaacaagacagtaagatcttactacttagcgaggagaagagatcgatcgatcgatcgtaggagcaatggcgtcgaccaggcaggctctcatcgcgttcgccgtcgtcctcctcgccgccgctttcctcgtcgccgcctccgccgccgacgaaacccaggctaacaagaaggaggacaccaaggtggacgtgcaggactactggcgcggcggcggcgggtacccaccacggggcggcggctatggctatccggggcgcggctacggctatccggggcgcggcggcggcggtggctacccgggcggaggaggaggctggcacggctgccgctgctgcggctacggctaccgcggcggatgccgctgctgcgcgagccccgacgagatcccggagcccatgtaccgcccggaggtggatccccacaactgatccaatcgatcgatcgatcgatcctcggcacatgtttaattttagtttggtttcgtcaataaaatcaaaggcggcgcgtatgatctctatacgtgtacgtgtgtgtggccgccatacttatatatgtacgtatgcacagtgatcttggagaagtggagaacacataatgcttattttccactgtttttaattagggtatggtcgatcgatcagtactgtgtgtgtgaccgatgtatgtatcactttgtattattatgcatgtgatggaataaatctacctctatatagttatagtggtattgttaaaaaaaaaaaaaaaaaaaaaaaaaa

SEQ ID NO: 1277 - DNA, 242 bp, Oryza sativa
  unsure (1)..(242): unsure at all n locations
  Clone ID: PAT_MRT4530_101159C.1
ccccccttttttgggggttttttttttttggggggggaaaaaaaaggattnnnaatgttccatgttatttggcagttttcaaggatcctaggcccggccaccaaccatgggcgcctcccaagatgatttcacccccaggaaaatgccccaattttggtccgttaaaccctaaccttntcnaaagcggccccctgggcggccccttgggcccccccctgggccgccccctgggtccccccggg

SEQ ID NO: 1278 - DNA, 279 bp, Oryza sativa
  unsure (1)..(279): unsure at all n locations
  Clone ID: PAT_MRT4530_10115C.1
agancagcctncctgttacatttgcntgcaagaannaancctgtnangggtttggaatagatncnggctgacnaatacgttgcttactgcngtggcttttgtgntantgggncanctntnaanncgntgnanatgtngtttatgctgccntcctgccnnggntgttgtttttttcngntngnnttccctngtggngatggtaanccngtaaaccatgtgnccangttttcttctttnnnannnaaaatttanannntnnnannnnnnaannntttnann

SEQ ID NO: 1279 - DNA, 611 bp, Oryza sativa
  unsure (1)..(611): unsure at all n locations
  Clone ID: PAT_MRT4530_101160C.1
ctcgcagtggtattagcagctactacaaagaacaagacagtaagatcttactacttagcgaggagaagagatcgatcgatcgatcgtaggagcaatggcgtcgaccaggcaggctctcatcgcgttcgccgtcgtcctcctcgccgccgctttcctcgtcgccgcctccgccgccgacgaaacccgtgagttctcgtcgtttcttcccaagttaattattagttctagcttagctctcaacacgcaattattagtatctcatatgtgttcttggcttaattaactacaacgtcgtcggtgatcgatatgatatgcagaggctaacaagaaggaggacaccaaggtggacgtgcaggactactggcgcggcggcggcgggtacccaccacggggcggcggctatggctatccggggcgcggctacggctatccggggcgcggcggcggcggtggctacccgggcggaggaggaggctggcacggctgccgctgctgcggctacggctaccgcggcggatgccgctgctgcgcgagccccgacgagatcccggaggccatgtaccgnccggatgtggatccccacaactgaaccaatcgatcgatcgatcgat

SEQ ID NO: 1280 - DNA, 1837 bp, Oryza sativa
  unsure (1)..(1837): unsure at all n locations
  Clone ID: PAT_MRT4530_101161C.1
tttttttttgcttttatgcatttagattgcatgtttttttttttaagcttataaacaagacaaacggtggatattctcgaagcacatatagaaaaaggagtagtaaattgtctcagcatagcacatacccataactacttagatacttagatatagttaagtagtagatgcctaaggattgtctcagcatagcacatacccataattagttagatatagttaagtagtagatgcccaaggatggatgcacatacttaacatgggtggacataaatacagcagaagaatccttcgattgtccctccaatccctttaagcatgatgacattaagcaatcttcaatccagcaagcggctgctcaagtgagcctccattcctctactttccgttgccatctaatcttttccattccactctcttgtttcgcctgcatgcatcattaaactccgtacccgacttgtcggtgtcgccacctttcttcaagtaagaggggaaccacgctggggatgaagttatggccataaaaatatttcatgggcgggtatctctcatcacaacatctttcttgctcttcttcttttccattgatgaagagctcttcttcttcttcactgatgtagagggtggctggtgacagcaggatttggtttctcatgtctacctcaatcatccagtaaaggccattgcccttgtcctcgaggaggaagttgttggccttgtcgtagaggaggaaggagatggcaaatggattagccatgctcaccagggggaaagtaggcggcgcatgtggaaggaggggctggtttgcagcagagcaaatatcccagaacttgccggcttccatagtgaaatcaagaatccatctactttcgtggatgtcgaccagacaccatgactcgatctcgatgaaagcagagccagcagtgctgttgttgttgcggcctcctgctgcggcattgtcgtcggctatgcagacaaccgtgatattgccagcgctgttgatggaggcagaacgagctggatcagggctgtacttgtcaacgcggcggcggccatgcttcgcctctgccggcagcggtatgtagttgaagtaacgctgggtcttgacgtcgatgaggatgatgccatggtagcagtcgacgcaggcgaggtagctgtcgtgcaggggaagaacggcgtcggtccaccaacctctgaggtggtggttttggttgggttgctgctgcatctccaggatctggaccttccattggggttgttgggggcaatcagcatagtggttgaggacgcagagctcgacggccttacccttatggatgttgatgtccgccaccgtgaaattgccggcgccgtggcagaagaagccgacgttctgctctaccatgacccgctgctgctggcaccggtgcggcttgaagtggcggtcgacctccggggaggagaatccaccgatgaagcaagggggcagccgcgtgagcgatgggcgccgcaggccctttgccgcggtgtagacgtagtagtcgacggggaattggcccggcgcgacggtgccgaggtccgcgaaggggacgcgcgccgagaggaggatggatccgcggtgggcggcgatggcctcggcgtcgcncaggtcgtanacgcgcggccagccggggcggtgnacgtaaaggcggaagacggcgggggggtcggcgacgcggagggaaacgcggatggggtgcccgctgcaggtgtaggcgacctccgacgacgtggggtcatcgtcgccgccgacgacgtcgtcgtcgtcgctccagcagcggacaatgcggtccaggaccatccatccatgcgcttccat

SEQ ID NO: 1281 - DNA, 1271 bp, Oryza sativa
  Clone ID: PAT_MRT4530_101162C.1
actcgaaattaagcttataaacaagacaaactgtggatattctcgaagcacatatagaaaaaggagtagtaaattgtctcagcatagcacatacccataactacttagatacttagatatagttaagtagtagatgcctaaggattgtctcagcatagcacatacccataattagttagatatagttaagtagtagatgcccaaggatggatgcacatacttaacatggtggacataaatacagcagaagaatccttcgattgtccctccaatccctttaagcatgatgacattaagcaatcttcaatccagcaagcggcctgctcaagtgagcctccattcctctactttccgttgccatctgttgttttcccttcattttgcttagttcccaactattcgatcccatctccaatccattcttttgcattgctctctcttgtttttccttctgcatcatttcacgtccaatcttttcgattgcactttcttgttttgcctgctgcatcattaaactccgcatccgacttgtggtgtcgccacctttcaaataagaggggaaccagctggggacgaagttatggccataaaaatatttcatgggcaggtatctctcatcatcttcttcttttccattgatgaagaaggtggctggtggcagcaggaattccgcttcttcttcttcactgatgtagagggtggctggtgacagcagggcttggtttctcatgtccacctcaatcatccagtaaaggccattgcccttgtcctcgaggaggaagttgttggccttgtcgtagaggaggaaggagatggcaaatggattagccatgctcaccagggggaaagtaggcggcgcatgtggaaggaggggctggtttgcggcagagcaaatatcccagaacttgccggcttccatggtgaaataacgaatccatctactttcgtggatgtcgaccagacaccatgacttgatgaaagcagagccagcagagctgttgttgcggcctcctgctgcggcattgtcatctatgcagacaagcgtgatatcgccagcgatgttgatggagacagaacgagctggatcagggttgtacttgtcaacgcggcggccacgcatcgcctctgccggcagcggtatgtagttgaagtaacgctgggtcttgacgtcgatgaggatgatgccatggtagcagtcgacgcaggcgaggtagctgtcgtgcaggggaagaacggcgtcggtccaccaacctctgaggtggtggttttgg

SEQ ID NO: 1282 - DNA, 186 bp, Oryza sativa
  Clone ID: PAT_MRT4530_101163C.1
tccacggtgtcgcgccggccagcctaccttaacagcgcgttgtggacgctcagatcttcgacattccaccgaaacaaccgctgcttcgtggcctatgaaatctccatcggcagtccatggtgtcgcgcccgccagcctaccttaacggtgcagttagtcgacgtgcttgacaccgacgtcgtctaa

SEQ ID NO: 1283 - DNA, 403 bp, Oryza sativa
  unsure (1)..(403): unsure at all n locations
  Clone ID: PAT_MRT4530_101164C.1
gattatnataataatcatgtttatgtacacaaacattttttttaaattttcttccttggatttttttttttacagggggggggggggggggccctagtagtttggggttggttaaagcaggccttgtggttttttaaccttggacaggaacaacttttttttaaaaaaaaccttccttgaccgggtttttttttttaaacgaaaacaggatttgggttctagaatccattttggtaaaaaaaaaagaagaacattagttgattaaaaattttttttattctggggtgggttggataattctctggggtattgggggaatgtttttaaattggtttttttgtttaattaatttgtttattatgggggggtatataaagcgttttaaaaattacttgatttcttt

SEQ ID NO: 1284 - DNA, 379 bp, Oryza sativa
  Clone ID: PAT_MRT4530_101165C.1
gagcgctgtttttttcccttctcttaccggactccatcggccttgggtgccaccgggatgcggtcatggttcctgtttgcagtagaacccttgaacatgtatcatggtgctgagcctttttaattgtggcatgtgactcgggaatgacctaatgaggtgcctgtcctcattgaggtatccctgtactcggaactgtcaacacttaaaaataccattgcctgggtatgaatctggttaaataacactgctcaaattctctcggggcatgtctactgctctgccagggtcctttgggcggtcaatggatacacatgtatcttaaccaatctacggaactcgggagactgcccgcgttggagtcctctttctccctcctgcc

SEQ ID NO: 1285 - DNA, 147 bp, Oryza sativa
  Clone ID: PAT_MRT4530_101166C.1
tttgatggacgccgtaggttacggatccgacggattaggagtataaagaggggaaaacggtgcagtgaggcggtgatgtgaaggagcttatataagagtagtagtcatgccagcgcaacattgacagttgtcattgaggcaatctga

SEQ ID NO: 1286 - DNA, 325 bp, Oryza sativa
  Clone ID: PAT_MRT4530_101167C.1
atcataattgaggagatgttctgttaattgttgcttgcatgttcttctatcggttgcgtggtgacagatatgcgtgaattgaaaatctaatttaaccacaggccgagggagatttcccttatattctggtgatccgtgctactactactcctacttctgctcctacggtgtcgcctcctccccttcgatggacaccgtgagcgagagctgcatcagtagctggagccgtggggagatcacgctggccatcggctgtggccgctcgtcggcggcggcgtggactcggctggtcagctccggcgtggaggacgtgctggtggtgggg

SEQ ID NO: 1287 - DNA, 1434 bp, Oryza sativa
  Clone ID: PAT_MRT4530_101168C.1
atggaagacgacgccggcaactgcggcggcctgacggcgttcgcgctccgcctggcgaagcgtctcgccgacgacggcgacaacagcaacaggaacgtcgtcttctcgccggtgtccctgtacgccgcgctggcgctggtggcgtccggggcacggggcaccaccctggacgagctcgtcgcgctgctcggcgccgcgtcgctcgacgacctcgaggagtcagtacgccgcgccgtggaggtcggcctcgccgacgagtccgagtccggcgggccgcgcgtctcctacgcctgcggcgtctggcacgacgagaggctcgcgctgaagccggcctaccgcgccgccgccgccggcacctacaaggccgtgacgcgcgccgccaacttccaaagacagccaaagagttcaagaaagaagatcaacaagtgggtgtccaaggcgacgaacaagctcatccgcgagatcctcccagatggatcagttcatggcggcaccgccctcgtgctcgtcaacgccatctacttcaagggcaaatggtccaatcccttccccagggagagaaccaccaccggcaagttccaccgcctcgacggcagctccgtcgacgctccgttcatgagcagccgggaggatcagtacatcggcttctacgacggcttcaaggtgctcaagctgccgtaccaccggaccatgaagaaccatggcgatggtggtgacactatcaccaacagtagcatcactccggccatcctcaaacactacggcgagaacgtggggttgtcgatgtacatcttcctgccggacgcgcgcgacggcctgccggcgctcgtcgacaagatggcagtggcgtcgtccggcacggcctcctcctccttcctgcgtgaccaccggccggggcgacggcggatcaaggtcggcgacctgagggtgccgaggttcaaggtgtcgttctacagcgagatgaacgaggttctgaaggggatggggattggggccgccttcgacgtcggcaaggtcgacctatccggcatgatcgacggcgagctggtggtggtggagaaggtgatgcacagggcggtcgtggaggtgaacgaggaaggcacggaggcggcggcggccacggcctgcacgatgaagttcttgtgtttaactttaacctctcctgtggacttcgtcgcggaccatccgttcgcgttcttcgtggtggaggagaagtcggatgcggtgctctttgctggccacgtccttgacccaacaagcttggagtaacaacgcaagcagatgagtactccctctatcttatactcctatataagatagaaacggatggagtagaatgaagtagataaacatagtgatatttcagtgtttactagaaatacgtagaatatctctaaagccaaataaagtaagctacattttgttctgtttggt

SEQ ID NO: 1288 - DNA, 1271 bp, Oryza sativa
  Clone ID: PAT_MRT4530_101169C.1
atggtggtgctcgcgaagccggcggcgctggagcagatctcgctggtgaggtcgccgtcggtggaggataacttcggcgccgggttgccggtggtggacctggccgcggacggcgcggcgggcgaggtggtgcgggcgtgcgagaggtttgggttcttcaaggtggtgagccatggcgtcggggagggcgtggtgggtaggctggaggcggaggccgtccggttcttcgcgtcgccgcaggcggcgaaggacgcgcacggccccgcgtcgccgttcgggtacgggagcaagcgcatcggccgcaatggcgacatggggtggctcgagtacctcctcctcgccatcgacggcgcgtccctctcccgttcctcccccgcaccgtcgtcctcgctccgggacgcggcgaacaagtacgtgggcgccatgcgggggatggcgaggacggtgctggagatggtggcggagggcctcggcgtggcgccgcgcggcgcgctcgccgacatggtcgtcggcgacggcgcggcgagcgaccagatcctccggctgaaccactacccgccatgcccgccgctgctgcagaacctgatgcccaactgcagcccgaccgggttcggcgagcacaccgacccgcagctcatctccatcctccactccaactccacctccggcctccaggtcgccctccaccacgacgccgacgccggcgaccaccagtgggtcaccgtccctcccgaccccgcctccttcctcgtcatcgtcggcgactcgctgcaggtgatgacgaacgggaggatgaggagcgtccggcacagggtggtggccaacaagctcaagtcgagggtgtcaatgatctacttcggagggccgccattggagcagaggatcgcgccgctgcggcagctgctggtggccggcgtcggcaacggcgaggaggaggagcagagccggtacgaggagttcacgtggggggagtacaagaaggctgcctacctctcccgcctcagcgacaaccgcctggcccccttccaccggcagccaccacctgtcgctaacccactcgcctaagctgagttaaggtgtaagtggttaacccgtgaaactcacttatagataaaagtaagcttcgaacccacttactttaacctattaataggtttgcggtttacccaggtacaccccaaagctgagctaggctcctcgcttacacagatcgacactgcactgagaatgacgacgaattaagctactgatcaacctaacaccaatcgatg

SEQ ID NO: 1289 - DNA, 1595 bp, Oryza sativa
  Clone ID: PAT_MRT4530_10116C.1
gaccacgcgtccgcgaaaacccaacgaaaggccgtggaggaggacggcgttgcgttggcggttgggcgtctcgtcccgtctcgtctcgtctccccacgacaagaagagaggcggtgcgcttctcctcctctcctgtcctctcctcctctcgtcgagcggcgacgcagaagagtagtatggtgcccgtggagatggaggtggacgacccccgcggctgggacttcgtcgactgggtcggccccgacgcctccgcctccatcttccgctccctcgacgaccccgccgacatcgtccgcgccgccgccgtctcccgctcctggcgccgattcgttgttgagaacgaattcagcaagagcatatgcttgcggatatgcccggagatcgccaatttcaccagcgcggaggaggtgagcagatcgccgccgcagccgccgcacgccgagtccagccatggcgtccagcgcaaggccctcgagagggactacaggatctactcctacctcagcggcgccctcgtctccaacagcccctccatggactgcatcctgcaatgcatcggcgcctccagcaccgacaacttccccgacgagaccatcgagaacacgctcataccacacgatcgggtcaagcaccgcccctcctactggtccagcggcggccacgacgatcccgacacaccagagaccttgacgtacaggctcaactgtgatatgtgcatcgtcgatgagatcaagctgcagccattcaaagcttattttcagtatggacatcctatatactcttcaaaggcagtcagattccggatgggccattccaagcttcctcatggctcggattcctttgttacggtcgaggatgagaatctgatggcaattgctgacgagaattatgtgtggacttacacttcaccagagttccccatgttgcaggaaaatgtgctacaatccttcaagcttccgcgcccagtcctttgcattggtggtatagtgaaggttgaactattgggcagagtacaaaaacaggaagcagatgataggtactacatatgtatctgccatgctcaagtgagagggcgttcactttctccagttttcatggttgatacctctgatcctgctggttattcagtcctcaagtacttgccggatgcaaaaatcctacgctccgaggacgcaatgctggacgatggcagcgaatcgctggagtggcactcacttgttgctaggtacaggcggatgaggcatctagcgataatgaatgtgcttcttggacctgaagagttcatggatgaagatgatattataggtggcgtgttaatggatgaagatgatttaggtggtatgttagaggacgacccttttgtgtaggcttgctgctacagaaccacccgggttttaaactctctgtagttagttttccttgcaggcatctgtgaaacattctgcaacttcgtcgagaaaatacagttgttctgatctggagagaagaacaaatggattgttactgcgctcaaaaaaaaaaatgtaaaaatgctctgctttgttgtttatttattgctgggctcattccgagaaccaaaaaaaaaaaaaaaaaaa

SEQ ID NO: 1290 - DNA, 1005 bp, Oryza sativa
  Clone ID: PAT_MRT4530_101170C.1
atggacgacgacgcctcctcctacacctactgttgccacagctgcgacagcttcgtccacccgcacccccacctcgacgccgctgtgctctgtccccactgcaacgccgccggcttccttcacgaccacgagatgcctcccgccgccgaccactccccgttcaacccccccgtcatcgtcctccgccgctccgcatcccccgacgacgccaccaccttcgatctcctctacgacgacggcgcctcctccgccctccgccccctcttcgaccgcctcctcctccgcatcccctccgcctccgacaaccccaaccccccggcctccaaagccgccgtcgactccatgcccaccatcctcatcggggcctgccacctcgccgccgactcccactgcgccgtctgcaaggaacccttccacctcgccgccgaggccagggagatgccctgcgcccacatctaccaccacaattgcatcctcccctggctcgctctccacaactcatgccccgtctgccgccaccgcatgcccaccgatgaccacgactcgaccaatgctgctgctgctcaggctgccgccggaagcagcgacgaggacgccaccaccgtgggtactctcaccatttggaggcttcccggtgggggatatgcggttgggaggtttgctgctgctggtgggacaagagccggtgagagggagctcccggttctctacacccagatggatgatggcggcttcaacggcggcggcggctcgggctcgccgacgatgatcgggtggtcatctagagggagtcgttcgtcccagagacagagaagcatcatcccacgcttgtttcgcaacatgtttgcatgctttaggcatcatgatgcaactgcagattcaggagattattcctcacgggctgggaggagatcctcctcctctgtcttcacccgcagcctgaggagccagatcacgagctggagatcggaagatggccaccccgatgccattgctactagatga

SEQ ID NO: 1291 - DNA, 2739 bp, Oryza sativa
  Clone ID: PAT_MRT4530_101171C.1
aaaaagggtactcatgcattaaaaaagggggatttataactaaatatccacttgcaaaaggggcaaagacatacaggaaaaacactacgattcaagcagttttacttttacaaagatagaaaaaacattaatacaagagaaacgctttgatacaagagttcagggaaggggtaaacaacttcaggaaaagaatttgaaatcacaccttttcgtagcaaatataccccacattgacattgactctataaaagggttctttcattaacatgtatgaagagattgggaatagacctcaaatttctagtatagtccttatctgctcaggcgagtgttttactaaagaccttgggtcagggtagcaattctttggatccaccactgccttataaaacaggtcataagcttccgccagagctctagccaaaccatagcatgcatcaaccaaacctgtgtaacttgtcaggttgcccctgattagcagcacttatttccaacctgccaaacttcagattttctttccttgctgcagtcaaccactccagctggtccatgcgccaaatcagcgcaaaaaggagcttggatagaactataaggggccacaaggaaagcaatctgcatatgagcaaccgaactgccagtttgactttattggttggcacgttggatgtagttttctgcagctgctcaaattcaggcaaggaaccttctgttccagtcactagaccatagaatgccttcaagcattccaacaacatttgcggtgatgtctccacaatatcagccaaaggtcgtgcgtcatccttgctgccagtagagctatagtcctttatgtatggcatcttgtttgatagtccacatttcctaagaatgctatcagcttctttatctactagggtgtgcaaatgtgtttcaatcatagaccgcaggttgttaatataacttgtagcaacatcttggcccatcaatggttcctgaatagctgacaaacagttgatgaggtagattttggatgaagattcaccactcagaaaggatgttgatgaattcttagataaaatagcatcaactgagattgaatctctattatttccagtgggatcagaactagttctaccacgccgtgcaattgtcccttttgacttttgtgcctctgcagcttgctcacacatctgaattataggatccagtatggcagaaatgacaggatcgaaatttggcctttttccagaggcaggaaccatcatgctattgtaggtatttatgagttcaagcaacaatgaaattccttctctcactgctggagggggagagaggtcaacagcaacaagtggaggatatcgcaataacttttctcctcggctcttaaggatattaaagaatgtctgctgcgttgcatctctaagtgaccatattgtattgcacagtgcagcgtctccacccaacagatctgatattgtgtaaccatagaattccaaggtattgctaagtttgtaagaaattatcaggcttggttgtgactgcagaacttgttcaactcgaactttaaatggtcgacaagccccttcaaaaattctatcaagaacaaaagttatatcatgctctcctttggagggatcaccttctcggacagaataacgacgagtagttggaccactgtcagtcatcgcatccggatcaagcaaaacaactataagctctctttcagatgccagagcctgatgtagccaccccagcatatcgccaacataacgaagaggatcatgagcatgcacttctattggtcttgggagccctcccggtccacctctagtaagagcacttataaaccgtctgaacaaggcattatgtctcatattggcaacctcttctgcgcagtacttaaataaaacaggtctttccttcaggcatcgaacagccttctttagaagttcacttacttcagggttgtcagtatcacctaatcttttacattcaacttgaacccacctgcataacctttcgtaagctccttcttggtaaacagacatcatatccataagttccaaaccagcacgctggtggtgtgttcgcagcagaaccttgcagtttgaatgtatttcttggacatgcaacaatgccttgaagaatttctcatctatttcttcgtcccggagtgcatgtatctcttcatttgaaagttggtaatccctcaggaagcatgacacaatttcctggcgctgagtgataacctcaagttcttgttgcagcctctccgttgtactgatgatatcccccgtacttgcactacaactgcccaatgcttcctcaatcctaacagcttggctcatggtagaaagtaaaaaccttttcttccaggaatcgttgagcgcgtgcacctccccctcgacgcgatccaacgccttgtgggcagggagggaggcgtcgaggaaatggcggttgatggtgaggccgcgctgctcgacggaggacttgaggttgcggcgcgcctgcggggtgttctgcacgtagaaggtggagagcgcgcccagcgaggcgagcagatccgggttgtccgtccgcgtctccagcaccttcttcagcttccgggacacccccggagcgagcgccgccgccatcctgatgccctccgcgccgccgcgcccaccgcgctccacgccgtcgagtcggcgatctcctccccctttcctcctccctccgccaggagtggttgctcgtctgagatctcggctgcagcccggg

SEQ ID NO: 1292 - DNA, 2836 bp, Oryza sativa
  Clone ID: PAT_MRT4530_101172C.1
ccatcacaagttatataacacatttctagctctttcgtcagggaaatgtgggaaaatggagttgcaatgcagtaaccttgctgctgcagaccattgttgctcaggtatctgctaatctgggtgtactgaagatgcttccaggatcctactgggacgaggggagcagattgattcgaggaatatcagtgtcaccattgacgttttgagtggttttcgacttcaggcgcagctcaggtgaagccaggatggcctcctccggaggtagacaccgcttggagaagtatgtcgctatgctcttgggctttttggaactcgcaggagatgaacttaagcctagcttgctaagaacctctttcttgacctgccaacgattatcaacaaattcagaaatctccctcactttatttttcagttgtgactttgacacattcgggaatttctgatgcagtgactcaaccagcttattgataccatcacggcatgatcctatcaccttaacaatttctgccaggtctgtatctggtatagctgaagcagcagcaggactactcttcacattcaactgattggtctcctcagcatttgcagatgaactatcaataaccggtaaatcaatagtagcacctccaggacagatgcgcattgaaagaacttgtaggcagagctgctcaatcttagaagttcccttgaggtctccggcagtcaataattcagctttttcatgagttaagtttgatatcactagaggttggctcttgcggagagcctgctcagtcaaagtgtttagtactttttgctggcgtagtagagccctaaattcctctacttctgcacactggtctggtggtgagctactggcttcatccttgtcgtccaagaggctttcaatctgaatcccctcttcccattcatcatcactatcaacctcatagtcaagatcaggatccatcttaagtggacatcttgggccaacaacagcacttttcttcctccaagtcccataatatgcaggtctgttgcttttgtcaaattgcaaaagcttccgctttattgatctagttggcagaggattagcatgattggtgccatgaaactgtagctcaaccgctggtagcatatcaacatcatttgctgacttatctggttcattttcctgacttaaattgtggcaggtatcttcattaggagaaagaatttcctcaagcatgttatcagaggttttttgaagtttgagctccttaaaagcttctttcttgggtttgtttctgatcccccacctggaggacctgttatagctagataacttctgccaaccactgatctgcaacctgcgaagatcctccaaagcccagttttctttttgagagaatgaagaatcaattatggatgtaaccaatggtaccacctctttgttggtggtgcatggatcagtagtttgaacgcctgagtcctttcctccaggtttctcaagcttttcactgtctttcttatttttgaaaaaccgttccatcatagaagcttgcttctgaatggccagttgcttcttgagttggacagcttccttctcacggcgcttctgttctttctcagcttcctcttgctgcttcttttgttgcttcctcgtttcagcttcttccttttcacggcgcttctgttctttctgtgcttcctcttcctgcttcctttgctgtttcttcatttcagcttcttccttttcacgtcgtttctgttctctcagcgcctcttcttgctgtttcttttgttgttttctcattcgagcttcttctttctccttctgttttagctccttttcaacttgtttctgtgctttctgagtatctttttcattagttgaggtgtttttttgcagctgagagtcatccacattctcaataatcccagtatcgttattgcttttcaccatctcttgcattggctctttagctgttgatccagtatttttggcaccccgttcaatgttgctcttttgtgtcgctctttccaccaatgatttaataccttccaggttcagtgctttgcttaacttcagtgatgctttcctcatatcatttacttgagcttcagctcccggagcttctagaactgataacgttgaataaatagcagtaatcctctcgtggattttctttctagcagttctacgcgtactcagaggtccacgcattctcagaggaatcaccttcaaatctctcacctcccagcaccaaagagccgtctctgattcatcttccaacacatcagcatccggactagattgcccatacatcatcctctgcccaatgagcagcacagaactccggaccgaagtcgccgacacgccttccattcccttcagcttttcatatatctcatccaccaacttggacaatccaagactgctctcctctagcaagcatccgatagcagcattcgtcgacaggttcccaacttcgaattgcatcctgtgacccgaaacctccctgtaatactccaataagccctcgagctcctggcaacatccagcaactagagcatccttgtctgctgcagcaagcgccgggccactggaagccctcttcctcttcagctgcttctgcacttccacgatggtatccatcagcgcaggagactgcttcgccggcgcaggttggcttgatgcctcaactgggacatcatcaatggccatcgaatcgctgggctcgagctcggcagatcggttgagaacaacaggtccatctacttgcattcgcgactgtcctaaatcatagcgcaggtcagcatcgatattattagcaggttcagggtgagcaacgccaagaagcttgccgccttccat

SEQ ID NO: 1293 - DNA, 292 bp, Oryza sativa
  Clone ID: PAT_MRT4530_101173C.1
cggacgcgtgggggccgggaaccgtaggttggtattgtctggtgtggcatcagtgccatggtgacggtagggtttggtcgtcggaccttgaggcctgagctcatgtcagtgatgaatggctattttggactttcggtctcgattttgcgaagttcgctggtactgctggcttgagctcagtggcaaatctgttatcagtggcaaatagttaattattccgggaactaaacacggccttaatcgcaaatttctctcttcggagactcgtctcgtctcctcttccctcttctct

SEQ ID NO: 1294 - DNA, 573 bp, Oryza sativa
  Clone ID: PAT_MRT4530_101174C.1
agcactcaaaaaaaacgggaaaacactttgctcaaggcttatatatttttcatcaaaattatgaccccaaaaaaatctactcaacacttggctcgacaagaagggacccaccattttctccccaaaattatttactttccgaacagggccaggaggaaagttttttaatcactatgctctaaaaaacctaaaggggccatcgtttaaaatgattggccccaagcaggaacatgacagccctggaaaacactgaaaatggggcattgcccttgttactttgttttttgcagggaccaatgcaaatcatggggaagctgacctttcaaggctggatcatgaaacacgggagggggggctccaaaaaggccaagagctctgggccttggctagccctggcgagttgccggcccttgagtttaccaaccgcctaaacaagctgcccttttagtttttgggggaatagccgcccacctgactccacccattccctgtacagggggagggaggccatggcaatcaccaactcaagggggaagggccctcagggcaaatcggggactcacccttttccat

SEQ ID NO: 1295 - DNA, 1037 bp, Oryza sativa
  Clone ID: PAT_MRT4530_101175C.1
tacgcctgcagtactggtccggaatcccgggtcgaccacgcgtccgcgcctataaatagccggcgaagccccttcttttcccccagatccgagcctcgagctccatccttctctctcgtccccaatgccggccaccggccgatctccctcgtcggactatttccgaccaagccctcgcgccatcggcttcgcctcgatggggcaaacccattccctaaccttccccttcctttccccttccaagattagccaccaccgttacttcccaaaccggccggggcaagcttttggccatcgccgttccggtctcctctctcattccccctgccggacaccaccctccccaatgcgcgtcgttcgggaacacattccgccaccgatgtcgccgcctcccaaccaccagagccctggtgcccctcctccccctcctctcgtttgctcggctggaagagaggaggaagacgacgggaggaagaagaaggaaaggaaaaagaaaaagaaaggctgacaggtgggcccatgaacagtgcactttcatcttttctagatttaattcaaaacctaatctttagaaacccatatctcctaaccatagatccaattccgatgaaacttagacctaaattcatctaaattcaaaatctacatgaacttagattgggacagtacgcaagatttggttgatttccgggtggctagtactgtctcggtcgatataagtttaccaagtacttatgtcaaacgaacgagtacgaccgcagcttctacaatggggacagacctagatattatgttaattaacaatgtggtacctctgtacagtggttcttatgtaagtcctcgcgaaggaggcaaatatatgccgcgaagggcaaatgtgatatttaccgaggcgcaggtaatcgtggactgcgggtaaagcgtacatctactgcagtatgaatatccttgaatctattcgaatagccgtgctcacggattgagcatcgggactcatatggtactttggttagaaatataattcaagattttcttaa

SEQ ID NO: 1296 - DNA, 384 bp, Oryza sativa
  unsure (1)..(384): unsure at all n locations
  Clone ID: PAT_MRT4530_101176C.1
gactgatccaactcctaggttggttgcagatccaaagctgcaattatctgacacggatgcagatatgatcctgaactcgaaaaccgtttgtgttgcagatcccaatcacgcatcgatcgacctgggactgagctactgagctaagcttaccatggtgatcttgattcttgtaacgtagagactacaccatcttctgctacatatagcccggaatgcaccaatgcatgagtggatcagctcacctgaaagcctgaaactgaacttgacctgatcacctgaccatcaatggcgtccaagaacagctgcgcctgccacggcggtcgtcgtnaacctggcctcgtgccttcctctcgtcgncgccgccgtctangtctctgtcctcgc

SEQ ID NO: 1297 - DNA, 819 bp, Oryza sativa
  Clone ID: PAT_MRT4530_101177C.1
actaggatgaaaccctaatctttgcttcaacttcatcttcagagctggcagaactatgtttatatagagagcaagggtgagtacttacgtactcaacaaggtttgttaacctctgcagagggggtacactttacccacatgacattactaacccggatcacccagcctgtggggatcagccacgtcgggagacctccaagctttcatgacaaggcatttccaaagccaacacaggtttaccatatgccgacgagaagggtcccagaccaacaacagttttacccaagatgtttaccatattttaagtttgacggcgaccgtcgatactcgcaccgagtgcacgaataccgaggctcgaccaggtggttacaaggaaacatggccaaggtggcaccgacgtggcgcctacgtggcagccacgcgggccgcgcgagaggaggaagatgcacaggagctccaaccaacggcggctgacggcggggcttcaccgaagcacgacgcggagattcgatcgagagggagttcaccggtacaaaggggagcacgagaggggatgagccaacggatcggatccttcgaagaggggccggtgacgacgaatcgcggcggcgcacgccggcgacgagaaaagggggaaacggcggaggggcgatgaggattcgattcaaggcggtgggagtatctatggggctcggggaatccgtttcaggcgccggatggggaggagaggcaccgaggagggctggcgacggcggcggcccccgggagcgggcggcaatggcggcgaggccatgccaggcggctgcggggcttgggggg

SEQ ID NO: 1298 - DNA, 240 bp, Oryza sativa
  Clone ID: PAT_MRT4530_101178C.1
cggtcgcgtgggcagatcttgtctacttgctgctagataacaatattcgacgaggcgacccggcgcgagagaagaagagatcgatcgatcgatcatccgatctctcctgagaaggaagaggagcaaacatttcttcggtgttcagcggggatgatacggcgccattttttggttcattgggggcgggctccggcctgatattatcatgcatgggtgcggcgtactgggcggcgaacagcg

SEQ ID NO: 1299 - DNA, 501 bp, Oryza sativa
  Clone ID: PAT_MRT4530_101179C.1
atggcattggtggtgctcgcgatcaccagcctcgccgaggcggaggcggtggcgagggagctcggcgggccgcacagcccccacgtcgacgtccgcgtcgagtccgtcgtcctgagcgaggcacccgccatggcggcgatcatgtacgcgctcttcgacgactacggctggctcgtcggcaacctcgacaggctcctcgacctcgccggcgtcgacgagcacctctccatcgtcgccgacgtcaatctccccaggctcgcgcgggacgtgcacgaccccaacgccctcgcgcggctacgcgacagcgccgccaccatcatccgcctcgccaggagggtcggcgggccatccaccgccgcctacaccaacttcggcaaccgcatcaccaagctcgcccaccacatccaggaccccaaccgctcggtgctggagctccgtggccgcctcggcgaggccgccacccgcgtcaacttactcaggtccagccacttcgatttctga

SEQ ID NO: 1300 - DNA, 378 bp, Oryza sativa
  Clone ID: PAT_MRT4530_10117C.1
ttttaagtcatcggcatcccagctgccgagtatccctcctattctaccaccgcctgcgatgtcggttcctcgtccccgccgtggccaaagcgaggccgacgctccatacaggccgtaccgcgttcctcgtgagattcaagcacccagcactgagctcgatcgggggcaagtcaccgtatggttaggaatcggtggcatccaaaccataccgacgatgaagatggatggccgatcggatgaggtaccacacgcatcctctgtatatgcgctgagtatttactcaattttcctgtgggagcaacagagcgggatgatgcgacgccgtcatcttgcacttcttcctgcctatccctgcactcttgcctgctgccacgcatc

SEQ ID NO: 1301 - DNA, 481 bp, Oryza sativa
  Clone ID: PAT_MRT4530_101180C.1
attgctatttgttggaattcctgatgctgtgaagatctgggatacaggagctgagatgagcctaagtgagccaactggcgagtacatgcactggcggttggcaatgggatgctcttcgctgcaatgcaactatacaagatggagatattttagcgtggagatattgtgcagaaaaagactcttttgagcttgcttcttctcttgtggggcatcaccgcatcagggtcctgttgtttcattagctataggaacaatgatgctttactctggttcaatggatcacactattagagaaaaaaaaatccttgtaaccctatgccctatttatttgtattcatttttagataatatgcgtggtacttctattaacatttagatgatggttagtataaaaatgcaatgtccaattctaaattttctgttgggtatttgctctcactgttttgttggcaatgaaaacatgacaggcctgggacttggc

SEQ ID NO: 1302 - DNA, 198 bp, Oryza sativa
  Clone ID: PAT_MRT4530_101181C.1
taggatgcccgcttttcagaagctttgctcctttttagcggcccttcttttttttttttttggtatacaaaatgtagcacaagtctttattgagcaattaatcttttgttgatgttacaaattaattaaatgcacatgcatgatctcaaactataacaaataccttagcaataacatagcaaagcttactaggctagt

SEQ ID NO: 1303 - DNA, 425 bp, Oryza sativa
  Clone ID: PAT_MRT4530_101182C.1
gtttatccgtggcgcatcccatctcgccccggcgactcgtcggcgtcggcgtcggccatgggcggcgactggcaggagcttgcccaggcggcggtaatcggcctcctcttcgccttcctcgtcgccaagctcatctccacggtcatcgccttcaaggaggacaacctgcgaatcacccgctccacgccgacctccccctgcggcgtggacacccccgtcgccccggccccacctgcggcctgcctcgacggcggccatggggacaccagcgacggcagcggcagcgacagcgacagctactgggagggcgtggagagcacggagctcgaccaggagttcagcgcccgctccgagttcgtcgtcggctccgctgcgtctggcacgagcgtccccgagcaagcccagcttcagctctatgggctcta

SEQ ID NO: 1304 - DNA, 3079 bp, Oryza sativa
  Clone ID: PAT_MRT4530_101183C.1
atgccgtctctccggcgattcttggagttggtggtggttgggattgttgtgtgtggtgtcaatggcgggagtgatggtttggaggttgcggtggcgaggaggcagctgcaccagccgttcttcccggatcagtcgtcgtcgccgccgacgccggcgccgcccggccccgctccgccgttcttcccggcgctgccggtgccgccgccgccgccggcgacggcggggcaggagcagccgacgtaccccgccctcgtgctgcccaacaccggcgccggtggcgcggcggcgacggccgctccggatggaggtggtggtggtggtggtggggcgaggaagtcgaagagcagcgcgtcgaagcttgtcccggcgattgtgctgccgctgctcacggtggccgtgctcgggctgtccatcgcgttcttcttcacgcaccggcgtgggaatgcggcgcgcgggggaggaggaggcggcgggtgcgtcggtggcggggacgccaagttcttgcacccggagagggcgagcctcttcgcgcgcgacgagttcggcgggagcggcggcgccgccgcgccgccggccgcggcgatggattaccgctacgtggggaacgccggcatcgggcggatggacgagaagagcagcgagacgacgtcgtcgggcgacgaggcgtcccggagcaccggcggatcgccggagctccgcccgctgccgccgctgctggcgcggcaatgcgggccgatgggcgcgaggagccccggcagcggcgtcggcgggttcgcgtcgccgtcgtccggcgacgaggaattctactcgccgcaaggatcatccaagatgtcgacctcgcacagaacgctcgccgccgcggtcgaagccgctgtggccgcgcgcgaccgctccaagagcccctcgcccggctcgatcgtgagcacgccgtcgtacccgtcctcgcccggcgcgacgaccacctttcctggcagtgttgctagcagagacggaactgacagtgagccgtcgatcctgaatccatatagcgcatgcgaatgtgtacgtcacaccggccaaccaccggcgcctccaccaccacctcccttcgcgccgacgctgccaccgccgcctccgcctcgccggaaaccgccgtcgccatcaccgccctcctccccactcatcgagaacacgtcggcgctcagatccaccaccaccaccgacaccaccatcccaagaaacccattcgtacaaccaccacccccaccgacacacacccacggaccaccaccgccgccgccgccgccgcctccgccgccggtgggctactgggagagccgcgtgcggaagcctggcaccggaacgtccaaagaaacccggtccccggcgctgtcgccgccgccgcaggccgccagcttcaagagcggtctacccaccgacgcgttccccggccgcctcgcggacaatgcggaccacgccgccgccgccgcggccggcggcggcggcgacaagtcggaggagacgacgccgcggccgaagctgaagccgctgcactgggacaaggtccgggcaagctccgaccgcgtcatggtgtgggatcagctcaaatccagctcgttccaggtgaatgaggagatgatcgagacattgttcatctgcaatccggcgaactcggcgccaccgaaggagccagcaacgaggaggccggtgctgccgacgcccaagacggacaacaaggtgcttgatccaaagaagtcgcagaacatcgccatcttgctgcgagctctgaatgtatccaaggagcaggtctgcgacgcgctctgcgaaggtaacacagagaactttggagcagaattgttggagaccttgctaaagatggctcctaccaaggaagaggagatcaaattgagagaattcaaagaggagacatctcctattaagcttggtcctgctgagaaattccttaaggcagtccttgatatcccatttgctttcaaaagagtagacgcaatgctttacattgctaactttgaatcagaggttaattacctgaagaagtcctttgagacccttgagactgcttgtgacgagcttagaaacagcaggctgtttctgaagctacttgaagctgtcctgaagactggcaacaggatgaatgttggaacaaatcgcggcgatgcacacgcgttcaagcttgatactctactcaaattggttgatgtcaaaggcactgatggcaagactacacttttgcattttgtcgtgcaggagattatccgaacggagggctcccacctctctgctagcaaccaatcaactccacgaactcaggcaaaccctttacgggacgagctcgagtgcaaaaagcttggcctccaggtagtggctggcctcggaaacgagctcagcaatgtcaagaaggcagctgccatggactccgacgtgctaagcagctatgtctcgaaacttgctggaggaatagagaagatcactgaggtgttgcggttgaatgaagaagtcaagtccagggaagatgcatggaggttccatgattcaatgcagaagttcttgaagagggctgatgacgacatcatcagggttcaggctcaggagagcgttgcgctatcacttgtgaaggagatcaccgagtacttccatggtgactctgcgaaagaggaagctcaccctttcaggatcttcatggtggtcagggatttcctctcagttcttgatcaagtctgcaaggaagttggcaggatcaatgaccgcacgatcgctagctcggtgcgccatttcccagtacccgtcaacccaatgatgccacagttgttccccaggattcatgctttgagagctggaatctcagatgatgaaagttcagccacttcagcatcatcaccttgatcaccagtagtctgccaatagaaatttttcgcagagtactgtgggaaacctccatagggcagagggagaccaacggcgacggggtgtcaaatttttttttgaaccttttgtacctgtagattatagaatgtaagaagtttttttgcaaatatttatttctatatataagaggagataaaatctagatcagaggagg

SEQ ID NO: 1305 - DNA, 383 bp, Oryza sativa
  Clone ID: PAT_MRT4530_101184C.1
aaaaccacaacggaacgtgtgtttcaatcatgacaaccacatatccatcattacatatatcttcctataaggaattatttactactattcataaacgctacacagtgcattcttaaacaactctttcaaaagtaaaaaaataaccctctgttctcttactcatccctaagaaatatcacccctccacatcattaaattaccaaagatgttacctctgcacaatctgctaacccccacccttacacctaccaaaacctcataccccacaattccctaccctttcttcaaatcacaccagattttcctatattaacaactatcatagcttaccgcaaacttctcacaaccccgtttcttgctgacaattcaattaattaacaatt

SEQ ID NO: 1306 - DNA, 675 bp, Oryza sativa
  Clone ID: PAT_MRT4530_101185C.1
atggccatggcccgcgccggaggcgggggaacctgctgcagctgcctctgcgccttcctcgtctgcatcggcgtcgccgtgctcatctactgggccacctaccagccccaccgcatccgcgccgccgtcgaatccgccgagctgtccaacctcaccgtcgttgtcaggaacggcacggccgacggcggcggcagcggcggcgtggtgtactaccgcctcgccgtcaacgtcaccatgtacaaccccagcggccgcgcgggggtccactacgacgccatccgcccccgcctcctcctcctcctcgccggcggcgcgtcgctcggcgccgccaacgccaccgtccccggggtgttccaccagcccaggatgtccaccaccgtcgtggcgatcgacttcgaccggagcggcggcggcggcgtcgctgtcgccggcgacgtggcggcggagctggacaaggagatcaagggtagcggcggcggcggcgaggtcgggttcgagatggtgatcgacgcgcgggtgaggtacaagctgggcttcatcccgataagagccaggccgaaggttcggtgcccggtgaggattccggtcaaggccgagcgccgcggcggcggcggcggcggcggcggcgtcaccggctttctccgctccggcgaccggtgcaccgtgaagtactga

SEQ ID NO: 1307 - DNA, 1908 bp, Oryza sativa
  Clone ID: PAT_MRT4530_101186C.1
atggcggcacccgcctcgccactccaccctctcgccgccatagcagcagctctcctcctcctcctcgtcgcagccccctctgcagcagctgcagctagccccgtcttccccggagtccctcccctgcagctgcaagctctgcagcagcggcggccggcgagctccgccggcggcagcaggtatgtcgtcgccgcggcggcggcggcggccggagggaacggcacagcggcggcggcgaagccgttcacggcgcactacttcccgcaggagctggaccacttcaccttcacgcccaacgcgtcggccgtcttctaccagaagtacctcgtcaacgacaccttctggcggcggagcgccgccgccggcgagacgccggccgggccgatattcgtgtacaccggcaacgagggcgacatcgagtgcaagcagcatcgattctacggggagtcgaagccgttcggcaacgagtcgaacagctcgccggagaagctggggtacctgacgtcgacgcaagcgctcgccgacttcgccgtcctcatcaccagcctcaagcacaacctctccgccgtctcctcccccgtcgtcgtcttcggtggctcctacggcggcatgttggcttcatggttcaggctaaagtatccccatgtcaccattggcgccgtcgcgtcctctgctccgatcctgcagttcgactacataactccatggagcagcttctacgaggccgtctcgcaagattacaagtctgaaagcttcaattgcttcagtgttatcaaggcagcttgggatttgatagatgagaggggatccactgatgcagggctcttacagctcagcaaaaccttcagagcctgcaagactgtgaaatcggtttactcgttcagaaactggctatggacagcatttgtgtacacagccatggtggactatccaaccccggccaatttcctgatgaatctgcctgcctatcctatcaaggagatgtgcaagatcatccacggcttccctgcaggagcagacatcgttgacaaagctttcgcagcggcgagtctgtactacaattacacaggagatcaaacatgcttccagttagaggatggagaagacccccatggcctcagtggttggggatggcaggcctgcacagaaatggtcatgccgatgacgatatcgaacgagagcatgttccctccattcaccttcacttatgaggggaaatctgatgactgtttccagagctacggtgttcgtccgagaccacactggatcaccactgaatatggtggaaatagaattgacctggtgctcaagaggtttgggagcaacatcatcttctccaacggaatgcgagacccatggagccgtggcggggtgctcaagaacatatcatctagtatcattgcccttgtcacggagaaaggagctcatcatttggacttcagatcagcaactaaagatgatccagattgggttgtagaacaacgaagacaagaagttaagatcatacagggatggatagatcagtacaacgaggaccttgcacagatatcaaaatgagaagatgcagttactgcgacagacaatcgaaacatgagactgtctacacagtaatcaactgtttttggctacatggaaaaaataaggaaaaggaatttttctttcttgcaggctgttagacagaaaattaaattaaggtaacatacagtggaaactcaataagtcactcagaaaggttgtaagcggctaacccgcgaaacccacttataggccaaaataagccacaaactcgtttattttgacctataagtgggttcgcggcttacccacttacacccagtcagaatcagaaattgtgacacccaaatattccatggttccatttatctcccagtaaataattggttctat

SEQ ID NO: 1308 - DNA, 582 bp, Oryza sativa
  Clone ID: PAT_MRT4530_101187C.1
atggccgctgcattgatctcaaagcgttctgaaagaaatcatttctataacgcaaatgtcattggcgtcgtggtccaatataacggcgccaatgacattggcgtcgtccctctagcccccgatggaagctacaccaatgtcattggcaccgatgatatatttgtccttaggaccaacgatattgatgctggattagctgacctcctagcgatttgggaagccagctcccactgcgacgtctccatatacggaggaattgaaaggcagtcagtcagtcacagtcagccagaggcgaggaaggggccggtgacggaggcggatggatcaaaacgcaggtgctccgtgcaccgtaagctcgtaacaatactcagctacttcaatagatcagctgaaggaggcctgaagctgcgtaatgatgccacagtccgcgagatattacttcctgagctgcctacattcattactacctatgtcctggctgggcgggttcaggtccacatccgctgccttttgagaccaaagacaaagtttactgttgctgccatctctagcccatccatctcttattcagggcctgtttag

SEQ ID NO: 1309 - DNA, 254 bp, Oryza sativa
  Clone ID: PAT_MRT4530_101188C.1
agtattaattacacaacaaccaccagtacatatgaatacattattctaatgctacactcacaaccaattaaaactgtgggggagacaaaaagatactctcgataatggcgagctgaatttcacagcaatggcattttaaaataccaaacggggaacacaattatgatcatattcttcctagcctacaacacctttacacatgcgggtttctcttcttcttacctttatgggacaatggccaccctccatcacca

SEQ ID NO: 1310 - DNA, 875 bp, Oryza sativa
  Clone ID: PAT_MRT4530_101189C.1
aaaatggcggcacccgcctcgccactccaccctctcgccgccatagcagcagctctcctcctcctcctcgtcgcagccccctctgcagcagctgcagctagccccgtcttccccggagtccctcccctgcagctgcaagctctgcagcagcggcggccggcgagctccgccggcggcagcaggtatgtcgtcgccgcggcggcggcggcggccggagggaacggcacagcggcggcggcgaagccgttcacggcgcactacttcccgcaggagctggaccacttcaccttcacgcccaacgcgtcggccgtcttctaccagaagtacctcgtcaacgacaccttctggcggcggagcgccgccgccggcgagacgccggccgggccgatattcgtgtacaccggcaacgagggcgacatcgagtggttcgccaccaacaccggcttcatgttcgacatcgcgcccagcttcggcgccctgctcgtcttcatcgagcatcgattctacggggagtcgaagccgttcggcaacgagtcgaacagctcgccggagaagctgggggtacctgacgtcgacgcaagcgctcgccgacttcgccgtcctcatcaccagcctcaagcacaacctctccgccgtctcctcccccgtcgtcgtcttcggtggctcctacggcggcatgttggcttcatggttcaggctaaagtatccccatgtcaccattggcgccgtcgcgtcctctgctccgatcctgcagttcgactacataactccatggagcagcttctacgaggccgtctcgcaagattacaagtctgaaagcttcaattgcttcagtgttatcaaggcagcttgagatttgatagatgagaggggat

SEQ ID NO: 1311 - DNA, 207 bp, Oryza sativa
  Clone ID: PAT_MRT4530_10118C.1
atggcgcgccttctgtcgacgcggctgccgcgccgttgccttcttgcctgtggacgctgcgctgttcgtgtcaccgaggtgacagctcgaccagagggcatggttacggtcgatgcagtgggaagaacagaggaaaaagaagagaaacggagaaatgagaggatgggaaaaaaaaggaaagaagggcccacttgccagttggtgtag

SEQ ID NO: 1312 - DNA, 165 bp, Oryza sativa
  Clone ID: PAT_MRT4530_101190C.1
atggagtgctccttcaccctccgcaggaacgcctcgtccttcccggccaagaacagctgttatcttcagtgcatgacccagcatcatcttgagacacttctcaaagctgagaagaggtccaatgatctggagtcattagttattcaactcactttgctgctgtaa

SEQ ID NO: 1313 - DNA, 468 bp, Oryza sativa
  Clone ID: PAT_MRT4530_101191C.1
accaaggacaaaaattactggttcacataaaacacaaaaaatctgaaaacccccttcaaaggaacatagggggaaaatcctttttagcgactaccgctaggaggatgcttcactggaaattgaaaaaaaaagggttgctttttaactaggactatgcaacacacaatttcctttgccttaaagaatgggtccatggctcacttggccataatgaccttaaaaaactccttatagtttatttgaccatcaccataaaaataagcctcacggatcattttatccacctccttggaagttagcttctccccaaaatttgtcatcacatgggggagctcaacaggggaaataaacccattttggtccttggaaaacacccggaaggcccccttgagtttttcctttgaataaggggccttcattttgcgagccctcagattgaaaaactcaggaaaatcaagggttccattg

SEQ ID NO: 1314 - DNA, 213 bp, Oryza sativa
  Clone ID: PAT_MRT4530_101192C.1
acgacgggcctgacaggtggaccccacctgtcagcggcagcgagggcgcgcgcgcgggcggctgcgaactgggccggctgggccgaggagagagagaaagcgagaacgtccgtacacgcgccgatataccgaaagaaggtggaaaggctcatcgggtggcttacagtgaagattcaaatgaagacaattcaagtttggaggaccgatggatcg

SEQ ID NO: 1315 - DNA, 303 bp, Oryza sativa
  Clone ID: PAT_MRT4530_101193C.1
atggtcgggactcgtcggacgagtcgtgacctccatttcatgtgtgataaactgagaattgaagcgcgtgcggctattcagaacatggatgtttgttcaggctatgcagcattgcaacgtcatcgtcaagcatttgttcgtggcaaaaagatgacacagaacatggtaaaggacacagaacctagggctataaccaaaaaatgcgcatccggggaatcgaacccggtcagtaccgtgggagggtactatgataccactacaccagatgcgcttctttggtgctggaagcttgttcccctttaa

SEQ ID NO: 1316 - DNA, 609 bp, Oryza sativa
  Clone ID: PAT_MRT4530_101194C.1
gtggatccccgggctgcaggggctttgaaggctcaggaggaggtcaaccagactgaagccacatcggaagaggggactgatcactagtgatgctaatggccataacatccaggaacataaattacctgcagttagttctgaagatccagtggctagcgctccaagctctagttttgaaccttccactggagtgagctcatcaggagaaaagaaatgccaagaccctcatgggctagggtacttgacatttaatcctttgttttctcagataacaggatcgcaaaatattcagctggagggtcctgtctctgatcaaatgcatcacgctgaaggagattttccatgtgccacacacacaaataccagagatgtactcaaccatgaacctttggagagaaaggttcttgcaccaaagcatattgtgtcaaatgataatggagaaaatgttgccgtgtcaaggattgtcttgccaatagcaagtctgcaacgggaacatctgaaaattgatcttgagaggcaggaaccaaggaagaatgctctaatcagtagtatgccaacaaagagttccaaggaaccatcaacttctgttatccacatcccaaggattga

SEQ ID NO: 1317 - DNA, 294 bp, Oryza sativa
  Clone ID: PAT_MRT4530_101195C.1
cggacgcgtgagtcgatctagcatgtgagcacacattacttgatgcagacgtgcagtcatattgtcgagaccctgtagtgcggtggccttaacgttaatgtgtacgtgctgatgaacgagtatgtttcgcaacctaatgacttcttcgcagacgccacatcacatatcaacacatgcgtgcagaagaatggtgctggaatggatgggatcatgacagatgttcctgcgacggtgcacagatacatactgagcccgtgcacgagctaggaaagcaacttgtgcaaccttcatgct

SEQ ID NO: 1318 - DNA, 459 bp, Oryza sativa
  Clone ID: PAT_MRT4530_101196C.1
gaggaggggcgcggctccgtcccttggcggcttgcgcgcggagtggcgggggccgggcgatgacgacggtgatgacgggagggcggcttggagcggggcgacaacaccggcgacaggcgcgcgcaaaggctgacggcgtcggcgaccgggcggtcggccactcggctcgcgcgcgcggcttgcaacaggcggcgtccgcgcgggcgcgcgcacgcgaacacggcgcgcgggaagcggctttgcgagcggggagctcgcgcgaggggagggggcgctcggcgcgggcgactcccgcgcatgcgcgagcagcgtgcgggcgaggctgagcgggggaaaggaaagagcgcgccggggggagagagagagagagagagagagagcgcccgggagagagatgggccgagctggattcggcccatcgaacccgggggaggcaaactagacttttgcggaggaaat

SEQ ID NO: 1319 - DNA, 675 bp, Oryza sativa
  Clone ID: PAT_MRT4530_101197C.1
atggcgagagacgtcgtcgaggccgcggcggcagcggatggtcgtcatcatcacaaggcggttgttgcggcggacggcggcggcggcggcggcgcggggacggcggcgctggtgtgggactgcggcagcgcgctctacgactcgtacgagctcacctccttccgccgccagctcgacgccgccgtgctctcctgcggcggcaggtcgctgtccatgccgcacctgctgtcgtcgtcgtcgacgcagcagcagcagatgccggcggggcggaggaggaggaggaggcggcggctgccggcgatgctccggaggctgttcgggaaggtgctgctccggctgaggttccccgtggcgtcgagggcggcgaggggtggctggtacgactacggcgcccacggcgacggccgcccggggtcgccgtggtccggcgcgctgacgtcgatcccggaggagagcgccagcccggagaacgggccgtcgtcgtccccgctggtcgacgacgacgggccgagcgcgctccgcaaggcgcagtcggagcgcttcgtcggcagcaagacggcatcgtccatggtgcagttcgatgtcgtcttgggcggtggccgcaacgtcaccaagctcatggcggaagcattgagggcgacaatggggaaggtaggagctaaaggtgatatatag

SEQ ID NO: 1320 - DNA, 4146 bp, Oryza sativa
  Clone ID: PAT_MRT4530_101199C.1
atgccagcacaggggacagcatctacccctttagcatatttttcagttgctaggacagctgcgcagccccccggaggtgcgccatgtccgacgttcggtctcggcgttcaatcgcctcgagcactcgacgtcagcaggacgccgagctcgccgcagcagaagagcgcagaagagcgcaggcgagcaacggctcagaccgctgcagcagcagcgagggcggctagactggcggcagcagagttggcagcagccagggcggaggcggaagcagaggcggcggaagatgcggcatgtgcggcggaggtagaggttgagaccttgcgcagtagcatcaacggctccatcgccggcgacatcaccgccgacagggagcttgaggagctggcaagaggtagggcacgggagcgggcagagcggtgggcagcagcccacctccaaggcggcggcggcggcccaagggaccgcgcgcccgccgacgggaaccctcgcaggcagcgcggctctccctcccctgaccggcgccatggccaccacggcgtccagacggtggtcagggactttggtcctggcggtgggtggcctaccctcaccaaaaccaactacatcgagtgggccgcggtgatgagggtgaggctccaggtgcggcacatgtgggaggcagtccggtacggcgacgtcgactacgacaaggatcggcgagcactggatgccctcatcgctgcagtcccgcccgagatgcagttctcgctttcccagaagcggactgaaaaggaggcctgggacgccatcgctgcggcacgcatcggcagcgaccgcgcccgcaagtccacactacaggcactccgcaaggagtgggagaacctggccttcaagccaggtgaggatgttgatgactttgccctccgtctcaacactcttttgcagaagatggtgcagtacggcgacgacacctacgacgaggagaagctctttcgctgcgtcccagagaagtacaggcagatcgctcgagtctctgctggacctctccacgatgtcgatcgaggaggcgttaggtcgcctcaaggtggaggaagagccggctttgctcctggcacacgccagcatcgagctatcttcagcggcaccggccgcaacggctttcctccacctcgaggagccgaaggtacacgcctcctcggcaacagctccagcaacgacaaggctgatgggtggtacctcgacaccggcgccacccatcacatgactggccaacgggagttgttcaccgagcttgactccagcgtccgaggctccgtcaagtttggggatgcctgcagcgtggagatcaagggcgtcggctccgtcaccttcaccgccaagtccggtgagcacaggctgctcaccggagtctactacatccccgcgttgagaaactctatcatcagcgtgggacagctggatgagaacggctcacgcgtgttggtcgagcacggagtcatgaggatttgggatcgccgccgtcgccttcttgccaaagtaaccagaggcactaatcgactctacatcctcaacgcgcaggtcgcacaaccagtttgcctcaccgctcgtcgggacgacgaagcgtggcagtggcacgagcgtttcgggcacctccactttgaggccctgaagcggctcagtgccaaggagatggtgcgaggcctgccatgccttgaccacgtggagcagctctgcgacgtctgcatcctaacgaagcagaggcggctcccctttccccagcagacgagtttccgagccaaggagcggctcgagctcgtgcacggggacttgtgtggcccagtgacaccggccacaccaggaggacgacgttacttcctgctgctcgtcgatgacctttcccgctacatgtgggtgatggtcctcggcagcaagggagaggctgcggacgccatccggcgcgcgcaggctgctgcagaggcggactgcggccgcaagctgcgcgtgctgcgcaccgacaacggcggcgaattcacggcggctgaattcgcgtcgtactgcgctgatgagggcattcagcgccactacaccacgccgtacagcccgcaacagaacggcgtcgtcgagcggcgcaaccagacggttgtggggatggctagggctctcctcaagcagagggggatgccagccatcttctggggagaggcggtggtgacggccgtctacatcctcaaccgctcgcctaccaaggccctcgatggcaggacaccgtacgaggcttggcatgggcgcaagccgggggtctcccacctgcgggtcttcggctgcctcgtgttcgtcaaggagcttggccccatcggcaagctcgacgacaggagcaccccaggggtgttcatcggctacgcggagggctcgaaggcctatcacatcctcaacccggagacagcgtgtgcgcgcgacgtagtgttcgacgaagggcgagggtgggtatgggacaaggcggtggacgatggttcgactccgacgtacgacgacttcaccgtcgacccggtggagttcgctactccgctctcccacgacggggagcgcatcgacgcgtaccacgacggcgagcagctacggtaccgtacgatggaggatcttctcggcgaccagccggtgccgggactggtgcctcgcaacctggaggcgcagttgcaccttgcgtgcgacgacggtgagcctcggtctttcgcagaggccgagaaacacgcggcatggcgtgccgcgatgcagtcggagatggacgcggttcaggagaaccgcacctgggagcttgttgatctccctcgtggtcaccacgcgatcacccttaagtgggtgttcaagctgaagagggatgaagccggagccatcgtcaagcacaaggctcgcttggtggcacgcggtttcgtgcagcaggaggggatcgactacgacgatgccttcgctcccgtggcacggatggagtccgtgcgactccttgcgctggctcctcaggaaggctggggcgtccatcacatggacgtcaagtcggcgtttctgaacggcgacttgaaggaggtctacgtgcaccagccgccgggatttgtgatccccggcaaggagggcaaggtgctacgcctgcacaaggccctctatggcttgcggcaggcaccgagggcgtggaatgccaagttggattccacgctcaaggggatgggcttcgagcaaagcccgcacgaggcggccatctaccggcggggcaatggaggaaatgccttgctggtgggtgtctacgtcgacgacttggtgatcaccggcaccaaggatgcggaggtcgcggcgttcgaggagatgaaggccaccttccagatgagtgatctagggcctctctccttctacctagggatcgagctctcactccgatggaggagactgaagctgagccgcgatagcacgacggaggaagtggatgctacacagtaccggcgtcttgtggggagccttcgctacctcacccacacacggccggacttggccttctccgtcaactacgtcagtcggttcatgcagcgaccgacgacggagcaccagcgggctgtgaagaggatcatccgctacgttgcggggactctcgaccacggtctctactacccgaggtgtcctggcaaggcacacttcgtcgggtacagcgacagcgaccacgccgacgacatcgacaccagcaagagcacgagcgggattctcttcttcctcggcgagtgcctcgttagctggcagtcggtcaagcagcaagtggtggccctgtccagctgcgaggccgagtacatggcggcctccgccgcttcgacccaggcgctctggcttgctcgactgcttagtgatctcctcggcagagacactggagcggtggagctcagggtggatagcaagttcgctctggccctggcaaagaaccccgtttttcacgaacggagcaagcacatccgggtgaggtaccacttcatccgaagctacttggaggaagggagcatcaaggcgagctacatcaacaccaaggaccagcttgcggacttgctcaccaagcctcttgggaggatcaagttcctcgagctctgctccaggatcgggatggcccaacttccccacaagacgacgcacaagacttag

SEQ ID NO: 1321 - DNA, 343 bp, Oryza sativa
  Clone ID: PAT_MRT4530_10119C.1
acatccaccagccaaggcccaggagttctcccgcgtagacttcgagtgagacctcttgtgctgcagtcgccccttctgccattggaacctgtgatacggcatggacgatgatgatgtctccgaggcccagaaggacctctccgagatgggtaaggactactaggagggcgggtgtcttctctgcgatggtgacaagggtgatgagggtgactatgactagagaggattatggtccttgcctgaagactgagcagtgcttgattactgctgctatcctatgatctgtgctggtaagcatctatcatatcagttgatgatgtctggctgttgaaacacatgttgc

SEQ ID NO: 1322 - DNA, 510 bp, Oryza sativa
  Clone ID: PAT_MRT4530_1011C.1
atccctattcaaaattatcatgctgatccatatgcaccatcgagtcaaccaccatctcttcgatctgatctactgttccttatcaccaaccacaaccgtctggttatccacctcctaatcagcctcgacatcaacaagcttacggaaatcctcaaagtgtaccaccccttctccgtatgcaccatctcttgcccaatactacggtgctcaacacgagcctaagatagttctcgagatctctggtcatatgcctatttaattttaatgcgtttgtctacgtatttttgcgtttatttgtgtttgtatgctgtgtgttattgtctcttgttttttttctcgattttcttatgtatattaaaaagaaagaaagaaatacctatatatcaacatctggaaatgaacatatgatgaatatgtacagaatgttctttactttgaacatttatttttcttcattggaatcttaatgtttatttctttgtttgattttagaaaaaaaaaaaaaaaaaa

SEQ ID NO: 1323 - DNA, 6216 bp, Oryza sativa
  Clone ID: PAT_MRT4530_101200C.1
atgtccgacgctcggtctcggcgttcggtcgcctcaagcactcggcgtcagcaggacgccgagctcgccacaacagaagagcgcaggcgagcaacggctcagaccactgcagcagcagcgagggcggccagactggcggcagcggagttggcagcaaccagggtggaggcggagacggaggcggcggaagatgtggcacgtgcggcgaaggtagaggttgagactttgcgcagcagcatcaacggctccatcgccggtgacatcaccgccgacagggagcttgaggagctggcaagaggaagggcacgggaacgggcagagcggtgggcagcagcccacctccacggcggcggcccaagggaccgcgcgcccgccgacgggaacccagacgggcgcgggcgtgccggcggcagcgcggctctctctcccctgaccggcgccatggtcaccacggcgtccagacggtggtcagggactttggtcccggcgaagcggactgccaaggaggcctgggacgccatcgctgcggcacgcatcggcagcgaccgcgcccgcaagtccacactgcaggcactccgcaaggagtgggagaacctggccttcaagccaggtgaggatgttgatgactttgctctccgtctcaacactctcttgcagaaaatggtgcagtacggcgacgacacctacgacgaggagagagctgtcgagaagctctttcgctgcgtcccagagaagtacaggcagatcgctcgctcgatcgaatctctgctggacctctccacgatgtcgatcgaggaggcgttaggtcgcctcaaggtcgtcgatggtgatgagccacagcctctctcggggcccatcaccattggcgggaagctccatctcactcgggagcagtgggaggcctctcagggtgacgggaggaagggggagtcatcttccccgacaggcggctgtaagccgcgcaaggcgtggggaggtgtccaactacggctgctcaccggagtctactacatccccgcgctgaggaattctatcatcagcgtgggacagctggatgagaatggctcacgcgtgttggtcgaggacggactcatgaggatttgggatcgccgtcgtcgccttcttgccaagataaccagaggcactaatcgactctacatcctcagcgcgcaggtcgcacaaccagtttgcctcgccgctcgtcgggacgacgaggcgtggcagtggcacgagcgcttcgggcacctccactttgaggccctgaagcggctcagtgccaaggagatggtgcgaggcatgccgtgccttgaccacgtggagcagctctgcgacgtctgcgtggtaacgaagcagcgacagctcccctttccccagcaaacgagcttccgagccaaggagcagctcgagctcgtgcacggggacttgtgtggcccagtgacaccggccacaccaggaggacgacgttacttcctgctgctcgtcgacgacctctcccgctacatgtgggtgatggtcctcggcagcaagggagaggctgcggatgccatcaggcgcacgcaggccgctgcagaggcggagtgcggccccaagctgcgcgtgctgcgcaccgacaacggcggcgaattcacggcggctgaattcgcgtcgcactgcgctgatgagggcattcagcgccactacaccgcaccgtacagcccgcagcagaacggcgtcgtcgagcggtgcaaccagacggttgtggggatggctcgggctctcctcaagcagagggggatgccggccatcttctggggggaggcggtggtgacagccgtctacatcctcaaccgctcgcctatcaaggccctcgatggcaggacaccgtacgaggcttggcatgggcgcaagccggcggtctcccacctacgggtcttcggctgcctcgcgttcgccaaggagcttggccacattggcaagctcgacgacaggagcaccccaggggtattcatcggctacgcggagggctcgaaggcctaccgcatcctcgacccggagacacagcgtgtgcgcacagcgcgcgacgtggtgttcgacgaagggcgagggtgggtatgggacaaggcggtggatgatggttcgactccgacatacgacgacttcaccatcgagtacgtccacttcgagagagctgggggagtaggcagctcttcttcaccgagcgtgtctaccccagtccccgagcctccaccgactccaacaccaacacaccctcgggccacgacttcaactacgacgagctcttcgtcgacaccaccccagccggtgtccccacgcgctccagcaccaacagccactcctccgggcacgtctactccgacgccagctcgtgttgagcgcagcccggtggagttcgctactccgttctcccacgacgaggagcgcatcgacgcgtaccacgacggcgagcagctacggtaccgtacgatgcaggatcttctcggcgaccagccggtgccgggactggtgcctcgcgacctggaggcgcagttgcaccttgcgtgcgacgacggtgagcctcggtcttttgcagaggccgagaaacatgcggcatggcgtgccgcgatgcggtcggagatggacgcggttcaggagaaccgcacctgggagcttgctgacctccctcgtggtcaccgcgcgatcacccttaagtgggtgttcaagctgaagagggatgaagccggagccatcgtcaagcacaaggctcgcttggtggcacgtggcttcgtgcagcaggaggggatcgactacgacgatgccttcgctcccgttgcacggatggagtccgtgcgactcctccttgcgctagctgctcaggaaggctggggtgtccatcacatggacgtcaagtcggcatttctgaacggcgacttgaaggaggaggtctacgtgcaccagccgccgggattcgtgctccccggcaaggagggcaaggtgctacgcctgcacaaggccctctacggcttgcggcaggcaccgagggcgtggaatgccaagttggattccacgctcaaggggatgggcttcgagcaaagcccgcacgaggcggccatctaccggcggggcaatggaggaaatgccttgctggtgggtgtctacgtcaacgacttggtgatcactagcaccaaggatgcggaggtggcggcgttcaaggaggagatgaaggccaccttacagatgagtgatctggggcctctctcctacctggggatcgaagtgcaccaggacgactccgggatcacgcttcgacagaccgcctacgccaagcgcgtcgttgagctggctgggctcaccgattgcaacccagctctcactccgatggaggagagactgaagctgagccgcgacagcacggcggaggaggtggatgctacacagtaccggcgccttgtggggagccttcgctacctcacccacacacggccggacttggccttctccgtcggctacgtcagtcggttcatgcagcgaccgacgacggagcaccagcaggctgtgaagaggatcatccgctacgttgcggggactctcgaccacggtctctactacccgaggtgtcctggcaaggcacacttcgtcgggtacagcgacagcgaccacgccggcgacatcgacactagcaagagcacgagcgggattctcttcttccttgacgagtgcctcgttagctggcagtcggtcaagcagcaggtggtggccctgtccagctgcgaggccgagttcatggcggcatccgccgcttcgacccaggcgctctggcttgctcgactgcttggtgatctcctcagcagagacactggagcggtagagctcagggtggatagcaagtccgctctggccctggcaaagaaccccgttttccacgaacggagcaagcacatccgggtgaggctcagcaacatgcaaagaggttctacgaccaccaccatcgggagctgcaatttgcggtgggcaactgggtttggctccgtctcattagcaactccggtgaagggcaagctcgggccacgctactatggactggagatcatcaacaaggtggcatatcacctcgctctgccagccggggcgcgtttgcatgatgtgttccacgtcggccttctcaagccgttcgtgggctcgccgccgactacgccgccagcgctaccttcgacccagcacggtgcagtgttgcctgcgctagcccaagtgctcaagtctcgtgtttctcatggtgtgcgtcagctgctcgtccgttgggatggtttgtcggcgtctgcaacgtcttgggaggatttggatgatttccgcactcagtatactgtgttccagctcgaggacgagctgtttgtcgaggaggggagagatgttatgtggggcattccataccgacgtcgaaaccggcagggcactcttttatcaaactctttttctgttcctgatgtttcttgtgtgcctgatctgaccatgcagcatatgtccgctggtcaacttgctgatcgtaactatcgtgtgattcttgaccctaatttttgttatattcaggatcgttgcacaggtcagttggttggtactggccctcggcgccgtgattcacagcgtctctgggagcttgactggattcatcttccttccactgcgtccgccagtcttgttggctctgtttttgctgcatcgtccacctcgtccttcgctcagtggcatcatcgtctgggtcatatttgtggctctcgcttgcccactatgattcgccgtggtctttcagggcatgtttcaggtcatgagtctttacatcagtgccagggatgtcggttaggcaagcagatacaacttccctatcattctagagaatatctttcgggagctctacggcatgttctctatgagtatggcactcttgctcagttttcttgtcctggtgctcatgctcagaatggcgttgttgagcgcaagcatcgtcatcttcttgagactgctcgtgctcttttgctcggttcttgtgttcctcctcatttttgggctgaggctgtctttactgccaactatttggttaatattcagccttcatcagctcttcatggagggattccttatgagcatctatgtagcaaattgcctgattatttcggccttcgtctttttggctatgtgtgctatgtgcttcttgcacctcacaccacttctgcatctttagttgacccactctccttcttgtttttacctgatgcctctattgccagtacacgcccggagtcgcagcttgctatggctgaggagattgctgctcttgagcgcactggcatgtgggatcttgttcctcttcctgcgcatgtttgtcctattacttgtaaatgggtctataagcaagagcatggtcgtgactatgacgagacctttgcgcatgttgctcatatgactactgttcgcactctctttgctgtggcctctatccgtgagtggtccatctctcatcttgatgtcaagaatgcctttcttaatggtgagttgcatgaggaggtgtatatgcgtcctccacctggttattctattcctgaggttgagactcccatggagcttaatgttcacctttgtgccacctatggtgagcctctctctgatcctactcactatcatcatattcttcactatactcgcgtgcttcgtgttctgcgttatcttcgtgggactatagttcatcgtttgttctttccacgctctagctctttgcaactccaggcatattgtgatgctacctgggccagtgattcctctgatcgtcgatctctttccgccttttgtgtttttcttggtggttctcttatttcttggaaaactaagaagcaaacagcagtttctcattcgagtgcagaggctgagttgcatgctatggctcttgtgatagcggaggttacttggttacggtggttgcttgaggattttggtgtttctgtttctatgccgactcctcttttgtctgatagtaccgatgctatcagcatggctcgtgatccggtgaagcatgaacttagtaaacatgttggtgttgatgccttttatacacgagcgcaggtacaggatggtgttgttgctcctcgttatgtgccctcagagattcagttggctgatttatttacaaaggcacagactggagcccagcataggttttatctctccaaactcagtgttcttgatccaccctga

SEQ ID NO: 1324 - DNA, 457 bp, Oryza sativa
  Clone ID: PAT_MRT4530_101201C.1
ccagcagctgcaggacgtgacccgcgagtcccactgcacctgaccaatcccccggatggtgaggagctacgaggagagcatgcccgatgcccctggaccaagcctggtcctcgtcgtcgtcggagtactatcggcggtcgaggggtcgtctgctcggagacacggggatatctacaggccgatgggtcgtcgcgatggagcggctactacgagcgatgcagcaacagcagccggggatgacccagcgctgaggctagaccagggacgaggcagtacagcggcagcagctcgccgtcgagtgatgccgggttgagcccacaccaagtgcagcatcgttcgccgccggccagtactaggctagctggcttgcctcatagctagtaggatcaccccgttgctgtgttgcatagcacacgagatagtgatcaaaacaaataatgaataatgaaatgttttg

SEQ ID NO: 1325 - DNA, 5850 bp, Oryza sativa
  Clone ID: PAT_MRT4530_101202C.1
atggccaagaaccccaaggcggccaagaaccgccgccccacgacgcggagacctcgcgccgccgccgccgccgccaccgcctccgcctccgcggacatcgaggacctggcgccgccgtccgggtgcagggcagcagtggggctcaccacggccgccgcggcggtgcgcgcggagctgctgcggtggtacgacgccaaccggcgcgacctgccatggcggcgcgccgcggagccggcggggagcgggagcgggagcgggcgcggcgaggagaagagggcgtacgcggtgtgggtgtcggaggtgatgctgcagcatacgcgggtgcccgtggtggtcgactactactcccggtggatggcccgctggcccaccgtggacagcctcgccgctgccacgcaggaggaggtgaacgagatgtgggcggggctcgggtattaccggagggctcgatttcttctcgagggagcaaagcaaattgttgaaaaaggcgagttccctcgcacagcatcagcactccgtgaagttcgtggcattggggattacacagcaggagccattgcttccatagccttcaatgaggttgtccctgttgtggatggaaatgtccgagttatcagcaggctttacgctattcctgataacccaaaagaatcctcaactgtgaagagattctgcactcggcgtcagcaggacgccgagctcgccgcagcagaagagcgcaggcgagcaacggctcggaccggtgcagcagcagcgagggcggccagactggcggcagcggagttggcagcagccagggcggaggcggaggcggaggcggcggaagatgcggcacgtgcggcggaggtagaggttgagaccttgcgcagcagcatcaacggctccatcgccggcgacatcaccgccgacagggagcttgaggagctggcaagaggaagggcacgggagcgagcagagcggtgggtagcagcccacctccatggcggcggcggcggcccaagggaccgcgcgcccgccgacgggaacccaaacgggcgcgagcgtgctggcggtagcccggagcccgcacgcggccctcgcaggcagcacggctctctctcccctgaccggcgccatggtcaccacggcgtccagacggtggtcagggactttggtcccggcggtgggtggcctaccctcaccaaaaccaactacatcgagtgggccgcggtgatgagggtgaggctccaggtgcggcatgtgggaggcagtccgttctcgctttcccagaagcggactgccaaggaggcctgggacgccatcgctgcggcacgcatcggcagcgaccgcgcccgcaagtccacactgcaggcactccgcaaggagtgggagaacctggccttcaagccaggtgaggatgttgatgactttgctctccgtctcaacactctcttgcagaaaatggtgcagtacggtgacgacacctacgacgaggagagagctgtcgagaagctcttccgctgcgtccctgagaagtacaggcagatcgctcgctcgatcgaatctctgttggacctctccacgatgtcgatcgaggaggcgttaggtcgcctcaaggtcgtcgatggtgatgagccacagcctctctcggggcccatcaccatcggcgggaagctccatctcactcgggagcagtgggaggcctctcaaggtgacaggaggaagggggagtcatcttccccgacaggcggccgtaagccgcgcaaggcgcggggaggtgtccagctacgaggtgcccagggcgttgccaccggcaaccacaagccggcacgagacgacgcctgccgcaactgtggcaagcttggccattgggccaaagactgtcaacagccacgacgtggccaggcccacgtcgcacgggtggaggaagagccggctctgctcctggctcacgcaagcatcgagctacctccagcggcaccggccgcagcggctttcctccaccttgatgagccgaaggtactcgtctccctctgcaacggctccagcaacgacaaggctgatgggtggtacctcgacaccggcgccacccatcacatgaccggccgacgggagttcttcaccgagttcgactctagcgtccgaggctccgtcaagttcggggacgcctccggcgtggagatcaagggtgttggctccgtcaccttcaccgccaagtccggtgagcacaggctgctcactggagtctactacatccccgcattgaggaattctatcatcagcgtgggacagctggatgagaacggctcacgcgtgatggtcgaggacggactcatgaggatttgggatcgccgtcgtcgccttcttgccaaggtaaccagaggcactaatcgactctacatcctcagcgcgcaggtcgcacaaccagtttgcctcgccgctcgtcgggacgacgaggcgtggcagtggcacgagcgcttcgggcacctccacttcgaggccctgaagcagctcagtgccaaggagatggtgcgaggcatgccgtgccttgaccacgtggagcagctctgcgacgtctgcgtggtgacgaagcagcggcggctcccctttccccagcagacgagcttccgagccaaaaagcggctcgagctcgtgcacgaggacttgtgtggcccagtgacaccggccacaccaggaggacgacgttacttcctactgctcgtcgacgacctctcccgctacatgtgggtgatggtcctcggcagcaagggagaggctgcggacgccatcaggcatgcgcaggctgctgcagaggcagagtgcggccgcaagctgcgcgtgctgcgcaccgacaacggcggcgaattcacagcggctgaattcgcgtcgtactgcgctgatgagggcattcagcgccactacaccacgccgtacagcccgcagcagaacggcgtcgtcgagcggcgcaaccagacggttgtggggatggctcgggccctcctcaagcagagggggatgccggccatcttctggggggaggtggtggtgacggccgcctacatcctcaaccgctcgcctaccaaggccctcgatggcaggacaccgtacgaggcttggcatgggcgcaagccggcggtctcccacctgcgggtcttcggctgcctcgcgttcgctaaggagcttggccacatcggcaagctcgacgacaggagcaccccaggggtgttcatcggctatgcagagggctcgaaggcctaccgcatcctcgacccggagacacagcgtgtgcgcactgcgcgtgacgttgtgttcgatgaagggcgagggtgggtatgggacaaggcggtggacgatggttcgattccgacgtacgacgacttcaccgtcgagtacgtccacttcgagggagctgggggagtaggcagctcttcttcacctagcgtgtctaccctagcccctgaatctccaccgactccaacaccaacacaccctcgggccacgacttcgactacgacgagctcttcgtcgacaccaccccagccagtgactccacatgctccagtaccaacagccactcctccaagcacgtctactctgacgccagctcgtgttgagcgtagcccggtggagttcgctactccgctctcccacgacggggagcgcatcgacgcgtacaacgacggcgagcagctacggtaccgtacgatggaggatcttctcggcgaccagccggtgccgggactggtgcctcgcgacctagaggcgcagttgcaccttgcgtgcgacgacggtgagcctcggtcttttgcagaggccgagaaacacgcggcatggcgtgccgcgatgcagtcggagatggacgcggttcaggagaaccgcacctgggagcttgctgacctccctcgtggtcaccgcgcgatcacccttaagtgggtgttcaagctaaagagggatgaagccggagccatcatcaagcacaaggctcgcttggtggcacgcggtttcgtgcagcaggaggggatcgactacgacgatgccttcgctcccgtggcacggatggagtccgtgcgactccttcttgcgctggctgctcaggaaggctggggcgtccatcacatggacgtcaagtcggcgtttctaaacggcgacttgaaggaggaggtctacgtgcaccagccgccgggatttgtgatccccggcaaggagggcaaggtgctacgcctgcacaaggccctctacggcttgcagcaggcaccgagggcgtggaatgccaagttggattccacgctcaaggggatgggcttcgagcaaagcccgcacgaggcggccatctaccggcggggcaatggaggaaatgccttgctggtgggtgtctacgtcgacgacttagtgatcaccggcaccaaggatgcggaggtcgcggcgttcaaggaggagatgaaggccaccttccagatgagtgatcaggggcctctctccttctacctggggatcgaagtgcacaaggacaactccgggatcacgcttcgacagaccgcctacgccaagcgcgtcgttgagctggctgggctcaccgattgcaacccagctctcactccgatggaggagagactgaagctgagccgcgacagcacggcggaggaggtggatgctacacagtaccgacgtcttgtggggagccttcgctacctcacccacacacggccggacttggccttctccgtcggctacgtcagtcggttcatgcagcgaccgacgacggagcaccagcaggctgtgaagaggatcatccgctacgttgcggggactctcgaccacggtctctactacccaaggtgtcctggcaaggcacacttcgtcgggtacagcgacagcgaccacgccggcgacatcgacaccagcaagagcacgagcgggattctcttcttcctcggcaagtgcctcgttagctggcagtcggtcaagcagcaggtggtggccctgtccagctgcgaggccgagtacatggcggcctccgccgcttcgacccaggcgctctggcttgctcgactgcttagtgatctcctcggcagagacactggaacggtggagctcagggtggatagcaagtctgctctagccctggcaaaaaaccccgttttcacgaacggagcaagcacatccgggcagctcactggtgaactggtcgacccttctaggccaggagacttcaaccaagcaattatggaactaggagcaacactctgcagaaagacgaagcccggttgctcccagtgccctgtctccaaccactgccaagcactcacactttccaaccaaagtgcttccgtaaaagttacagactacccacgagtggttccaaaagccaagccacggtctgattttgctgctgtttgtgttgttcaaatcaatgataatctctttctattgatcaagaggccagaagagggcctgctcgctgggctctgggagttcccatctgttcttgtgagcgaagagaagactgatgtgctgaataggagaaaagagatggacaaatatttgaagcaggtccttagcatagatgttaaaaggagatccagtgtgatcctcagggaagatgttggccaacatgttcacattttctctcacattcgcctgacgatgtttgttgagctgatgattttgaacctcaaagatgatggggataaattatgcatggagggacaagataacagcaaactgagattcattgacgaaaatgcagtcgactcaataggattgatatcagggatccggaaggtgtacaacatggtcaaggccttcaaggagaagaggccgaaagagcagagccaagtaccatcgaggaaaaggagtagacggctgaagtag

SEQ ID NO: 1326 - DNA, 552 bp, Oryza sativa
  Clone ID: PAT_MRT4530_101203C.1
atgccgtcactggtcaccgggacactcctgcaccccggcctcctcatcgcttcggtgagggacgacatggaggcgtcagctgctgatcatcacggtggccaccaccaccagacgacgaagaagatcatcagccagggctccgacggcatcggcggcggcggcggcggtaagtcgagggtggacctgtacgccggcgcggtggcgcagcgggcgctgtacgggccgacgacgacgagccggtgccgcggcgcggcgaggcagaggcagcaggcggtggccggcggcaaggactccaagcagcccagcaggctgagcaagatggtcgccattaggaggaacgctccgtcgtcgtcgcacccggccaccgtcgccccgtcgtcgtcgggcacgagcaccgccgccccatcgtcgccgcgcgcggccaccaccgccccaccgtcgccacgcgctgccaccgctgccccgccgtcgccgcgggcgggcaccactgccgcaagcaaaaagggcttggggaagagggggagcaggataatgaggaagaaagtgatgtag

SEQ ID NO: 1327 - DNA, 378 bp, Oryza sativa
  Clone ID: PAT_MRT4530_101204C.1
atggatagatgttgggcaagcgagagccacaaatatgacccagacgatgatgccactgagcgaaggacgaggtggacgatgcagcaaaaacagagccaacaagactggcggacgcagtggaaggaagatgaatccagtcaagctcccagagacgctgtgaatcacggcgccgagggccattacgatcagcaagttgaccagcggacatatgctgcatggtcagatcaggcacacaagaaacatcaggaacagaaaaagagtttgataaaagagtgccctgccctacaacaggaagaggagatccatcggcggtatgaacaaaacaggaacgagatggagaaactgttaggcaccggccctagacggcgcagcgcatag

SEQ ID NO: 1328 - DNA, 351 bp, Oryza sativa
  Clone ID: PAT_MRT4530_101205C.1
atgtcagccttctacatcactttcttcctcattatcctgctccccctcttccccaagccctttttgcttgcggcagtggtgcccgcccgcggcgacggcggggcagcggtggcagcgcgtggcgacggtggggcggtggtggccgcgcgcggcgacgatggggcggcggtgctcgtgcccgacgacgacggggcgacggtggccgggtgcgacgacgacggagcgttcctcctaatggcgaccctactacttattgctcgtctccccactcggcaccccccatctctctttgtgccaaagatcctacaaactcgcctcgcgaataacgatggcatcgtcgctgccgtcgtc

SEQ ID NO: 1329 - DNA, 3606 bp, Oryza sativa
  Clone ID: PAT_MRT4530_101206C.1
atgtccgatgttcggtctcggcgttcggtcgcctcgagcactcggcgtaagcaggacgccaagctcgccgcagcagaagagcacaggcgagcaacggctcagaccgctgcagcagcagcgagggcggccagactggcggcagtggagttggcagcagccagggcagaggcggaagcagaggcggcggaagatgcggcacgtgcggcggaggtagaggttgagaccttgcgcagcaacatcaacggctccatcggcgacatcaccgccgacagggagcttgaggagctagcaagagggagggcgcgggagcgggcagagcgtgctgcccacccccacggcggcggcggcccaagggaccgcgcgcccgccgatgggaacccagacgggcacgggtgtgccggcggcagcccggagcgcgcgcgcggcggcggcgctccgagtggaggtggctggttcgacagagagcgtggccctcgcaggcagcgcggctctccctcccctgaccggcgccatggccaccacggcgtccagacggtggtcagggactttggtcccggcggttggtggcctaccctcaccaaaaccaactatatcgagtgggccgcggtgatgagggtgaggctccaggtgcggcacatgtgggaggcagtccggtacggcgacgtcgactacgacgagaatcgacgggcgctggatgcccccatcgctgcagtcccgcccgagatgcagttctcgctttcccaaaagcggactgccaaggaggcctggcaagtccacactgcaggcactccgcaaggagtgggagaacctggctttcaagccagaagatggtgcagtacggcgacaacctatgatgaggagagagccgtcgagaagctgttccgctgcgtcccagagaagtatgggcagatcgctcgctcgatcgagtctctgctggatctctccacgatgtcgatcaaggaggcgataggtcgcctcaaggtcatcgacggccatgagccacagcctctctcggggcctatcaccattggcgggaagctccatctcactcgggagcagtgggaggccagccaagcaacgacaaggctgatgggtggtacctcagacaccggcgcctcccatcacatgaccggccgacgggagttcttcatcgagtttgactccagcgtccgaggctccgtcaagtttggggacgcctccggcgtggagatcaagagcggtggctccgtcaccttcaccgccaagtccggtgagcacaggctgctcaccggagttcactacatccccgcgttgaggaactctatcatcagcgtaggacagctagatgagaacggctcacgcgtgctggtcgagcacggagtcatgaggatttgggatcgccgtcatcgccttcttgccaaggtaaacagaggcactaatcaactctacatcctcagcgcgcaggtcgcacaaccagtttgcctcgccgctcatcgggacgacgaggcgtggcagtggcacgagcgcttcgggcacctccactttgaggccctgaagtggctcagtgccaaggagatggtgcgaggcctgccgtgccttgaccacgtggagcagctctgcgatgtctgcgtggtaacgaagcagaggcggctcccctttccacagcagacgagcttccgagccaaggagcggctcaagcccgtgcacggggacttgtgtggtccagtgacaccggccacaccaggaggacgacgttacttcctgctgctcgtcgacgacctctcccgctacatgtgggcgatggtcctcggcagcaagggagaggctgcggacgccatcaggcgcgcgcaggctgctgcggaggccgagtgcggccgcaagctgcgcgtgctgcgcaccgacaacggcggcgaattcacggcagctgaattcgcgtcgtactgtgctgatgagggcattcagcgccactacaccgcgccgtacagcccgcggcagaacggcgtcatcgagcggcgcaaccagacggttgtggggatggctcgggctctcctcaagcaaagggggatgccggccatcttctggggagaggcagtggtgacggccgtctacatcctcaaccgttcgcctagcaaggcactcgacggcaggacactgtacgaggcttggcatgggcgcaagccggcggtctcccacctgcgggtcttcggctgcctcgcgttcgccaaggagcttggccacatcggcaagctcaacgacaggagcaccccaggggttttcatcggctacgcggagggctcgaagacctaccgcattctcgacccggagaaagcgtgtgcgcacggcgcgcgactagtgttcgacgaagggcgagggtgggcatgggacaaagcggacgatgcttcgactctgacgtacgacgacttcactgtcgagtatgtccacttcgagggagctgggggagtaggcagctcttcttcaccgagcatgtctaccccagcccccgagcctccactgactccggcagcgacacaccctcgagcaacgacttcaactacgacgagctcttcgccgacaccaccacagtcggcgaccccacgcactccagcaccaacagccactcctccgggcacgtccaccccgacgccagctcgtgttgagcacagcccggtggagttcgctactccgctctcccacgacgaagagcgcatcgacgcgtaccacgacggcgagctgctacagtaccgtacgatagaggaccttctcggcgaccagccagtgccgagactggtgcctcgcgacctagaggtgcagttgcaccttgcgtgcgacgacgatgagcctcggtctttcgcagaggccgagggacacgaggcatggcatgccacaatgcagtcggagatggacgcggttgaggagaaccacacctgggagcttgctgacctccctcgtggtcaccgcgcgatcacccttaagtggtcccttgtcaagttggattccacgctcaaggggatgggctttgagcaaagcccgcacgaggcggccatctaccagcggggcaatggaagaaatgccttgctggtgggtgtctatgtcgacgacttgatgatcaccggcaccaaggatgcagaggtggcggcgttcaaggaggagatgaaggccaccttccagatgagtgatctggggcccctctccttctacctggggatcgaggtgcaccaggacgactccgggatcacgcttcgacagaccgcctacgccaagcgcgtcgttgagctggttgggctcaccgattgcaatccagctctcactccgatggaggagactgaagctgagccgcgacagtccgacggaggagagactggagcggtggagctcagggtggatagcaagtccgccctagccctggcaaagaaccccgttttccacgaacgaagcaagcacatccgggtgaggtaccacttcatccgaagctacttggaagaagggagcatcaaggcgagctacatcaacaccaagaaccagcttgcggacttgctcaccaagcctctcgggagaatcaagttcctcgagctctgctccaggatcgggatggcccaacttccccacaagacgacgcacaagacttag

SEQ ID NO: 1330 - DNA, 3009 bp, Oryza sativa
  Clone ID: PAT_MRT4530_101207C.1
atgtccgtaggacagtctcagcgctcggtcgcctcgagcgcacggctccggcaggaggccaagctcgccgcggcagaggaacgcgagcgagcggcagcagagactgctgcgatggtagcgagggtgtcaaggctggcagcggcggaattggcggcagcaagggcggaagtggaagcagcggcagcggcggtggcagagctcaaggctctacacgacagtagctccagcagctctgtctccgcctacgacatccccgctgatgagctgatgagggagatagctcgtgagcgggcggagcagtgggcagccgcgcaaccccacgcgtgtggtggcggtagccaagacgggcgtggacgcgccggcggcgttcctggtgggagcgcgcgcggcgttggcagcccagacgggcttggacacgcggcgtgtgtctctccctccccggaccggtaccatgaacaccacgggattcaggccgtcattagggaagtcggccccggcggtgggtggcctaccctcaccaagaccaactacgtcgagtgggctgttgtcatgagggtgaggctccaggtgcagcacatgtgggaggcagttcggtacggcaacgtcgactacgacgaggatcgatgggcgctggatgccctgatcgttgcagtcccgcccgtgatgcagttctcgctttcccagaagcggactgccaaggaggcctgggacgccatcgttgcggcacgcatcggtagcgaccgcgcccgcaagtccacactgcaggcacttcgcaaggagtgggagaacttggccttcaagccaggtgaggataagatggtgcagtacgatgacgacacctacgacgaggagagagccgtcgagaagctcttctgctgcatcccagagaagtacaggcagatcgctcgctcgatcgagtctctgctggacctctccacgatgtcaatcgaggaggcgaaaggtcgcatcaaggtcgtcgacggcgatgagccacaacttctctcggggtctatcaccattggtgggaagctccatctcactcgggagcagtgggaggcttgtcaggatgacgggaggaagagggagtcctcttcctcgacaggcggccgcaacgtccgaggctctgtcaagtttggggacgcctccggcgtggagatcaagggcgtcggctccgtcaccttcaccgccaagtccggtgagcacatgatgctcaccggagtctactacatccccgcgttgaggaactctatcatcagcgtggggcagctggatgaaaacggttcacgcgtgttggtcgagcatgaagtcatgagaatttgggatcgccgtcgtcgccttcttgccaagcaagggagaggctgcagacgccatcaggcgtgggcaggctgctgcggccgcaagttgcgcatgttgcgcaccgacaacggcggcgaattcgcgtcgtactgcgttgatgagggcattcagcaccactactccgcgccgtacagcccgcaacagaacggcgtcgtcgagcagcgcaaccagacggttctggtgatggctcgggctctcctcaagcagagggggatgccggccatcttctggggggagccggtggtgacggctgtctacatcctcaaccgctcgcctaccaaggccctcgacgctacctcgcgttcgccaagggagctcggccacatcggcaagctccacgacaggagcaccctaggggtgttcatcggttacgcggagggcttgaaggcctaccgcattctcgacccgaagacacagcgtgtgcgcacggcgcgcgacgtagtgttcgacgaagggcgagggtgggcatgggacaaggcggtggacgacggctcgactccgacgtacgacgacttcactgtcgagtacgtccacttcgagggagctgggggagtaggcagctcctcttcaccaagcgtgcctaccccagtccccaagcctccaccgaccccggcagcgacacactctcgagctacgacttcggctgcaacgagttcttcaccgacaccaccacagccggcgaccccgcgcactccagcaccaacagccacccctccgggcacgtccactccgacaccagctcgtgtcgagcacagcccgatggagttcgctactccgctctcccacgacgaggagcgcatcgacgtgtaccacgacggcgagctgctgcggtaccgtacgatggaggaccttctcggcaaccagccagtgctgggactggtgcctcgtgacctggaggcgcagttgctccttgctgtgacgacggtgagcctcggtctttcgcagaggccgagggacacgcatcatggcgtgccgcaatgcagtcggagatggacgcggttgaggagaaccgcacctgggagcttgctgacctccctcgtggtcaccgcgcgatcacccttaagtttgacccatgacaggtatcaagcaaatgactattacctcaagaatttgatagtggaatggtgtgaaggagttttgtctagcggtaatggaaatcgagaatattaccaattggatcagaggaaagaatcattcaagctcgttcttgagaaagtgacaacattcttgcagaaagatgttgatcaaaaccaaactgtcgatgttcgtgggctttcaaaggttgaatctcgcgttgtagttctctcagttctccggaagatcaaagagaagtatctactaggacgagcagttcaggatgatgtagtaatcatcactggtcatgggaaggcatcaagcgccaaggccgagactagtgttgtcgaggtcgagcatgcaatagttgctgttctgacggatgagttgggtcttgaggttttaattggacctggaagtcgcccggcttcgtccaaacccacagttccagctcgttctaggagtcatttagatctagcttctaaacatttttccaggagaccgcaggggatgataaagatcccgatcaactctctgaatcattggttgaagaggaaagctgtgaggactgtgcagtga

SEQ ID NO: 1331 - DNA, 3744 bp, Oryza sativa
  Clone ID: PAT_MRT4530_101208C.1
atggagttggcagcagccagggcggaggcggaagcagaggcggcggaagatgcggcacgtgtggcggaggtagaggttgaaaccttgcgcagtagcatcaacggttccatcaccggcgacagcaccgccgacagggagcttgaggagctggcaagaggaaggacggtggtcagggactttggtcccggctgtgggtggcctaccctcaccaaaaccaactacattgagtgggccgcgatgatgagggtgaggctccaggtgcagcacatgtgggaggcagtccggtacggcgacgtcgactacgacgaggatcggcgggcactggatgccctcatcgctgcagtcttgcccgagatgcagttctcgctttcccagaagcggactgccaaggaggcctgggacgccatcgttgcggcacgcatcggcagcgaccgcgcccgcaagtccacactgcaggcactccgcaaggagtgggagaacctggccttcaagccaggtgaggatgttgatgactttgccctccgtctcaacactcttttgcagaagatggtgcagtacggtgacgacacctacgacgaggagagagctgtcgagatgctcttccgctgcgtcccagagaagtacaggcagatcgctcgctcgatcgagtctctgctggacctctccacgatgtcgatcgaggaggcgttaggtcgcctcaaggtcgtcgacggtgatgagccacagcccctctcggggcctatcaccattggcgggaagctccatttcactcgggagcagtgggaggcctctcaaggtgacgggatgaagggggagtcttctccctcgacaggcggccgcaagccgcgcaaggcgtgtggaggtgtccagctgcggtgggcgcgaagacgcgccgagggtggcgctcgcagaggcgcccagggcggcgccgccggcaaccacaagccggcacgagacgacacctgccgcaactgtggcaagcttggccattgggccaaagactgtcgacagccacgacatggccaggcccacgtcgcacaggtagaggaggaagagccggctctgctcctggcatacgcaagcatcgagctacccccagcgacaccggccacagcggctttcctccaccttgatgagccgaaggtgctcgtctccctctgcaacagctccagcaatgacaaggctgatgggtggtacctcgacaccggtgccacccatcacatgaccggccgacgggagttcttcaccgagcttgaccccagcgtccgaggctccatcaagtttggggacgcctccggcgtggagatcaagggcgttggctccgtcaccttcatcgccaagtccggtaagcacaggctgctcaccggagtctactacatccccgcgttaaggaactctatcatcagcgtggggcagctggatgagaacggctcacacgtgttggtcaagcacggagtcatgaggatttgggatcgccgccgtcgccttcttgccaagcgcgcaggtcgcacaaccagtttgctcgccgctcgtcgggacgacgaggcgtggcagtggcacgagcgtttcgggcacctccactttgaggccctgaagcagctcagcgccaaggagatggtgcgaggcctgccatgccttgaccacgtggagcagctctgcgacgtttgcgtggtgacgaagcagaggcggctccccttgccccagcagacgagcttccgagccaaggagcggctcgagctcgtgcacggggacttgtgtggcctagtgacaccggccacaccaggaggacgacgttacttcctactgctcgtcgacgacctctcccgctacatgtgggtgatggtcctcggcagcaagggagaagctgcggacgccatcaggcgcgcggggatgccggccatcttctggggagaggcggtggtaacggccgtctacatcctcaaccgctcgcccacgaaggccctagacggcaggacaccgtatgaggcctggcatgggcgcaagccggcggtctcccacctgcgggtcttcggctgcctcgcgttcgccaaggagcttggccacatcggcaagctcgacgataggagcaccccaggggtgttcatcggctacgcggagggctcgaagacctaccgcattctcgacccggagacacagcgtgtgcgcacggcgcgcgacgtagtgttcgacgaagggcgagggtgggtatgggacaaggcggtggacgatggttcgactctgacgtacgacttcactgtcgagtacgtccacttcgagggagctgggggagtaggcagctcttcctcaccgagcgtgcctaccccagtccccgagcctccaccaactccggcagcgacacattctcgagcttcgacttcggctgcgacgacttcttcgccagcaccaccacagccggcgaccccacgcactccagcaccaacagccactcccctgggcatgtctactccgacgccagctcgtgttgagcgcagcccggtggagttagctactccgctctccacgacggggagcgcatcgacgcgtaccacgacggcgagcagctccggtaccgtacgatggaggaccttctcggcgaccagccggtgccgagactggtgccccgcgacctggaggcgcagttgcaccttgcgtgcgacgacgtcggagatggacgcggttcaggagaactgcacctgggagcttgctaacctccctcgtggtcaccgcgcgatcacccttaaatgggtgttcaagctgaagagggatgaagccggagccatcgtcaagcacaaggctcgcttggtggcacgcggtttcgtgcaacaggaggggatcgactacgacgatgccttcgctcccgtcgcacggatggagtccgtgcgactccttgcgctggctgctcaggaaggctggggcgtccatcacatggacgtcaaatcggcgtttctgaacggcgacttgaaggaggtctacgtacaccagccaccgggatttgtgatccccggcaaggagggcaatgtgctacgcttgcacaaggccctctacggcttgcggcaggcaccgagggcgtggaatgccaagttggattccacgctcaaggggatgggcttcgagcaaagcccgcacgaggcggccatctaccagcggggtaatggaggaaatgccttgctggtgggtgtctacgtcgacgacttgatcaccggcaccaagaatgcggaggtgtaccaggatgactccgggatcacgcttcgacagaccgcatacgccaagcgcgtcgttgagctggctgggctcaccgattgcaacccagctctcactccgatggagagactgaagctgagccgcgatagcacgacggaggaagtggatgctacacagtaccggcgtcttgtggggagccttcgctacctcacccacacacggccggacttggccttctccgtcggctacgtcagtcggttcatgcagcgaccgacaacggagcaccagcaggctgtgaagaggatcatctgctacgttgcggggactctcgaccacggtctctactacccaaggtgtcctggcaaggcacacttcgtcgggtacagcgaccacgccggcgacatcgacaccagcaagagcacgagcgggattctcttcttccttggcgagtgccttgttagctggcagtcagtcaagcagcaggtggtggccctgtctagttgcgaggccgagtacatggcggcctccgccgcttcgacctag

SEQ ID NO: 1332 - DNA, 2436 bp, Oryza sativa
  Clone ID: PAT_MRT4530_101209C.1
atggcagcaagggcagcaaggctggcggcggcggaattggcggcggcaagggcggaagtggaagcagcggcagcggcggatgcagcgcgtgcggcggtggcagagctcaaggctctgcgcgacagtagctccagcagctctgtctccgcctacgacatccccgctgatgagctaacaagggaggcagctcgtgagcgggtgaagcagtgggcagccgcgcaccccgacgcgcgcggtggcggcagcccagccgggcatggacgcgccggcggcgttcctggcgggagcgcgcgcggcgacagcagcccaaacgagcttggacgcttcggcggaccccctagcaggggtgcgcacaacggcagtgctcccggcggcaacggttgggttgacgaagatcgcgatcgttacaagcagcgcgtctctccctccccggaccgataccgtggacaccacgggattcaggatgtcatcagggaggtcggccccggcggtgggtggcctatcctcaccaagaccaactacgtcgagtgggctgcggtcatgagggtgaggctccaggcactcagcaaggagtgggagaacctggccttcaagccaggtgaggacgttgatgactttgcccttcgtctcaacactcttttgcataagatggtgcagtacggtgacgacacctacgaggagagagccgtcaagaagctcttccgctgcgtcccagagaagtaccagatcgctcactcgatcgagtctctgctggacctctccacgatgtcgatcaaggaggcgataggtcgcctcaaggtcgtcgacggcgatgagccacagcctctcttggggcctatcaccattggcgggaagctccatctcactcgggagtacttggccattgggccaaagacggtcgacaggctcgacgcggctaggcccacgtcgcacaggtggaggaagagccagctctactcctggcacacgcaagcatcgagctctccagcagcaccggccgcagcggtttttctccacctcgacgagtcgaaggtacacgccttcctcggcaacagctccaacaacgacaaggctaatgggtggtacctcgacaccggcgccacccatcacatgactggccgacgggagttcttcaccgagcttgactccagcgtccgaggctccgtcaagtttggggatgcctccggcgtggacatcaagggcgtcggctcgtcaccttcaccgccaagtccggtggcacaaccagtttgcctcgccgctcgtcaagacgacgaggcgtggcagtggcacgagtgcttcgagcgccttcacttcgaggccctgaagaggctcagtgccaaggagatgggcattcatcgccactacaccgcgccatacagcccgcagcagaacggcgacgtcgagcggcgcaaccagacggttgtggggatggctcaggctttcctcaagcagagggggatgccggccatcttctggggagaggcggtggtgacggccgtctacatcctcaaccactcgcctaccgaggccctcgacagcaggacaccgtacgaggcttggcatgggcgcaagccggcgatctcctacctgcgggtcttcggttgcctcgcgttcgccaaggagcttggccacatcggcaagctcgacgacaggagcaccccaagggttttcatcggctacacggagggctcgaaggcctaccgcattctcgatccggagacacagcgtgtgcgcacggtgcgcgacgtagtgttcgacgataggcgagggtgggcatgggacaaagcggtggacgacggttcgactccgacatacaacgacttcactgtcgagtacgtccacttcgagggagctgggggagtaggcagctcttcttcaccgagcgtgtctaccccagtccccgagcctccaccgactccggcacagacacaccctcgagccactacttcgactacgacgagctcttcgtcgacaccaccacagccggcgaccccacgcactccagcaccaacagccactcctccgggcacgtccaccccgacgccagctcgtgttgagcacagcccggtggagttcgctactccgctctcccacgacgaggagcgcatcgacgcgtaccacgatggcgagctgccgcggtactgtacgatggaggacctcctcggtgaccagtcagtgccgggactggtgcctcgcgacctggaggcacagttgcaccttgcgtgcgacgatggtgagcctcagtctttcgcagaggccaagagacacgcggcatggcgtgccgtgatgcagtcgaagatggacgcggttcaggagaaccgcacctgggagcttgctgacctccctcgtggtcaccgcgcgatcactcttaagtgggtgttcaagctgaagagggacgcacaaggacttttctgtcataccatacgtccatactga

SEQ ID NO: 1333 - DNA, 330 bp, Oryza sativa
  Clone ID: PAT_MRT4530_10120C.1
gattatatacgtgtctaaattatcaaaaggagaagtggtataaatccgtataccacatgatacacacaccaaaccaatcaatgaaagaatcattctacacggaaatttaaatacaagaaatgaattatacacacaaactccaccaataatatatcggagaccagctcgcctgaatctacagtatttcaccagcaaattactcacaactaattaatcactaatccaacagttgcagcaaggatgagtagacttgtggtgctagattaattattttttttaattaagcagggatcattagccttgggtttttgaaggtgggaagcgggctga

SEQ ID NO: 1334 - DNA, 126 bp, Oryza sativa
  Clone ID: PAT_MRT4530_101210C.1
atgaaggaggagaggcgcaagcacgaggtggtggcgctgtacgagctagggcttcgacatgctggtgttgggggtggcactgttcgagagggctcctcgccgcaggaggacgacaactggatgtaa

SEQ ID NO: 1335 - DNA, 1724 bp, Oryza sativa
  Clone ID: PAT_MRT4530_101211C.1
ctacaatgggagaggcaagaggaagtatggggattacaggagagggtattcggattgggggagggatagggagaaggagagagggaggccgggttcgaatggccgccgctatgaggagaatgacgatgaggatggggctcctggtttccggagggagcggaggggcagtggagggaatgatgatgcgaggagtagcgttgccgacgtgtatagggaggcaacaccattgatgaggaaggaactaggggatttggaaatgaatggtactgagtcgagggccgcgaatcccagtggtgaagttaaggaagctgatgctccgcagatggtgcagagtgaagagaatgaggaaggtgagatggaggaggatggcatggtgttgaattcggaaccagaggttgtggagctaaggatggacacaaatgatgatgttaataatgcttctgttggtgttgatatggagacagagttgcagcgttcgcccaatggtaacgttccaggtgagaaagccgaagatgacgacaaagttttggttgagtctgctttggacagtattgctttggatgatgaggtggcaaatacggaaaataacttgcacggtgatgagaggaatttgcttaaatactgtgaatatgcaaaagctccaactaagcgcaggtcatcacgtccacaaaggaatgcagcatctgtccaaatagaaccagcagtatctgaaacaaccgatcagatttctattggagaagcttcccagatagtacctggtgaagttgcaaatgagatctcagtgaccaacctcaagtcagaaaatagagaagatcaaatctaccgagaaaacactgactttagcacttcctgcaatggtacattggagccaattcttcttgaagaaaacaatgagtcagctgcgactggaaatataatagaagaaaagaatgatgtacagctccatgtggtcaaggaaccagaggaagaagtaaatgtatctgcattcgcgccttctcacaaggatagcttgatgcaagaaactgacttatctccatcaacggcttctcacaaggatagcttgcttgagggtgatattgctggtagtacaaataatatgtgccaacttccattagataataagggtgtccaagtaattgatatagaagatgacacaccaattgaagttggtggctttgattcttcaaaagcaaagagcgacatgatatgctctaacatggataacatgatgggccctgttgtacacagtggtgatcttcctggtattcaagatggttacaatcttgcaatttctgattatcttggtggtgatataccatgctacccatcaatgcaatcagatcttcatggtggtataggtgctaatgattctgagggtatcactgtcatggatgatccaatatatgggtctctcactgatattggtttcatggatgtctgggggcagccaacacaggatgactacgagaagttcttctagccactgttgacagattctaacaatagcttgattgtagaaactggaccttcattgacacattaccatgaggatagcatggttgaagaaaccaatctatggtgcttgacaacttctcacaagggcaacttgaaacaggagacgggcttatctcagacaatatcttctcatgagaataacttgaaattgcaatacaaggaaagttgaggcattgatatgttgacacaagatgtagacttgattgaat

SEQ ID NO: 1336 - DNA, 822 bp, Oryza sativa
  Clone ID: PAT_MRT4530_101212C.1
ggccaccacctgctgcttgaccgactgccagctaacgaggcactcgccgaggaagaagataatcccgctcgtggagaaccacgaccaaggaccacaaagacttatccatcaccgagggcgtggaatgccaagttggattccacgctcaagtggatgggcttcgagcaaagcccgcacgaggcggccatctaccggcggggcaatggagaaaatgccttgctggtaggtgtctacgtcgacgactttgtgatcaccggcaccaaggatgcggaggacgactccgggatcacgcttcgacagaccgcctacgccaagcgcgtcgttgagctggctgggctcaccgattgcaacccagctctcactccgatggaggagagactgaagctgagccgcgatagcacgacggaggaagtggatgctacacaatactggcgtcttcgaccgacgacggagcaccagcaggctgtgaacaggatcattcgctatgttgcggggactctcgaccacggtctctactacccgagcaagagcacaagcgggattctcttcttccacggcgagtgcctcgttagctggcagtcggtcaagcagcaggtggtggccctatccagccgcgaggccgagtacatggcggcctccgccgctttgacccaggcgctctggcttgctcgactgcttaggagcatcaaggcgagctacatcaacaccaaggaccagcttgcggacttgctcaccaagcctcttgggaggatcaagttcctcgagctctactccaggatcgggatggcccaacttccccacaagacgacgcacaagacttag

SEQ ID NO: 1337 - DNA, 237 bp, Oryza sativa
  Clone ID: PAT_MRT4530_101213C.1
actagtggatccccgggctgaggctctctcctccatggcgccacacccgatctccctcaccggagcctcgcaagccaaaccatcgcgccgatgatgttcgtctcgacgaggtgattccatttttcctgtttcccccttctcccccaccccatagcaatcaccacagccacttcttttgccgtcggagataagctcttctactcgtcgttccggccatctccctcgctctcttcgcca

SEQ ID NO: 1338 - DNA, 235 bp, Oryza sativa
  Clone ID: PAT_MRT4530_101214C.1
aaactaaagcacttggtcttacattaaaatagttatccccctttaatacttttcatcaaaaaatcaacacttaaattaaccccttaaccattcattcaaatgcattccttccggaaacaatttccacaacacacacagtaagtcttaatctcataacattcatctgtctctctcttctccccccaattcattaacatcttatacattcatactccacaaaaaaaaaaagaagaaa

SEQ ID NO: 1339 - DNA, 339 bp, Oryza sativa
  Clone ID: PAT_MRT4530_101215C.1
atggcgatgctccaggaagcatatggcaaatccaagtactacgagaagcacctcactagctccttcttcttctccggcccctcttgccccccaaattccggtggttcaccgccggtttttcctgttcctgtggctatgtctcatttggttacgttcaagcgaagagccctggttgctggtgacggcggttgccttggatctctggatggcgctgcttcgtacagcggcggtggcggccctggatctctgggtgccgtcttcaaactccaggtgctgttgcttcttgtgatagccttggagctcttcgtactactgctccgtgcgctggtgataccttga

SEQ ID NO: 1340 - DNA, 1338 bp, Oryza sativa
  Clone ID: PAT_MRT4530_101216C.1
atgtcccaccacgacggcagcaagccctaccagccacgccggggccccgagcgcccccctcctccggccccggcggacgatgcggcggcgcacgtcgcgcccacggtcgaccacctcgccgcggtggccgccgaggccgaggcgatggcccgcttcgaggaggagcaccgcgccctgggggcggaggaggagtatgaggaggaggaggatgagttggaggaggaggaggaggagatggaggaggatgaggacgcgcaacatcatgagggggtgggcggcgaggtggctgtcccgatggacgcggaggccgccgcgcagctggacccgcacggcgggatgctcgccgcctccggcgctgtccagcccatggcgtccaaccaactcaccctctcgttccagggcgaggtctacgtcttcgactctgtctcccctgacaaggttcaagcagtgctcttgctactcggtggaagggagctgaacccaggtttgggctctggagcatcgtcatctgcgccatacagtaagaggttgaattttccacaccgggtggcatctttgatgcggttcagagaaaagcggaaggagcgcaactttgataagaagatccggtattctgttcggaaggaagttgcacttaggatgcagcgcaatagaggtcagtttacatcttcaaaaccaaagggtgatgaagcaacatcggaattgacagcttcagatggctccccaaactggggatcagtggaaggtcggcctccctctgctgctgaatgccatcactgtggtataaatgcaaaggctacacctatgatgcgtcgtggacctgatgggccaagaacattatgcaatgcctgtggcctcatgtgggcaaacaaggttaaaatgccaagttcaaggtgtcatgccaacttggggatgttgagggacctatcaaaagcacctcccacacctattcaagttgtggcatcagttaatgatggtccatttttaagcagttgctgaagctcctacccccgagcaagaaattccggcaccagccactgtcaatggccacgaatcaccaacgtgagtataccaatgtttgtcctgtggaggatcgcgaacatcatgccggcattatatccatgtagtttaactgtctgtactataacttgatgagaacctgttaggtacctaggccatttctttaccatcatttagggtttgaatgttgttctgcatatgttgtaagccatgaaaaatcatgcttccggtcattatggccgtagcaattttatttcttgttaaaactcttgggtggaagtgagaacaaaaaaggtaatgaagtgaatattttaaaaa

SEQ ID NO: 1341 - DNA, 485 bp, Oryza sativa
  Clone ID: PAT_MRT4530_101217C.1
cacatatgtgttggctggttgggagggggctgcacatgatgttgtagttttaagagatgctttggaacgtgaaaatggtcttcatgtcccccaaggaaaattctacctagttgatgttggatacggagccaaaccgggatttttgccaccctttagaagcacccggtatcatctaaatgagtggggaaacaatccggtccaaaatgagaaggagttgttcaaccttagacactcatcccttcgtatcactgttgaacgtgcatttgggtcactgaagaggaggttcaaaattcttgatgatgccacaccatttttcccctttcagactcaagtaaacattgttgtagcttgttgtattattcataattgggtgataaatgatgatattgatgagcttgtgatgggcccaaatgagtccataattcaagacaacgatacttctacggttggccaaccaaacgaccacgcatggatggttcaattta

SEQ ID NO: 1342 - DNA, 564 bp, Oryza sativa
  Clone ID: PAT_MRT4530_101218C.1
atggctcgacgacaaccgtcaccggagcagcacaaaccatggtggccgaagtcgaccatctgcggcattccaagaaggaaggcagccgccaccgccgccggcgacggtggccgcccgatggctgccgatggcggatcaggcaagaatgggggttgcctcgccttgaacatgcaccacctcaagaagatctgtgagctgttgcgctcgctaaagtaccggaagatgaacatctcccagttgcccaagcagatgaacaacctcctgcatctggagacgctcgacatcaggcagaccaaagtgcaaggtgatgcgatgaaggatatcttcctcaatgagctgaagcatctccttgctggtgacatcattgttgatgccgctggcgacaatgaggcaatagcgctctccaccgtggtaatgcctcctaagatcagcaagaacacgaagatattgcgccatgtccagatcaaggatggtccagaagcccagctccagctttctcatgtcgcgtctctggagcggctaaggaagctgggtgtgctcggtcctcggctgcagagaagataa

SEQ ID NO: 1343 - DNA, 2551 bp, Oryza sativa
  Clone ID: PAT_MRT4530_101219C.1
tcatgtcctgtgaaatgggtggctttcttaagaggtcaagggctcatcaaaaaaaaagtgaaggacagtgaagtttacggtgacatcgtcatggctgctgatgctgatacaaacagttcttgttccgaggtttgtgctacttatttcttgatgtttggtggtattggccgcgccccgaccagctcgcgacagcggcgcccgctgctgcgccggctccccgccgttgccctgctacatgaccaccccgttggggcccccgagatgctcctcgacgccccgcgacgcaggaggccccggcgagatcctcgccatctgcggcctcgtcgcctcgctcatctacctcctcagcttcttcggcatcgcgttcgtgcagtccgtcgtctccaacagcgacgatgaggaggaggaggaggacttcctgatcgactcccgcgccgcgggccccgtcgccgcgcaggctaccccgccgccggcgccggcgccgtgctcgctgctggggagcgcctgcgccgccccgaagaaaatgccggaggaggacgaggaaatcgtggccgaggtcgtggcggggaagatcccgtcgtacgtgctggagaccaggctgggcgactgccgccgcgccgccgggatccggcgcgaggcgctgcggcggaccacggggagggagatcaggggcctccccctcgacggcttcgactacgcctccatcctcggccagtgctgcgagctccccgtgggctacgtgcagctgccggtgggcgtcgccggcccgctcgtgctcgacggcgagcggttctacgtcccgatggccaccaccgagggctgcctcgtcgccagcacgaaccgcgggtgcaaggccatcgccgagtccggcggcgccaccagcgtcgtgctccaggacgggatgacgcgcgcccccgtcgcccgcttcccctccgcgcgccgcgccgccgagctcaagggcttcttggagaacccggccaacttcgatactcttgccatggtcttcaatagatcgagcagattcgctaggctgcagagagtgaagtgcgcggtggccgggaggaacctctacatgcggttcagctgcagcacaggggatgccatggggatgaacatggtgtccaagggcgtccagaacgtgctggactaccttcaggatgacttccctgacatggatgtcatcagcatatcaggtaacttctgttctgacaaaaagtcagctgctgtaaattggattgagggacgtggaaagtctgtggtttgtgaggcagtaatcaaagaggaagttgtgaaaaaggttctcaagaccaacgttcagtcattagtagaattgaacgtcatcaagaaccttgctggttcagctgttgctggagctttgggtggcttcaatgcccatgctagcaacattgtaacagccatctttattgccaccggtcaggatcctgcacagaatgtggaaagctcccagtgcatcacaatgttggaagctgtaaatgatggcaaagatcttcatatctccgttactatgccatcaattgaggtgggcacggttggtggaggcacacagctggcctcacagtctgcttgcttggacctacttggcgtgaagggcgcaaacagggaatccccaggatcaaatgcgaggctcctggccgccgttgtggctggcgctgtccttgctggggagttgtccctcatctctgctcaagctgcaggccatttggtccagagccacatgaaatacaacagatccagcaaagatatgtccaaggtcgcctcttgagcgtatcatttggatcattgccgaggaaatggacaaaaccccgtaatgttaactactgtctaattgtcttcttgtacccgctggagagagactggaagtggacacccaagagcttcacatgctgattccatgtggcatgctcgaggtaaaaaaaaaaaaaaaagaaaaaaaagagacaaacccatcaggctaacgggtgtctactcagtagagttgagtggccatatttaccaggcggaggatgccgttggtggtgtatagtgtcctattcgtatattgatgtctattattgctgcttcaacaaagtcgctaactcaggtttatgggcattcttctatcactgggttctgtgtttggccggtctgctgctgagtcatgaaaccggtcgttctccggcgtgctgtcatcgaccccattttacaactgggaggctaactttggtcttggtgttcataaacaataatgttgataaaataggccatggttggtaggtactggactactggtggacgacgggcctccctcgttgcttcacgaagctgtccactttccagctttgctttagtaattactttcgctttgttttaatccttttttgagtagtttttctccattatttcctcgtcggtcagaactcagaaccctgtcgaagcttagtgatgtggtaattttgtaaaaaaagatgtgttgctaaaaaaaaaaaaaaaacttgtgtaaaaaaaaaaaaaaaaaaaaaaactcgagactagttctctctctctctctctc

SEQ ID NO: 1344 - DNA, 754 bp, Oryza sativa
  Clone ID: PAT_MRT4530_10121C.1
cccacgcgtccgatcatatcggatcggagaggcaatggcgagcactaagatggcggtggtggcgatcctggcggcgctgctgctgatggcagctgtggagccggctttggccacgccgcccagcttgctgccggcaagaaagctgcagatgcctcgcctcatggatgtcgtctccgcagagtcaaagctggcttgcctcccagcaggcggtttttgcatgtttcgtcctatggattgctgcggtaactgcggttgtttatatcctgtcggggtttgctacggctcgcggtgtgaggaatgaactgtacgtacgtacgtgtccattttactagctaatcacgcatctgcagtgtcacaataaaatcgcgttctgcgttcggtccctagattgttgctcatgatcaacaagctcgctctgttcaagtatcgagtctgttagtttgttgtcaggtacgtacgtgttgtgcatgagctcacgagttgtgtgacgccgtgcaattagaccccctggagtcgcagtaccgagtctagcttccggccctggattcgctcttcacgtcctgcgtcgtggggggtgtgagaaggatcgagctcccagggccgttccttttgagtcatataaataaaacatagggatcagtgtgcgcacgttgtgatcgtctacgtttgtactgtgtttctcaaaaataataataaaaaaattccaagtgtatgttcgcaaaaaaaaaaaaaaaaaaaaaaaaaaaaaaaaaaa

SEQ ID NO: 1345 - DNA, 305 bp, Oryza sativa
  unsure (1)..(305): unsure at all n locations
  Clone ID: PAT_MRT4530_101220C.1
agctcgtgcctaattnggcncgagcnaannaccaatggttctcgtctccncctcctcctccnccaccgnctgtcgcggcgctccccggcgccgccagngccncctccttnctcggccgcgccngcangagcggcangctnctgctgaagcnagcnnagtcntcgtccgcncnggcgtcntgntccgntcgcnccncgtctccnnaanngacnatctngttncctngcagaaccnctcctccntggctccactgnagcntccacgacgactncagcttcatacacntgggtctcggntcggatccg

SEQ ID NO: 1346 - DNA, 184 bp, Oryza sativa
  Clone ID: PAT_MRT4530_101221C.1
ggaatggtgggttctaagaaaccaataatccgcccttcggtggtccctgccccaatgcagagggccaatattgccagggtactctgggctcctatgcaaagaattgaagatgacagtgtatgcatcgaagacatgatgcggaagtgtggagttattgattctagagttgatcagggcatggaag

SEQ ID NO: 1347 - DNA, 495 bp, Oryza sativa
  Clone ID: PAT_MRT4530_101222C.1
gccaatgcggcctgcgacgaccgctgtggtgcggatgcgagctgcagtgctggcgtggatgcgggtttatcgtttcgggttgagcacagattggatttgcaatcttggtttgcaggattacagtatgagctcctcagattcaacgatgaactccgtggaaatcttttgcggagtccggtgatgcttacaccaaaatctacggcttcgcagcaaacctctcatatgtgtcgtttccgtggaggcaaccgtaggggctttccggtttgtcaagcggagtgcacatcaatataggccctcggatgcagtcgtcgcggcattgccgtagtaccctgtggatttgctccattgctgcttagtttcattaggaagtttgcttccttttttcagctgacctctcttgttaaagatggtccaactcttatgtttatcctgggtgatgtttcgggaattcaattcccctaaacgctgtcttttaataaagtgtgatgtgttttc

SEQ ID NO: 1348 - DNA, 351 bp, Oryza sativa
  Clone ID: PAT_MRT4530_101223C.1
tgatacatatcaccggtcgccgagcagggtgcgcattatgagaaagcgggcgcattgttgcggaatgcgctagaaaccactgaggatcgctagactattaaccgggaagggtatccgagtattagggccaacatgagcaagatatgcgcaactgggggaatgcgggggatcaatgctggcctcgggccaacagtaaatgggacgctgacttatagccacatgctattactttatggacgacacaatcaagacttgtaactgccccatacataagaagagcgggatgacttggcctgagcgaccagacattggagcattggcacgtgtgaccgaaagcacaatgagctaccc

SEQ ID NO: 1349 - DNA, 510 bp, Oryza sativa
  Clone ID: PAT_MRT4530_101224C.1
ggagattcgagctacgacccacgcatagcggcggaaattaataccgggttccctccttttgatctcgagcctttacgcccgttactcctatgctcctattgctatatcccctttctatatcttgtgctactataaagcggacgctgtgagatcaggaggaggcggacgcagcgggagaggccataagccatcgcctatgccttaaccatcaccggaccgaacaccgagcagaggtggatgctcgctacatcgcagcggcagtggattattggggtgcaggagggatctaaaaggcatatcgttggaagaatgcgccaggcataatcgaggagcgtgctgcaggacaatacatgcagggaaagtaatgtgtatgagcatgcaggctatggagatgaaagggaacagctccgatgtgaagtgaattactgaatgggtccataataaccgaaagcaggtctctcatttgttggcagaggaaaaatatggacacgcatggtcataattgagcta

SEQ ID NO: 1350 - DNA, 357 bp, Oryza sativa
  Clone ID: PAT_MRT4530_101225C.1
atggcctccatccgcaccgtcgttttagtcgttgtcgccgccgtttgcgccgccgtcgtgctcgtcagtatcccacccgtggaggcgcagcagcgggattgccactcaatctgcaatcagagctgcgcctcgtcgtgcaggccggcgcccatctcggcgtgcggcaaggcctgcagcctcgcagggccacaggcttgcagtcagtgccagtacagcgtctaccagcagtgcaccggcctctgcttcaactactgcttcaactcggcctccctcacgggttcctgctcggaggccaaagacttcttcgtggatctttgcttgatgaggcaaggggttaatcgagatctagttctctag

SEQ ID NO: 1351 - DNA, 266 bp, Oryza sativa
  unsure (1)..(266): unsure at all n locations
  Clone ID: PAT_MRT4530_101226C.1
ctttaactaaatgttgtatttaataaaaacccatggtagcaatacatcaaccgatcataccaaaaaatctgcagaatatcaattaccacatctacgcagtcctgatttacataattaccagtatgaaacaaacaaatagcagggcacatttatccaatcatatggntacaatcatcgaccatacagatgaggatacagaatcataccgttaccccatctgcacaaagnacacttgtntnccctaatgatatncacgcaaccatgat

SEQ ID NO: 1352 - DNA, 286 bp, Oryza sativa
  Clone ID: PAT_MRT4530_101227C.1
aaatattatagctgaagcatagtagtagaatccaacaacaatgaagatcattttcgtatttgctctccttgctattgctgcatgcaatgcctctgcgcggtttgatcctctcagtcaaagttataggcaatatcaactacagccgcatctcctactacagtaacaagtgctcaccccatgcagcgagttcgtaaggcaccactataccatagcggcaacccccttctggcaaccagttacgttccaattgataaacaaccaagttatgcactacaattgttgtcaa

SEQ ID NO: 1353 - DNA, 644 bp, Oryza sativa
  Clone ID: PAT_MRT4530_101228C.1
ccggccgggaaaaaaaaaaaaaaaaaaccattgccgccgcgccgcgccacgccacgccacgccgagttgccgagctgagccatgatggagttgcgcaagtactggggcgtcggcgggcggcggtgcggtgcgtgcgaggcgtcgccggcggccgtgcactgccgcggctgcggcggggtgtacctgtgcacggcgtgcgacgcgcgcccgggccacgcgcgggcggcgcacgagcgggtgtgggtgtgcgaggtctgcgaggtggcgcccgccgccgtcacctgcaaggccgacgccgcggtgctctgcgccgcctgcgacgccgacatccacgacgccaacccgctggcccgccgccacgcgcgcgtccccgtcgcgcccatcggctccgccgccgccgccgccgtgattcccgaggctctgctgatccggataaatcccgccggggcccagcccgaggcgttggagaataagctgcttcacagagcaccaaagctacaaacaggcaacagaaaaaacgtgccacagccctacactgattgtcgctcatcacaatcttattgatacgcttctgggattatttttgtttttaatcttaatgcttacgcagggccgaaattctgttaagatgattccatccaaaa

SEQ ID NO: 1354 - DNA, 701 bp, Oryza sativa
  Clone ID: PAT_MRT4530_101229C.1
gaaatccaatgcacaccatcataaaatggagtgcacaatccattacattttttttttttttttttttagtctcaaatcatcattctttttcttctttccttgaaagaaaaagatcagtagtggacaacccgagtgaaataaaaagtacaacagcttacaaaatgtgaaaatgaaaatagaaagagaagactgtacagatcttgtcagaataccaaatataagcaaagtgggtagctactccagtgatacaaggcttgaaatactgccaattgacctggagaacattggtacaaaacaccaacaggaaatacttcaaccttttgaaggatgtgtgcaaccagatccttgctttatcacattctggaaagacttgatccaccaaattagaatactatctcatggttagttgttccgttgatcagacaacaaattagtgcacacacactgaaagtctctgacagatttgagtccaccagatctcttgtacctacgaaatggcaactcccttcattatgcacagccttcatagaccaaccacacccccttgttgatattctttaggaataatctgcttttatgggaagcaaaattaggccttgataccagtctgactaccccttgttggtgttgcaacaaagtttcaacgatgttctctgtggtgacaaatttgctcatacttctaggatgactattcaggaata

SEQ ID NO: 1355 - DNA, 318 bp, Oryza sativa
  Clone ID: PAT_MRT4530_10122C.1
atggccaagctcacggtattcgtggccatcctcgccgtcgccgccgccgccgccgccgcggccgtctcgacgacgacggcgcacggcgtcgccgtcggccgccgcgctctggatgagtacaggagcgtgctgcgcgtgatcgtacccttggaggtggccggagcgccatcgtctgggtcgttggacgacgacgcggcggcggctctcggccccgacctgccggagtttggagctgcgccggcggctggccccgccgcggcggcgtgcggcggcgatgaagttgactgcgacaacaaggtgccggtgtatgggccgtag

SEQ ID NO: 1356 - DNA, 486 bp, Oryza sativa
  unsure (1)..(486): unsure at all n locations
  Clone ID: PAT_MRT4530_101230C.1
cttattctcttgttgtcttctttttttttttttgtttttttcatggaggtggaccaagaaaacaagctcgacggtgccaatggtgctcacctcagcacagaaacggctcctccccttggtgaactccatcgagtctcttcacagcagtggctgccgaatctgcgagcttccctttgttatactgangccagggcacctccacccagtctctacgagaagttagtagtgacatgctgcagatcactgtatctaaaggcgatcagtgtgcccccagcagtcttgagtatcctgagagtcctctctcggcggnatttctgaaataggaagcacgccacagtagaaaggacacttaaaactgcagcaactccgccaacaactgcaccaatgatcactgccttgctccttttggagcctggcagttcataagccgcacgcctgaggaagagagtgcctcctccattcccgctgtattgatccctgagggta

SEQ ID NO: 1357 - DNA, 981 bp, Oryza sativa
  Clone ID: PAT_MRT4530_101231C.1
tggagaggcggactggtggagagccgaagaaggagtggccggtagagcactagcgctgggctcttgggcggctgccggctgggcgcgtgctgccaccgacgcacgtcgggcaggaccgcgggagccaggaggccgccggctggtcgcgccgacgcgggacagagagagtgtggccaggcggggcgcgccggcgaggggcggagagggcgcggccgcacgggctccgacgcggcacgaaaaggcagtaggaggagcggcgctgtgagtcgcggcctcgcgggagcgccggccaccggattcacgggctcgcgggagcgccgtggcctgtcgggagtgggaggccaggagaactactctttggtcccgccactggaagccggtggtggcggtggcgtagcacggcaacgacaggagccgcggtggctcgtggttggaggacgccggtgggcggcggagctcaagccggcgtgggaagaacgggagagcgtggggaacggcgaggaggggaaacaagagaggatggccgggatgcgttttatagcgctcggcggccgggattgtggccgagagaggcggattcggggtggcaaccggggtgggggaagtgggcgcaaggtggaggaggaccacgtgcgcgcggtggagtcgctgagccctcctgttggcgagggagggacaaaggagccgccgccgctgtcacccatcaccagccgcgtggtcggccaccattgtctccgcgacggcggcagggtgcagggagttaggaggtgcaatggaggtggaggaggcagaaagccatggatgaacgggctctgccggccgtccgtccagggctccgccggccgcctatccgggggaccgccggcctgccagccgtccgtccaggggcagcgccgcccgccgcccgtccagggcaccaccacctcgccatcgaccgtccatccaggtcaccccgacgacgacgtgtgctgctactgctga

SEQ ID NO: 1358 - DNA, 155 bp, Oryza sativa
  Clone ID: PAT_MRT4530_101232C.1
actaatttcgaatctaggttccaaccccactggtaaccacgtctctcgcgtttatctcgtttaaattttcgcctagggttaatcgactttgcatttagcgatgggcaatgggctttagtatttagaatatgattaaagtaggggagcccacaact

SEQ ID NO: 1359 - DNA, 929 bp, Oryza sativa
  unsure (1)..(929): unsure at all n locations
  Clone ID: PAT_MRT4530_101233C.1
atggagtggacgacggtggaggcggcgaacggggccaagctgagcgtgcggctgttcaagccggcggcgggggcggaggcggcggcggcggaggacgtcgcggtggtgctggtgcacccctacacgatcctgggcggcgtgcagggcctgctgcgcgggatcgccgagggcgtcgcgcggcgcgggtaccgcgccgtcaccttcgacatgcgcggcgccgggaggtccaccggccgcgcctcgctcaccggctccaccgaggtcggggacgtcgaggccgtctgccgctgggtcgctgacaatctcaacccgcgcggcgtcctcctcgtcggctcctccgctggagcaccaatagcgggatctgcagttgataaggttgaccaggtcattggttatgttagcattgggtacccatttggtctaatggcctcggtcctatttggcagacaccacaatgctatcctcaagtctgagaaaccaaagttattcgtcatgggaactaaagatggcttcacaagtgtaaagcagctgcaaaacaagctcaagaatgcagcaggacgggttgatactcacttgatcgaaggagctggccacttccaaatggaaggccctgcttttgatgcacgaatggttgaccttattgttaatttcatcaaatccttgcccaaatagcattgacagtgactgtgtgcaaatttgtcatgattgtagtgagttagtgacaaacaaaagaagctattgaacagtgcattcatggtgtgtattttctcatcttgtaattgtacacttggtgttgtaattttagttcaatccgtgtttctttcgaagcctagtgtaaaatgatgagtttcagatacaatacatttacaggatatgacatttcatggtttcagtcnaaaaaaaaaaaaaaaaaaaaaaaaaaaaaaaaa

SEQ ID NO: 1360 - DNA, 248 bp, Oryza sativa
  Clone ID: PAT_MRT4530_101234C.1
tatatattgaacgtaaacagaccgcgacgacattcctagatctcggaatgcggatgagctccgactatgtactgtgtaacttgatgtaatccatctcatgcttgcctatggcacccaattcatcacctaaggttgagaagggttttttatggggtcatagattgatattcatactctctgatagagctctactagagcaaagtgcctcaaaacgtgtaaatggcagaaactgagcatagcaccatcaa

SEQ ID NO: 1361 - DNA, 756 bp, Oryza sativa
  unsure (1)..(756): unsure at all n locations
  Clone ID: PAT_MRT4530_101235C.1
ngccggccggggaaaaaaaaaaaaaaaaaaaaactccgaactctgaacaaacctttaaaccctagcctcgtgtggcgtcggcttcccccggcgattccaagggagcagtcccctgttccctccgttgctggtgtcaggtggttaaggaatctgaagtagggttgatatggagtccactgatgagcatgcaatggagagtgacactgatttgatcagtgtgctgcctggagaggtcctacagcatatcctgtccttttcaaggattagagcaattgtgaggatgcgcaggctttctaggaggtggatgagagtgattgagtgtctgcagttcatatgccttgattacagagattttaaacattggaaggttgagaaatttgctcgctttgtggacaacctattactcatccgttctaaagtagacctgcatactttccagctttattggtttcattatcttccactgaactgcaatgatcttaggaagtggatcctctatgcggtgaagcacaatgttaaagtgcttgatgtggaactggatatgtatgataaaacggccttaccgtctcgcattttcacctgccgttcagttgaggagctaagtttgcagatgggagaagcccctgatgaagatcttgaacacgtaggccttgtgcttccggacataattcaacttccttctctcaaaaagtgactctctctgatgtagaagtggaccagctttctctgaccaattcatcggtcggagccctaact

SEQ ID NO: 1362 - DNA, 342 bp, Oryza sativa
  Clone ID: PAT_MRT4530_101236C.1
gatcgcatccgccgccgctgtttctgtgccgctgttgcagcataaattaaatgatcgagtgacctgctttatgcgaggatgcattttcgcagctgctgtccgttgctatctgctgtatgcagcaccactgcgcaggtggatgaaccttgtctgggttttcagcagtgtcatgtgccatatggtgtgctggttgagcaccactagcttatgagtatatactgagcttcgtgtggctttgaggacaacacttgctgacaagcaccctattctattcagatgtgagactggtgggaaaaaacgatctctagcaacaaattatggtggtggtgcaccaatttcact

SEQ ID NO: 1363 - DNA, 206 bp, Oryza sativa
  unsure (1)..(206): unsure at all n locations
  Clone ID: PAT_MRT4530_101237C.1
aggggtgtgtgtttttttttttggggtttttttataattttttatngggcccgcttttagaaaacttgaataaatttttaaatgggtgacgcccaacataaagggcgtttttacaggttggggttctaaaacatttaacataccttacaaggttttttgcttggtttcctttttaaaagttaccacctcaaaaacatccttttttt

SEQ ID NO: 1364 - DNA, 441 bp, Oryza sativa
  Clone ID: PAT_MRT4530_101238C.1
atggatgactcacctgaggacggccggtggggctcggtggtggtggcgcagggctcggtggagggtgtcgccggtcggtggaggcggcgccgagctcagtggcggcggtgccggggtcggtggagggcgtcgccggggtcggtggagggcggcgtcgggcgtcggagaggaggaggcaacaacgacaaggaaggacgtcaccgggctcggtgggggtcggcaacgtgcgttggtaacgacggttggggtcggcggcggcggtccgaatggagggcggaggaggagaggcgggcggcgacgatgaggaaggccgacgccggtcggtgtggaggctcggtggcggcgacagcgggctcggcgagggaggacgacgacggcactagtgttctgaggaggcgggaaactatagcgggagttagaaaaattatcgatccgatctaa

SEQ ID NO: 1365 - DNA, 328 bp, Oryza sativa
  Clone ID: PAT_MRT4530_101239C.1
actaccccccccccccacccgccccgggcctgggaagtttttcgggcagggatggtaactgccggctccgcctccgcctccgtatttcccgccgtggagtttggcgccaaaacctcacgtctgggccccagtcccagacccagaccgagccccgtattctaattctcgaggacttccctcctcgtcttggacgccggtaggttccactcaagcctttacatttataatttcaagcgccacgggcagcaacattgttagcaacgccagcggtattaacctggaggaccccgtgctcgcgccgattgccgttccaaatatgaccggtact

SEQ ID NO: 1366 - DNA, 525 bp, Oryza sativa
  Clone ID: PAT_MRT4530_10123C.1
aacgcacatcaaaacggattccgagatatctaacatacaacacacactcacgacgatcttagccatcctgtatgtaataactctcgcagccagcactggctcggcgcagtatgatgcaaggccctatggacaatgcgagcacaagccgtttatgcaaccgaccatgaaccagaacagtgaggtgcctaggctcctagacagcaccgacgagcctacctagggagcaggcacgcatgctacagctgaacacttgacaggtgatgcggcaaccatgctgtcagctgatgaggatgatggcacaacaatattaacgctaggctatgagcaccatggagctgactattatgcaacaagtgcagactgatgctgacttagatggcgagcgccaagctcactacaagatccaagtggatgtcaatttgccctccatgtgttaagtctactataggtactgctacatttcatgcatagttgctactggacatcgcggtgattggtagagcgttccatcatatatatatagtc

SEQ ID NO: 1367 - DNA, 578 bp, Oryza sativa
  unsure (1)..(578): unsure at all n locations
  Clone ID: PAT_MRT4530_101240C.1
tttaacctctggaatgagaggtaacacggtagngtaggtctctcagccacgctgcaatatggatatgcaggataacctttgnctcgtgtcaacagttgtgccatganaccacaatatcatgctaggagttatcatcatgatccancanctggtgaggcttgtntgtctgaggaccctgatgtgatgagcactggtgtatgtanctgacaccaccccccacgtgggagacacgtgtatctggtgaacacagtgattgagtgggctgagagtttgttggcagagaagaaaaatgtgtggggggaacaccgggagtttgtcacngaggtgttgtcagatggcatgcctttttttggctgtaatgtgaagtgaaatgtgtgcccaacgcaagctgctgttgggtggcttgataactgatgactcgcacagtctggcaatgcaaagcaaccctgcatgtggtgaattgaaggatgaatgcatgtgacattgtgtgtgttgacccntgaatgtntggaggctggaccaggcnctgtaattataacggacaggtncgtgganaccaaaaaaaaaaaaaaaaaaaa

SEQ ID NO: 1368 - DNA, 811 bp, Oryza sativa
  Clone ID: PAT_MRT4530_101241C.1
gccgtgtctcttcccccacgcgtccgctcctccactcgcgctccgcctctctctctctctccatcgatccaagcccccccccccccccggcagatccccctcgccgcctcgccaccgcgtcggccatggcggaccagctcaccgacgaccagatcgccgagttcaaggaggccttcagcctcttcgacaaggacggcgacggctgcatcaccaccaaggagcttggaactgtgatgcgctcattagggcagaaccccactgaggctgagcttcaggacatgatcaacgaggtggatgctgatggaaatggaacgattgactttcctgagtttctcaacctgatggcacgcaagatgaaggacactgattctgaggaggagctcaaggaagccttccgtgtatttgacaaggaccagaatggcttcatctcggcagctgaactccgtcatgtcatgaccaaccttggtgagaagcttacagacgaggaggtggacgagatgatccgtgaggctgatgtcgatggtgatggtcagatcaattacgaagaattcgtgaaggattactgacccaagtgagatcccatctagttactctcctggtggtagtaaccagtgtagctttgaaaactgacagcatttggttatgggaatgaacatgtttgttgtttgttttcttctcaggaatgtttggtaatttcgtttggattttgtttgcagttgtacaacatttgtgttatcttggtacaatgatgctttcaccctccaaattgtcataatcttcttgtagagcatggtgctgaagttcaggaact

SEQ ID NO: 1369 - DNA, 1576 bp, Oryza sativa
  Clone ID: PAT_MRT4530_101242C.1
ggtccggattcccgggtcgacccacgcgtcccacaagtctctcctcctcccatctccgcttcccttcttcttcttcttcgttgatccactcacccgccgcgcgcagaggaggccatggcggatcagctcaccgacgaccagatcgccgagttcaaggaggccttcagcctcttcgacaaggacggcgatggttgcatcacaaccaaggagttgggaactgtcatgcgttcactagggcagaacccaacggaagctgagctccaggacatgatcaacgaggttgatgctgatggcaatggaaccattgattttcctgagtttctcaatctgatggctcgcaagatgaaggacactgattcagaggaagaactcaaggaggccttccgggtgtttgacaaggaccaaaatggcttcatctccgctgctgagctccgccatgtgatgacaaatcttggcgagaagctaactgacgaggaggtggatgagatgatccgtgaggctgatgttgatggtgatggtcagataaactatgaggagtttgtgaaggtcatgatggccaataattcttgtccttggtatgtccagattgcagttgggcctagtcatacacgattgcgcatggagctggacaagaaatttaaggtgctttgcctgcacggcttccggacaagtgggagttttctgaagaagcaaatcagcaaatggaatccttccatcttccaacaatttgacatggtcttccctgatggcatattcccagctggagggaaatcagagatagaaggcatatttcccccaccctactttgagtggtttcagttcaacaaggacttcactgaatacacaaatctggatgagtgcatttcatacctgtgtgattacatggtgaaaaatggaccttttgatggcctgcttggattctcccagggtgcaactctttctgctcttttgataggttaccaagcacagggcaaagtactgaatgatcatccaccaatcaagttcatggtctcaatagctgggagcaagttcagggacccaagcatatgcaatgtagcctataaggatccgatcaaggtgaaatcagtgcatttcattggagagaaggattggctcaaagtgccttccgaggagctggccgctgcctttgaggaccctgtcatcataagacatccccagggccacactgtccctaggcttgatgaggcaagtgtgaagcagctttctgagtggagctcaagcatcctggaagacatcaagaatgcagatgatgttgccaaggcttcaattgtggagaagccatctgagggtaataccgtggcagagtccggtgaaaacctggtggagcaaattgcagcttgagtatggtaactgacagtcttgacactgtctggaggctggagctgattgctgcttcaaattaaaccggattagtccgtcatgaaactcgatctatccaaatgtttaagtctttaagagctttcttttttagcgaagatgtttaaaaactttgttaccacaaatatatttgcctgggtactgcttgtattccctcggggaactaaaaaaccacaaa

SEQ ID NO: 1370 - DNA, 531 bp, Oryza sativa
  Clone ID: PAT_MRT4530_101243C.1
atgatggatagggccatcgtccttaactttcagccaccagcccacttcatcagcgcccgccagcccatgggaaagagaaggcccaccatcccaacaatggttgggacggacaattctaccctagagagcgaggtcatgatgggcaggttccgcagagtgtacgagaagataaatatggcactggactggatgttgtacgatctatcctctctaactctcttctccaactcctccccttccacctatcctcccccttctctccccttcctcctccccttcccggccagcctccccttcccatctggcgggccggcgggcggcagggccgcgtgctacggcggccggcggcggccggcggggcggcgcccagcggggtcgtgcccggcggagggcggcggggcttcgggcggcggggccgcggcggcggcgggcggcggggccacgcccggcgaccggcggccggtggggccgcgcctgtcgttcgtggcgaccggcggcggcagcggcattctttttttttttaatttgtga

SEQ ID NO: 1371 - DNA, 1674 bp, Oryza sativa
  Clone ID: PAT_MRT4530_101244C.1
ttttttttttttttttttttaccaatgtatattcatgaatctaatttaggttctcaaggttactaaatttatctataaatttaataaaacttaaaatgctaaactaaaaaagtcaaaataacttataatattaaagtagtacatgatacgacctacgcgcaaatcgcatgcaaattttgaagtcacggggcaggcctatctgatcacgtgagtgggaagctgtagctgcaaatataacacaataacggcccaaacctcctgtgtggcaaactgtgtcgacccgaaataaatcagaaacaaaacttgacaacgccacagaaggaatacaggagtgatgacactccaaatggtctattgtacatgtggttaaaagaacagaaaaatcatacgcattagattgcactatgacctggacctacaacaataaataggtctgcttcatctttaacccttacagataaaaacatgacttctaaaattgtacaattgatgaagtcagaggaaatatgggacagcagtcctcggtcctcgcatctggttattctcctctgtctctgtgaagaatttgacctctctttccattgtctcactgaagcttagtatagaagcaacatttccacatctgtagcaataattaggagcggaccacacagttacaaggcctttgtcctgaaacatgtactttaagccttcctgaaccagctggtgagctcggcaaactagatcgagattgttaatatggttgaactcagctgtcactcgtgatccaaaaagccaaccagctccacgagggctaacagcccatgtctctatttcttcagggtcactccacattagatcacagaaaggaccttcatgaggaatttcacaattgcgatcaatcgtccgaatctgatcaacagtgcgcacatcaggagaaagtccaccatgaacacaaagaaccgtgccattaatgattgctgaaagagtaaggtagtcaaaaacatcggtgcaataccgccatgcattcgcattcccatacttcctttggcactcatcgtagaaaccatacacctgtgtcaactgtctgctttcatgatttccacgcagaagcgttatgtgtgcagggtacctcgcttttagtagcaacagaatggtgaagacctccagactgttgaagccgcggtctacaaaatcacccatgaaaatataattcgtctcgggcacatgccccccagtcgcgaagagcttcatcaggtcatggaactgcccatggatgtctccgcacacggtcaccgggctgttcactggctgcacgttggactcctcgatgaggatctccttcacgtattcgcagagggactggagctcgtgctcggcgaggtgctggccctccttcaccttagagatccacagatccaaatccatcgggaggggctcgcgggggcggggggggatggcggcgcgcccgggggtggggtggggaggcaaaggggattttagggcgcggattcgagaaggggcgggggctagggtagcgaagccgcggcggatcccccctcggattccggtgttggtttcgccgccgtctcgatcgcggcgggggggaggggaggagggacgaagagggaagggagggaggggaagagagaggaggacggacgcgtgggcggacgcgtgggctcgtgccgaatt

SEQ ID NO: 1372 - DNA, 795 bp, Oryza sativa
  Clone ID: PAT_MRT4530_101245C.1
atgccgccggagcgacaccaccaccctcctcctccagctcctggaagccctgccatgaagttcccaatcatctcaggtgactctgatcttggcaaagatctgaagttccatgagtcctccgcgccgaccatcgccgcgtactcgccattgcaggagtaccaaggacactttgagctagcccttggccactccatggtttgcaccaacttctgcaactctgaacaaagctatggtgtttactccccctatggagctcaaaccatggctgggaggatgctgctgccgccggcgatcgccaccgacgtgggtccgatctacgtcaacgcgaagcagttcaacggcatcatccggcggcggctggcgcgcgccaaggcggagcgggagcaccgggtttcccggagccggaagccgtacctccacgagtcgcgccaccgccacgccatgcgccgcgcgcggggcagcggcggccgcttcctcaacaccaagaacgcctcctccgccgccgccgcggccgccgacgcggcgccggtgagctccggtggcggcgaccacggggcgagcaacaagagctcgtcggcgtcggaggcgacgcgcgtgtacgacgacgacgacgacatgggcgcgggcggcggcggcgacggcggcgacttccaccacgcgatgggtcacctccgctcgccggcgttcttcccgtcgctggccgcgatgatggacggcggcggcggcggcggcgaggggaagtgggcgaccgcgacgcctcaccatggctgccgcgtcgacctcctcaaggtgtga

SEQ ID NO: 1373 - DNA, 1605 bp, Oryza sativa
  Clone ID: PAT_MRT4530_101246C.1
atggaaacccaatcgacggcgacaccgtctcctggtgcttcgtcggcgaccggaggcggaggcggcggtgcctacccacggtgggtgatcctcgagcagcgagccgttcacgacgacaaagaggacgacgacggcgaggacgactcccgctgctccgccgccgacgtcaagatcaacaccgaggcagcctgccgctcctccgacggccatctcgtccgcgtctacttccgccgcctcgtggctccgccggcggcgtcgcgcatgacatacaatggtcagctcgatcgcttcgtctacagcgccgccgactcgccgacgttgacgctgctcccgacccacgcgcggcggcagcactggctggacgtgaaaaccaccggcctcctgcgtcgccgccgccgcgacggcgaactcgtggtggcggagctcaccgtgaagaagggcgacaccgacgacacaccggaggatgccgagctcgtcgtgctccgctctggcgagtggaccgtcacgcgggcgccgatcatccacgacgacggtaaggccgaggaggtgtcccgctggcgaaccgacatggtcgtccccgtgggcgacacgctcctctgctgggtcgacttatgccgtggcgtcatcctcctctccgcctccgacctgttcgacgaaagtcgtccccgccggctaaagtacacgtcactccccgtcgaggctcccgccaagaaattcgacgacgacgacggcggagagtacgcgatcaacccacgaggatacccggagagaaaccggagcgtctgcgtcaccggcggcggcgccgcgctgaagttcatcgacgtctcgccgcgctgctgctgcggcagcccaggcgccaccaccctctgccacaactctagcggcgcgttcgtcatcaagacatggacactcatgatgaacgacgacgacgacacgacgtcgacgacatgggcgatggacgccatggtcaacgccgccgagctctggtccctcgacgcctacgccggcccaccacgcctgagaccagtataccccattgttagcatggacaacccacacatcatttgcttcatggtttgcaaggaacactgggagtcatgcttccactgcgaaaggacaatatggaagatcatcttcgacatgaagagcaagaaactactctcaattcgctactacgatgagtcccagtgtcaaacttggggggtacattatggagatgattaccttcctagcatgatctctgattacttcaattctaatggcaaatatacaagtcataatgcgacaacaagcattaacgatctcatcgtcactaattatttaccgcagtcatctcacaaaggtttgaaggtggtgtcatcagaggtacaagtttctgatgaggagatctttgcggcgcttgaagagatacctgacttgggttgtgatgatttgctgaaggcatatagcattcttagtcatgacattggtcaacaccggtttagatctcttttgggcctcccaatgagtttgaggaagaaatggctattgatagaaatcaagagtagagaagctagttccatctgctctgcatgtgcagcaaacatgcaacatttacatgcttga

SEQ ID NO: 1374 - DNA, 1292 bp, Oryza sativa
  Clone ID: PAT_MRT4530_101247C.1
atcacccccattgctgcccaagtaaccactagcaccaggcatcccattgctacaaaagcctttgggtttagtgaacctagatttgtgaccttggttgatccactcaaaccaaacaaatcaaataaactagggtctgatctaattattcttcgtccgacaacttgaaccctcctatccggacgaccgaacagctctgcttgtacaactcgacctccagattcgtccactgcaccatatcctgtcattcctagcccggattgaatccaagcgtaaccgaacaaggcctgaatatttttttggcaaccatctcgattccataactccaacccatcaaagtcaacaaatctcatcttctgtctccttgaaaacctggcaacacaccttgctgcatccagatcaagataaagttgtgctgggattttaaccatgattgtgtggtgacactcaaaatcacagctaacggcagataggaactgggacgccgttgtggcctgcgggaaagcgagtgcgccgtccaacaccggcagccccaccttgccgcctccggctccgcctgcaagaaaaccatcatccagcgatgagtcagccactcgaccaagatcgtcgtaatgattaactaataagtttacacctaggtcagaaaccccaacaagcaaagaacacacatccatattgccgggcccctgccagtaagcaacaagattactcctgggcgaaaagattgcgatggcgcccaaaccacatgtgtcgccatcgtcgaggtcgtcgccccatctgccagtctgccaccccacctccgtccctcccatcatcacccgcggcggatcagcacgaacggagggtggagagacgacggaggtcgccggatcgacccacccatcgccgcggacggcagatccgcacaagaggggagcggagagacgacgggatccatgcaggaggggaagaggtcgccggatccacccctcccgtcgccgccgacagcggatccgcgcgagaggcgctagcggcggaggtgtacaagcgcgggggtacggtaatataaataccgcggtaacctccgccggggtgcggtaaccttgactccggcggtttaggaaaccctgaatctcccaggcagggttcaccataccaccggtaaccgcgcggttgctgggcttaccgcgggggtatggtgatataaataccgcggtaacctccgcggttaccgcgtggtaaccttgcttaccgccggggtgcggtaaccccgaccccggcggtttgggaaaccctgctcccaggcgatcactcat

SEQ ID NO: 1375 - DNA, 231 bp, Oryza sativa
  Clone ID: PAT_MRT4530_101248C.1
atgcctttgggccggcccggcacggcccgagacgtgttgggccatgcctgggccgcgagtgcggcacgtgggctggcacggcacggcccgccacatcaagttgccgggcctcctgaccacttttcccttggttcccttatcattgatcttacatatcgtcttctaaccatttacaccgatggcaccaccatgtcctcgttttttccactgtgctcatcaccaaccgtctct

SEQ ID NO: 1376 - DNA, 439 bp, Oryza sativa
  Clone ID: PAT_MRT4530_101249C.1
gccgcgggaaggtattaaaatcgagagcgcccaaccaccgctgctctctacctgtctctgctgcatccgcccacgaggtgttcgacggaatgcgtgagagagacgccgcagcgggcgccacccctccccccatgtgggcctcctccctactccctcttccccctggccacgcgcgggaggggacgggggcatcaccgccatcacacatcgacccgggcggtactcgcgggacacctgatggaatcgacccagattcttccatcccatgtcaagatcgaggacagctacatcgtgtccggcgacgactgcatcgccgtgaagagcggctgggaccagtacggcatcaagttcaacatgccgagccagcacatcctcatcaggaggctcacctgcatctccccgacgagcgccatgatcgcgctcggcagcgagatgtccg

SEQ ID NO: 1377 - DNA, 213 bp, Oryza sativa
  Clone ID: PAT_MRT4530_10124C.1
atggagcgcagcagcggcagcggcagcgccgtgagaggaggcggaggaatcgcgaggcgcgcgcacacgctgacacgcatgacgcggcacagtggcacagtgcggcagcggcgctgccaacttagtttggttcttctccccatgcgctaccgcggccgccctcaacgcacttgccgtcaccagccgctcgctagtggcgagagtgttgtgtga

SEQ ID NO: 1378 - DNA, 717 bp, Oryza sativa
  unsure (1)..(717): unsure at all n locations
  Clone ID: PAT_MRT4530_101250C.1
gcgcgatttccccttctccggcggcgccctccccagcacgacctcccctctctctcctcggcgcctcgagcagcggtggcnggcggagcttcccggcggcagcagatcgagcagccgctggaggtggggatcgtggcagcgggcgcggatcgaagcggctgcggccacagatcgacgcggtggcggcagatggaggcgcaggaggtggggatcgaggcggcagcggcggatcgaagcagcggcgacgtggatcgacgcgacggccgcggatcgacgcgtcagcggcagggagcgacgcggcagagacggagcttcccgggtacgcctttctctcgagtccaccccttcgccatcttcttccacagtagcggagcagatcgatgcgtcggtggccggcggagcttcccggcggcggcatcttccatcgtggatccgtcacggggagacgacctcgccaacgtgccgctccaagcgtgcttcgctgttctcgagccggggcgagcagaggtgcgcggcgctctgcagaggtccgcgattctttgcagggcgatggtcccgggcgaaaaagtggggcgagctagggataccctccaaggtggagggttgggcatgccctaagggcaagttttatggtggaggtgagtgccacgtctaatttaaaccatgtcatcttttcattaattaagagataacaattacaacaaaaaaaaaaaaaaa

SEQ ID NO: 1379 - DNA, 1839 bp, Oryza sativa
  Clone ID: PAT_MRT4530_101251C.1
atggcggcgctgcgcgtcccgctccgcgcgatcctcgccaccccgcgcgcggcggggccgcgcctcctcctcccgctccacgcccacctcctcgtctccggccgcctcgccgcctccccggccgcgctcacctccctcgtctcgctctacgcgcgcgccgccgccccggcgctccaccgccacgtcgccccgctcctcctggaccgaccgtcgcccccgccgcttccctgcttcaacgcggggctctccctgccccacccgctcgcgctcgcggtgttccgcggcctccgccacgcgtactccccggacgccttctccttcccgcccctcgtctcctccgcgccctcgccgccacacctcctcgcgctccacgccctcgcgctccgctgcggcctcgcgcacgacctcttctgcgccagcgcgatgctccgctcgtgcctcaggtttggactcgcggaccacgctcgccgcctgttcggcgaattgccgcgccgggacgtggtggtgtggaacgcgatggtcaatgggtttgccaggctcgggtgcttcggccacgccgtggagtgcttccggatgatgagggaggacggtgaggtcgagatcagcagcttcaccgtcaccggcatcctgtcggtctgtaccgccacagcggatttggggcacggggctgcggttcatgggctagtggtgaagtccgcgtttgaacaggaggtgtctgtgtgcaatgcgttggtggatctttacgggaagtgccacaaggtggatgatgcagcaatggtgtttgaggggatggcggacatagtcaaggatctgttcagctggaactcaatgctgtcagcgctgcattactccgctgaccatgctgggacaatgaagctgttttcaaggatgagacgcgttgctgtgtggccagatgcagtgaccgttgcggctgttcttcctgcatgcgcgcagactgcagcattgcaggtgggaagggaagtgcatgggtacattgtaactagtggactggcttgccatggcgcgttggactcgtttgcttgtaatgcactggtggacatgtatgccaagagtggggctttggatgaggctcgtcgcatatttgatcggatgcaacagcgggatgtggcatcatggaatattatgattgatggatatgcatcgcacgggcatgggaaggaagcactggagttgttctgccagatgacagaggtggaacggcttcttccagatgagataacactgttgggggcattgtcggcttgcagccattccgggcttgttgaagaagggaagaattttctgaagagaatgaaagaggaattttctttggagccacagttagagcactacgcatgtgtgactgacatgcttgggcgtgcagggaggctggaggaggctagaaaggtagtagaggatgcaggggatgtgggggttggtgcttggaggacataccttgcagcatgccggatgcatggtgataaggagagagcccaagaggcagctaggatgctgatgacgacagagcagtctgagagtggtgggtgggtgctgctagcgaatacatatggctgggagggaaactttgacgaactggaagaggtgaggggcgagatgaaacggcgaggagtacagaaagctgcaccaggctgcagctgggttgaggtgggtggagatgatagggggagtggagcagtgatgcatgcttttgtcagtggggataggggacaccctgaggctgacatgatctacgaaatgttacatgcgctgataagttggatgagggattgcagccacctgagtaatacgaccccattatattcagtagaacactcatga

SEQ ID NO: 1380 - DNA, 316 bp, Oryza sativa
  unsure (1)..(316): unsure at all n locations
  Clone ID: PAT_MRT4530_101252C.1
gtcgctgagactcgtgaaacaccgcgaccaggagatagtttcagcaggagcaggcgatggcgagcccgcagtgctgcgcgaacccaccgacgctgaacccggccggcggggaggggaaggacctactcagcccgttcaccccgttcttgttcaacaccctgttcttttaaggcactgaccgcgctggtgaaaagcatttctgggaaagctatcttgggaagaacttttatgcgaaaacggtattaccctgaaaattgtttgatttcttccgcggnccgtgagttaaaagtgctaatacttgagtaaaaacaaaaca

SEQ ID NO: 1381 - DNA, 413 bp, Oryza sativa
  Clone ID: PAT_MRT4530_101253C.1
gaaaaccccaccaaactcttcttcttcttcttcccccattttcctcgcgttcccctcgtgccgcccgcctccgccgtcgcgtccccgccgccgccgcccgccttccccgaggggcgcagccgaggagcgccccaccccccctccccatggccgcctctatcgtacacaccgcggtagtcagcgtgttgaagcaccggacgcccgagtggtggccatgcacccactcggcttctgatgacaattcctgagcctggcgtgcgccaacggtaactaaaactctatccgaccgcgccgatgcctagacacaccgctaagagcgctttcgatgctgtcacacctggccgccggacggagcgccccatggacagaccgcgtgataaccacattcttcaccaaggacagagcgggctcag

SEQ ID NO: 1382 - DNA, 527 bp, Oryza sativa
  Clone ID: PAT_MRT4530_101254C.1
atcccccgggctgcaggatcggcacgagggctaaagagtgcaatctatcagttgtggggatttggacattgaaggtctcactgagtccatatttgtttcccacaaagatgagtacacagaatttgaacaggcatcactcagacaacaataccaatcaaagatggctgaattgagagctgaggccaagcagcaatctgagtcaactggcacaattggacgttcaaatggagcggctgtgactacatcacttcagcagcagatatcagttactgtagtgactgaatttgttcgctggaatgaggaagcaatatctagatgcacactgttgttttctcagcctgctactgttgcagctaatgtgagatccatatttgcatgcttgcttgatcaagtaagccaatatttgactgaagggcttgaccatgctagagagagtttaaatcatgcagcaactcaacgggatagatatgtcattggaacaagtgttagtagaagggttgctactgctgctgctaatgctgcagagg

SEQ ID NO: 1383 - DNA, 357 bp, Oryza sativa
  Clone ID: PAT_MRT4530_101255C.1
atgacggctcgcttccccttcccctatcctcttctcctgcttactgctcgctgcgtccgtgatggcggaggcggtggtgacgggcgcatagatctgattccttcacggcggcgggcgagctcccgcgggcgagcagggatcgggcagtggctggaacgagggagggcggagcggcacgtagcaggtcgggggctgaaggcgaggctcaggtgcctcgtggccgcggtggccgacgcgctcgccaagctcaggacgccaacctcttgccctgtttgcagcaatgtactgcttactgaatcatttcagattgactgcctacgtatagatgattctggacaagatggtgtcatggattag

SEQ ID NO: 1384 - DNA, 1760 bp, Oryza sativa
  Clone ID: PAT_MRT4530_101256C.1
cgcccgctgtggcgttcatccggcggcggtggcgccatcgtcagtaaactcctgcgttcccggggcgtgttcctgacgtgggaggacgtgtgggtgacggcggtggacagcggggggaaggccgccaccatcctcaacggcgtcagcggcagcgcgcgccccggcgaggtgttggccatcatgggcccctccggctgcggcaagactacgctgctcgacacccttgccggaagattggattcaaacttgaagatgaaagggcaaattctggttaacggtcgatgtcagcaacttgcatttggaacctcggcgtacgtgacacaagagaacgtgctaatggcgacactaacagtgcgcgaggccatctactactcggcacagatccagctgccagacaccatgactatggcagagaagttgcggcgcgccgatgaaacggtgagggagatgggactcaccggcacgctggacactcggatcggcgggcggtcaagcaagggcatcagcggtgggcaacaaaagcggttgagcatctgccttgacatccttacacgtccccggctgctgttcctcgacgaacccaccagcggcctcgacagcgccgcctccttccatgtcatgagtcgcatcataggcctcgctgccagggagggcatgacagtcgtcgctgtcgtgcaccagccatgcagcgaggtgttcgagctcttccatgtcctttgcctgctcgccgctgggaacaccatcttctttggcccagcttcaatggctgccgagttctttgcttcaaatggctacccttgccctccaatgaggaatccatcagatcattttttgaggactgtgaacaaagattttgacaaggttactaacacacaggagagtgaagacagactccggtgcatgccagctgttgcagatgaagcaatagacattttggtgaattcatacaaatcctccaacacttcggaagtcgcaaaacaggacatgcgtcacataaacgagatggtttctgctgatcgggtgacgattggaagaaaccgagctggttttattaccaagacacttgtccttaccagacgttcatttgttaacatgtatagagatattggatactattggttgcggatggccatttatatttccataagtgcttgccttggcaccatattttacaatatgggctatggatccgattcaattcgagctaggtcatcaatgttaatgtttattagcaccatgctaaccttaatggcaattggagggttcccatccttcgtggaggatatgaaggtatttatgaaggaaaggctaaatggacattatggtgtaaccacatttgtcatctccaatacattgtcatccacaccatatcttcttcttattgccataatacctggtgcaattgcgtattatcttagtggcttacaaaggcaaattgaacattttgtctattttacgttagtactttgttcatgcacaatgctagtggaaggcctgatgatgatcgtagcaaccatcgtaccagatttcctaatggggatcataacaggtgctggtatacaaggtattatgatgctcacaagtggattcttccaacttcctaatagccttccaaacatagtatggaagtacccaatgtactacatctcctttcacaagtatgcactgcagggtgaaagaggaagatgaggaagagataagggagagataaagagtggaggggaggaagagataagggtgaggactctcagatgcgcgcg

SEQ ID NO: 1385 - DNA, 447 bp, Oryza sativa
  Clone ID: PAT_MRT4530_101257C.1
atggaagtgaagaaaacagtcggcagccatggcaaacgcggtgacaccagtcagcggcggatgcggcggccggtcggtgaagacgtagacgcccaacaacagcggcataaaggccagccgtgcaggcggaagcaccagtcggcggcggacgaggcggccggtcggcggaagcaccagtcggcggcggcgaaggcaagccggtcggtgaagacgcggaagcaccagtcggcggcggacgaggcggccggtcggcggaagcaccagtcgacggcggacgaggcggccgaggcggaaacaccagtcggcggcggtcgaggcgagccggtggtggagacaccagtcggcggcggcgaaggcaagccggtcggtgaagacgtggacgcccatgaacggtggcgaaaacaccagtcggcggcggcgaaggccagccggtcggtgaagacgtag

SEQ ID NO: 1386 - DNA, 561 bp, Oryza sativa
  Clone ID: PAT_MRT4530_101258C.1
atggccagctccaccaccgagccactggtgccgccttgccggcgacgattggggcgttgccccctaccatccccgccggcgccggcggcggagggtggtgcgcccgtgcatttgaggtcgtcgaggctgcccacgccgctcagcgccctgtcagcgtcgctcctcggtgtgtctgtggtgctgctcgtcgcactattgggagggcagcgccccaatcgccgccggcaaggcggcaccggtggtgcggcggtggagctggccatggccaccggtgagatcttcacgcgtggaatggaggaagaagaagagccaggggcaaggatggcgagctctgaattctttggcctgtgggacgagctcgctggtataagcctcgaccctgcgtccacagacacgcttccggaagaacttattgtccctggggaagatcatttggaaatccaggacccccgccagatacaaattcttcatgtttctgacggtcagaggggcatgtatgatggccgataccatgcaacaccgtgggtggcaccttgcgtcgttctgccatctctgtgctag

SEQ ID NO: 1387 - DNA, 363 bp, Oryza sativa
  Clone ID: PAT_MRT4530_101259C.1
atggaggtgcaagagggcgaggggattggggatggaggcgaggagggactggccgacgtccgatcccgatcgatggtgaggagacgcgacgatgacggcggcagcgacggcaatgcaagagggaaagggaggagaggagatagggcgacgagagggatgatgggttgcgggggcgcggtgctgcgtgatgcggagcaacgggggctaacggaggagcagcgtcggcgggttcgcgagcgcgagctgccttgtggggagaaaagcgagtcgagggggaggaccgtgaggggatccctcagggaggggatgcatcgcaggcggaggggaggagcgcgtgcgatgggatccctcagcaccgtctga

SEQ ID NO: 1388 - DNA, 744 bp, Oryza sativa
  unsure (1)..(744): unsure at all n locations
  Clone ID: PAT_MRT4530_10125C.1
ccggccgggagctcctaaattcatggcgttggccgccgtcctctcccgagccgccgcgcgcctcctccgccctcccctacccctccgcacccgccatctctgcgccctcccctcctcctcctcccccgctccgtctgaggcggagatcctcgccgaaatcgatcccatcgtcgacctcgtcaaggacatcctccactccgccagatatggagatggtgcatttctaagtccagacgatcaaaaggctgtagtagaaaaggttcttgttcaccaccccacttctgaagataagattggctgtggggttgatgctattatggttggtaagcaccctgatttcaggaagtcaagatgcctctttattgttagaacaaacggtgagactgaagatttttcataccgcaagtgtatcaaggagtacatcaaacagaagtatcccagccaggcagacgattttatacagaatcatctcacccggcaatttactcgacgtcccaagtagaaatgccccttttttttcgtgatagtgtctttggcttataggcaaaatagaacccgtatgtctcagttagaacatgtaaacgaactcgtgtttcttaatgtcaagtgaaaatgttttgttaacaaaaaaaaaatgaagaacctcgaaccaattatctctcatgttttctctgcttnnnaaaaaannnnnnnnnnnnnnnnnnnnnnnnnnnnnnnnnnnnnnnnnnnnnnnnnnnnaaaaac

SEQ ID NO: 1389 - DNA, 981 bp, Oryza sativa
  Clone ID: PAT_MRT4530_101260C.1
atggagcacatcatgaacttcccgctcaaagtggattctccaggtgctgaaaatccgggtgtcctgccgatcatctgtcgacggaaagctgggaagagcaccttgattgagcatgactgtaacgatgaaagggtgtgtaaccacttctctcaaattgtgtgtttcagtgacaatgatcttaaagatgcatgcatggtgactcttagagattgtggtgcaatcaagcatcaaaaccatggcattggtggagaaagagtatttattgttatcgagcaaatcggagacatcgatgagggtgtatggagaagattgtactcagcttccaagagttgtgttccaaatggtagtaaaattattgtcgcaagccaatctgataagattgcgagctttggaacaacacaagctcttagagtagaattgtttactgaagaagcatactggtactttttcaaggtgtgcacagtcggaagcatggatgaacaggagcacccaaagctggcatcaatagccatggatatggccagggagttggatgggtgtttcatgggtgcaagcatctacagtgtacttctgaaagcaaatttcaacgctcggttttggaacatggctctggcaagcatcaaagaattcaagcaaacgaacctcctagtatacggcgcatatattgacaatccttggcagacgtctgaaccgacatatgttaggacggtaaacagaatttcctctgaataccttgtgattcttgacgactatcagacatgtcccatccaaatcacaaaccctgctcagagtgaagctgaagttcctgaggtgaatattcaagattttctctttgcgagtgttatacctcaaggaaaattcaaggttcttgcatggacatctcaccttccacctcactacaactacatgctcagctgtgaggtacagaggaaatatcgtatggtcgccaaaaagaagagatcgcaggaactttgcacctga

SEQ ID NO: 1390 - DNA, 159 bp, Oryza sativa
  Clone ID: PAT_MRT4530_101261C.1
atggcgccagcgggtgcagaggctggacggacggcaacggcgcggtgggtgcagaggccggtgaggcgctgcggccggccgttggcgtcgtggccggccgagaatcccgctggggctcgaagcgtggtgccacgtggcccaatcactgggcagggttag

SEQ ID NO: 1391 - DNA, 432 bp, Oryza sativa
  Clone ID: PAT_MRT4530_101262C.1
aaggtgtcacattcatctccatcaagcattaatactgtagatgcttatgcattctcctgtttctattctattcccataattgtttgcaaacaaaaaggggaaaccatagtcaatttttcctgtcacgtaaaaagaaaggctttacacgacatctatctcttctgagcaacctcttttggattcttaggagcacccttgcatactgtctacattgggttctttattatattatctcatttgagggacttttaggaacgttcagactatatttagtctattttggaatttactgtctcctttttattagggaggcggttaaggacttgagaagatagaggagagtgccatgcaccgatttccggaataacattcatcactcaaagccccatgccctcacgaggtttacaagcatcatcgacactatggacaccg

SEQ ID NO: 1392 - DNA, 5385 bp, Oryza sativa
  Clone ID: PAT_MRT4530_101263C.1
atggccgagccagcaaaggcgcgcgacctctccccaagtatgagcggtgacgatggggagccaaacccacgccgtcgagctcgtactccaccgccccctccacgccaaagtcctaggcgggaaaaggcgctcgagagggctgaaggatccacgacttcgacatccacaggaggtggagaagggcggcgagatggggagcgtcgtctcctcgtctacggcgacggcagcacgccccagggcgcgctccaagctgcaggcgcgctcctacgtcacccgcccgtcgcccatgacccggagtctccagcccaacgttggctggacgatgtggccaaattggtcatgactgcacggcagcgcctagatgctggtgggcggtcctccgccaccaaggcctctggtgctgctaccaccggctccgcgtcagcctttgtggcgagccttcggaatgtccgttggcccccaaggttccggcccaccatcgccgaaaaatatgacgggagcgtcaaccccgccgagtttctccaggtctacacgaccgggatcgaggccgccgggggtgacgacagggggggtgtgcggcacaaccgtatgctcgaaaagatcgcctccaaagagccccagactaccgcggagctttttcagctcgcggaccgagtggctcgtaaggaggaggcatggacctggaacccctccggttccggtgtggcagcttcagccgcccccggatccgctgctcagacagggcggcgtgacaggaggaggaagaagaggtcagcccataccgacgacgagggtcatgtcctcgccgtcgagggcgctccgcgggccacccgaaaggggaggcctgcgggagacaaaaagaaggaggccggcgctcccagcagggagcgcccgaccggcaagtggtgcaccgtccacaacacttcccttcacgacctcgcggactgccgtgcagtcaaaagtttggctgagcggacgaggaagtgggaggaggagaggaggcaggagcgccgagagggcaagtccccggcggttccttccggcaatcggcgaagtgaggccaagcagaaggcccccgctgaggacatcgatgacggcgatgatgacctaggtttccaagagcctggggccatcgttgccactgtcgatgggggagcgtgtgctcacgtttctcgccggagcctcaaggccatgaagcgagagcttctggccgcggcccctactcatgaggcgacgcgccgggcgcggtggtcggaggttgccctcaccttcgaccagaccgaccacccaccgtgcgttgcccggggaggacagatcgcaatggtggtttcccccactgtttgcaacgtgaagctggggcgtgtcctcattgatggaggagcagccctcaacatcctttcccccgcagcctttgacgccatcaaggccccggggatgatgctccggccgtcccagccgatcatcggtgtgacgccggggcacacttggccgctaggtcatatcgacctcccggtcaccttcggtggacccgccaacttccgcacggagcgggtgaactttgatgtcgcggacctcagtctgccctacaacgcggtcttggggaggcccgcgttggtaaagttcatggcggcggtccactacgcctacctccagatgaagatgccgggccccgatggccccatctctgtccatggcgacctcaaagtcgcgctcgcttgtatggagcagcgcgcggaccgcctcgccgtcgtgtccaagcccgagggtggcgacgagaggcttggcacatccgcccccgccgccccgaggcagcggatagtcacgtgcgatgaggtcccggaagacacgctcgtctctttcctgcgggcaaacgctgacgtcttcgcatggagaccggcggatatgcccggggtccccagggaggtgattgagcaccgtctcgccgtacggccgggcgcaaggccggtccggcagaaagtgcggcgccaggccccggaacgtcaagccttcatccgcgaggaggtggcgcgacttctggaggccggattcatccgcgaggtcatccatccggagtggctggcgaacccggtggtcattcccaaggcgaacggcaagcttcggatgtgcatcgactacaccgaccttaacaaggcatgtcctaaggatccttaccccctgcctcgcatagatcagattgtcgactccacagcgggccaaataggacgtaatgttgaggcttatgtcgatgacttggttgtaaagacgcgcaaccaagagaccttactctcggatctagcggaaacttttgagagtctccgctccgcccgcataaaactgaaccccgataagtgcgtgttcggtatacctgcgggcaagcttctcgggttcttggtctctgcccgaagcatcgaggccaaccccgagaagatacgagctatagagcggatgcgcccccccagcaagcttagggatgtgcaatgcgtcaccggttgcatggccgccctaagtcggttcatatcgaggctgggagagaaggcgctacccttatttaagctcctcaaacgctccgggccgtttacttggacggaggaagctgaacgtgccctcactcagttgaaggcgtatctcagctctcccccagttctggtcgccccggagccaaatgaacccttgctactctacttagcggcgaccccgcaagtggttagtgcggcgttggttgtggagtgcgatgaggacaatcctcattccgcgcacccccaccctgtgctggcttggcccgggagagagcagggaggagaggcccccgagccggacggtggcccaaggcccccgacgaccggagcaggccctctgcccgcttgtcagacggtgccaggtgcccccgacccccaggacggccccgaagccactgcgggaaggccgcacctatcgccctctgaccccgaggctaaccctgtgccgattcgacccgggagagagcagggagaagaggcccccgagccgaacggtggcctaaggcccctgacgaccggagttggccctttgcccgcttgtccgacgacgccaggagcccccgacccccaggacggccccgaggccactgtgggaaggccgcccctgtcgtcctccgatcccgaggtcgtcggcacagaagacgagtgcgccccgcgaggccgcttgggtgaagagcgccccagggatgcggcccctagcgaagaggatcggccccaccgaaaggtgcagcggcccgtctactttgttagtaaggccctccgggatgccaagacccgataccctcaggcccagaaaatgctttacgttattctgatggcctcgaggaaactgcgccattatttccaggcgcatcgggttacagtggttacgtcttaccccctcggccaaatcttgcataatcgagagggtactggacgggtggtgaaatgggcaatcgaactttctgagtttgatttgcactttgaaccacgccacgctatcaagagccaggccctcgccgactttgtggcagaatggaccccggctcccgagctcgtctcggtccccgaagccagctcgggcccctcgcagctgcctcacaccgcccactgggtgatgcagttcgacggctccctgtctcttcagggcgccggtgcgggggtcacgttgacctctccgagtggagacgtcctcagatacttggtccgcctcgactttcgagcgaccaataatatggcagagtacgagggactccttgccggactcagagtggcagctggactggggatccgccgcctcctggtgttaggcgactcccagctggtcgttaaccaagtctgtaaggagtaccggtgctctgacccgcagatggacgcctacgtgcgccaagtacggcgtatggagcaccattttgacgggattgagcttcggcacgtgcccagacgggataacatgatggccgacgagctctcacggctcgcgtcctcgcgagcccagaccccaccgggcgcctttgaagaaaggcttgcccagccgtcggcgcgacccgaccccttaggggagacggatgcgcctgaccggcccccgaggcccgtcggagtccaggcctcgggacccgaggggagtgctcccagctcccttagattgattgcttggatcgccgagatccaagcatacctcacagataagactctacccgaggaccgcgaagggagtgaacgcgtccatcgcatctccaaacgctacgtgctggtagaagggaccctctatcggcgcgcggctaatggaatcctcctgaagagcattcctcgggaacaaagcgttgtgcttcttgccgatatccatgaaggcgaatgcggagcccactccgcctcgcgcaccttggttggtaaagcttttcgccaaggtttctattggccgacagctctcaatgatgcgctcgacctggtccggcgatgtagagcgtgtcaattccacgccaagcaaatccatcagccggcccaggccctgcagaccataccactttcgtggccatttgctgtctggggactcgatatcctgggaccgtttaggcgggccccaggcgggtttgagtatctgtatgtcgcgatcgacaagttcactaagtggcccgaggcttatccggtcgtcaagatcgataagcactccgcacttaaattcattaagggcatcacggcccggtttggagtgcctaaccgtattattacggataatggcacccaattcactagtgaactcttcggcgactactgcgaagacatgggcatcaagctctacttcgcctcacctgcccaccccagaagcaatggccaagtggagcgcgctaatgcggaaatcctcaaaggccttaaaaccaagaccttcaacatactcaagaagcatggcgattcatggatcgaggagttgccagcggtgctctgggcaaaccgaactacaccaagccaagtaaccggggaaacgcctttcttcctcgtctacggcgcggaagcagttctcccatccgagctcaccctgaggtctcctcgagccaccatgtactgcgaggctgatcaagatcagcttcgcagagatgacctcgactacttggaagagcgaaggcggcgcgcggccctccgagccgcgcgctaccagcagagcctgcggcgctaccatcagcgtcacgtccgggcccgatcactctgcatcgacgacctcgtcctacgccgcgtccaaacgcgtgctggattgagcaagctttcaccaatgtgggagggtccgtatcgagtggtcggcgtcccctggccgggctccatacggctggccacgggcgacggcactgagctccctaacccgtggaacatcgaacaccttcgtcgcttctacccctga

SEQ ID NO: 1393 - DNA, 2756 bp, Oryza sativa
  Clone ID: PAT_MRT4530_101264C.1
atgttgtgtgaagaagggccaacgtgcagattgctgagctgacgcgtggtggacaagaatgaccgatttgtgaccagtctgacaccggtcatgtcgtcagcagacagccatgattccgcgtcgcgcctgctcccggcgaaagtggaggtagagattgggagcttagagtctcacccagggtccccggccgaaccggcaaaggggggcctgcgcggtctcccggtgaggagccccacgctccgtcatctggcgcgccagcttttcctgttcagcccaatggccgagccagcaaaggcgcgcgacctctccccgagtatgagcggtgacgacggggagccaaacccacgccgtcgagctcgtactccaccgccccctccacgccaaagtcctaggcgggaaaaggcgctcgagagggctgaaggatccgcgacttcgacatccacaggaggtgaagaagggcggcgagatggggagcgtcgtctcctcgtctaccgcgacggcagcacgccccagggcgcgctccaagctgcaggcgcgctcctacgtcacccgcccgtcgcccatgacccggagtctccagcccaacgttggctggacgatgtggccaaattggtcatgactgcaaggcagcgcctagatgctggtgggcggtcctccgccaccaaggcctctggtgctgctaccaccggctccgcgtcgtcaagacgaagggcacgacgagcggcagccgctgttcgccattcggccgccactcctacgtcgactccttcgacccgggaagatctgcgtggggggccggacgcccgcaccagcatcgagcgccggcgtaatgaccgacgtgctgcccacacaacggagggcgcttcctcgtccagagtgtcacctcaccacggacgcggggatcagccctccgtgcccccggttggtggtgtcggctgtagagcctttgtggcgagccttcggaatgtccgttggcccccaaggttccggcccaccatcgccgaaaaatatgatggagcgtcaaccccgccgagtttctccaggtctacacgaccgggatcgaggccgccgggggtgacgacagggtcatggcgaatttctttcccatggccctgaagggacaggcacggggttggctaatgaacttgccacccgcgtctgtccactcttgggaggatttgtgccaacagttcaccatgaacttccaaggcacatatccgcgccccggtgaggaagcggacttgcacgcagtacagcgaagggacgatgagtcacttcgatcgtacattcagcggttctgtcaagtccgcaacaccataccatgcatccctgcacacgcggtaatctacgcgttcagggagggcgtgcggcacaaccgcatgctcgaaaagatcgcctccaaggagccccagactaccgcggagctttttcagctcgcggactgagtggctcgcaaggaggaggcctggacttggaacccctccgattccggtgtggcagcttcggccgtccccgggtccgccgctcggtcagggcggcgggacaggaggaggaagaagaggtcggcccattccgacgacgagggtcatgtcctcgccgtcgaaggcgtttcgctggccacccgaaaggggaggcctgcgagcgacaaaaagaaggaagccgacgctccctgacctcggctacttggaagagcgaaggtggcgcgcggcccttcgagccgcgcgctaccagcagagcctgcgacgctaccatcagcgccacgtccgggcccgatcactctgcgtcgacgacctcgtcctacgccgtgtccaaacgcgtgctggactgagcaaactctcaccaatgtgggagggtccatatcgagtgatcggcgtcccccggccgggctccgttcggctggccacgggtgacggcacagagctgcctaacccgtggaacatcgaacaccttcgtcgcttctacccctacctcgccgtcgctgtcgtccgcaccgttgtcaccgcactcctcgtcggagttgaaggcaaacgcgagccgaggggccgctcattattgtcggtcggttttcccttgctgatacgcgcgatttgcgaccgccgggattctgcccgaagaaagagagagcagggaggagaggcccccgagccgaacggcggcccaaggcccccgacggccggagctggccctccgcctgcttgtccgatggtgccaggcgcccccgacccccaggacggccccgaggccactgtgggaaggccgcccctgtcgtcctccgaccccgaggtcatcggcacagaagacgagtgcgccccgcgaggccgcttgggtgaagagcgccccagggatgcggcccctagcgaagaggatcggccccaccgaaaggtgcagcggcccgtctactttgttagtgaggccctccgggatgccaagacccgataccctcaggcccagaaaatgctttacgctattctgataacttcgaggaagttgcgccattatttccaggcgcatcgggtcacggtggttacgtcttatcccctcggccaaatcttatataaccgagagggtactggacgggtggtgaaatgggcaatcgaactctctgaattcgatttgcgctttgaaccaagccacgcgatcaagagccaggccctcgccgactttgtggcggagtggaccccagctcccgagctcgtctccgcccccgaggccagctcgagcccatagcagctgcctcacaccgccctctgggtgat

SEQ ID NO: 1394 - DNA, 2037 bp, Oryza sativa
  Clone ID: PAT_MRT4530_101265C.1
atgccgggccccggtggccccatctctgtccatggcgacctcaaagtcgcgctcgcttgtatggagcagcgcgcggaccacttttccgccgcgtccaagcccgagggtggcgacgagaggcttggcacctccgtccccgccgccccgaggcagcggatgatcacatgcgacgaggtcccggaagacgcgctcgtctccttcctgcgggcaaacgctgacgtcttcgcatggagaccggcggatatgcccggggtccccagggaggtgattgagcaccgtctcgccgtgcggccgggcgcaaggccggtccggcagaaagtgcggcggcaggccccggaacgtcaagccttcatccgcgaggaggtggcgcgacctctggaggccggattcatccgcgaggtcatccatccggagtggctggcgaacccggtggtcgttcccaaggcgaacggcaagcttcggatgtgcatcgactacaccgaccttaacaaggcatgtcctaaggacccttaccccctgcctcgcatagatcagattgtcgactccaccgcgggccaaataggacgtaacgttgaggcttatgtcgatgacttggttgtaaagacgcgcaaccaagagaccttactctcggatcttgcggaaacttttgagagtctccgctccgcccgcataaaactgaaccccgataagtgcgtgttcggtgtacctgcgagcaagcttctcgggttcttggtctctgcccgaggcatcgaggccaaccccgagaagatacgagctatagagcggatgcgcccccccaacaaacttagggatgtgcaatgcgtcaccggttgcatggctgccctaagtcggttcatatcgaggctgggagagaaggcgctacccttattcaagctcctcaaacgctccgggccgtttacttggacggaggaagctgaacgtgccctcactcagttgaaggcgtatctcagctctcccccagttctggtcgccccggagccaaatgaacccttgctactctacttagcggcgaccccgcaagtggttagtgcggcgttggttgtggagcgcgatgaggacaatcctcattccgcgcatccccaccctgtgctagcttggcccgggagagagcagggaggagaggccaccgagccgaacggtggcccaaggcccccgacgaccggagctggctctctgcccgcttgtcagacggtgccaggtgcccccgacccccaggatggcccggcggccactgcgggaaggccgcacctatcgccctctgaccccgagcctaaccctgtgccgactcgacccgggagagagcagggagaagaggcccccgagccgaacggtggcctaaggcccctgaggaccggagttggccctttgcccgcttgtccgacgacgccaggagcccccgacccccaggacggccccgaggccactgtgggaaggccgcccctgtcgtcctccgaccccgaggtcgtcggcacagaagacgagtgcgccccgcgaggccgcttggacgaagagcgccccaaggatgcggcccctagcgaagaggatcggccccaccgaaaggtgcagcggcccgtctactttgttagtgaggccctccgggacgccaagacccgataccctcagacccagaagatgctttacgctatcctgatggcttcgaggaaactgcgccattatttccaagcgcatcgggtcacggtggttacgtcttaccccctcagccaaatcttgcataatcgagagggtactggacgggtggtaaaatgggcaatcgaactttctgagtttgatttgcactttgaaccacgccacgctatcaagagccaggccctcgccgattttgtggcagagtggaccccagctcccgagcccgtctcagtccccgaggccagctccgacccctcgcaattgcctcacaccgcctattgggtgatgcagtttgacggctccctgtctcttcagggcgccggtgctggggtcacgttgacctcgccgagcggagacgtcctcagatag

SEQ ID NO: 1395 - DNA, 678 bp, Oryza sativa
  Clone ID: PAT_MRT4530_101266C.1
atgccgctgcagtccactgccggaccagccaccccctcctcgctcctcctccctcctcctctcagccgtgtgaatgcccgtcgcagtccatcgttggaccagcgccgccgctaccgcgcctccaccgccggaccacctcaatcgctgcacgcctcctcgcgagtccccgccgcacgccaccgcatcgtgtgcccctgcaggcgccgtggtggttctccttccctaacccgtcgaagttcaccggagaagcccggccccttctctcaaactcgctcaccagagacagagaagatgaataaacgcgtggagaggaggaagaggaaatacatggttatgatgctaccttcaacgtgctgctgctggcctgatcttcccttggtgatgaacaacaagatacatgggagaatggctctgcaagccaacattgttgacaaggacagagaagatcaaggaggttgttcctacgaatacaaatcatgctcagacgctattaaatcagccactgattcacatattcacaaagcttattttacatgcgctataaactcccctataaaacttaccatgaggcatctatatcttgattccatatctctttttgcttttgtgaactatattcttcttgtgagcattcatttatccaattctcaagaagtcaaccaggctcctgttttttaa

SEQ ID NO: 1396 - DNA, 489 bp, Oryza sativa
  Clone ID: PAT_MRT4530_101267C.1
atggggaacgacggtgatacgggagcaagagtggcagtcgagaggtgcggcggtgggggaggtgcagcagcaacagattcggtgatggggaggcacggcggcggcggatccaacgacggggaaagcgacggcggcggatccagcggtggggagcgcggcggcggtggatccagctccccttgcgcgcagcaacagactgtggcgatgatgatgaggagctactaccgggctttggcgacatcgacggtggcggcaacgacgaacggcggcgcgtgggttgttactgttgataatccggcgatcctaggccgggccgtcagagatgagtcacttgtgagagtcctaactggccctaggctagcggagaccaacacctctgatggtcttctagtaacttgtccgtcagaggtgagggtttgggaccgtcacaggacagttaaggaggtgtggattcactttgtggatagatatgatgggcctgttcagatt

SEQ ID NO: 1397 - DNA, 6095 bp, Oryza sativa
  Clone ID: PAT_MRT4530_101268C.1
atggccgagccagcaaaggcgcacgacctctccccgagtatgagcggtgacgacggggagccaaacccacgccgtcgagctcgtactccaccgccccctccacgccaaagtcctaggcgggagaaggcgctcgagagggctgaaggatccgcgacttcgacatccacaggaggtggagaagggcggcgagatggggagcgtcgcctcctcgtctacggcgacggcagcacgccccagggcgcgctccaagctgcaggcgcgctcctacgtcacccgcctgtcgcccatgacccggagtctccagcccaacgttggctggacgatgtggccaaattggtcatgactgcaaggcagcgcctagatgctggtgggcggtcctccgccaccaaggcctctggtgctgctaccaccggctccgcgttgtcaagacgaagggcgcggcgagcggcagctgccgttcgccattcggccaccactccttcgtcgactccttcgacccgggaagatctgcgtggggggccggacgcccgcaccagcatcgagcggcggcgtaatgaccaacgtgctacccacgcaacggagggcgcttcctcgtccagagtgtcacctcaacacggacgcgggaatcagccctccgtgcccccggttggtggtgtcggctgtagagcctttgtggcgagtcttcggaatgtccgttggcccccaaggttccggcccaccatcgccgaaaaatatgacgggagcgtcaaccccgccgagtttctccaggtctacacgaccgggatcgaggccgccgggggtgacgacagggtcatggcgaatttctttcccatggccctgaaaggacaggcgcggggttggctaatgaacttgccacccgcatctgtccactcttgggaggatttgtgccaacagttcaccatgaactttcaaggcacatatccgcgcccaggtgaggaagcggacttgcacgcagtacagcgaagggatgatgagtcacttcgctcgtacattcagcggttctgtcaagtccgtaacaccataccatgcatccctgcacacgcggtgatttacgcgtttagggggggtgtgcggcacaaccgcatgctcgaaaagatcgcctccaaagagccccaggctaccgcggagctttttcagctcgcggaccgagtggctcgtaaggaggaggcatggacctggaacccctccggttccggtgtggcagcttcggccgcccccggatccgccgctcagacagggcggcatgataggaggaggaagaagaggtcagcccataccgacgacgagggtcatgtcctcgccgtcgagggcgctccgcgggccacccgaaaggggaggcctgcgggagacaaaaagaaggaggccggcgctcccagcagggagcgcccaaccggcaagtggtgcaccgtccacaacacttcccttcacgacctcgcggactgccgtgcagtcaaaagtttggctgagcggacgaggaagtgggaggaggagaggaggcaggagcgccgagagggcaagtccccggcggttccttccggcaatcggcgaagtgaggccaagcagaaggcccccgccgaggacatcgatgacggcgatgatgacctaggtttccaagagcctggggccaccattgccactgtcgatgggggagcgtgtgctcacgtttatcgccggagcctcaaggccatgaagcgagagcttctggccgcggcccctactcatgaggcgacgcgccaggcgcggtggtcggaggttgccctcactttcgaccagaccgaccacccaccgtgcgttgcccggggaggacagatcgcaatggtggtttcccccactgtttgcaacgtgaagctggggcgtgtcctcattgatggaggagcagccctcaacatcctttcccccgcagcctttgacgccatcaaggccccggggatgatgctccggccgtcccagccgatcattggtgtgacgccggggcacacttggccgctaggtcatatcgacctcccggtcaccttcggtggacccgccaacttccgcacggagcgggtgaacttcgatgtggcggacctcagtctgccctacaacgcggtcctggggaggcccgcgttggtgaagttcatggcggcggtccactacgcctacctccagatgaagatgccgggccccgatggccccatctctgtccatggcgacctcaaagtcgcgctcgcttgtatggagcagcgcgcggaccgcctcgccgtcgtgtccaagcccgagggtggcgacgagaggcttggcacatccgcccccgccgccccgaggcagcggatagtcacgtgcgatgaggtcccggtcaagaaggttgccctgggcgacggccccgtctctttcctgcgggcaaacgctgacgtcttcgcatggagaccggcggatatgcccggggtccccagggaggtgattgagcaccgtctcgccgtacggccgggcgcaaggccggtccggcagaaagtgcggcgccaggccccggaacgtcaagccttcatccgcgaggaggtggcgcgacttctggaggccggattcatccgcgaggtcatccatccggagtggctggcgaacccggtggtcgttcccaaggcgaacggcaagcttcggatgtgcatcgactacaccgaccttaacaaggcatgtcctaaggatccttaccccctgcctcgcatagatcagattgtcgactccacagcggggtgcgaccttttgtgttttctagatgcatactctggttaccatcagattcgcatggctagggaggatgaggaaaaaactgcgttcattacccccataggaacttattgttatacaacaatgcccttcgggttaaaaaatgcaggtcctacttttcaacgtactactcgaatttctttgggtagccaaataggacgtaatgttgaggcttatgtcgatgacttggttgtaaagacgcgcaaccaagagaccttactctcggatctagcggaaacttttgagagtctccgctccgcccgcataaaactgaaccccgataagtgcgtgttcgttatacctgcgggcaagcttctcgggtacttggtctctgcccgaggcatcgaggccaaccccgagaatatacgagctatagagcggatgcgccccccagcaagcttagggatgtgcaatgcgtcaccggttgcatggccgccctaagtcggttcatatcgaggctgggagggaaggcgctacccttatttaagctcctcaaacgctccgggccgtttacttggacggaggaagctgaacgtgccctcactcagttgaaggcgtatctcagctctcccccagttctggtcgccccggagccaaatgaacccttgctactctacttagcggcgaccccgcaagtggttagtgcggcgttggttgtggagcgcgatgaggacaatcctcattccgcgcacccccaccctgtgctggcttggcccgggagagagcagggaggagaggcccccgagccggacggtggcccaaggcccccgacgaccggagcaggccctctccccgcttgtcagacggtgccaggtgcccccgacccccaggacggccccgaggccactgcgggaaggccgcacctatcgccctctgaccccgaggctaaccctgtaccgattcgacccgggagagagcagggagaagaggcccccgagccgaacggtggcctaaggcccctgacgaccggagttggccctttgcccgcttgtccgacgacgccaggagcccccgacccccaggacggccccgaggccactgtgggaaggccgcccctgtcgtcctccgaccccgaggtcgtcggcacagaagacgagtgcgccccgcgaggccgcttgggtgaagagcgccccagggatgcagcccctagcgaagaggatcggccccaccgaaaggtgcagcggcccgtctactttgttagtgaggccctccgggatgccaagacccgataccctcaggcccagaaaatgctttacgctattctgatggcctcgaggaaactgcgccattatttccaggcgcatcgggttacggtggttacgtcttaccccctcggccaaatcttgcataatcgagagggtactggacgggtggtgaaatgggcaatcgaactttctgagtttgatttgcactttgaaccacgcaacgctatcaagagccaagccctcgccgactttgtggcagaatggaccccggctcccgagctcgtctcggtccccgaagcaaactcgggcccctcgcagctgcctcacaccgcccactgggtgatgcagttcgacggctccctgtctcttcagggcgtcggtgcgggggtcacgttgacctctccgagtggagacgtcctcagatacttggtccgcctcgactttcgagtgaccaataatatggcagagtacgagggactccttgccggactcagagtggcagctggactggggatccgccgcctcctggtgttaggcgactcccagctggtcgttaaccaagtctgtaaggagtaccggtgctctgacccgcagatggacgcctacgtgcgccaagtacggcgtatggagcaccattttgacgggattgagcttcggcacgtgcccagacgggataacatgatggccgacgaactctcacggctcgcgtcctcacgagcccagaccccaccgggcgcctttgaagaaaggcttgcccagccgtcggcgcgacccgaccccttaggggagacggatgcgcctgaccggcccccgaggcccgtcggagtccaggcctcgggacccgaggggagtgctcccagctcccttagattgattgcttggatcgccgagatccaagcatacctcacagataagactctacccgaggaccgcgaagggagtgaacgcgtccatcgcatctccaaacgctacgtgctggtagaagggaccctctatcggcgcgcggctaatggaatcctcctgaagtgcattcctcgggaaggcattgtgcttcttgccaatatccatgaaggcgaatgcggagcccactccgcctcgcgcaccttggttggtaaagcttttcgccaaggtttctattggtcgacagctctcaatgatgcggtcgacctggtccggcgatgtagagcgtgtcaattccacgccaagcaaatccatcagccggcctaggccctgcagaccataccactttcgtggccatttgctgtctggggactcgatatcctgggaccgtttaggcgggccccgggcgggtttgagtatctgtatgtcgcgatcgacaagttcactaagtggcccgaggcttatctggtcgtcaagatcgataagcactccgcacttaaattcattaagggcatcacggcccggtttggagtgcctaaccgtattattacggataatggcacccaattcactagtgaactcttcggcgactactgcgaagacatgggcatcaagctctgcttcgcctcacctgcccaccccagaagcaatggccaagtggagcgcgctaatgcggaaatcctcaaaggccttaaaaccaagaccttcaacatactcaagaagcatggcgattcatggatcgaggagttgccagcagtgctctgggcaaaccgaactacaccaagccaagcaaccggggaaacgcctttcttcctcgtctacggcgcggaagcagttctcccatccgagctcaccctgaggtctcctcgggccaccatgtactgcgaggctgatcaagatcagcttcgcagagatgacctcgactacttggaagagcgaaggcggcgcgcggccctccgagccgcgcgctaccagcagagcctgcggcgctaccatcagcgtcacgtccgggcccgatcactctgcgtcgacgacctcgtcctacgccgcgtccaaacgcgtgctggattgagcaagctttcaccaatgtaggagggtccgtatcgagtggtcggcgtcccccggccgggctccatacggctggccacgggcgacggcactgagctgcctaacccgtggaacattgaacaccttcgtcgcttctacccc

SEQ ID NO: 1398 - DNA, 444 bp, Oryza sativa
  Clone ID: PAT_MRT4530_101269C.1
atgccgctgcagtccactgccggaccagccaccccctcctcgctcctcctccctcctcctctcagccgtgtgaatgcccgtcgcagtccatcgttggaccagcgccgccgctaccgcgcctccaccgccggaccacctcaatcgctgcgcgcctcctcgcgccgtggtggttccccttccctaacccgtcgaagttcaccggagaagcccggccccttctctcaaactcgctcaccggagacagagaagatgaataagcgcgtggagaggagaggaggaagagggatacatgggagaatggctctgccagccaacattgttgacaaggacagggaagatcaaggaggttgttcctacgaatacaaatcatgctcagacgctattaaatcagccactgattcacatattcacaaagcttattttacatgggtacatactctctag

SEQ ID NO: 1399 - DNA, 458 bp, Oryza sativa
  unsure (1)..(458): unsure at all n locations
  Clone ID: PAT_MRT4530_10126C.1
cggacgcgtgggtttgctgttgtgcacaaacaagtctacgggattgttctttattggtagttgtctaaaggcaatgctaattctttttgaggcattctttgttaaccatgtaacttcaaaagtagtatcaagcatgcaagcttgctttgtctgacaatattagggggacttgaataggatgcctgcctcgtagaaagttgtcgattcactattaaacattggatagcactaggatctgttttgttcagcaatctgttgctggggacatgttgatgtgtttattttgtttaatgttacaaagaaatgtttgtaggcatatgtattgcattcatcatttgatagcatcaattaacatccttgatttctttctattgtagtttactccccagagaggggggagatttgagattgnttttgtttcaccaactggagaagagattaaaaacaagagacagctg

SEQ ID NO: 1400 - DNA, 5892 bp, Oryza sativa
  Clone ID: PAT_MRT4530_101270C.1
atggctgagcaagcaaaggcgcacgacctctctccgagtgtgagtggcgacgacggggagccgaacccacgccgtcgagctcgtactccaccgccccctccacgccaaagtcctaagcggggggaggcgctcgagagggtcgaaagatccgcgacttcaccgatcgcgggcgatggaaaagaacggcgagatggggagcgtcgcctcctcgtctacggcgacggcagcacgccccagggcgcgctccaagctacgggcgcgctcttacgccacccgcctgtcgtccctgacccggagtctccagcccaacgatggctggacgacgtggccaaattggtcatgacggcgcggcagcgcctagatgctggtgggcggtcctccgccaccaaggcctctggtgctgctaccaccggctccgcgtcgtcaagacggagggcacgacgagcggcagccgctgttcgccgttcggccgtcactccttcgtcgactccttcgacccgggaagatctgcgtggggagcaggacgcccgcaccagcatcgagcgccggcgtaatgaccgaagtgctgcccacgcaacggagggcgcttcctcgtccagagtgtcacctcgacacggacgtgggaatcagccctccgtgcccccggttggtggtgtcggctgtagagcctttgtggcgagtcttcggaatgtccgttggcccccaaggttccggcccaccatcgccgaaaaatatgacggcagcatcaaccccgccgagtttctccaggtctacacgaccgggattgaggccgccgggggtgacgacagggtcatggcgaatttctttcccatggccctgaaggggcaggcgcggggttggctaatgaacttgccacctgcatctgtccactcttgggaggatttgtgccaacagttcaccatgaacttccaaggcacatatccgcgccccggtgaggaagcggacttgcacgcagtacagcgaagggacgatgagtcacttcgatcgtacattcagcggttctgtcaagtccgcaataccataccatgcatccctgcacacgcggtaatctacgcgttcagggggggcgtgcggcacaaccgcatgctcgaaaagatcgcctccaaagagccccagactaccgcggagctttttcagctcgcggaccgagtggctcgtaaggaggaggcatggacctggaacccctccggttccggagtggcagcttcggccgcccccggatccgccgctcagacagggcggcgtgacaggaggaggaagaagaggtcagtccattccgacgacgagggtcatgtcctcgccgtcgagggcgcttcgcgggccacccaaaaggggaggccagcgagcgacaaaaagaaaaaggccggcgctcccagcagggagcgcccagccggcaagtggtgcaccgtccacaacacttcccttcacgacctcgcggactgccgtgcagtcaaaagtttggctgagcggacgaggaagtgggaggaagagaggaggcaggagcgccgagagggcaagtccccggcggttccttccggcaatcggcgaagtgaggccaagaagaaggcccccgccgaggacatcgacgacggcgatgatgacctaggtttccaagagcctggggccaccattgccactgtcgatggaggagcgtgtgctcacatttctcgccggagcctcaaggccatgaagcgagagcttctggccgcggcccctactcatgaggcgacgcgccgggcgcggtggtcggaggttgccctaactttcgaccagaccgaccacccaccgtgcgttgcccggggagggcagattgcgatggtggtttctcccaccgtttgcaacgtgaagttggggcgtgtcctcattgatggaggagcagccctcaacatcctttcccccgcagcctttgatgccatcaaggccccggggatgatgctccggccgtcccagccaatcatcggtgtgacgccggggcacacttggccgctaggtcatatcgacctcccggtcaccttcggtggacccgccaatttccgcacggagcgagtgaacttcgatgtggcggacctcagtctgccctacaacgcggtcctggggaggcccgcgttggtgaagttcatggcggcggtccactacgcctacctccagatgaagatgccgggccccgatggccccatctctgtccatggcgacctcaaagtcgcgctcgcttgtatggagcagcgcgcggaccgcctcgccgtcgtgtccaagcccgagggtggcgacgagaggcttggcacatccgcccccgccgccccgaggcagcggatagtcacgtgcgatgaggtcccagtcaaggaggccggattcatccgcgaggtcatccatccggagtggctggcgaacccggtggtcgttcccaaggcgaacggcaagcttcgaatgtgcatcgactacaccgaccttaacaaggcatgtcctaaggatccttaccccctgcctcgcatagatcagattgtcgactccacagcggggtgcgaccttttgtgttttctagatgcatactctggttatcatcaaattcgcatggctagggaggatgaggaaaaaactgcgttcattacccccataggaacttattgttatacgacaatgcccttcgggttaaagaatgcaggtcctacttttcaacgtactactcgaatttctttgggtagccaattaggacgtaatgttgaggcttatgtcgatgacttggttgtaaagacgcgcaaccaggaaacgttactttcagatctagcggaaacttttgagagcctccgctccgcccgcataaaactgaaccccgataagtgcgtgttcggtgtacctacgggcaagcttctcgggttcttggtctctgcccgaggcatcgaggccaaccccgagaagatacgagctatagagcggatgcgcccccccagcaagcttagggatgtgcaatgcgtcaccggttgcatggtcgccctaagtcggttcatatcgaggctgggagagaaggcgttacccttatttaagctcctcaaacgctccgggccgtttacttggacggaggaggctgaacgtgccctcactcagttgaaggtgtatctcagctctcccccagttctggtcgccccagagccaaatgaacccttgctactctacttagcggcgaccccgcaagtggttagtgcggcgttggtcgtggaacgcgatgaggacaatcctcattccgcgcacccccaccttgtgccgacttggcccgggagagagcagggaggagaggcccccgagccgaacggtggcccaaggcccccgacgaccggagatggccctctgcccgcttgtcagacggtgctaggagcccccgacccccaggaaggccccgaggccactgcgggaaggccgcacctatcgccctctgaccccgaggctaaccctgtgccgatttggcccgggagagagcagggaggagaggcccccgagcagaacggtggcccaaggctcccgacgaccggagatggccctctgcccgcttgtccgacgacgccaggggcccccgacccccaggacggccccgaagccactgtgggaaggccgcccccgtcgtcctccgaccccgaggtcgtcggcacagaagacgagtgcgccccgcgaggccgctcgggtgaagagcgccccagggatgcggcccctagcgaaaaggatcggccccaccgaaaggtgcagcggcccgtctactttgttagtgaggccctccgggatgccaagacccgataccctcaggcccagaaaatgctttacgctgttctgatggcctcgaggaaactgcgccattatttccaggcgcatcgggtcactgtggttacgtcttaccccctcggtcaaatcttgcataatcgagagggtactggacgggtggtgaaatgggcaatcgaactttctgagtttgatttgcactttgaaccacgccacgctatcaagagccaggccctcgccgactttgtggcagaatggaccccggctcccgagctcgtctcggtccccgaaaccggctcgggtccctcgcagctgcctcacaccgcccactgggtgatgcagttcgacggctccctgtctcttcagggcgccggtgcgggggtcacgttgacctctccgagtggagacgtcctcaaatacttggtccgcctcgactttcgagcgaccaataatatggcagagtacgagggactccttgccggactcagagtggcagctggactggggatccgccgcctcctggtgttaggcgattcccagctggtcgttaaccaagtctgtaaggagtaccggtgctctgactcgcagatggacgcctacgtgcgccaagtacggcgtatggagcgccattttgacgggattgagcttcggcacgttcccagacgggataacatgatggccgacgagctctcacggctcgcgtcctcgcgagcccagaccccaccgggcgcctttgaagaaaggcttgcccagccgtcggcgcgacccgaccccttaggggagacggatgcgcctaaccggcccccgaggcccgtcggagtccaggcctcgggacccgaggggagtgctcccagctcccttagattgattgcttggatcgccgagatccaagcatacctcacagataagactctacccgaggaccgcgaagggagtgaacgcgtccatcgcatctccaaacgctacgtgctggtagaagggaccctctatcggcgcgcggctaatggaatcctcctgaagtgcactcctcgggaacaaggcgttgtgcttcttgccgatatccatgaaggcgaatgcggagcacactccgcctcgcgcaccttggttggtaaagcttttcgccaaggtttctattggccgacagctctcaatgatgcggtcgacctggtccaccgatgtagagcgtgtcaattccacgccaagcaaatccatcagccggcccaggccctgcagaccataccactttcgtggccatttgctgtctggggactcgatatcctgggaccgtttaggcgggccccgggcgggtttgagtatctgtatgtcgcgatcgacaagttcactaagtggcccgaggcttatccggtcgtcaagatcgataagcactccgcacttaaattcattaagggcatcacggcccggtttggagtgcctaaccgtattattacggataatggcacccaattcactagtgaactcttcggcgactactgcgaagacatgggcatcaagctctgcttcgcctcacctgcccaccccagaagcaatggccaagtggagcgcgccaatgcagaaatcctcaaaggccttaaaaccaagaccttcaatattctcaagaaacacggcgattcatggatcgaggagttgccagcggtgctctgggcaaaccgaactacaccaagccgagcaaccggggaaacgcctttcttcctcgtctacggcacggaagcggttctcccatccgagctcaccctgaggtctcctcgggccaccatgtactgcgaggctaatcaagatcagcttcgcagagatgacctcgactacttggaagagcgaaggcggcgcgaggccctccgagccgcgcgctaccagcagagcctgcggcgctaccatcagcgtcacgtccgggcccgatcactctgcgtcgacgacctcgtcctacgccgcgtccaaacgcgtgctggattgagcaggctctcaccaatgtgggagggtccgtatcgagtggtcggcgtcccccggccgggctccatacggctggccacgggcgacggcactgagctgcctaacccgtggaacatcgaacaccttcgtcgcttctacccctga

SEQ ID NO: 1401 - DNA, 1028 bp, Oryza sativa
  unsure (1)..(1028): unsure at all n locations
  Clone ID: PAT_MRT4530_101271C.1
tcagccgtgtgaatgcccgtcgcagtccatcgttggaccagcgccgccgctaccgcgcctccaccgccggaccacctcaatcgctgcgcgcctcctcgtgagtccccgccgcacgccaccgcatcgtgtgcccctgcaggcgccgtggtggttccccttccctaacccgtcgaagttcaccggagaagcccggcccctcttcggccccagggatctcatgcctgttgtgaatgtggttgtctgcatcggttgtgatccgttcacggactggcttcttggtcctttctgaactcgacggagccggccgtggccagagccgatgttgtccccagtcgccgccgaagctgaggtcgtccccttccgccgccgcactccaccactgcccccgccggagccgaggtctgccagagccgtgctcttccccatccgccgctgccggagccgatagcgtaatgttaatcatattttcgcatattgtgtgaaatattttgttgtataaattaatgtatggagtcaggagcaatatgctctagaaatacatggttatgatgctaccttcaacgtgctgctgctggcctgatcttcccttggtgatgaacaacaagatacatgggagaatggctctgcaagccaacattgttgacaaggacaggtaaatcagattcactatgttgcagcttcaatccaaaaatattatattgcacacacaattcacatatggtaaatcagattcccttgccgccgccgaactccaccgctgccacaggttttngccccggaggtgttcgactgaatgccactcaaccaatacggtttctatttattcctaaccattgcctcatatattttattgttcatgggtctatctatctccttacaatggagggatacatcgttgggctaggactaacagcttgcagcttgttcaccattcagctgtaagaaaatattgtacatggtttatccagttgacgatgatacatgttgggttggttttcatactactttaaatgttgctctattaacct

SEQ ID NO: 1402 - DNA, 303 bp, Oryza sativa
  Clone ID: PAT_MRT4530_101272C.1
atggatataccagatataccagttgtttatgaagcttcatgggttacaaaatgttgtatgatttggaatattcctatctacactgtacacaactgctttataactaatgctttgaatgcaatgaaaattccagcattctacacagctctgatttatgataacctgattcggtattcttcaatgaaacattctatgactgtgattgatagtggttatggtacaaagatactggatatttgcttgaaagacaaggatgagacccaccactggataagcgaagaagaagcaaaagggagtgtgtga

SEQ ID NO: 1403 - DNA, 1398 bp, Oryza sativa
  unsure (1)..(1398): unsure at all n locations
  Clone ID: PAT_MRT4530_101273C.1
ccggccggggccgcaccaatctccgccccctcctccactcctcgcatcctccctcctctcatctcatccacgcgaatccccgccgcctcactcgctccacccgattccccgctactgccagaccagccgccccctcctccctcctcctcagccgcgcgaggaatccccgccgcctcgctcgctcctgattccccaatgccgctgcagtccactgccggaccagccaccccctcctcgctcctcctccctcctcctctcagccgtgtgaatgcccgtcgcagtccatcgttggaccagcgccgccgctaccgcgcctccaccgccggaccacctcaatcgctgcacgcctcctcgcgagtccccgccgcacgccaccgcatcgtgtgcccctgcaggcgccatggtggttctccttccctaacccgtcgaagttcaccggagaagcccggccccttctctcaaactcgctcaccagagacagagaagatgaataaacgtgtggagaggaggaagagggatagcaggagagagatggtgcagtccaccgctgccactgacggagccggccgtggctggagccgatgttgtccccagtcgccgccgaagctgaggtcgtccccttccaccgccgcactccaccattgcccccgccagagccgaggtctgccagagccgtgctcttccccatccgccgctgccggagccgatagcgtaatgttaatcatattttcgcatattgtgtgaaatattttgttgtataaattaatgtatggagtcaggagcaatatgctctagaaatacatggttatgatgctaccttcaacgtgctgctgctggcctgatcttcccttggtgatgaacaacaagatacatgggagaatggctctgcaagccaacattgttgacaaggacaggtaaatcagattcactatgttgcagcttcaatccaaaaatattatattgcacacacaattcacatatggtaaatcagattcccttgccgccgccgaactccaccgctgccacaggttttgcccggaggtgttcgactgaatgccactcaaccaatacggtttctatttattcctaaccattgcctcatatattttattgttcatgggtctatctatctccttacaatggagggatacatcgttgggctaggactaacagcttgctgcttgttcccattcagctagaggatccaagggagttgttcctacgaatacaaatcatgctcagacgctattanatcagccactgattcacatattcacaaagcttattttacatggagnatgatgggtgtgtgaattgagaatccttaaantgtcatcggttcagcgctataaactccctataaaactaccatgaggcatctatatcttgattccatat

SEQ ID NO: 1404 - DNA, 2524 bp, Oryza sativa
  Clone ID: PAT_MRT4530_101274C.1
caggaaggaaacggccgcgtttgctttgctgctccccctaactccctgcagtttaagcccctccaaaacggcgctttcctgctcctttttcttcttgtttcttctccttctcctcgtcggcatcctggtcatcgtcctccttttgctttggagactcctccccctttccttgttgtctctcttgcgggatctctacgtcagagctctcgcacctctctcttaagcttttcttctctggccgatccttgaagcaagacgccggtccatggtcggataaggatttcagactgctgccctggtgccgcgatcctacaagcttgtgtgagttatctttcagtggcattccaaagaagcagaggaagaaagaagcaatcaagaagagcgcgcgcacttgatccatcgtcctatcggcaggcaaggctgatcgccgatagggatggagcagctccggcaactcggcgaggcggtgggtagcatcaacgcgctcatggcgttcgaggacgacctccacatcaacccgcggcagtgccgcctcctcgccgacgcctgcgcgcgcgcgctcgccgccgtcacggggcaggttcgcgcccagctccgcttcgacgagcgcggcgccaagtggcgcgccatcgaggcgccgctccgcgagctccaccgcgccttccgcgacgccgaggcgtacgtcaggcagtgcctggacccccgcggcagctggtgggcgcgcgccgcggccatggcgcacggcaccgagtgcgtggagcagcacctccacaatgtcctgtggtgcgtcgccgtcgcgctcgaggccatcgacgccgccggcgagatcgccggctccgacccggacgagctcgccagggggcggctggtgctcgccaggaagtacgacagggacatgctcgatcccaagctgttcgagcacgcgttcggcaagctatatctggtctcccaagagctcgttgcaaggatggacatggcgtggaaggaggacagatgggtgatatcgcaaatgttcgacgaaatgaaaggccctgcggcgtcgaaacctctgagcaaaaacgagcaccgcctcgccgagctcctcgccgcggcgatggggaagctgcacccggcatctgtccttcttggcagcgactacagcgtccggaggcggctcggcggccggctcaaggaggtgcattggatgggggagagctttgcgatgaagcatttcatcggggacaccgatgccgccggcgccgaggtcgcgctcctgtgttcggtggcgcacccgaacgtcgcgcacgccgcgtactgcttccacgacgaggagaagaaagagtacttcgtggtcatggaccagctcatggccaaggacctcgggagctacgtcaaggaggtgagctgcccgcggcggcggatcccgttcccgctcgtcgtcgccgtcgacattatgctgcagatcgcgcgcgggatggagtatctgcacgcgaagaggataaaccacggcgagctgaacccttccaacgtgctcgtcaagccgcgccaacccgatggcggctacgtgcatgtcaaggtcgccggatatgggcagccagctggcatcacagccggcggcgcaaaagcttccgccaatggcaacgccaacggcaacgacaactcctgcatctggtacgcgccggaggtgctcaggtccgacggcgtcgcggacgccgcggcggcggggaggtgcaccgagaaggccgacgtgtacagcttcgccatgatctgcttcgagctgctgaccggcaaggtgccgttcgaggacaaccacctgcagggcgacaagacgagcaagaacatctgcgccggcgagcggccgctgttcccgttccaggcgcccaagtacctcaccgcgctgacgaagcggtgctggcacgccgacccggcgcagcggctggcgttcgcctccatctgccgcgtcctccggtacgtcaagcggttcctgatcctgaacccggagcagcagcagcagcagcagcagggccagaccgacgacgcgcccaagccggccgtcgactacctcgacatcgaggcgcagctgctgaagaagctcccggcgtggcagcgtggcggcgaggcgccgcgcgtcgccgacgtgccgttccagatgttcgcgtacagggtcatggagagggagaaggccgccggcgccgtgcacgtcgccaaggacagggcctcggattcgggcagcgacgggaactcgctgtacggcgacgagaacgggttcggtgcaatgtcgccggagcacaccttctccgccgtgtcgaacggcaccctgcggtcgcggccggccagcagcgacggcaggttgccgacggccaagaaggcggacggcaaggcgcccaggcaagcagggccacagccgaaggtgaaacccgtgaacacggcggcgaggactccgcactcggcaaggcgggcgctcggcgtgaagcccgacgatcacctccagaccaacggcgctcccaccgcccgccggaggacgcccgagatggcctcagaatag

SEQ ID NO: 1405 - DNA, 606 bp, Oryza sativa
  Clone ID: PAT_MRT4530_101275C.1
ccggccgggctcgacgcgcccggtcggatctaattaatttacctcctccacctcctcctccttcccccgatcggatcgcgccggctcctcctcctcggccgcaggcaccgacgccgcgtataggatgagatggtcgcactctgataccttgctctttacctcggagactgtgaacgaggtacaccctgacacagctctgcgacccagtctcagacgctgcgcttggtggctgcctcgccgaggagcctgacagcaaggtcgcttgggagacctgcaccaagacaaacatggtgatggtctttgatgagatcaccaccgaggctaacgctgactatgagaagattgtcgggtagacgtgcccgaacatcggactggtggcgatcgtgacgcccccctcgatgctgaccactggaaggtgcttgcgcagatcgaatcatagacccctgacattggacagggtgtgcacgctcacttcaccaggtgccctgaggtatattggagatgttgaccacgcacgcatgattggatatgcagctgtcgagacccctgaggtgatgcccctcaggcatggccttgctaccaagcttggcgctcgtcttacggagg

SEQ ID NO: 1406 - DNA, 299 bp, Oryza sativa
  unsure (1)..(299): unsure at all n locations
  Clone ID: PAT_MRT4530_101276C.1
ccagntttantctagcggcaccgagttgnctantttcttgtgttccaggacatgtcagtacttgccgtgtcatttancagttgtgcatcaaggagtactagtaatncgtaacatgggtgaactagtaaatcttcnctttttttcttttcatgtttacagcgagttgagantcggttttggnatgattgntctcncatattattgtactgcgagattcggctttggtnatatcattatagtnattntancttcgcncgatntaaacaaaaaaaaaaaaaaaaaaaaaaaaaaaaaaaaaa

SEQ ID NO: 1407 - DNA, 1579 bp, Oryza sativa
  Clone ID: PAT_MRT4530_101277C.1
ctagcataggggggtgaggctttttttttttctttgcagttccaaattgtcttcagctaatatattgatgattcaaacagatgctaacgatgcaacttagatacaagagacgttcataatccataacaactccaactacaacactgaaccatcaaatatagctgattctggtcaatcttagccaaaggcgtttggacattactaagagcgacgtagcaaagagacaatcctggatacaagaccatataactcatttcgggttcctgagcacaatgatgaccgaatccccacgtaggaacatcttgctaatgaacctgtccttgttcactggaagagccttcttcttgcctttaccagtctttggtacctcagtccacatctccctaacattctcaagaaccatgttgcaatggcgatcaaatgccctcacacgaccaagcaacttcttgttgttccggcaattgataagcacctgggtgttgttcttcacgctcatcatcagcacggacagcggccccgtactgaattcctcctcctccttcttcccctgagtggcttcctccgccatcggcagcgaaggcgggcgggcggccggcgagcctggaggcgggagaggcctctggatctggagctcaggagcggagacgatgtcgacgacggcgagtggcggcggcagcgacagcaggtcgttcgacgtcgtcttcttcttcttcttcccgccgccgccgccttctcggcgccgccgcgactcgatgatgtcgagcaggagcgcgtcgatctcccgccccagcttccacgcctcgtaggtggcgcggatgtggaggaggccggcgagcggcacgccgacgaggcgggtggagcggaacagaatcgcctgcatggcctgcagcttgtggaacaccctggcgccggtggcgtcgtcgtcgtcggcggagatgccgaagctggccctggcgatgatctcggcggcgttccggaccacgcccttctcgacgtcgacgcagctccgccccgacgccaccatgtcgccccactcgcccagcatcttcgccgtcgtctcctccatcacgccgatcatgtcgttgaggttggtggcggagaaggccggggcgatgatgtggcggtggcgagcccactcgtcgccctccgccatgacgaggcccctcccgaacatgggcatgcggtcgcggcggaacacgtcgggcttgccccagagcttgccgagggcgccggcggtggcggccttgaggaactcagggtcggcgacgtacaggaacggctccgtgccgagccagtagacgaacaccttgccgaacgcccgccgccaccgcgcgaagtaggggaacacggcggcgtggatgtcgccgcccttggtgttggattcgtcggtgtcgttgttggaggcgagcgaggaggcgatctcgcggaggttcccaagcgggaaggaaggggtcgggccgcggaagccggcgttgcggaggcggcgcgcggtggccgccggcgagaggtataaggtggagaggaagaagacggcgaggagggcagctgcggccgccaaagcctgcaccactagctccat

SEQ ID NO: 1408 - DNA, 2919 bp, Oryza sativa
  Clone ID: PAT_MRT4530_101278C.1
atggctgcagttggagttggatccccggtaaagtacaacaacaatgtggcggtgcagttcgtgaatgcgtgggagatcgaattcatcgtggtttccagcttcctcctgcaggtagccgccctgttcttggccggctaccggcggcgcagcaactcagctgtggtgaagtcgatcgtgtggatctcgtacctgctggccgactccgccgccacgtacggcctcggccacctctcggtgaactcacggccgccggagcggcagcagctggtggcgttctgggcgccgttcctgctgctgcacctcggtggcccggactccatcaccgcctactccctcgaggacaaccagctctggaagcgaattctccagaaggacttcttcacgcaggtcctcggcgctgcatacgtcctctacaaaacattccccgccggcagcggtcttctgctcccggcggcgtgggtgatattcgccatcggcgttgccaagtacgcggagaggatatgggcgctctacaacgcaaacatgagcaacatccggagcgctttggagaacgacgacaacagcgacgacgagaaacaagaggagcctcctgaagtgcccgtcattattagatatcgtcgagctcccgaagatctcctgctttatgctcactcccagtttgaggtatgcaagagcgccttggtggactcctcatcggcgaaggcaaagaatatatcttatctacgcaggacaatattttctgatgtatgggagtgggagaagagatggacggtattccagatggaggtgtctctgctgtacgacatcatgtacaccaaggctggtgtcatccacacctggtacggctactgcctccgtgtcttctcgccgcttgccaccgccgccgccttgctgctctttcatctcagtcgcagcagcacaagtagcgtgggcgccacctccatcgctgccatgaattctcctccggtgcttgttgacgtcgccatcacctacgcattgctggtgggtgccatcctgctagacatggtgtcgctgctgtcggcagccggatcgagctgggcgttcacctacctggtccttggcatgccgagacgacgacatgggtggctgtaccgcgcagccgtgcacagtgggatgtggcttcaccgctggctggagtacctccgcgagctcatcaacgcgcatgatagaaggaggtggtccggtgcgattggacagtacaacgtactgcagttttgtactgcaactagtgagaagaggaactataccaccacaacagaagagattcctgaaggtgtcatgaaattggtctttgaggagctgacaagagtgattttgagaactaatatggaggggaatagtgggactggtaataaggacatgagtaaggaggggattgggttggctaagaaagatctgactaacaatccctcggatcaaatggaggggattggatctgacctgggtgatcattcttcacaccatgtgaagtggattgggacaagtaataaggacctgactaataagtcttcggaccatgtcgaggggaatgagtctgatctgaatgataattcttcgggccatggggaagggattggatctggtaataagcacctaagtaataattttttgaaccacgtggaggggattgggtttgacctgaatgataattcttcggaccatgaggaagggattggctctggtaagaaggacatgatgaataagtctttggaccgcgtggagggtatttcgtttgatctgagagataattattcgagagatgagacctttgggtcaggtaggaaggacacgagtaataagtctttggaccatgtggaggggattgagcctgatctgagagataattcttcgggcgatgagacctttgcgtcttatggggaggacatgagtaataagtcttcggaccatgaggaaggaattaggtctggtaataagtcttcggaccagattaagaatgagtatgtcactgtagagattactcagaagttgcgacgtggtgttcgccgccaaacacccaaagtgagcaaaccttcagcagaactaacaaagctagagggtgcggccacagactcggttggtttaatcaaggcagaaaggggccagctcgcactgcgtaatctgatggccaagaaggaaggtttggtgatctcaattggtgatctcaaacggtacctccgcgacgagatccaggagggcatcctcatctggcacatcgctacagacgtcttcctccgcacatctgagtccgatgagccggcggccatgaaacaacaacatgactctgatcatcagaccgaccagcgtgtggaagcaattaagcttctatccaactacatgatattcctcatggtggaacgcccatcaatggtaccaggcctcgcccttggcaagctgtacagacaaacttgcagggcactgtcgaaggagcttgcccccggcgtcaatggcgatgctaacaaacttgcagaaattctggccacgaagaagagggacaacccagtgttgcagcaggatgggaagctagcccttcgcggtaatgccctgcggtatgcaaccaagctagcactcatgcttgccgacctcaacgaaaagtttgcacacgaatccacgaccctgaatggcaagccgacgtctatcccggaaaagaaaagggatgacgacttggtgcaatttttgtttgagatgtgggtggagatgctcctctacgtcagccaccggtgtagcagggagtcacacgccaagaggattggtgaaggcggcgagctgacaaccgtcgtctggcttatggcagaacaagctggcaagttctacatcgataaagaacttagtgtagccgaagaagcagaacaagcagaagaaaaagatgatgataattatgtacttgttatatctccttaa

SEQ ID NO: 1409 - DNA, 531 bp, Oryza sativa
  Clone ID: PAT_MRT4530_101279C.1
atgttccgcgcgtcgggcggcgtgggtcgctcccccatgcattggcgcgcggatccgccgaaggccacgacccagccagccgcccgagccccctcatctctccccgggtcgccgataggtggggcctacctgtcgggcccgtctcccacctccagccggcgccaccgcgccccgcaaccgccgccgtgcccgctcccacgtctcccgggccacgtcgcccacgtcgccctcgcgcccgcgttccccgcgcccacttccctctctttcccgctcgcgcccgcgctcgagacggccgggattcaatttttgaatcccgcctctctctcctctcccactcccccacgtcggccggcgatttccgcctctcccggccacgtccggacccctcctcccctatttaagcaccaccgccatcccctctctctttttccccatctctccgagtcctcccgtgctctccaccgccctagcgccgtcgccttcctctccgccaccgccgccgtcgctccggtcgccgctagccgccgctag

SEQ ID NO: 1410 - DNA, 588 bp, Oryza sativa
  Clone ID: PAT_MRT4530_10127C.1
atggcggcttcgggtagctcaactgttcgtggctcacatgttgagggatccatgctccgccatcctcgtcatgcatcatcctcttccactgaatgctaccagaagtaccttatcgatcatggattgctgaatggagatgctagtagggaagaaatcaagggagatagttctgaagaggatgaagttgaagacctaggttcaaagaagaagcttatagatgttgtattgatgatgaggtccgaagtgaagcagcaaactctctatttgaagattgcagcatttggcattgttgtttttggtgctgtacttttaggtatgattgctgtagtggtggcaaagggctttctgcagtggctggtgacggagcttggggctcctcactgggagaccgcgcaggcccccctttgccggttcggccgggggccctggggagacaaagagaagggcgaccgtatcacccttgggcccgacccccccgaggggggcgatcgccctccccgagggaagcggtcgggcgtgacgccacttctaaggcctggtgacaggtggggccggttcctacaggtgccgtcgaactacatcacctag

SEQ ID NO: 1411 - DNA, 855 bp, Oryza sativa
  Clone ID: PAT_MRT4530_101280C.1
atgtcggccacatctgcttacactgccgattgcctgaacaatttcgcggtcggctgcctccacgccaccgcgtgggcacgatgccgcacgctcggggtattcggccttcgcacggctgaagcaacccgatttcgcctggggcatgtctccgtatgcccggggcaagacaccgcacgcccgggggcttcagtcttctcctggctgacgcggcccgactacgccccagacagactactcccgagcccgacttcgcccgggcacatctccgtaagacctgggcacgacgctgcacgcctgggagctttggccttcacgcggctaactcgacccgacttcgccaggagcgtgtgcccgcccgcctacgcctccacattagtcaatcacgtacccaccgactggccggctccggggcagctgaagggcttcaccgcctccccgggcccagctggcactttgttgtgtgaggcacactccttagtgctgccttactcggcttcgtcgctaccggctggtggctatgcctccacgttggttgctttactcggctaccactccactgggcaagacacgccccctgagttgtcttactcgggcgtcactcccaagtcccgggtgtcttctagctggctgcctatgccaccgtcgggtgacctcatccccatgttggctggctcctctgccgccggctgggggctgcgtctccaggttggttgcctatgctgctgtcgggtgactttgtccttgtgctggttggctccttcaccaccgccgagcaactacgtccccatgttggccaactttgtgatcactaactggcttcctcacctccatggtttggctggttccattggatga

SEQ ID NO: 1412 - DNA, 1498 bp, Oryza sativa
  Clone ID: PAT_MRT4530_101281C.1
ccgctgcccagtggccggcctgtctccgcccttcgcctcctccaccgagtcagatctcgagcgccgcagaggagagcagcaatgaggccgtcgctgatgagatccgcctcgcaggtcctccgccgccgccgcggctactcctccgcctccggccagccggagcggaaggtcgccatcctcggcgcggccggcggcatcgggcagccgctctccctcctcatgaagctgaacccgctcgtctcctccctctccctctacgatatcgccggcaccccgggcgtcgccgccgacgtctcccacatcaacgccccggcccaggtgaaggggttcatgggggatgaccagctcggggaggcgttggaggggtcggacatcgtgatcatcccggccggcgtgccgaggaagcccggcatgaccagggacgacctcttcaacatcaacgccggcatcgttaaggacctctgcactgggatgtccaagtactccccgaaggttcttgcgaggaagaccggcatgaccagtgacgacctctttaccatcaacgccggcattgttaaaggcctctgcgacgtactcttgcaagtacggtgtttggtgtgattactcttgattcagcacctgctaagactttctatgctggaaacgcagatgtaccagttactgatgtgaatgctcccggtagttgaaggtcaggcgggtatcaccatcctgccactgttctcacaggcaactcctgcaactaatgcgttgtctgatgaagacatcaaggctcttaccaagagaacacaggatggtgggactgaagttgttgaagcaaaggctggaaagggctctgcaaccttgtccatggcgtatgctggtgctgttttcgcaaatgcttgcttaaagggtctgaatggagtgccggacgttgttgaatgctcttttgtgcaatcaactgtaacagagctgccattctttgcctccaaggtgaagcttgggaagaatggagttgaggaagttcttgggttgggccagctgtcagactttgagaaggaaggactggagaatcttaagggcgagctcaaggcttcaattgagaagggtatcaaatttgcaaatgcgtagttaggccattttgcagactagcaactcatacctgtagatgaggcttctcttgatttgatttatgcttttttctaccccttgtgttgggataccgaggatttgagctttacaataagaatccggcggcctaatgccaaacagaacaaaacttgtacgagaggaactatttgtgtcaagttttgagttgttacattggacaaacattggattatgcaccttccacaataaaatcttgcggcttgatgccaacctgaactcaaaacttgtaccagaaacagcgactccggtgctatttttcaccttgtacctgaaactgcgtacagtgaacccaaaaaaaaaaaaaaaaaaaaaaattcagttaaaaaaacaaagacaacttcttctctcccga

SEQ ID NO: 1413 - DNA, 378 bp, Oryza sativa
  Clone ID: PAT_MRT4530_101282C.1
ggcataaaaaacactgaattttatttcactcaccacgtgtccatgcgcatctattctaatttctcaataaacaaaatcttgctagggcgcataccatacctgtacactccctctgtttacaaaagagaacgatctatgacttatgaaactgagctgaactttcttgaccaagccgagcaagggagcatcagggatggatgttcttcaaggtaagtcgtgcaccatgctgtggtgggcgagttatcacagcgaatggcgcgggcatgtccgcaggtgaaagcgtaagggatgaccgctaaacgatagtaccaatggccatgtcggcattgaacagcgcgaaaagagcgccgatgcacactgcgggacctcatgcaaatg

SEQ ID NO: 1414 - DNA, 158 bp, Oryza sativa
  Clone ID: PAT_MRT4530_101283C.1
gtctaacgcgggggaagcaagaagcagggagggggtcagataagaagccgcgacggtaggcacgaccgagcgaaaaaggaagggcacgactaagcagacaaagcacacgaagaggaaggtcccccagccaagaggagcaacctatacagccatagcat

SEQ ID NO: 1415 - DNA, 559 bp, Oryza sativa
  Clone ID: PAT_MRT4530_101284C.1
agatatacaacaatatggacttattcagcacctaggttcagatcatgaaacccaaattacagggggatacataaaagaaggggaaatttttgaaaagggggggggggcagttgtatacaaaaactttggtggtagcctggtagggtggtacggcaaaaaccccggggggagggggggaactattggatctataggatcggtattcatcattacaaagccaaattgggggggaggattattgcctaaaaacgctggtaaagctgaaaaagaaattctcttcaccagcaaccgggggggggagcccccctggtgcccacccattggtcaccggtttgggggggggatcacctataacccgacccccctcagaaaccttggcaaactcggggaggcccttttccttccggtccttttttctccgcctaacctcaattctttttttcctcagccaggtctccacgggtctcaagaaaggaaacgggctcatttttttcactttttctaaaggcgggggtaggtgcaacttcccacgggcaatggacaacaggggggggggcca

SEQ ID NO: 1416 - DNA, 492 bp, Oryza sativa
  Clone ID: PAT_MRT4530_101285C.1
atgaaggggacaatgcaaggtgtggattgcttgccacgtgtaccgcattcatggtcaatggtgggaaagggtttaactggggacaaggtagcggtcagaacggggtttgtcccagagaggataggcgaccaatcagcgagcaacacagaaaccatcctgatttggtttagactcgtgacgacgatgtttaaaatgccccctgtgaggttgaaagttgaaactctggtctctgcctctctggagaagagacaaccagcgctcctgctccccacatggccatggtggtggatgatgctccttcagctccagcaaccactactcaccaccagtggcctagatgcagctacaaactgcgcccgtgctgtgccatcgtttgaccgagaccgaccaaattttttgtcaactagtaaaaagcataaccacgagctccagttaattaactggtctactcctcctgcacttcctaccgatcgagtaattgtcgattactag

SEQ ID NO: 1417 - DNA, 2308 bp, Oryza sativa
  Clone ID: PAT_MRT4530_101286C.1
atccactcctctccagtctccccgccgctccgcatcccgcagccgctcgtcagcgacggacatggccgccgccgccgcagccatggccaccgccacctccgccacggcagcgccgccgctccgcattcgcgacgccgcgaggaggacccgccgacgcggccacgttcgctgcgccgtcgccagcggcgcggccgaggcgcccgcggcgcccggggcgcgggtgtcggcggactgcgtcgtggtgggcggcggcatcagcgggctctgcaccgcgcaggcgctggccacaaagcacggcgtcggcgacgtgctcgtcacggaggcccgcgcccgccccggcggcaacatcaccaccgccgagcgcgccggcgagggctacctctgggaggaggggcccaacagcttccagccttccgaccccgtcctcaccatggccgtggacagcgggctcaaggacgatctcgtgttcggggaccccaacgcgccgcggttcgtgctgtgggaggggaagctaaggccggtgccgtccaagcccggcgacctgccgttcttcgacctcatgagcatccccggcaagctcagggccggccttggcgcgctcggcgttcgagcgccacctccagggcgtgaggagtcggtggaggacttcgtgcggcgcaacctcggcgcggaggtctttgagcgcctcattgagcctttctgctcaggtgtgtatgctggtgatccttcaaagctcagtatgaaggctgcatttgggaaggtgtggaggctggaggatactggaggtagcattattggtggaaccatcaaaacaatccaggagagggggaaaaaccccaaaccgccgagggatccccgccttccaacgccaaaggggcagacagttgcatctttcaggaagggtctgactatgctcccggatgctattacatctaggttgggtagcaaagtcaaactttcatggaagttgacaagcattacaaagtcagacaacaaaggatatgcattagtgtatgaaacaccagaaggggtggtctcggtgcaagctaaaactgttgtcatgaccatcccatcatatgttgctagtgatatcttgcggccactttcaagtgatgcagcagatgctctgtcaatattctattatccaccagttgctgctgtaactgtttcatatccaaaagaagcaattagaaaagaatgcttaattgacggagagctccagggtttcggccagctgcatccgcgtagtcagggagttgagactttaggaacaatatatagctcatcactctttccaaatcgtgctccagctggaagggtgttacttctgaactacataggaggttctacaaatacagggattgtttccaagactgaaagtgagctggtagaagcagttgaccgtgacctcaggaagatgctgataaatcctaaagcagtggaccctttggtccttggcgtccgggtatggccacaagccataccacagttcctcattggccatcttgatcatcttgaggctgcaaaatctgccctgggcaaaggtggttatgatggattgttcctcggagggaactatgttgcaggagttgccctgggccgatgcgttgaaggtgcatatgagagtgcctcacaaatatctgactacttgaccaagtacgcctacaagtgatcaaagttggcctgctccttttggcacatagatgtgaggcttctagcagcaaaaatttcatgggcatctttttatcctgattctaattagttagaatttagaattgtagaggaatgttccatttgcagttcataatagttgttcagatttcagccattcaatttgtgcagccatttactatatgtagtatgatcttgtaagtactactaagaacaaatcaattatattttcctgcaagtgacatctaaatcgtcagcaaaaaaaaaaaaaaattctgatccctccgccaccggcggcaacatccccgtcggccgcaaggatcccctcccggagcaggagcccgtcccggaacctgcccccatctcccgccgtggtcgcccgcggtccgccggccatcgccccgcccgtctcggtcgtcgaagaagagagaagagaagaaagggaaaaaaagaagggatgtggggcccgtaccgttttctctcacttacatgtgagccccatatactttatttatttacttttgctgactaggatgccacgtaagcgaaaccacccctataggacctcccgtgaacggtttgtgaaattttaggggcgaacatttctggttttgtggttgaggccttaagggacttt

SEQ ID NO: 1418 - DNA, 1731 bp, Oryza sativa
  Clone ID: PAT_MRT4530_101287C.1
atggccgccgccgccgcagccatggccaccgccacctccgccacggcagcgccgccgctccgcattcgcgacgccgcgaggaggacccgccgacgcggccacgttcgctgcgccgtcgccagcggcgcggccgaggcgcccgcggcgcccggggcgcgggtgtcggcggactgcgtcgtggtgggcggcggcatcagcgggctctgcaccgcgcaggcgctggccacaaagcacggcgtcggcgacgtgctcgtcacggaggcccgcgcccgccccggcggcaacatcaccaccgccgagcgcgccggcgagggctacctctgggaggaggggcccaacagcttccagccttccgaccccgtcctcaccatggccgtggacagcgggctcaaggacgatctcgtgttcggggaccccaacgcgccgcggttcgtgctgtgggaggggaagctaaggccggtgccgtccaagcccggcgacctgccgttcttcgacctcatgagcatccccggcaagctcagggccggccttggcgcgctcggcgttcgagcgccacctccagtttgtgtgctctccccgctgtgcattcttgattcacttgtgaaattcgattgtgctgagcgtttccggcgaaggtttcaggggcgtgaggagtcggtggaggacttcgtgcggcgcaacctcggcgcggaggtctttgagcgcctcattgagcctttctgctcaggtgtgtatgctggtgatccttcaaagctcagtatgaaggctgcatttgggaaggtgtggaggctggaggatactggaggtagcattattggtggaaccatcaaaacaatccaggagagggggaaaaaccccaaaccgccgagggatccccgccttccaacgccaaaggggcagacagttgcatctttcaggaagggtctgactatgctcccggatgctattacatctaggttgggtagcaaagtcaaactttcatggaagttgacaagcattacaaagtcagacaacaaaggatatgcattagtgtatgaaacaccagaaggggtggtctcggtgcaagctaaaactgttgtcatgaccatcccatcatatgttgctagtgatatcttgcggccactttcaattagtgttgtcatagaatttggcttggtgatctacttgagtgatgcagcagatgctctgtcaatattctattatccaccagttgctgctgtaactgtttcatatccaaaagaagcaattagaaaagaatgcttaattgacggagagctccagggtttcggccagctgcatccgcgtagtcagggagttgagactttaggaacaatatatagctcatcactctttccaaatcgtgctccagctggaagggtgttacttctgaactacataggaggttctacaaatacagggattgtttccaagactgaaagtgagctggtagaagcagttgaccgtgacctcaggaagatgctgataaatcctaaagcagtggaccctttggtccttggcgtccgggtatggccacaagccataccacagttcctcattggccatcttgatcatcttgaggctgcaaaatctgccctgggcaaaggtggttatgatggattgttcctcggagggaactatgttgcaggagttgccctgggccgatgcgttgaaggtgcatatgagagtgcctcacaaatatctgactacttgaccaagtacgcctacaagtga

SEQ ID NO: 1419 - DNA, 336 bp, Oryza sativa
  Clone ID: PAT_MRT4530_101288C.1
agggtatcaggtgggaaaaaagacagctccgcaaaatcatgtggttctctcaagttctcaacaaaagagactgaggcatgcattggatttggatatatcaccaagacaccaaccggggtgctcaccgctcagtcagtcggtcagccaccattttagtactagaacagtaggcaagctgttcggagaggtcaatttcaacactctccgaagtctgtttataaaagtcgacatgtgtatcacattatatttattcattccatgatacattcacattgtgcaaatctgacagcgacatatccagtggattcattttgttagatggacgtgttgctattt

SEQ ID NO: 1420 - DNA, 190 bp, Oryza sativa
  Clone ID: PAT_MRT4530_101289C.1
acgtaagactagagattctatgagagcggcgcgctcttttcttttttttctttttaaaaatagcggagtccatggaggtgttccgatcacaatccatccaaatgtccatcagaatgcacggaacatgaagcaacatatggccatgggggaggcaggcctacggtacaattctctcaaccagtgctgtagt

SEQ ID NO: 1421 - DNA, 522 bp, Oryza sativa
  Clone ID: PAT_MRT4530_10128C.1
atggcggcttcgggtagctcaactgttcgtggctcacatgttgagggatccatgctccgccatcctcgtcatgcatcatcctcttccactggtcagattcgttttactccctcctcattgttgccattggtgtattatccggattgtggagagcaaattgttcggtatgtgtcccgcagcaagaagaacccaaatcgagtgtactacaagtgttcaaaccgcacagagaggaatgccccatgcgatttttggtattggaaagaatgctaccagaagtaccttatcgatcatggattgctgaatggagatgctagtagggaagaaatcaagggagatagttctgaagaggatgaagttgaagacctaggttcaaagaagaagcttatagatgttgtattgatgatgaggtccgaagtgaagcagcaaactctctatttgaagattgcagcatttggcattgttgtttttggtgctgtacttttaggtatgattgctgtagtggtggcaaagggctttctgtga

SEQ ID NO: 1422 - DNA, 1631 bp, Oryza sativa
  Clone ID: PAT_MRT4530_101290C.1
cattcgcaagcagcttcattcattttgagtacagataatactcatgctgttcttgtgcaccactcggaagctgcataatctcttgatttttagcccaacggctttgctaatatatgtgcgtcgcttgcgttgccattaattcttggatgttgttgctactgttgttttggaagcgatagcttggagttgtaaggtgaggtgaggtgcagggtggtcgatcagtaggtggaaaggaggaatcgaggagatggacggcgagattggggaggacatgctcacggagattctggtgaggctgccgtacaagtcgctggcgaggttccagtgcgtggccacgtcgtggcggcgcctcatctccggcgactacctccgccggaggctgccgctcatcacctccggtgtgctgtaccaggaaggccggggcggcggcggcggcggcggcggcgaagggaggaggaggcaggcgtacacgtacgcgtgcgcgtcggggggtggtgaccacggcggcggcgtggcggaggccgacatgggattcttccccgggcacgagacgtccaccatcatcgacgggtgcaacggcatgctgctgtactacgcatcgcaaccggcggcggcgttccacgtcgtgaacccgacgacgcggcggtgggcgaggctgccgccgccgcgcgggaagacgctgctgtccgtgctggcgttcgacccctccgcgtccccgcactacagggtggtgtgcttcaccgggtggctcccccgcggcgcgtccgtcgaggtgttcgactccgagggcggcgcgtggcgcgaccacgagctcgacttcgggctcgacaccgacgccatgtcggccaccatgcactacttcgacggcgcgatccacgtgctggcctactcgggccacgtcgtccgcatcgacctcgggaccatggcgtgcgcggtgaccgcgctcccggccccggtcagctgccgggcgcgcgccgggcactgccgtggccgcctccggtacgcgtccagcgacggcacgcgcctcaagttctgggagctcaagaacgcggccacatcggagtgggcactgaagcacgagctgggggtcaatgacctcgtcgccggcgaggcgagcggagcttgccaggccgtcaccttcttgttcatggcgttccacccggacagggagatggtgtacctgtggacgccatggaagctcgtggcgttcgacatggagaagaggcgcgtcgaggaggagtgggaggtcgggccggagaaggagaaggaaggcgcgcatctcattcagatttggctgtttccgttctcgcgccatctggccaacagcttggcctgattggtctatgtggctgataggctggccggcgatgttgacaatggcatgtgggcccaatgcttgtctgcaacattgggcacaatgccgttccgttcgagtgtccaactgtacaaagaaggtacaagacaatcaaaagaaaaaagggaggaaaaaaatatatgctattcgtttgttctatggagtaaaattcatctctaatcccatcaggataagtggacagttcttctgtttccataaaaaaattgatttgttttttttttcaaaattcataattgaaatgtataatgcataaaat

SEQ ID NO: 1423 - DNA, 732 bp, Oryza sativa
  Clone ID: PAT_MRT4530_101291C.1
atggcgatgacgctccgcttccccgcgggcggcgcgacctcggtgcctgcggccatgccccaccgcgtccccatggcgaccgcgccctctcgcctccccgcgacggtggccatggcgttgatttcgactccttccgcggccatccgccttaccccgatcaactcggtcacccacttcgacgtgttgcgcctgcgcgcgcgcaggactgacggggaagacgatgtctcggcactcccggagatcgacggcgccgcctccgcgcttccctgcaccgcctccactgccagtcctcgtagctgcgtccccggcttccccaacacccagagcgccttccccaacacccggctctccctcttgggctggattctcaaattagtccaggagagattctcaggagatcctagtttactctcaagcttattggttcttctgatcggtggttggcagactgcttacttcaaggaagctgtagaaaggaggatcaagggatccatgcgcattcctccctgtatcctcaccattttcacgttctgtgcggctgtagcaacattgctgtacaaagcggtcaaagctagcgaagagttagatggcatcatctcgcatctcatcaagaaattcgagaagcttctagagtcccatgatgtgaagacgcaatctgagaagcttccggagcctcgtgaggccgaggcgaagtcgcaggctaaggaggtgaagactcaagacaagagctag

SEQ ID NO: 1424 - DNA, 1540 bp, Oryza sativa
  Clone ID: PAT_MRT4530_101292C.1
ctccgacgacaggtttgagcgcgatgaggcatcccggcgcgggcggcgggagcggggacgccgggttcgtccgggcggaccagatcgacctcaagagcctcgacgagcagctggagcgccacctcggccgccccgcggagcgggccgcgtcgcagcacgggggcagcgggagccgccgcggcgagtccgccaggctcgggctcggggaggagccgccgcaggcgccgcaccatcagcggcgccgggaggactgggagatcgaccccgccaagctcgtcatcagaggcgtcatcgcccgcggcacgttcggcaccgtccaccgcggcgtctacgacggccaggacgtcgctgtcaaaatgcttgactggggggaggatggccatagatcagaacgagaaatttcttcactaagagcagcatttgcacaagaggtcgctgtctggcataagcttgatcatccaaatgttaccaagtttattggggctataatgggtgcaagagatttaaatatacagacagaacatggacattttggcatgccaagtaatatttgctgcgttgttgtcgagtaccttgccggaggtgcactgaaaaattttctgataaagaacaggagaaggaagctagcctataaagttgtggtccaattggctcttgaccttgctaggggattaagctatcttcactcaaagaagatagttcatcgtgatgtgaagactgaaaatatgctccttgacaaatcaagaacagtgaaaatcgctgattttggtgttgcacgaattgaggcttcaaatcctagtgatatgacgggtgaaacaggcacacttggttacatggcacccgaggttctcaacggccatccttacaacaggaagtgtgatgtatatagctttggaatctgcctatgggagatatactgctgcgatatgccgtatcctgatctgagtttctcagaggtcacttcagctgttgttcgtcagaacttgaggcctgagataccgcgctgctgccctagctccttggccaacgtgatgaagcgctgctgggacgcgaacccggacaagcggccggcgatggcggaggtggtgtccatgctggaggcgatcgacacgtccaagggcggtggcatgatcccgagcgtctatgttggaggatatctctcgtgcttcggtcggaggcatgatccctgaagatcagcgacaaggatgcctttcatgcttcaggcagtacaggggtccgtgacggatggagcacgctggagttgtatctgcagattgacggctacatctcgtgtaattcgattacatttgttttaaggtacgtaagcaaactggttatggagctagcatgcttaagacctttggtttgtgtagccctctgatgtaaattccctgttcatcccttctgtttatcaatgaagaaccagctcggctcgttcatccatgtttgatgttccctgatgtaaatatttcaccagtatcgacgagtagtagcaaaaaaaaaaaaaaaaaaactcgagactagttctctctctctctcc

SEQ ID NO: 1425 - DNA, 240 bp, Oryza sativa
  Clone ID: PAT_MRT4530_101293C.1
atgtcgatgtcaccatcgctgcccctaactcgcagccaccgccgtcttgatctggtccgcccaccgagactgcttgagaacgagcaggtgagggaagtggaggtcgaggatgacgccaggggggagggaaagaggaggttgaatggggatggcacgttcggcgaggtcaaggcggacgacgaccagcagattttgtgccctcctcatcgatgccaccaccgcctccacgtcgccaggtga

SEQ ID NO: 1426 - DNA, 1638 bp, Oryza sativa
  Clone ID: PAT_MRT4530_101294C.1
atgaccaccgccgtcctccggccatccccaccggtcgccaccctcctcggccgctgccgcaccgcgcgctgcctcgcccagctccacgcccgcatcgtccgcctcggcctccacaaccaccacgcgctcctcgcccgcttcgccgccgcctgcgacgccctctcctgcccctccgtcgccgcctccctcctctccgtcgccgtcccggtacgcctgcggaacgccgtgctcgcctccctcgcccgccacgccccgctgcgggacgcgctcgcgcagttcaacctcctccgcgggggcgcgtcccgcccggacgccttctccttccctcccctcctctgcgcctgcgcgcgcgcctcctccctccccaccggcgcttccttgcacgccgcggccatccgcctcggagtcgacgccgacctcttcgtccgcacggcgctcatccagttctatgggaggtgcggcgccgctgccgccgcccgggctctgttcgattcactgacaaaccccagcgaggtctcttggacggccattgtcactgcctatgtcaactctggtgatattttgactgccagggagttgttcgaccaaattccacaccgaaatgtggtgcattggaatgccatggttgatgggtatgtgaagtgcggtgacttggagggtgcaaggaagctgtttgatgaaatgcctgagagaactcctgcagcgtacacatcattgattggcgggtatttaaatgcagggaacatgggagctgcgagaacattgtttgataagctagaggaccgtgatttgttcgcatggtcaacaatgatatcagggtgtgcacagaacggttaccctggagaggctttgaggatttttaacgagttccaaaagcaagaaatatgtccagatgagcttgttattgttggtttgatgtcagcatgctcccaacttggtaacatcacattggcaagatggattgaaggttacatcatgatttatccaatagacatgaacaatgtccatgtgatggcgggtctcattaacatgaatgcaaagtgtggcaacatggagagagctactcttttgtttgaatctatgtcagttcgagatgttttttcatattgttcaatgatgcaaggtcattgcctccatggttcagctagcaaggctgtagagcttttttctcagatgctcttggagggcatcaccccagataacgccgcgttcacagttgttttgacagcttgcagtcatgctggcctagttgaagaagggaaaaggtactttgatatgatgaagaatgagtatatgattgtaccatctggtgaccactatgcttgccttgtcagtcttctcggacgttttgggatgctgagagatgcatatgagcttatcaagtcaatgcctggagaacctcatccaggagcatggggtgcattgctggggggatgcaagtttcattgtgacattgagcttggaaaaattgctgcaaagaagctctttgaaattgaaccggaaaatgctggaaattatgtctcgttgtcaaacatttatgctaacattgaccgatggggaaatgtttctgaaactagagctgagatgacaggaagagggataacgaaaattgcaggctgtaccttggttttgcagtag

SEQ ID NO: 1427 - DNA, 120 bp, Oryza sativa
  Clone ID: PAT_MRT4530_101295C.1
atggcgtctgccagcgacggcggattcagtccatgcgtctcccggcggctcccgacggacgcccgtgccgtgcgagagaaggcagcgagcggcggtgaattcaccgtggagaaacggtga

SEQ ID NO: 1428 - DNA, 1275 bp, Oryza sativa
  Clone ID: PAT_MRT4530_101296C.1
atgtcgctccacctcctcctcgccgtctcgctctgcgtcgccttggcctcgtcgttgccatgggcagcagctagtgccaatggcaatggcaatggcaagccgcttgtcgcggccatcaccaaggacgcggcgacctcgctctacaccgtccccatcaaggacggccgcccgctcgtcctcgacctcgccggcgcgctcgtctggatgtcgtgcgccgccgcgcacccgacgctggagtgccaccaccacttctgcatgcacgcgcacagctaccacccgccgggatgcccccacaatggctatggccgcgccgacgtcgaggacccgttccggtgcaagtgcaccgcccacccgtacaaccccttctccggcgagtcggcgacggccgacctgacgcggacgaggctgtcggcgaacgccaccgacggcaagaacccgctctacccggtgtcgttcgccgccgtcacctcctgcgcgccggattccctcctcgcgaagctccccgccggcgccgtcggcgtcgccgggctcgcgcgcaccaggctcgcgctgcaggcgcaggtggcgcggtcgcagaaggtcgccaacaagttcgcgctctgcctccccagcggcggcggcggcgacggcgtggcgatcttcggcggcggcccgctcttcctcctcccgccggggcgtcccgacgtggcggcgacgctcgccggcgaaactcccctccaccgcaacaaggatctccccggatacttcatctcggcgaccaagatcgccgtgaaccaggagcaggtgcagctctacacccaagagccgctcgtcgtcgagctgtgcacgaggatcccgtacacggcgctccggccggacgtgtaccgagcggtggtcgacgcgttcgccagggccaccgccggccggaagcgcgtcacgccgccgccgccgccggcggcgccgttcgagctgtgctacgactcgcgcgatctggggtcgacgcggctgggctacgccgtgccgcagatcgacctggtgctggagggcggcaagaactggacggtgttcggcggcaactcgatggcgcaggtgagcgacaacacggcgtgcctcgcggtggtgaaggtgaagggggagaagggcagcccgccgccgccggcggcgatcatcggagggttccagatggagaacaacctggtggtgttcgacgaggagaagcagcggctcggattcagcggcctgctctgggggaggcagaccacctgcagcaacttcaacttcactctcgccgcctag

SEQ ID NO: 1429 - DNA, 261 bp, Oryza sativa
  Clone ID: PAT_MRT4530_101297C.1
atggattccaggaccacagggactgaagagagcaccgagtcaaaacccagaagttccgttccttccacggctgccaagagaccagagcaccaggatgacatgaagaagacttcccatctcaaggacttggaagcactaggccccttggaggtcttccgcgctgacatggacgaagaaggcagcttcgacgatgccgttgccggctgcgattacgccttcctcgtcgccgctccggtgaatttccagtcacagaatcctgag

SEQ ID NO: 1430 - DNA, 279 bp, Oryza sativa
  Clone ID: PAT_MRT4530_101298C.1
acaatcagacttatgtatgaatgggccaagaacttagaattggcacgatgaattgggccaaaattcagaagtctgcgtatgagagcaaaagaggaggctgcctgccgaaattgtgccaggtcggcccagcccatggttcggccgaacaattgggttcggccgaatgccccgcagcttcgtttgatccagggttctcctggacggctgagatggctccctaatgacggttggagggtattaccgaccattccaaccgtcacaaccgtcattgggaggcta

SEQ ID NO: 1431 - DNA, 405 bp, Oryza sativa
  Clone ID: PAT_MRT4530_101299C.1
cccttcaagccatatagaacgcaatgggttagtttgattttctgtctccacctgctccttacacccagcaatccagtgccgctaaccatctccttttattcttcctcaacctcctgatctccaagagcatgcagatgcaaactgatatttctcctccaaggttccaacccttttctccctcccctcgtctcctgactactactattaaccacttgatattgttacacacacattaattctgtcatggtcgacttcaaatttcttgaacacatgagaacccataatccattaagatgcaggcacaggacaaattttgaacatgtataccataatgaccactgtgcagctcatgctaccaccatctacagagaaggcatctattaaatggttacgatctacagcgaa

SEQ ID NO: 1432 - DNA, 638 bp, Oryza sativa
  unsure (1)..(638): unsure at all n locations
  Clone ID: PAT_MRT4530_10129C.1
gccggggcgnnngcagaagggacgcccagaaaaaacgccatggaagaggagagagggcaggggggggaccagaggagcactgcggcagcgcngaggggcgccatgggcggcatagccggcggagggggcgccgaaggcagaggggggggggcagacaccagggcatcgatctgggtccactggtcaagggggatcctggggatcagccgactgggtgggtgtggcggccatggggggggcgctgtgggggggtggggtgtgggggactggtgggggggccgcgggtgcgccgtgggctggcgggggatggggggccatggggggcgggggcggtggggggggatgtggggggggttgggcgggaagggggggctgggggtggggggggggagggcgggggggggggggtgagccgcgctggggggggtgggtgggtgcgcgtgggggggtggggggggacctgtgggggggcggcggagtgggggggggggggggggggggtgggggggcgtgggggggccggggggggggggcgggggggggggggggcggcgggggggggcggggggggggggggggcggggggggggggtgggggggggcggggggggggcggggggggggctgggggggggggg

SEQ ID NO: 1433 - DNA, 3777 bp, Oryza sativa
  Clone ID: PAT_MRT4530_1012C.1
atgtcgcaggaaagtaagttagatcttcttctgaaggtggtcgaggagaacgagaggaagagagtggcggcgaaggaaaggactcgagcagatttcgccgatctgaagaagatggtggaggcccgactgccggtggtggaaaagaaggtggagacactcagcgtttcggttcaaagcttgagccagaaggtggagctgatggaagggagcatgctcaaatctgaaccaccaacggaagggatcgggaacaacgcatcttggcttgctatctgctctagattcactagggacagacaggaggcactaatcaggcagtggtttcatgctcaacagagtagcactgttgctgaatatgtggaaaattttgataagatcatgcatcagcttatggcctatgatagtgccctcacacctgtgtactttgttaccaagttcattgaaggactcagggatgagaacagaggggtagtcatgttacagaggcctcaggatttggactctgcctgttcaattgctctgcttcaggaagaaatcctggatagttgcaaacccactgttagcaaaagagccgactcaccatctgtctataaacaagttccaagattctctagcttcattcctgccactccagggcataaattttttcctggtagttcttctgatggtggtaaggtgactgaatcaaccaaacctaaagaggacagagtggcttcactcaaggcctacagaagatctaaggggttgtgctttgtttgtggtgagagatggggtagggaccataaatgtgccactacagtacatttacatgttgtacatgaattgttagaggctctgcagtctgaatcttattctgaaaatgatactagtcctgaaggaaccaaagagcaagatgaaggtactttgatggctatatcccaacaggctctgtggggtactgaatcctccaagtcgattcgtttgagaggatggatacaaggcactgagatactcatgttggttgactcagggagttcctactctttcattgatatagaaattggcagcactctctctgtcattactaatttgcgccaacctgtaattgtaaagatagctgatggggggatggactggttggagcagttcagtcccatgaaggttgactgggtaaacaaatggttggagattatgttggaaggaaagttgatcaccctacaaggcatcacaactcagactactatttgccctcctatatcaactgatcagtgtctaggcatggccaggaatggatccttaatgtacttaattcagttgaattctatgtttcagactgaatctgcagaaattcctgattctgtcagaaaaattttggatcaattcaagagtgtttttgaggaaccaaaagggttacctcccaagaggatttgtgatcacagtattcctctaatacctagtgcaaaacctgtcaaccttagaccttacaggtataatccagcccttaaagatgagatagagtcccagatctctgaaatgctacacacaggggtcatacaacccagccaaagtgcttttgcctcacctgcattattggttagaaagaaggatggaacttggaggttagtaattgactacagacagcttaatgctatcacagttaagagttcttacccaatgccagttattgatgaattgctggatgagctgtcaggtgctaagtggttttcaaaactggatttgagggctggatatcatcagataagaatgaaggaaggtgatgaatacaaaacaacatttcagacccacattggtcattatgagtacaagaagtatcaatggcaggtgaaactctccaagtgttcatttgctcagcaacaacttacctatctagggcatattatcagtgctgctggggttgctactgagccaattaaaattcaggaagttgttaattgggttactccagccaatcaaaagaagttgaggggattcctgggcttagctggctactacaggaagtttgtccaaggatttggtatcatcagtaaaccattgacaaatcttctgaggaaaggggttccttacaaatggactcaggaaacagaattagccttccaacagctcaaacaagctctagtttcagcaccagtcctagcactacctggctttagcaaaccatttacagtagaaacaaatgcttcagattcagggattggtgcagttttgtcacaagacaaacatccaatagcttttgttagtaaggcacttggtcctagaacaaaaggtttgtcaacctatgaaaaggaatgtatggctatacttttagctgttgaccattggaggtcctacttacaattgggagagttcataattctcactgatcatcacagccttatgcacctatcagacaagaggctacataccccttggcagcataaagcttttactaagcttttgggactcaactatataatctgttatagaaaggggacaagcaatgctgcagcagatgcactgtcaaggaagttccaaggagatgcagaattgtctattatatccaactgcactccaagttggttactggatgtggttaaggggtatgaacaagattcccacgctaccgaattactgacagctttggctctgcaagctgactctaaaccaggttaccaactgcaatctggtgttatcaaatacaaggggaggatatggataggtaataatgctcagctacaatggaaactgttaactgaatttcatgccagcccacttggtggtcactctggtttcccagtcacatatagcagactcaagaaattatttgcctggccaggaatgaaatctcaagctaagaaatttgttcagcagtgtcaaatttgtattcaagctaagccagatagagctaaatacccaggacttctccaacccctgcttgttcctgatggatcatgggaagttatatccatggattttatagaaggtttgcccaggtctaagtcctttaactgcatcctggtaattgtggataagttctctaaatatggccatttcattcctcttgcacatccttacactgctctggaagttgcaaaactctttatgctgcatatttacaaactgcatgggcttcctttggtgattatctcggatagggacaagatttttactagtcaactctggaaccacctgtttacatcttctgctgagtattggtacaacacctcttaccactcttccgtgaaggcatctccgtttgaagtcttatatggtcatgctcctcgtcactttggtatttctgtggaagcatgtgcaatcccagatctgcaggaatggctcaaggaaagaaagttgatgcaagccttagtgcagcaacatctgaatagagctaatcaacaaatgaaacacatggcagacaagaaaaggagtttcaggtcgtttgctgaaggtgattgggtatatctcaagctccaaccatatgtgcaatcttctgtagccactagagctaaccacaagctttccttcaagtattttgggcctttccaggttctgcagaagattggtatagtagcttacaaattacagcttcctgagactagtaatgttcacccagtgttccatgtgtcccagcttaaggcagcttgtggttttcaaggagacatccagtctactttgccttcagctctttctgaccttcaagtgccactccaaattcttgataccagggtgatcaataaaggtaattcagctgtatctcaggtgctaattcattggtctggtactgcagcagaggatgccacctag

SEQ ID NO: 1434 - DNA, 109 bp, Oryza sativa
  Clone ID: PAT_MRT4530_101300C.1
aatgccatttggtatctgacacatggtctgctcttgtgactatttgtctcgaaatatggcataaaacaaggggtaacggatcttgcgacattggtggtacctctatgat

SEQ ID NO: 1435 - DNA, 1426 bp, Oryza sativa
  Clone ID: PAT_MRT4530_101301C.1
ttgaactagtggctgtgtggatgaactctgattggattccagctactatttgccatccatttcttgctgaattctctcttctttacttcatcctctcttctcctcttctccttcatcactaggcagtagccacagtagccagtagctagctagcttgtcaagctaggagctagcagctgtgtgtcgtcgatggcatccaccgccgccttcctgtccacgctcgccggctcgaccagcctgggcggcgccacgccggccagcggcggcgggagcgggaggagcaagacggcgaggttcttgaggaggcggcggcgcggcggcgcggtgagggcggcggtgtccggcacggagcaggcgccggagacgacgaagaagaagggcggcggcggcggcggcggggacgagcgggtggtgcaggtgcacagcgcggaggagctcgacggcgcgctgcgggcggcgaaggagcggctggtggtggtggagttcgcggcgagccacagcgtgaacagcagccgcatctacccgtgcatggtggagctgagccgcacctgcggcgacgtcgacttcctcctcgtcatgggcgacgagtcggacgccacccgggagctgtgccgccgggaggggatcaccgccgtgccccacttcaccttctacaagggcgccgagaaggtccacgaggaggaggggatcggccccgaccagctcgccggcgacgtcctctactacggcgaccaccactccgccgtcgtccagctccactcccgcgccgacgtcgagtccctcatctccgaccaccgcggcgagggcggcaagctggtggtgctcgacgtggggctcaagcgatgcgggccctgcgtgaaggtgtaccccaccgtcgtgaagctgtcgcgcaccatggccgacaccaccgtcttcgcccgcatgaacggcgacgagaacgacagctgcatggagttcctccgcgacatggacgtcgtcgaggtgcccaccttcctcttcatcagggacggcgacatcgtcggccgctacgtcggctccggcaggggggagctcatcggcgagatcctcagatacaacggcgtcaaggtcacctagacatatacagattcatcactacgcagctcagctgcatgcagcaaccgtaattaaattaattactgtactactctcttgatcatgattgtaattttacaccaccacactagcttgagaagatcaagcttgttttatactggggacgatttgatcaaacctatctcgttgatttggtcccgtgtaatactagaattttggaacgtcaattgcaagttcgagacttgattttgcctatgattgtatctgtatccatccatctatcataggtggtgttcttatctctgaagatgaagattaagtttttttacgcaaaacaaggtggtattaacat

SEQ ID NO: 1436 - DNA, 262 bp, Oryza sativa
  unsure (1)..(262): unsure at all n locations
  Clone ID: PAT_MRT4530_101302C.1
ctcttctccacgctcccagcgccaaatcccagcagcttccccgcacgccgcgaatggcgcctcccgccactgcctccgcctccgcctcggcaccggtctccctcctctttctctcccttccgctctccccttcctcgtgtcgcggnctcccgcgccacatacccancctcccccgcgccgnctcgcgctcgcgccggccccgcctggcgccgcgctgctctccagccttggcgacgcgcaggaagaggagggagtacgatga

SEQ ID NO: 1437 - DNA, 538 bp, Oryza sativa
  Clone ID: PAT_MRT4530_101303C.1
attgagaacttcaagaggtatgattttaatcctaattacaaaggaaaaaaacgccacatatccaacatatatcatgaacaaaacatactgattcagcatatactgcttgcaaaccatcgcaaaacataaaacccgacctagggtacaccatatttcttatagttacatacatttataggcatgtagtatacatccaccagatggtgcaaccaacaccacattcagtaaaagttcttataaaacagatcttggagcaaaactatgatctctttatccaccacaaacgccttgatcaaaaatcatatgagataggcggcatcgatacatacaccgcattgggaatagtaataaccccgaactcttgggtactcaatgcaggactggccactgtcccatactgcgggcttagattcaactgtaagtggctaagcccctcatggaacacaaacacatgaccctggtggagcacctggctacatatccggccttctagatcagaacgcaacaaagcccacgcatgacagctccttcaagcaca

SEQ ID NO: 1438 - DNA, 195 bp, Oryza sativa
  Clone ID: PAT_MRT4530_101304C.1
atgccgatggcctgggccctggaaaagtttgtgtgtctgtgtgtgtggatgattcatttgctgccatacaaacaaacaaacaaggagggcgccatgtggtggcaagcaggcattgctgcaagttggggggtgtggtctgtcacctcactttcagctcctaatgatttaagactgccatgcgatgatgttgtctga

SEQ ID NO: 1439 - DNA, 264 bp, Oryza sativa
  Clone ID: PAT_MRT4530_101305C.1
tacggcatcccagcggggtggttggtgtcgtggaccaatgggatgggttggtacatggggatgccgcggcagttacaggacggacacaaccagctgcgcgcgcgctacggtctgcatcctcactaggcgggataacaagctggcgatgcacgccccgctgagaaccaaagccatgtacgtaccatgccacatccgccactacaccggcaaaaggtaccacgtgagcctctacatgaacaggaactgctggaacaccagggattt

SEQ ID NO: 1440 - DNA, 346 bp, Oryza sativa
  Clone ID: PAT_MRT4530_101306C.1
aacggttctagatgagaatcggattcctcctccaccaccgccatggattcgccgccgccgccgcgggaggaggtggtggtattcgcggtcaacagcgagcgcttcgagctccgccgtgacgggggcgaccccggggagtccctcctcgagttcctccgctcccgcacccgcttcaccggcgccaagctcggctgcggcgaaggtgggtgcggggcgtgcgtggtgggtggtctcggtttacgacgcgtaggccgaccaggaagcgcccggcgcgggcagatgatgccataccttgaggcacgctcccccacatcgcacgaggacgacctcacagtgtgtattgagc

SEQ ID NO: 1441 - DNA, 1179 bp, Oryza sativa
  Clone ID: PAT_MRT4530_101307C.1
atgaggcctctgtacctgcgcagcagcggcagcttcaagaagctgctcctctccatcagccaccgcggcgccaagaacggcaatggcgacgccgccgccaaggagagatacacgcccgccgccgccgcggcggcgccggagtcgccgcggaagccggcgtggcggtgcttctcctacgaggagatccaccgcgccacgaacgcgttccacgagggcaacctggtggggaagggcgggtcgtcggaggtgtaccgcggcgagctccccgacgggcgggccgtggcggtgaagcggctgatgggcgcgtgggcgtgcgagcggcgggagcgcgacttcctggcggagctcggcacggtggggcacgcgcgccaccccaacgtgtgcgccctcctcggctgctgcgtcgaccgcgacctctacctcgtcttccacttctccggccgcggctccgtctccgccaacctccacgacgagaagaaggcgccggcgatggggtgggcggtgcggcgcgccattgccgtcggcacggcgagggggctggagtacctgcacaaggggtgccagaggaggatcatccacagggacatcaaggcatccaacgtgcttctcaccgacgacttccagcctcagatttccgatttcgggctcgccaagtggctgccgtcggagtggacgcaccgggcgatcgccccgatcgaaggaacattcgggtgtttggcaccggagtactacacgcatggcatcgtcgacgagaagacggacgtgttcgcgttcggcgtcttcctcctggagatcatgaccgggagaaagccggtggatggcagccacaagagcttgctcagctgggcgaggccgttcctgaacgaggggaggatcgagtcgctggtggatccgaggatcggcggcgactacgacggcgaggaggcgcggcggctggcgttcgtggcgtcgctgtgcatccgctcgtcggcgaagtggaggccatccatgaccgaggtgctggagctgctggaaggcgtcgagatccggcaagaacggtggacgatgcccgaggcagtggaggacgacgacgacgaggagctatggagattcgatgacctggatgacgaagatgacgaagatgaagaggagttcaacactgcatccccatcttcttgctcatcatctttgagcaattag

SEQ ID NO: 1442 - DNA, 975 bp, Oryza sativa
  Clone ID: PAT_MRT4530_101308C.1
atgtcgtactccagaggatcaagaagtgtggactcaagtgatgttgaaaaccctgggaacaacctgtatgttactggcttatctgctcgtgtgacagatcgagatctggagaaacacttttctgctgagggagaggttattgatgctagcatagtacttgatccatggacaagggaatcccggggatttggatttgttaccatggctactgttaaggaggctgatctttgcatcaaatatctagaccgctcagtgttggaaggtcgtgtgataactgtagagaaggccaagagaagacgtggtcgaacaccaacgcccggaaggtatctaggcacaaaatcatcatgtgtgacaccagcacggaggtattccccaagctactcgcctgttgaaagagaccgctacagttcacgctactcacctgagcgagaacggtcttattctccttatggtagaaggcgatcatattctccatacaacaggcgaagatcatactccccctatgagaggcgtagatcctactctccacatgaaaggagacagtcctactctccgtatggcagatccccttctccttatggtagacggcgatcatactctccctatgacacacgtggttcacggcgtcggtcatactcatcttaccgtggttcccgctaccgttcaagatctccataccgttacagaagagagaggtcatgttcctatgaccattctgtttcaccatactatagaaggtgctattctccaagtgctagaggacggagctattctcgcagtgtatcacctcagaggagctactcccatagctgttccccggattctcagaggtcagggagctattctccaaggaaaagatacagtgaaaggaaaccgtcgcgcagcaggtcgtcgggtaagaggcattctagggagagctactctcacagccgcagttcctactcaaggtctgtctccagggagcgctcagaatga

SEQ ID NO: 1443 - DNA, 219 bp, Oryza sativa
  Clone ID: PAT_MRT4530_101309C.1
caaggtcggggagtatttgggatggcgctgctggttgtccagagacgttccagtcagttaggtctccctttgagcaagaggtggcaacagctggtgaggctcaatcatcaatgcaaaaaatgagagacgagcaccagcaacttcaccaattcctacctaaggtgatgtatcgcagtgcagctggagtagccactgtatatacatgtgatctctgtgtgc

SEQ ID NO: 1444 - DNA, 2757 bp, Oryza sativa
  Clone ID: PAT_MRT4530_10130C.1
atggatctcctccgctcgcacctccacaaggtccgcatcccggagcccggcagccgcatccacaaggacgagtgctgcgtctccttcgacaccccgaggtcggagggtgggctgtacgtcgacatgacctcgttcctggggttcgggagggagcacgtggcgtggaactacgagaagagtgggaaccccgtgtacctccacatcgtgcagcgccggaagccggagcccgacgacgaggcggatcgcccgctgaagaagcccacgctactcgccatcggagtggagggaggtttcactgatcaagaacccgaatacgatgaggcttttgaaattgttatcttgcctgaatttactcttctctcccttttccatcaattgacttgccagagaaggttaggattgcagttgacaaagttatacttgccgaaagtgctgatcgaaaacaacaattggcttcttgggttgctgacaagaaaaaagtcagtgcacatgctatggatctgaagcagctagacaatggtgtcattgtgccacctacaggatggaagtgcagcaagtgtgataaaactgagaatctctggttaaatttaactgatggcatgatcctatgtgggaggcggctttgggatggaagtggggggaataatcatgctattgaacacttcgaacagaccaaatatcctcttgcggtaaagcttggaacaattactgctgatttagaagcagcagaggcaacgttttctcatacccagaagatgatagcgttgaagatccactattagcgcagtattttgtcacattttggtattgatttttcttcactccaaaagaccgagatgactactgctgaaagagagcttgatcacaacacaaattatgactggaatagaatacaagaaagtggcaaagatgccgaacttttatacggccctggttatactggccttgtaaatcttggaaatagttgctatatggcctgaaagtggcaaagatgccgaacttttctacggccttggttatactagccttggaaatagtgcttgaaagctgtatttgcaattgccctagctgatccaacatgggacttgaacatgcaaatgacaaagtgggctcatggaatgctctctggcaaatactctgtgccaaatctctggcaaaaagaaggaatacaccctcgtatgtttaagacagttattgctgcaaaggatccagaattttccagtatgaggcaacaggatgcgcttcattttttccttcatcttattgatcaagttgatcagtcaaataatggaacaaattaatcggatccttttacagggttcaaattcatcattgaggagcgtcttcaatgcccttctggaaaagtctcctataacaaacgttctgactacattctttctttgaacataccgttacatgaagctactaacaaagagcagctagaagcatttcatgagaagaaagctgcaatggatttggatggaaaggaagtggcaaatggggaaattgtgaggcctagagtcccactggaggcatgcttagcaagttttgcaggcgcggaggaagtgcctgaattttacagcactgcattgaattcaaagacaacagcaattaagactgctggcttttgaattttacagcactgcattgaattcaaagacaacagcaattaagactgctggctttaaaacatttcctgattacctggtgttgcagatgcgcaagtttgtaatggaagcaggatgggtgccaaagaaactagatgtatacgtagatgtgccagatataattgatatctcgcacatgcgcagcaaaggcatacagcctggtgaagagctactacctgaaggagcttctggtgataacaaagctgaacctgttcatcctgttgccagtgaggacattgtatctcagctggcaagcatggggttcaattatcttcattgccagaaagctgctattagtacatcaaacacaggagttgaggaggcgatgaattggcttctctcacacatggatgatccagatatcaacgatccaatatctaaagattcacaggctgctgaacaaactgttgatgaaactagcgttcaaactcttgtttccttcggatttcaagaagatgttgctcgaaaggccttggcagcttctggtggaaatatcgagagagcaacagactggatttttagccaccctgaggcttttagctcagtacctactgattcttcaacaagcaatatggaagatgatgatgcacacataccagatggaagtggcagatacaaattgatggcgtttgtgagccatatgggcacctctacccattgtgggcactacgttgcccatgtcctcaaagaccaaggatatgggatacccgtatttctttcaaaggatataaagctttagcagcccaaagacttcgcaggcaagaaatacattcgctcgctgacttgagtcttagttatgggcacctatgatcaaaagcacggcggatagtcggtgaacttgcatgcagatggacttagagcgagtgttggtcacatcctgtcgtgctgactttagactgatcgatcagctgggatatcactttgttccatggcattatgcattggcacattcaattcttctttgtcgatctatcatcttagcgttaacattctgccatgaaaactttggactggctcaactttttacatatgaaatggaaaacaaaaggcaagggacggtccctgatgccgcataaaaaaaaaaaaaaaa

SEQ ID NO: 1445 - DNA, 1654 bp, Oryza sativa
  Clone ID: PAT_MRT4530_101310C.1
cttgtccggcacagagagacgctctcggctcgggcacgtatccgcgcgacgaggcggagtgtcggagcgccgtgactgagaacaagagaggccggcacagagagacgctctcggctagggcacggatcgtcgcgacgaaggaagatgtcgtactccagaggatcaagatatgagtccgactcatattctacatcgcccagacggagcagccgttcaaggtataggagtcgttctagaagtgtggactcaagtgatgttgaaaaccctgggaacaacctgtatgttactggcttatctgctcgtgtgacagatcgagatctggagaaacacttttctgctgagggagagctcaccgtattacaggttattgatgctagcatagtacttgatccatggacaagggaatcccggggatttggatttgttaccatggctactgttaaggaggctgatctttgcatcaaatatctagaccgctcagtgttggaaggtcgtgtgataactgtagagaagcttttgttgacagcagcagggtagatgtccgttgctgctctacgtcaaattcaaaagatttacaacctaacagccaaacatgctacctcaaccaaagggccaagagaagacgtggtcgaacaccaacgcccggaaggtatctaggcacaaaatcatcatgtgtgacaccagcacggaggtattccccaagctactcgcctgttgaaagagaccgctacagttcacgctactcacctgagcgagaacggtcttattctccttatggtagaaggcgatcatattctccatacaacaggcgaagatcatactccccctatgagaggcgtagatcctactctccacatgaaaggagacagtcctactctccgtatggcagatccccttctccttatggtagacggcgatcatactctccctatgacacacgtggttcacggcgtcggtcatactcatcttaccgtggttcccgctaccgttcaagatctccataccgttacagaagagagaggtcatgttcctatgaccattctgtttcaccatactatagaaggtgctattctccaagtgctagaggacggagctattctcgcagtgtatcacctcagaggagctactcccatagctgttccccggattctcagaggtcagggagctattctccaaggaaaagatacagtgaaaggaaaccgtcgcgcagcaggtcgtcgggtaagaggcattctagggagagctactctcacagccgcagttcctactcaaggtctgtctccagggagcgctcagaatgaattgaagcttgatgttctagagatcaataaagctctctatgcctaagtgtatgtctgtatctcgtgaagcttactttgcacctgtttccaacttagaaaccgtgtaccataatatttgtgtcgtattgtatcggatacttctatatgtttatgcttactttcgtaggcagatattattggtggttcgttatggtgtccagatctacaatctgtagcatattgatacttactgtgtgttgtatcaggttctgttatgctgtcattttcgcaggcagacacagttggttcaggcagtcaggctgggttttgtgctactgtgggcaaatcaagttaccgaatcaagtttataggct

SEQ ID NO: 1446 - DNA, 2310 bp, Oryza sativa
  Clone ID: PAT_MRT4530_101311C.1
ccctcaacttgtcatcgaattaaaaaatcgtcccccaaccacaaaaccagatttataatatcccttgacttacaaaaacattcactttaaatccttaggtagttttaaacccggttttatccgatggggggactgagtcagcatgggacccatatgggccccacgtgtcagtacgccacgtcactctttcccctctttcccttcctcatctctctctcacttttatcctctctggtatgggggccgcccggcgggtggagaggaggtcgccgggcgaaacgagggaggaaatccgacggccgacgacgtggcggtggcggcggtgacccgggaaaaagggagggccggggcagcggcgcccgccggcacgccgccatgtcctccccccgcgggccgccgtcatggctgttctgaaccttgtactgtgccatcttgtgcaatgccattgatgttcatgacctccttgtccttgcccatggcgtgctgctcatggttgctgcctccggtgtcagaggagctcccctgcaaatgctgctcctcttcgtcgtcgtcggcttggaacgtgatctcctcaaaccggccgtgcagctcggcgcaccgcctgcagccatggcgctccgccgccgccgccgatgacatgaagtcgacgagcgagccgcaggacgacgacgacgacgccgccggccggcagttcttgcagcaggcggcggcggcgccgcccggcgcgtccggatcatcgccgccgccgacgagatcgtcgtcgtcgtcgtcgtccgtcgctggacccggcctccagcccggcaccagcgcggcgaccttgccgtcgatcagctgggcgatgcgagtcacctcgtggtcggtgatgtccagctcggcgaccatctccgccgccacggtcatcgccgtgtcggcctcggtgtcgaaccggaagcagattatccggccacgccctgtgccgttcttgtcggcgatgcgcaggccgaggtagacgccgccgtcgtccgtcctcctccccttgatggtgatgtccacgccaccgacacgctcgttggcgtcggcggcggcggcgtcgtcgtcgtcctcgtcgaacagcatgtggatgtcgcggagccagttgtcaccgtcgtcgtccccccgctgcacggccgcgtccacgtcgttgtcgccgacgctattcgacggcgacaagccgccattgctgcaggcatggtggtcgtcgatgcaagcaggctggtgcaggtagttgtacatcagattgtagtagccaacgccaaaaccgccatgtccatcgccgccgtcgccggagaagaagccatcatcctcaagcggcagcaggaacgggtcgtcgagcagctccctcgccgccggccgccgcgccgccggggcgaggcaccgttcgatgaattgcctcaccaccgggtcgctcaccctgtacaacgccgcgggcttgatcccggagatgactcgcttgtagatttggatgggattggagcactcgctgtaggggtaatcgagggtgaccatctcgaggacgcacatgccgaaggagtagacgtcggcgagctcgtcgtaggactcgtcgtacacctcgggagccatgaactccggcgtgccgacgcagcgggcgtggccgccgccgcggcggaacgcggcgaggccgaggtcgccgatcttgacctcgccctggttgccgttgacgaagatgttgtcgcacttgaggtcgcgatggatgatgggcggcgagtgggcgtggaggtaggcgaggccgtcgaggatctgcgcgcaccagcgccgcaccgccgccgcgctcacccgccggtgcctctccctgtactggcggagcgtgccggagacgaagagctcggtgacgaagttgagggcgcggcgcggcgcgtccacccagtaggcgtggaggcgcacgatgccgcggtggcggagcgcggcgaggaggtggacctcgccgtagaaccgctccagctcgccgccgccccgcacgacgtcgcgcagccgcacctggttccacgccacctccactcccctccactcatcgaaccccctatacacaatctttgacgatcccttgccaagaatctcattgaatctgccatatcttccagtgggatcaacctcggcatagccagcctcagcgaggaggaggacgccatggccatggccattgctctgctgctgcagggctcccatcattctacacacactctgctcagctcagcagcaacacatctccattgatccactcaagaagaactcgtgagcgtggcatgtcgatctcgaggagatggagatagagag

SEQ ID NO: 1447 - DNA, 315 bp, Oryza sativa
  Clone ID: PAT_MRT4530_101312C.1
atggcgctaccgctgtcaagctctgccgccggcaccgacgaggaggaggaggatggcggcagcgcaacagccatcgccgccgtggtaggatctcttggcggacctgctagggctcgtgctcctccagctcccgtcccttccaaccacgtccgcctccgcgccgtctgctgctcctggcgcgcggtcaccaccgccagctacctcgccggcagctacaaaaaatttgtgatttcggatccgtcctccagtgagctcagcatctggttgaaagttgatgattccgatctacgaggtaggaatattgattcacgctaa

SEQ ID NO: 1448 - DNA, 997 bp, Oryza sativa
  unsure (1)..(997): unsure at all n locations
  Clone ID: PAT_MRT4530_101313C.1
tgggtcgacgcgccacgcggcgccctcaacttcgtcatcgagctcttcgtctccggcacgctccgtcagtacagggagaagcaccggcgggtgagcgtggcggcggtgcggcgctggtgcgcacagatcctcgacgggctcgcctacctccacgcacactcgccgcccaccatccaccgcgacctcaagtgcgacaacatcttcgtcaacggcaaccagagggaggtcaagatcggcgacctcggcctcgctgcgttccgcctctccgccgccggcggcggcggcgaccacactcgctgcgtaggcacgccggagttcatggctcccgaggtgtacgaggagtcctacgacgagctcgccgacgtctactccttcggcatgtgcgtcctcgagatggtcaccctcgattacccctacagcgagtgctccaaccccatccaaatctacaagcgagtcatctccgggatcaagcctgctgcgttgtacagggtgagcgacccggtgatgaggcaattcattgaacggtgcctcgccccgacggcgcgagctgctcgacgacccgttcctgctgccgctcgaagacgatggcttcttctccggcgacggcgatggccatggcagtgttggcgttgcctactacaatttgatgtacaactacctgcaccagcctgcttgcatcgacgatcaccatgcgaagggatcgacaaggtttgggtgggacggacgagacggcggcccgcggggggaggacatggcggcgtgccggcgggcgccgctgccgcggccctccctttctcccgcgtcaccgccgccaccgncacgtngtcggccgtcggatttcctccctcgtctcgcccggcgacctcctctccacccgncgggcggncaccataccagagagggataaagtgagagagagatgaggaagggagagaggggaaagagtgacgtggcgtactgacacgtggggcccatatgggtcccatgctgactcagt

SEQ ID NO: 1449 - DNA, 315 bp, Oryza sativa
  Clone ID: PAT_MRT4530_101314C.1
atgcatgtggggcccaccatccgacatgggccaataggattgggtgaccgggccatcatggtatcagctgatcagggtgatggaccaaatggattagtcagagtgggccataacaacgggagggccccaccccaatgttccttctccaatatccagcattatccatggcgacaattgctacacctctccatctccatgagtgccaattcgaccacctcgaagtctctcaagtatgaaacggagaagacgacgtatacgtgcatgcaggattgggctcattctaggcaacacaacacaggattgtcgattgctctg

SEQ ID NO: 1450 - DNA, 312 bp, Oryza sativa
  Clone ID: PAT_MRT4530_101315C.1
gcaggggaaatctatggatcgagctaactccttaaaaagaaataaaatctaatatacaatcaaagaaacacacacgcacacacacatgcttgcactgcatatatatgagcaacgaactctattgattagattctgattctctagagataaaagagaacctgatatagagatatacacgatcatgctactctaaacgagctacctgccctctaaacgaactaccttgcgcccttaaaccacctatagtcgaccgactcccccttgcatatgtacatcttgccgacttagactgaggactcgatcatgtaaaac

SEQ ID NO: 1451 - DNA, 344 bp, Oryza sativa
  unsure (1)..(344): unsure at all n locations
  Clone ID: PAT_MRT4530_101316C.1
atttctgaagagatgttcaaaggagtgaataccataacctcttcactttataatggaaaacacttgaaaataatgactcttggagatggtcaagtgttttcaagtgaataccataacctnttcaactttattaatggaaaactcttgaaagacacttcggctctccttagcnggcttccttcggggggggggggggccatgattttggctcgtgtgctgctggggagccctggcctgtggatgacgggcatgccagctgtcctcgggaggcagagcttggcgcccgtgcccggagggtggacgcctccttggccttcgaggccactgctggtgtgctcgtgaac

SEQ ID NO: 1452 - DNA, 1624 bp, Oryza sativa
  Clone ID: PAT_MRT4530_101317C.1
ccccgaggccgagaccttttgcccccctcctctcctccgcctcctccacacacgagcgcgtcccccgacgccgcgccgagatctagggttgggcgcgcgcgacgccccccccccgcggcgaggaggatgagcagcccccatggcggcctcgacgaccagatcgagcgcctcatgcagtgcaagcccctccccgagcccgaggtcagagcactttgcgagaaggcaaaagagatattgatggaggagagcaacgttcaacctgtaaagagtcctgttacaatatgtggtgatattcatgggcagtttcatgaccttgcagaactgttccgaatcggtggaaagtgcccagatacaaactacttgtttatgggagattacgtggatcgtggttattattctgttgaaactgtcacgcttttggtggctttaaaggttcgttatcctcagcgaattactattctcagaggaaaccacgaaagtcgacagatcactcaagtttatggattctatgacgagtgcttaaggaagtacgggaatgcaaatgtgtggaaaacttttacagatctcttcgattacttccccttgacagcattggttgagtcagaaatattttgcctgcatggtggattatcgccatccattgagacacttgataacatacgtaacttcgatcgtgtccaagaagttccccatgaagggcccatgtgtgatcttctgtggtctgatccagacgatcgatgtggttggggtatttctcctcgaggtgctggatacaccttcgggcaggatatatcagagcagttcaaccataccaataatttaagacttattgctagagctcaccagttggtcatggagggattcaattgggctcatgagcaaaaagttgttaccatatttagtgcacctaattattggctatcgctgtgggaacatggcatcaatcttggaagttgatgattgcagggagcatacattcatccagtttgagccagccccaagaaggggagagccagatgtaactcgtagaacacctgactatttcctgtgatgtaaaagtggtggactgtctctgcagcaaatgtttgatagctaggtgaagttccctggttgcagatatttttttcccctcgaatctcctgtgtgttattcttactacctttgcccgtggcgcttggctatcgcgagctgctttgctgcatcatgattcaagtgtatacctacagctgggaggattcatcgtgttctcacttatctctaattggctgatgcttggcttgggggctgcagtggtgactcgaagcatcaagtagcaaatttgtattatgaaaggaaaactattctctttgtattcattttgttcgcctttcttccccacaaatttcacctaattttcttttttcttttttcatgatccttgtagagatgaacaatgtagttgtatggctccctgttgagccggtaggtctttctgagtacatcttgatttgccgtacataattgcttgaaaaacaagtattagaattctttgtgaccaaaaaaaaaaaaaaaaaaaatcaaaaaaaaaaaaaaaaaaagcaaaacgcgaacccaacctcctggcgcggtcccccgcgcccaaagg

SEQ ID NO: 1453 - DNA, 183 bp, Oryza sativa
  Clone ID: PAT_MRT4530_101318C.1
atggctaggggcggtacgatggctattgaggatagaggagaggagagtggaatgatggtgctggaggtgaagggaggaaagaggcgcggccatgcggtgctggctaactcagttgggggagttggcgatggaggagagggtgtctgcggctgggggagtttctggggagagttgttgagatag

SEQ ID NO: 1454 - DNA, 423 bp, Oryza sativa
  Clone ID: PAT_MRT4530_101319C.1
atgtcggggagggaggatggcagctcaacaatgcccacaagagggagcacggcatcaagaggcgttgtcattctcggcccaaaaatcgagctaggcttttgccaactgtatcatctccctccgaaccatcgacatcccaaagctctgccacccgaacgacctcctccatcacgtgggctcgtcgcaccagagcccctccgctggccaacacccctgtcacagccccagctcattccgcactacaagccgcgcctccacgcgtcacaccagtctatcgctgtcgccgaccaccggatctggccagagggtaccagatttggcgcccactgctgccgctaccgcctcgacattgccgccgtcactgcaatcccaccgcatgacatcgctgccccgccgcctatcaccacctccgctcggctctag

SEQ ID NO: 1455 - DNA, 431 bp, Oryza sativa
  Clone ID: PAT_MRT4530_10131C.1
aaaaggcccaagggttttttttaaaaaaaagcaaatttttttaactaaaccttaaaagaaaattttttcttaaggggggggggaaataaaaaaattttaacccgggccccttaaaacacaaaaaagggggcaaactaatttaagctggggggtctacctggggggttgatcccccccccgcccatagtgccggcgggttaaaagcttgtccatagttgggaaaaacccccttcccccctttccatcaggggatttaggggcccggggcctgaacctgaaaccctttcccataatatgtggggggggcaggggaaatcccctagggggctgaccttatcttggggggagggggaggggcctaaaaaccataaaaaaactgctttttgaaagggaagaaaagcctttgggggggaccaccctggaaaaacctt

SEQ ID NO: 1456 - DNA, 549 bp, Oryza sativa
  Clone ID: PAT_MRT4530_101320C.1
atggctccctcatgtgcagtggcgttgacggcgacggggtcgtgcagcacaaagaaagcttcggcgccggattgggtggaggattggaggaagaaggcctccagcttcggtcaggtcactgtcaggtgggtccctatgacagttgtggcagttatggcggtttccggcatggttacacctgacatccgccagagcaagtggccaccaaagccggcgacttgtgaggttggcggcggcctccacagatccggcgtggcagactcaaaggttgaggatggccggagggatgccggcgttgaggttggcatgcaggaaaaggtggtgcaagcgtggtcgggccggcggtggcgggagccgagcggaggtggtgataggcggcggggcagcgatgtcatgcggtgggattgcagtgacggcggcaatgtcgaggcggtagcggcagcagtgggcgccaaatctggtaccctctggccagatccggtggtcggcgacagcgatagactggagactgttgcggtgtgtgaggtgagcccagtgtggaggcgctag

SEQ ID NO: 1457 - DNA, 385 bp, Oryza sativa
  Clone ID: PAT_MRT4530_101321C.1
gtttgatgttgatggatttcatccactgaacattggacgacttgcaatgcaaggtcgggatccgttctttgttccatgcacccctaaaggatgcatggaattactacacagatatggagttgaaatcaaagggaagagagctgttgcaattgggcggagcaatattgtggggatgcctgctgcattattactgcaaaaagccaacgcaactgttagcattgtacattcaaataccaagaagcctgaggaaataacaagacaagcagatattgttatcgcagctgttggagttgctaatctggtcagagggagttggataaagcctggagctgctattattgatgctggcatcaatccagttgatgatccagaaagccctcgaggt

SEQ ID NO: 1458 - DNA, 159 bp, Oryza sativa
  Clone ID: PAT_MRT4530_101322C.1
gcctggcttctccctatgctccccgtgtaatcttcagaacctgaagaccggacccaggcgttccagacctcttcagaacacggtggtatggtgatagtagtgccgtgtgacctgttgatatgctatataatccacagaatatttcggctttttcaaaaa

SEQ ID NO: 1459 - DNA, 450 bp, Oryza sativa
  Clone ID: PAT_MRT4530_101323C.1
atggcatcgtcagcttcgtcggtgttcgcggccttcgacaaggacggcgacggcaaggtgtccgcgtccgagctgcggggctgcatggcggcggcgctcggggaggaggtgtccgaggaggaggcggcggcgatcctcgcaacggccgacaccgacggcgacggcttgctggacccccacgaggtcatgaggctctctgctgctcatcagttgcaggagccagcggaggagagcctaaggtgcctgagggaggcgttcgacatgtacccggaggaggaggagacggcggtgatcacgccggcgagcctgcggcggatgctgaggcggctggggtcagagcatcagcggctggagatggaggagtgcagggccatgatctgcaggttcgacctcaacggcgacggcgtgctctcctttgacgagttcagggtcatgatgctcatggcttga

SEQ ID NO: 1460 - DNA, 2607 bp, Oryza sativa
  Clone ID: PAT_MRT4530_101324C.1
acagtatggaaactggggcctcaaaactattaatttaaaaatcagctcacatcctctctcctgatcaaatgttttacaggtccaataatttaaacttaaatgggttaaaaagctaggaaaaagaactatggagcttcagtttgctcggacaaactgaactcaaaactatggatacatgaattttcaactgactccaattaacacagttgaataaggctggaaaaaattgtatggacatgcctatctgctgtaagcagttttcttctgagtgttgtctcaatggatcgctctctgccttgcaaatccaggctgaagaagcattgaagtgccttttggtgtttctgcggctacatggctccgggtcttccttccattcactgcaagtgtagaagggctgttgcctccaatgtcccagaaggtacgcttcttggctgttggtactggtgacgtaaaccggtggctcgggctccttagctcgcctgcagctgctgcatctttctgcgcctttcgcacgcttgctctggtggcaactcttctctcacatgttgctgcttcaggaacatttgaggtcttcctgttgatcagatcacggatgaactcatccttctgcttgagctgcagaaggtgctctttcttcatcttctcgatctcggcctccatggccttgactttcctctgcagatcccggacctgtgcattctctgctgcaggtcttttggaatctggtgtgttgaagcagttcccagctaggatagaacgcttcacctttctttgagttgagcatggtgttgatatttgcgctgagggagcaggagattgctgcggcgaggcattggaagcaagtgtctgagcctgaacagtcagtagtttctgttgttgccgtgccaactgctgcctcagctcactgttctccttctgcagctccaacaccagcttagcctgatcagtctcagaatctgtgactctcaaaacctcctcatttgcagtggttaatgccttggttttaatctccttggcacgatcagcccaatgaagcgtgttctgtgtctccccgaaggaaagatttgaggggcttatgttcgcgatcatgacagtgttgcaggagcccccaagtgaatccttcaggagttgtgtcagcttggaattgcgatatggtatgtgcttcttcccctccacaagagcattgatacagctgctgagcgcaaggagcgagcggttaatgtttgcgccttcaattgatctctgcgtgcgctgatcagttgctagagctctttctgatccagcaagatcaatgagagagagctttccaactcgcgtcactatgctacctccatctatggatctatattcgacgatgacctgcaggattgcatgggagcgtgatgaggtctcatttactcgggttggttctgttgttctattctggttaccctgctgaagtaatttcattacctcatccgtggagtatgctctgtagtgagtaagaccagcagcaacagttccctgcttatcttctctaaggaggaggggtctaccaggagagagcaagtccctcactgtctcattgtagacctcgaggtaggacagctgaattgagtggttgccgtcatgactcctctgcctcaccttggtgaacaaatccttgatggcgagcaccattacgccggggctttccatcgtcccaagcattgtgtaggtcttcccagcaccagtggctccatagcagaacaccgtcccattcctaccttgcagaacaccctccacaagatctgatgttgtggtgctgtagacttccgcctgcgtcgtggtgtcggggaaggaggagtcgaagcagaaatggcggccgcgcacccgcttcagcctgaggtagtcggtctccgaggcgaactccgtcaggtacacgtccttcttgttcacgatcttgacgcagctcctcgacccggcgtccttctccttcctcgacatcggccgcagcctgacgaacaccatgattcggctgccggcggcgtcgccattgccggcgccggcctcccctgcggtcttcagcctggcggccatgccgccccccagcgagagcttcctggccgcgggcgcggggagcgccggcgccgccttcttgatggggcacgacatggtggcgatcccgccgtggctgacgttctccttctctgttgggtcggcctgcctggagaacacgacgacgtggctgctcttgggaggcggagctggaggtgggggtggggctcgctcctccggcggcgccatgttctcccttagcaccgccgccgggacggcgtcgtggcgcttgcgccccacgtcgtcctcctcctcggcgttcctcccgttctcgtccccgcccacctcgccgacggcgtactggatgctgcggcggccccgcgcgccgccgccctgcgacgaggcgagctgctgcttgtgctgctcgtagaagagggtgagagcgcgcatcttctccttgaggccgtggtggtggtggttcgtcaagatctcccgccgcgccccgccgcgtcccggagccgacgccggcgcgggcgccgccgagctccacggctggccgccggccgcgctggcccttgtcgagaccggcat

SEQ ID NO: 1461 - DNA, 780 bp, Oryza sativa
  Clone ID: PAT_MRT4530_101325C.1
atggcctcgttagtgattcagccgaagctgtgtgtgatggacaaagaacaaatcctgagcagtcacctgttcgcgctctccacgttcttatcagaatttgtgactgctcatcagaattccccgcacgagtttggcgtgcttagcgcgggggcgcttgtggtctccggctcgccgccggtcgtcgcctgggttggtgatgcttttgcttgcttgcttgcagccatttcccggggcaccgagtggggcttctcgcgtggtctcgcctcgagtacctcgtgctcgccccccgccgctgtcgaggacggcgacggcgcccgtgagcgcgacaagggatcatacaggtacgggccgctgggaagcggaacaccctactcctatgcgtgggattatgatgagttcttgcaagaggtcttgagctcctggggaaacctaactgttcttcctttagggctcaagctattgagagtcgtcccatttctcggtgggcgaggtcctccttttatagttcaagggataccacatgcaccgtctatgcgtacccctccatgggagggggacccacctaacctggatcagaccgccatccgtgccttcaaccggaagcaaggtggttgtgcgtctctaggtggggctcaacgccgtcctccgcctgacacgggggacactcctcatgggacggttggggcgccgcgcattgaaagcggtgagcggcgctcttgctccgcccactctccccgccacgtgatggccggctgggggcctcagggcagcacgcgctga

SEQ ID NO: 1462 - DNA, 1081 bp, Oryza sativa
  Clone ID: PAT_MRT4530_101326C.1
ccggccgcccgggggcggcacctggcgcgtgtccacgcgtccgctcacgcttcttcttctgccattccatccgtccaccgccgcctccgctctctcttcttcttcttcctaccctttgcctagttgcattcggagaggagaggactgattgattgattgatcgatcgatggccatcgaccacgagtcgccgttcaaggagctccgcctcaagaacaggaggatcatgggaggaggagggcctgagccggaggaggaggaggcggtggcgcacggagagcagtggccgcggtggctgagcccgctgctctcggccagcttcttctcgcagtgcaaggtgcacgccgactcgcaccggagcggcgagtgcaacatgttctgcctcgactgcgccgccgacgccgacgccgccgccgccgcgctctgctccctctgcctcgcccacaaccaccgcgaccaccacaccatccagatccggcggtcgtcgtaccacgacgtgatcagggtgtcggacatccagaggttcatggacatcggcggggtgcagacgtacgtcatcaacagcgcccgcgtggtgttcctcaacgagcgcccccagcacaaggccggcaagggcgccgtcgccaacatctgcgaggtctgcagccgcagcctcctcgacaacttccgcttctgctccctcggctgcaaggtcgtcggctgctccccccacgccgccaccgccgccgccaccgccaccgccaccgccgccaggaggaagagactacgccacgcccacgccatggcctccacctccgactccgacaactccacctcccctgccaagaggagcttcacgccgtccaccccgccgccgccgcccaccctgccgcccaagcgccgcaagggcattccacaccgcgcgccattcggcagcctcatcgtcgagtactagccattgccaaccaacagcaacttcacctgcaggaatccagcgcgtgcgcaattgggaatcgcattgcaaagcggccgctctagaggatccaagcttacgtacgcgtgcatgcgacgtcatagctcttctatagtgtcacgtatcatctg

SEQ ID NO: 1463 - DNA, 198 bp, Oryza sativa
  Clone ID: PAT_MRT4530_101327C.1
atggccccacctcctatacttccccctccccttctttggctcgcctccatctgcaacatcgggctcctccgcctcggtctctgcctagcggcgcagggggctcgccctcaaccagtcgctcgaccacaccgctgtggcaagcctggaagcagcagagggaggcgggtcttcgttgataacatgagaattgctacgtaa

SEQ ID NO: 1464 - DNA, 468 bp, Oryza sativa
  Clone ID: PAT_MRT4530_101328C.1
tagtccgataggattcatctggattaaacgccagatccagataggccgttctagacaccacaacgttgaggaaaagattccacaagcattcattagtgatagctacaagaagttttggagggaaaaatcagtgaagagaaatcccctatcaaggaaattctggtaaactatttgcaggacacacatatggtgactgttgagccagatattcgtattaagtgcttgacacaagtgtgtgttcttaattagtttgctgtcctgtaatcccttgggtgcaaccattttttcttttctgcaatgtactgcatagtgccccatgttcacaacagttacaccctgagtcagtgggttctgtacatacatgggcaatcatagactattagacatactaggatcttctctctattaatctacaggatgtagtgttctcagttagtaggatttgtaaccgccctatttatgtaacaa

SEQ ID NO: 1465 - DNA, 237 bp, Oryza sativa
  Clone ID: PAT_MRT4530_101329C.1
gctgattatccaaagcttgcaatcatccgtgcggtttcaggttgaggacacattgccctttagtctgcaggtgcatcatcgcactaggcatgtccagatcttggctgcatcatgtctatacctgctatatggagacctcaacccatccttacagcacaagagggggtcctcactaactcatgcgtcaagacatgagtcaccctgtccttatcacttctgcacaagagacgggtaagc

SEQ ID NO: 1466 - DNA, 416 bp, Oryza sativa
  Clone ID: PAT_MRT4530_10132C.1
caactccatcgacttcgccgatccggaccccgccgaccgcatcctccccgcggggggcccgggtcctgtgcccggcccctgttcctgcttctactgcatcccctgggttattatcgtgcgcttatttgtgcgctcggtcgacacgtgtgcctttctcatctttctttttcattgcggttttatccatttccgactggattagtttctccattttcttctcttctcgccatgctccttctttctttccacctttttactttttcttttccttctttttacttctccattttctttctcctttttttttcttttctctttttttgtatcttcttcttcatttctatttcttatacctttatttatccctttctcttctttttctctcctttccattttttcttacccttctcttcttt

SEQ ID NO: 1467 - DNA, 406 bp, Oryza sativa
  Clone ID: PAT_MRT4530_101330C.1
tggaatttctttaacatcactgatggatgttgagaggggggggggttttttcaagccagtgggcgggaaagctatggtggaacttgatgctgcacctttcaagaaatatgcatcgatgcgtgatgagtgggccctcaagaacagatacatcagccctggccccatccagttcagcggccctggaagtgatgactcgaaccatactttgatgctggaactcggtgctgcgctatagagatgcgtcctttactttgctcttacagtttttgggagtggagactggcactggagcagcctgcaggtctccatattgtgtgtgaaattgcctaaccagaagcttgatgggagccttctgcgtagccgactggatgcggactgtggtagcaaattagaaccgggttttagt

SEQ ID NO: 1468 - DNA, 405 bp, Oryza sativa
  Clone ID: PAT_MRT4530_101331C.1
tttttagcccccgaaacaattcgttttcctcccttctccagcagcgtaggccagctagcggtagcggcagcagcagcagttgttgttgggggtaggtgcgactactccccaaccaaaccctcgcttccctcgcgcgcggcgcggcgatggcgctgtcactgaaggcggcgaggtcatgggcggcttacgtactgccgccggagctagccgtcgcggcggggggagacctgctcgccgacctcgccggcacggtcgaggtgctcgtggccgggctggtcatgctagccgtgtggttccgatccgggggaggggcgccgtccaaggccgtcgggccgccgccattcccgacgccggtctagatagaggtcgacggcgacgccgacgacggtcggaagctcgtcaccg

SEQ ID NO: 1469 - DNA, 483 bp, Oryza sativa
  Clone ID: PAT_MRT4530_101332C.1
atggccgacgccggcttcatcgccaccacctgcaacaaaacccacaacgccaagtgcgtcgccgtgctcaccgccaacccggacagcgccgacgcctccaccgtctccgacctcgccggcgtcgcgctcgacctcgccgtcgccgcagccagcgacgccggggccctcatcaacgacaggtccagcaggtacggcggcggcgcgccggagggggaagcgctgcgcgcctgcagcggcgcctacttcgacgccgccaacgacctcgacatcgacgcgcacgacagcctcggctccggcgactacgccgccgcgtcgcgcctggtgtccggggcgagtggcgccgctgacacgtgcgacgcggcgttcgccgccgccaaggtgagctcggtgatggtcgacgtcgaccagaagatgaaagacagatgcggcgtcgcccgtgatctcatcaaccttctcattaaattccccccaagtgataattag

SEQ ID NO: 1470 - DNA, 1217 bp, Oryza sativa
  Clone ID: PAT_MRT4530_101333C.1
atggacgaggaccgcgcggtggaggcggcggcaagcgcgtggcctggcccctcccgccgccgccgcctcatcgagttcctcctccacgcctccacgcggctcgacctccgtcccgtcgtcaagtacaccgcgctctccttcttcgccgaccgcctactgccctccctccggaggaagatggggttctgtggcgcacggggtggccgagctgtgacctcctggctgctcgagcctctgagggacagcaacctggagctcttcgccctcgttgccgtgtggatcgccagcaagattcacgagctgaagccgctgtcggtgaagagcctcaaggcgcttggtgatcgcatcatcgccgaccagcatttcacttgccgcgatttcgccaatgctgaactggtgttcatggaggtagtggaatacaacattgggtccttgaacattgcttttacatacctagaggagcttctcgtgcaattcagggaaatatccaaaataggtgatcttttaaatatggatgtttgcatggaaattttggatattctttatgagactgaagatagttcatggctttttaactctccctgtcaacttgctgcttcagctcttgttactgcatatgccatatcagttcctaagcagagatgggagttcccaatccttccttgggttacgtttacgacatcatatgatgaagaagaaatcatgaaggttgttctgactattctaatgcacgtgcttaaaccagatgaaatgaaagggaagggcgagagagatttcaatatctgaggtttattgtgaattctttatgcgtagagcatgagtcccagttttgccgttgtaagcactattctcatgtaactgtaagtactgctacacatgtttgtacaaggttgtgcagcccgtctatgcccgacgaccgacattgacacattgttgagactaaaatgttgaaaatgcaagggaattgcttttcaaagattaaagaaatgcaagggaattgccggcagcccgattcaactgaaattcatgattggatattaagaagtaactaatatttatgagtgccttattttacccatcgattctgtaaatacgtttaatgccatatgttgatgaataatgctcactgataattctgtaaacatgtacagaagtattgtcttctgatgtttcagcttatgtgaatgatgcagctgtgccgatggtacctcgagatt

SEQ ID NO: 1471 - DNA, 291 bp, Oryza sativa
  Clone ID: PAT_MRT4530_101334C.1
atggagatgcggggcggcagccactacagcttccaggaggatgcgagtacgccaacctgcctgacgctgaggtgggacttggccacaacgaccaaggtccagaccagcaagccttctggatggcttgcgggctgggacctcagcgccagccataatggcgctgaccgtgggaagctcagtgccaaccggcctggcgctgaggtgggacttggccgtttcggccatggcccagcccagcaagccttctggatggctgggctgggaactcagagccaggtgcactggcgctga

SEQ ID NO: 1472 - DNA, 1142 bp, Oryza sativa
  unsure (1)..(1142): unsure at all n locations
  Clone ID: PAT_MRT4530_101335C.1
gcgattcctttctagcggctcgacctccgtcccgtcgtcaagtacaccgcgctctccttcttcgccgaccgcctactgccctccctccggaggaagatggggttctgtggcgcacggggtggccgagctgtgacctcctggctgctcgagcctctgagggacagcaacctggagctcttcgccctcgttgccgtgtggatcgccagcaagattcacgagctgaagccgctgtcggtgaagagcctcaaggcgcttggtgatcgcatcatcgccgaccagcatttcacttgccgcgatttcgccaatgctgaactggtgttcatggaggtaatgcgaaatatatacaactacatggcgtgctccatttcattgttatattccttttcccccttctattattttcttgtacttccattgtctaaaaagattatctccttcttgttcgtgttgtgggttctgtangtagtggaatacaacattgggtccttgaacattgcttttacatacctagaggagcttctcgtgcaattcagggtctttggattggttatatttttaatattggtgtttgcatggacagttttggatattctttatgagactgaaagatagttcatggctttttaactctccctgtcaacttgctgcttcagctcttgtatgttatttaatgcagcattttgttactgagattttgtatagactgctgaattatgatttatatgatgtctcatttcttttcaggttactgcatatgccatatcagttcctaagcagagatgggagttcccaatccttccttgggttacgtttacgacatcatatgatgaagaagaaatcatgaaggttgttctgactattctaatgcacgtgcttaaaccagatgaaatgaaagggaagggcgagagagatttcaatatctgaggtttattgtgaattctttatgcgtagagcatgagtcccagttttgccgttgtaagcactattctcatgtaactgtaagtactgctacacatgtttgtacaaggttgtgcagcccgtctatgcccgacgaccgacattgacacattgttgagactaaaatgttgaaaatgcaagggaattgcttttcaaagattaaagaaatgcaagggaattgaagt

SEQ ID NO: 1473 - DNA, 1920 bp, Oryza sativa
  Clone ID: PAT_MRT4530_101336C.1
atgacaagtttacctctagttgaagatcgaaactgttgcaactcaacccgaaatgcaaaaaggcgatcccaaggcgattcaagctccgagaagcttccacccgtggcgatgtcgactttcgccagcccgtctgccgcaccatcagccgaatacgcagaacaattcttagccgaagcccttgaaacaaagaagcaaattcctttgggcaaaattctcctcggctacctataccaaatgttgagcaatgcatcggctaaaatagccataggttcagtagtcggtgcaagtggaccatggtggctgctacaaacctggctcaacctggttgccatgaaggctgtaaatcagccacctttgacagatgctgaatttccaagtctagaacccaccatcaatgatgatggagaagaagtcacccaccgacgatgcatgtcatatggagaagctgcatcaacaccagccgattccggagcaaagctatcggctgaattgctcaaagactggttatgcagtttctgtgaaggctttcagaaagatgcccgagtttggtttgcatatgaggattcaatggactttgagctgccatcggacttcagatttgaagaaatcaattctgagaaatttgataagtctagagaaacaacagaatcttctcctcctcgcaagagcaatagcggcaaggacatagaatatgccctaggcctcataccaaaaggaggtggactagctccccctgtcattggctaccatgcccccaagacctcaagtctactccaagggcaactgagagaaccagccaatatcggcaggaaaaggaaagctaaggcatcggccgttgatctatcggctctggctccgaagaagaaagccatgaagaagaagtccaagccaaccgatgacttgcccgccttagatccatccatagaaaaagtcctggatgaagaggagattgaagaagatgttgaccaggcagcagctagactaagcgactcgggagataagacaccatcggcttctcgtaaaagaacacctcctactcctgctgctccagctcacttttcaaggaaaaagaaaactgctgtgaagaagaaatcggcaccagcaccatatagacaagttccatcggctcctcctccttctcctcctggtcagccgatatcaagtgatcgtactccatcggctgcaggtagccataatgttgaggaagaagaacaaccagccgctcctgctatcccagtcttagccgatctgttttcctttgacatcaaggattactttgatgaagaggcagaagaagaaacaacaagtaagaccctagctcctccggatgaagatgtcaaaagaactcttgaagatatctctcatcggctagagtcatcattggacaacttggtagctgactgtggttcaattcgggcaagatttgcagagattcaagccttagtcccggatgacctggcgaatatcatctctccagctgtgtatctcgagcaacatcaattcaagctggaaaaggccaagcaaaggatagccgatcgacgggagcgaaaggatattgaagccaccattcaggccaatcggcaacttgtgcataaagagaaagctaagcttgatcagctctctattgggccaattcagtctaacatagatcagtttgaagcccgcaaaattgatctcatagcacaatttgaagaatgcaacgccgaactggatctggagaaacaaaaattagctaatctccccaacgctgttgaagaacagacgtccagactaagatcggccatcaagaaagtagccgacatgaccaaatccctcaaggtcattcctggaaccgatgctcaagacatccagcccattgaagaagtagagcaaattaggcaacaagctgtgtcggctatccaacgttacttgtctgggtga

SEQ ID NO: 1474 - DNA, 408 bp, Oryza sativa
  Clone ID: PAT_MRT4530_101337C.1
atggggaggccgccgccacctcccttgggcactaccgccgctgcatgtcgccaccaccaacccaccaccccgagcaccttctccccagatctggctaactccggtgaggccgacggagagggagagcaagacgaaaaggggaccggatttgcacctccccgtcgctcgtggggagggcgccggtcacatgtgccactgctcgccgtctggaagagggggacggagggggagggaagcagccagccggcccgctgggacaggggagcgaagggaggtggcagccagcaggtgcaggagggagaaggggaggaaagggcagcggagttggaaggtgtgagacgaacgagtcaaggcgtccgcgtctcgcatcgcgcggataaggaaaaggctgacgcgcggcacggataa

SEQ ID NO: 1475 - DNA, 1371 bp, Oryza sativa
  Clone ID: PAT_MRT4530_101338C.1
atggcagaagttgatacaaagttacttgaagttggtttgaggttcaaaaatccatataagggttggttattttgggtggcatatggcggccgtactggctttgatgtgaggaaaagatgcacaaatgtaagcaaaatggatggtaaggtgacttcatgcagatatgtttgtttcaatgagggtcatcgaacaaaaaggcaaacggaacatgtgacaaggtgttttagagctgatacaagaactgattgcaaagctcagatggttatttcattggatcgaggtgcaggaaattatgaagtcattgatgtgcttgaacacaaccacccactccacttgccagagaccttccacttgatgaaatcacaacgcaaaatttcaaaactccaagcttttgaaatagaaacagctgatgattctagtattaggccaaaagctgcccatgagttggccactcgtcaagttggtggaccacttaaccttagctacagttgccgtgaccgccaaaattatttgcaaagcagacgtcaaagggaattggcttttggacagaatgctgtgaagcatttatctccagtgaaaggtaaagaggatgatgaaggtgaagaggaagacgaaggtgaagaggaatcgcatgttcgctttttaggagtgcgaagtacacagctaagtgagagcttcaacaatgcattgaagaaccatttgaaatcagattttgatatcattcgatttcttaagcattttgagaggtcagttcaagacaaaagagataaggaactacaatctgaatttgaggcaaggaagaagctacctagaagactaatgtgcacaccgatgttggttcgagctaaccaagtgtacactccagtgatttttgaagctttccaaagcgaatatgaaagatccatggctgcgtgcgctagagttttggatggagaacacagatatgctgttgtagttgggaatttgcttggtgagctagaggagaaactcaatttactatctgctggtggtacacatgagccctacgaggacaaagaaaatattgacccaaacgcgcaacatggagatgatttgcttagtgctacacaactaaacaagaaggaggttcagtcaaacaagtcaaggagaattagaacttggattgataagctacgcaaggggaagcgcaacaatcctaaatctgcaaaaccaacaaaaaagggagtaaagaaaaatgatgctttacagccacaggtacaagttaaggatgatggcagccacaaagaaagagacgtggagcttcaacaatacaatatcattagcgattttacccaccttgtgacagcaccaagttgtgatgatgatattctctgtgatcaagatctgttctaa

SEQ ID NO: 1476 - DNA, 389 bp, Oryza sativa
  Clone ID: PAT_MRT4530_101339C.1
cccacgcgtccgcccacgcgtccgcgcacgcaggcgtcgccgtcggcgagcggcggcggcggacggtggacggcgcgtgcgtagcgagcagggtgcgtgaggacggagctaagctagctgctgactagaaggtgatgcaaccactcgagcacagagaatattgagtggattcctccctcctcgccctctgctcgacgggcggtgcgtttctctgtcgctcccatccccagccttcacctccgccttgcttctcctgaaatccggccgtccagatctctgccgtcgcagcaccgctccactccgagctccggcgaacagccggcaaatcctataccctatacagcgaggggttggagcggcgcccgtcgtggtggaccggactggcggag

SEQ ID NO: 1477 - DNA, 300 bp, Oryza sativa
  Clone ID: PAT_MRT4530_10133C.1
gatctccgtaaaaattggtggtgctgatcctgagaaatacgacagaagggctgaagagttggcgttcatgatcgactcaggtctgcatgacagatgcatgagcatcactttacaatgcgtgaggcagatgtttgatttcaacgaagataagagtagcctgacacatgaagaacaaaggaaattgaaacaacaggagatcctggaggatgactctgacgaagaatatgacgaaattattcaggactctggggagcaagaagtgaaacagtcaaccttatctgaatgggacattgtgcacct

SEQ ID NO: 1478 - DNA, 1531 bp, Oryza sativa
  unsure (1)..(1531): unsure at all n locations
  Clone ID: PAT_MRT4530_101340C.1
ggaccgtggcngngacgcgtggncggaggcgaccattctcttggtctctcccccaaattccaattccaatttcatcatcttcttcgtctacctccagctcgcctcgcttcccccaccaattgcttacgtacgactactcctccacgccccaaatccaaaattccccaatccgatctctcgcctaccaccaagctcatctcgtttcgttagctacctaccaaattaataagggtagctacagacagcgtagcggacgaggaatccaaatcaaatccaatcctcaatcgaagaaatggagtgcgagccggaggagctgcaattcctgggcatggtgggtatctacagggaggcggcgtccatcctgcgcgcccaccggccgctcttcgcccgcatcgccgccgccttcgtcctcccgctctccctcctcttcctcctccacatcgccatctcccacgccctcttctcccacatcgactccgacgactccgccctcgactccgccgccccgggcacccccgcccagcgccgcctcctccaccgcctcgccgacgactggctcgccctcctcctcttcaaggccgcctacctcctcgccctcctcctcttctccctcctctccaccgccgccgccgtcttctccgtcgcctccgtctactccgccaagcacgacgccctctccttccccagggtcctctccgtcgtcccccgcgtctggcgccgcctcgccgccaccttcctcgccgccttcctcctcctcttcgcctaccacctcctcttcgtcgccgtcttcgtcgccctcctcgtcgccgccgactccggatcgggcctcgccgcgctgctcgccttcctcctcgccctcgcctacatcgcgggcctcgtctacctcagcgtcgtctggcacctcgccagcgtcgtctccgtcctcgaggactacaagggattcgaggccatgcgcaagagcaaggcgctcatacagggcaagctctggaccgcctccgccatcttcttcgtcctcaacgtcgtcttcatcgtcgtcgaggtcgccttccgggcgtgggtggtgcgcggggccacccacggcctcggcgccggctcaaggctcctcctgggcctcgccatgctcgccgcgctctgcgctgtcgtgatgctggcgctcgtggtgcagacggtggtgtacctggtgtgcaagagctaccaccacgagagcatcgacaagagcaacctctccgaccacctcgaggtctacctcggcgagtacgtcccgctcaaggccagcgacgtccagatggagcaattcaacctctgatcatcaaccctccgctccatccgatccgatcgctgtgagttgcgcttggattatatctctgtaatcatcatatttttattctcatcaacacagatactcataccacaaaaacacagtttgggatggctcaaaatcaggctggatctcaattgggagaataacctgtcagctgtatttgtaccagtagacattagaggttgtgtattgcattttctgttttgatcg

SEQ ID NO: 1479 - DNA, 639 bp, Oryza sativa
  Clone ID: PAT_MRT4530_101341C.1
gcacgagaggttgattctcttggttgtgtggatcatcatgtaccaagagtgctggctagatacattgcgcgaggaagtgaaggacaagagtaataaagagatcgaccccaccgcttacagctatgaccatgattacgccaagctctaatacgactcactatagggaaaggctggtacgcctgcaggtaccggtccggaattcccgggtcgacccacgcgtccgcggacgcgtgggcggacgcgtgggttcagaaagagaacagtgatggaaatcttaagattaagagctgactaatcaaatatggatccttttccttttggtgaacagctgattaacttaggttgatattcgtagactaaattgtcaatcgtgtatacattgttggaagttgccggcaaagataggaaatatatttttccagtgagaagctggagttttgtcagtatgtaaacctgtatgttgataacaccagatttctgtaaagttccgttgtttttggtgattcagttggcagaaagaacaagagggggaagagaatctttgcgctcggttgaacaatctgtatctgaagagtttaacttttaggagcctagcccgtagtgctacctgatacttaccaaaaaaaaaaaaaaaaaaaa

SEQ ID NO: 1480 - DNA, 573 bp, Oryza sativa
  Clone ID: PAT_MRT4530_101342C.1
agagtgttgaataccatccatgtgatgttgatgacgttcacaagccgtctagtgctgtcaggagtggtggaatgagtgaggcattggatcttaactatagcaaccaagcaccgcaaagcagttttgtacagcctgctgctgaaagtaatgcaagggagataggaggtagtagtatgaatggaggggaggaagtcctcaatgcagaaactgctcctgcttttgctagggaccaactaagcctgggagttagtggagggagtgttggtatgggtgctagtcatgaagccgaaattcatggagttgatgtttctgagcataaaactgatagtgttgttggagatgtggaaccagctcccgagcttactgaaaatatgggcaatactggtgagtcaagccctggacctggaatgatggatgagtttgtccctgaagatgttggccgagaaagaacctcaggtgatagccaagatgtggcatctcgagtttattctggcattgatctgtctaaagatgaggtgacacagattgctaaattgccagcaaatgacgactatgatccaggagatgatcttg

SEQ ID NO: 1481 - DNA, 256 bp, Oryza sativa
  Clone ID: PAT_MRT4530_101343C.1
agtcaaatttaagacggtagatgaagttgaacatggtcttcggagagtctatgatgtgacagctaggaagaattcaattcacttggcaagatgactgtggtgatatgagagaaggtggagcaatgttgcaggtggagtcaggaggaagaaattacaaggatagcgggagtctcttgtttacggtgagcctgatggaggcttgtcggggcagctcggcgtgagcggcgaaaaaggatcaactcaagtcttggtacac

SEQ ID NO: 1482 - DNA, 759 bp, Oryza sativa
  unsure (1)..(759): unsure at all n locations
  Clone ID: PAT_MRT4530_101344C.1
ccacgcgtccgctctcctctcgcccgcatcggccgccatgcgcgaggaggtgcggagctcgtcggcggcgccgcccgacccgccgccgcgctcggcctcgccgcccgccacccccgtcgccagttcggctggtgcatcatcaccacctgcacaaacaaatgcagctagcatagattggttaggtggtgagccaatatccaaagtggaatcatcatcccagattgctccacatgctcctcggccttctcttagtactaatgctgctggagctgccgtggatttctctcaaccatcttgtagaccatgggaacgaggagacttgcttcggcgactggccacattcaagtcttcaacatgggcttctaagccaaaggctgctagttcactggcttgtgctcgaagaggctgggtgaacattgaaatggacaaaattgcatgcgagtcatgtggagcacatcttatatttacggcattgacatcttggtccccagctgaagttgctaatgctggggaagcctttgcggaacaacttgatgcatcgcacctgggtgattgtccctggagaggaaatagctgtgctgatagcctagtccaattccaccttaccccatcagctcttgttgggtggtttcaaagatcgctgtgatggactnttgcagtttatatctcttcctgttattgccaaatctgcaatagagagtatgaagctcacaaagagtcctcagattgaccgtgtcttatcccaagcaatcactattt

SEQ ID NO: 1483 - DNA, 732 bp, Oryza sativa
  unsure (1)..(732): unsure at all n locations
  Clone ID: PAT_MRT4530_101345C.1
gtggtcntgcnttttgatgaccacttcgattactacanggcgaattctagctcggtacccagctgatccagatcagatccattcccgtttacccgagcataagcaaaattcgtactctgcatcagttaagaaagataagggcaaaggaaaaattcatgtaaaagactctggatgcagcatgaggtcacctttgcttgattgcagcttatgtggagcaacagtgagaatatgggatttcagatcggtgcctcgtccttctcatcttagtatcaataatattgacgcacctgatatgcggaagggggtgctgacacgtggaattagtgctacaagtggcatcaatggatgggttgctgaaggaacagaaagagagaatgttgaaggacgtggtgaggcaggtaccgatgagggaaaatcactgtcaaatgctcaggttgacctaaatcttacaatggcaggtggtttgccatctacgcattctgtgatgccctctatgcatgatcatttcaatgatggagggatgggaagagatctgatgattgggcagcctacttgaagtgagctaggtggcttttgcagctcatttgagtctaggggttcctagtcaagaaagccgcatcttgaggaaagtgggagcacaacttgataagccgttaataagcttcattctgctgacagcataagaagaacttgtattgaccgtgaccgtgattaagttgatgatgggcaccn

SEQ ID NO: 1484 - DNA, 3930 bp, Oryza sativa
  Clone ID: PAT_MRT4530_101346C.1
cccgcgtccgaacaggaattgatatcaatcatctgaggagacctgtagctactctcaaggaactctcttgttatttatgctctcatatctttattctttgctgctatagtcctcagaatctgtggctttatttactctatgccacttccatctaatttatctaggcacagaatcttatcagcctttgtggatgggaacctatatggcttccaaatgcacaggactggggaagaaaattcaacccgttctgccaaacatacaggctcagctgatccagatcagatccattcccgtttacccgagcataagcaaaattcgtactctgcatcagttaagaaagatacgggcaaaggaaaaattcatgtaaaagactctggatgcagcatgaggtcacctttgcttgattgcagcttatgtggagcaacagtgagaatatgggatttcagatcggtgcctcgtccttctcatcttagtatcaataatattgacgcacctgatatgcggaagggggtgctgacacgtggaattagcgctacaagtggcatcaatggatgggttgctgaacgaacagaaagagagaatgctgaatgacgtggcgaggcaggtaccgacccattcactctctctcctctctctctctcctctcgcccgcatcggccgccatgcgcgaggaggtgcggagctcgtcggcggcgccgcccgacccgccgccgcgctcggcctcgccgcccgccacccccgtcgccagttcggctggtgcatcatcaccacctgcacaaacaaatgcagctagcatagattggttaggtggtgagccaatatccaaatgaccatgtggcgcctagccgcaagctgttgaaaagggctagccacagcaaatgttaattgaagctcctcctatacagacatacatttggtgaacttaactaatccttgtcaccagcattttcacagttcaaatagttgactgatgcaaacctgagcagagttgatatactatttgcaaaatttaggttctggccactgtcagtccagaagagctttgaagctatccatgatcaggtggtggaagatgaataaattaagcttcaacttagttattgtagagtgtagatgagtctgcctggccttttgccgagttgtgccccctttggttgtatttttgtatttcgaacctctttgtatctattcaagttacagacagattatctagttagtgaggctagaactttgaacaaccttgtcctttttggtcaaagacctatatgtccaaatgtgcaacattttgtcctacaaaagagagtatgaagctcacaaggaatcctcagatttaccggctcctatcccaatcaatactggttcctgcactaataccggacttaacggctgccagctaacagtaaatgcaatggatactaaacagtatcttgctaaagcccaaaatcaaattatgccgtctgactctgcggcatcactgtataaggatgaccatgtggcgcctagccgcaagctgttgaaaagggctagccacagcaaatgttaattgaagctcctcctatacagacatacatttggttctggccactgacagtccagaagagctttgaagctatccatgatcaggtggtggaagatgaataaattaagcttcaacttagttattgtagagtgtagatgagtctgcctggccttttgccgagttgtgccccctttggttgtatttttgtatttcgaacctctttgtatctattcaagttacagacagattatctagttagtgaggctagaactttgaacaaccttgtcctttttcgtcaaagacctaactgtgcaaatgtgcaacattttatacaattaataatgaagaacgtattgaggcaggtaccgatgagggaaaatcactgtcaaatgctcaggttgacctaaatcttacaatggcaggtggtttgccatctacgcattctgtgatgccctctatgcatgatcatttcaatgatggagggatgggaagagatctgatgattgggcagcctactggaagtgagctaggtggctttgcagcctcatttgagtctaggggtcctagttcaagaaagcgcaatctggaggaaggtgggagcacagctgataagccgctaaataggcttcatcctgctgacagcatagaaggaactgttattgaccgtgacggtgatgaagttgatgatggcgcacaagattcagatattcggagcaacaaaaggcctcgtggtttcaatctcttcgatgtgaatcaaccatcttcttctggagctggtcccagcagaaatttaagttttgacctggatatagatgtcaataaatttgatacatataaagctgaaggtccatctgcccttcataacccctctgcgtcgatgagggcatcttctgttattgcgatggacacagtccacagtgcagaggaaaattcaacagagagtccgtctagtgctgtcaggagtggtggaatgagtgaggcattggatcttaactatagcaaccaagcaccgcaaagcagttttgtacagcctgctgctgaaagtaatgcaagggagataggaggtagtagtatgaatggaggggaggaagtcctcaatgcagaaactgctcctgcttttgctagggaccaactaagcctgggagttagtggagggagtgttggtatgggtgctagtcatgaagccgaaattcatggagttgatgtttctgagcataaaactgatagtgttgttggagatgtggaaccagctcccgagcttactgaaaatatgggcaatactggtgagtcagcccctggacctggaatgatggatgagtttgtccctgaagatgttggccgagaagaacctcagggtgatagccaagatgtggcatctcggttagtgggtagagctgacagtggctcaaagatttgtggttcaactaaagctgattctgttgagagtggagagaagatgagccatggcataggtcatgagagtaacctacagcattccctttctcgcaatgctagagtttattctggcattgatctgtctaaagatgaggtgacacagattgctaaattgccagcaaatgacgactatgatccaggagatgatcttgcagcaaacgggggaaatgactatgaagcaggtcttccagaatttgacccaattagtcatcacaacaattattgcccatgggtaaatggacatgttgctgcggcttgctgtatcaatactggttccagcactagtaccggactttccggctggcagcttacagtagatgcactggaaactatccagtctcttgctcaagcccaaaatcaaattatgccgtctgactctgcggcatcactgtataaggatgaccatgtggcgcctagccgcaagctgttgaaaagggctagccacagcaaatgttaattgaagctcctcctatacagacatacatttggttctggccactgacagtccagaagagctttgaagctatccatgatcaggtggtggaagatgaataaattaagcttcaacttagttattgtagagtgtagatgagtctgcctggccttttgccgagttgtgccccctttggttgtatttttgtatttcgaacctctttgtatctattcaagttacagacagattatctagttagtgaggctagaactttgaacaaccttgtcctttttcgtcaaagacctaactgtgcaaatgtgcaacattttgtccaattaagtattagtttccgttgtggaatcatcatcccagattgctccacatgctcctcggccttctcttagtactaatgctgctggagctgccgtggatttctctcaaccatcttggagaccatgggaacgaggagacttgcttcggcgactggccacattcaagtcttcaacatgggcttctaagccaa

SEQ ID NO: 1485 - DNA, 419 bp, Oryza sativa
  Clone ID: PAT_MRT4530_101347C.1
agccttccgccaagccttcccccaagccttccgggacccctgggtgccaaccggcctgggattaaacccttttgggcctaagggggcccattccggtgggaataacaaaaaggtctcaaccgcaagggatggggtcattctgggccctggtggtttcaattaattcaaccctcaaggtccggcggtccttggttttaagaattaaccggaaaacaaaattggacctgggcccaacctaatcccttcgtttaacaaaatttggttcaaaaaaacctgaggggggaagtgataatgaccaaatggatccgggggacctgcaaatggaaaaaaaaaattggaaaaaccgggccaggttcctagaaaggctggcaatcttagcggttcccttaccttataattcgggcctaaccccaccaggg

SEQ ID NO: 1486 - DNA, 1602 bp, Oryza sativa
  Clone ID: PAT_MRT4530_101348C.1
gaaagcgaaacactgtctgaagttcactataatatatgaagttcattatatatagttcagagttgcaaaccattgtacaaacgattatataaagatatctaaaatacataaaacacagccgaaaaaattcttgtataccttttcatgttcttttatacactatcgtatacttgcacatgcaactgttctgtagaatgtaggatgcaggggcaccaaagagagagagaaagaaaggtgcagttttcagagatgcaaaaatatacaaaatcgggttgagataggcacctcgagtactttctctattagaccttttgttttgaactaatcatctaaattcttcatatattcttttgacagtttcgaattcattatcagttcttgctctttcaccagagagtccccagattcaatcaacgcatctacagtggtctttggaggaataaatgttggaagctcctctcctttctttcgcttgagaagcttttcatttagttgttcatgaccaccaatctcttctacccacagtacatcttcaacagtatttgctaaaaagtacatcttcaacaactgcaagattgcccgatcgtatgtcctggatctcaaagctccataaaagtccagagcttggtttggaaaagtgtctacaacttttgatacatcctcgaaagacaaaccatcctttatatacatgcggtgaacaatgttaattatatcttcacggccaggctgccaatagaacttttccatcctcccatcacgaatcaagggagcatacagtgtcgaaaaatcatttccggtaactattattggcactctgtgtgttacatcagattctctccatttctggccaatgctaacccatatgttcgatgaaaaataaaactctaagatccatctcttcctacaaaaggtgctcttcttcatgaaaaaaattgtgaaaacaggaatcattgaagtaaattggttttgaattacttgagaagccgtcctgtatcggtcacgtataagcctcccaggttctcctgctttctcagattctagttctccagcagacataataacaggttcaacacccattgctctaaatataagttcagtctggaatgttttcccttggccttttccaccccagattccaactttatcaaggaagaggggtgcgatgtaataatctccttgcaggtactcaaacgtcctggtcgctttctgccggtaatcgaacacaatatccgagtctttgccgaggaagttgccgacgaagaggtcgtcgacgatgccgctccgcgcgccgacggcgatgttcatgttgtcggcctccttcccgaggcggtagaggtagtcatccccctcggagtccttcgcctcccacgacgactgcttcgacagcctccgcccctcctcctcctcctccccctcatcaccgccggcggtgggctggggagacgacggagacgaggacgacgcgcggagcaccgacggggagccggggcagaggcggccccggttgggggctctcaggatggagctagcggctgagcgcgagggcgggaggcggcggtgcgcggcggaggaggcgagggaggtggcggtggcggtggccat

SEQ ID NO: 1487 - DNA, 644 bp, Oryza sativa
  unsure (1)..(644): unsure at all n locations
  Clone ID: PAT_MRT4530_101349C.1
ctcctatcaattaaattccggcagctctcctgccgtcgtttccctcaaaaaaaaatatattcagtgttgataatgtgagaggaaagtctaaattctgagtccttgtcatgaaattgattgatggaatcccaagggaaaattaaaagaagaagaaaaaaaaataaagcctatcattttgtgcctatttttcttaatgtgaaaatgtaggacagcaaccagctgtctgcatgccacataaatcatgaaaaaaatatgtcaacattaaaaacaactgttgctgctgcaaatgatgccacgcaaatgtgaggctttagaagcatataattgctgagtgaaaatgatactaatatcatacctctgttatttttccttgtgctgcatcccactttacgatgagatccttttctcatacaaaagctccttgttcttctcctcagctcaactacntccactccagctccttgagcctcttcagcttctctgnacctcngngtcctganggcgcnnccctccttggaatcacgcaacacctgttctttaaaacanncgcctttgtngntcgctcatcntttgtcgtgnncctgnntgtcnccacccnnnccttgnccggncnggaaatnccggcncnccnccctnccnatnag

SEQ ID NO: 1488 - DNA, 428 bp, Oryza sativa
  Clone ID: PAT_MRT4530_10134C.1
cctttagggctgccggcgccgacgggtaccaccgccgccacagcacccacgggaaccaccgccgccgcagcgtcgatgggactgccgccgtcctcctccgcagccctagggccaccggctccaacggaagccgctgccttcttgggccgccacagcccctaaggccccctccgccgacgggagccgttgggccgccgccatcctccgccgcccccagcaccgtcaaagagactccgtcgcctatgccttgccacctccccgccgccactgtcctagccgctggtcagctctggcggcagcatggccagatctgggagctggggggggagaggaagagacgagctggggggagaggaagttgggatctgggcagaggccccgttgccactgtcctcgccgctgcacggacgtgcgggagctggctctag

SEQ ID NO: 1489 - DNA, 184 bp, Oryza sativa
  Clone ID: PAT_MRT4530_101350C.1
tttggtttttgaacaaccagggcgggaaagtgactatgggagaactatcaacatttaactcgcattctttttacagaggcgaaggattacaagatcacaccttatatgttgagtgattggaagcaaacactctgcatgcctatgtgggacgatcatggctaagaagcgcatctgctccaaaaga

SEQ ID NO: 1490 - DNA, 195 bp, Oryza sativa
  Clone ID: PAT_MRT4530_101351C.1
atggtgcgcatggctggtgtgaacccggagtggtcacacagcatggcacatgtgctggcactgggtctggggttgatcgacgtccgtcgatctctcttaaggggggtggcgcgttgggtgtggaggacgctcggcccgctctcctttgccagctcaggaactgtcacgccccgagctagtcccgactggaattag

SEQ ID NO: 1491 - DNA, 1213 bp, Oryza sativa
  Clone ID: PAT_MRT4530_101352C.1
atgtaggcacgaatttttttttttatcattctttattccgactgaaatacacgagcacatgtgccgaatatggtacaacaatgcacaaacacctggcttcctcttccattatggttctttgaatcagaatgaagatcaggaccatgaaaagcaaaggacatatttgaagtctgaacttttatttttattttatggaatccgggctgctgcggtctttttctcccttttgtcttggttacgatagctcgtcgtctttcgctggtcagtctttatgccggctcgaattcacgcgctcctaaggccctaacccgctcctttttcgggtgagggcgacctgggcaggctcctcctcgcacgggccaccatcagtagccactgcagcgctacccatcgcagtcggaagggaccgtgtggactccgaggccgacctacgggccgtcggcctagcttccgatgttcgtgcctcatcagctcggtgcagaatagcagttccccaaatgtttgcatagaatccatggaccctgttagtgcgctttaggataaactctgcctcctgcggccctgatatgggacctccatgacacagaacaataatgtcaggattaatcccaagtgctgcatcagcaatggcttgaacacgtttgacactgtcatctaaagtgacagcagtctttgccccaatagacccagctgttgttagacccatatgtgccactattatatgagctccagccttggccatggcagcagcttcttcaggattgaaagcatatggagtcgtcaaaaaacccatgctgtgagctcttgagatcatctccacttccaagctgtagcccattccagtttcttccaagttctgtcgaaaattgccatcaaaaagaccaacagtggggaaattttggacaccacaaaatccaatagcttctagttgtttaaggaagtactccattctacggaatggatcagtagcgcaaaccccagcaagaaccggaactcctttaaccacaggcaacacttcattggccatctcaagtacaatagcgtttgcatctgcaaatggcaatagtcctgccaatgaacccctcccagccatgcgaaaccgcccggagttgtacagaactataagatcaactccaccagcttcttcaaacttggctgatatgccagtgccagcaccagctccaatgacaggagtaccctcaacaatttgttg

SEQ ID NO: 1492 - DNA, 453 bp, Oryza sativa
  unsure (1)..(453): unsure at all n locations
  Clone ID: PAT_MRT4530_101353C.1
aaacttcacgtccaaattgcaatctgaccacttgccaaaaaacaagtacaacacacgtggatttgtgcgcatttcacggtgcaaatgtgaaaatgacaagacatctttcacttatttttttttctaaaagacacgaggacaaattaagattgctcgtattaatcagactggatcgatcaaacgaggaccaacttgtcgctgaggttcttgcggtagacgtggatgagccccgtgtcgtcaaccttctgcagcttctgcttgaggatctccttgtactcatcatccttgttctctaacttcgtcttcagcttaacccgtttctggaagagcgcgaactcgtcggagctgagcgagccgtcgctgttggcgtcgaggaggcgcatgagctcctcggcgtcatggccgccggcgccgaggtcctccatgatctcggntagctcctccatgctgatc

SEQ ID NO: 1493 - DNA, 850 bp, Oryza sativa
  Clone ID: PAT_MRT4530_101354C.1
cccacgcgtccgcagagaattatcaattggatggatagcactggaggactttgtgctgcatttgatttcacaacaaagggtattcttcaggaagctgtcaaaggtgagttgtggcgtttgcgtgaccctgaaggaaagccgcctggtgtcatgggctggtggccttcgagatcagtcacatttgttgaaaatcatgacacaggatccactcagggtcattggccattcccatctgatcatatcatggagggatatgcttatatacttactcatcctggcatccccacggtgttctacgatcatttctatggcaaagatgattccttccatggtggaattgcaaaactgatggagatcaggaaatgccaggacatacatagccgctccgcagtcaaaatcttggaggccagctcagatctgtactctgcaatcgttgacgataagttgtgcatgaagatcggggacggctcctggtgcccgagcggcccagagtggaagctggcggcctctggtgacagatatgctgtttggcacaagtagatataccaacatatagcatttctttctgctgaacatgagatatgctatttcttcagagcccgaactgtatatgctagtaccatggtaatttaatcatcttcaatgcaataccagagagcaaaccacttgcaatttatcacatgctcacagcagatagtgtaaactgtaatgcgaagtgtaaactgtaatgtgaatacgtatactgtaatgcttgtgtgcatataggaataagagagtgtttatttataaaaaaaaaaaaaaaaaaagctaatttcgaaacctcattaaaaaatattttataaaatttttg

SEQ ID NO: 1494 - DNA, 867 bp, Oryza sativa
  Clone ID: PAT_MRT4530_101355C.1
ttttccgctctcgctgcagatgatgggatgcgcgacgcccttgcggtcacagacgcggccgacggcggccaccactctgtcctggtgttcgaggccttctcggcttcggcgcccggccgcattgacccggccacgggctacctgctcgacgagctcaccgacgactgccacgccgactaccgcaacctcatggccgccgcggtgcgcggcgacttcgacacctgcgctctgtacgccgaccagctgaagcggcgctgcgccgatcagttcaaggacggcgttcttggcctggagcacctcgccgcggtggacagcctctgcgagatcgtcgcccgcggcatgggcgccgacgagccgtcgggcacgtaccacatcaacctgtccgggttcaccttcctgcccgacatgtgggcaatcgggcagatgttcccaatcatcccaatccagtgccttggtgagcgccctgcaatcgacggcgtcctctccgacctcacctccgacagcgacggcaaggtcgaccacttcatcagcgggaggcacagcctgccgctgcacgagctccccgtccacggcacccgcggctactacctcggcggcacctaccaggaggccctcggcgggctccacaacctgttcggcgggccgagcgtgcacgagcacgaggtgttcaagcagagaaccgacggcgccaccgccgccgcactcgccaaagcgttcggcgcaatgccgtacctgtcgttctacccggaggccgcagcgatggccagaggggagagcagcggcatgagcagcgactcggaggtgtcggccgccggcgtggccgaggatgatgatgagtgggagttcatgcgcgggctcatcgtgtga

SEQ ID NO: 1495 - DNA, 3084 bp, Oryza sativa
  Clone ID: PAT_MRT4530_101356C.1
ctcatctctcgctcgctcgctcgctcgccgctacgcctcacgattccgacgactccgacgccggtagggtcataacaccctcctagacgccggcgacgacgagggtggttgggttgtggatagcggctgcgacgacgagggcgctctcctgaccgccggcgtggggtgccccagctccaccaccggcgacgactcctcctccgccgcgagcgctcccccagcctgcttcttttgcgggggtagccggggctccggcctcggcggctttcaaagcccccttcctcacaacaggatccaaaatcccgtcctagagttcttctacctccccttccaaaacttcctcttttggcatccttgattcaatttcccttccctttctttctttctttctttctttctttcgatttcttcttcttgctttagatttcttatccttcttcttgttgctaatctcgatcgatccatctatccatccaaacaacctcattcttttttcctttgatttgattcttcgctgctaacgccaccgaaacagacaacagatttacagcaaaagaaaaaaaaagaaggaaggctaacctttttctgtggattttagcgttctccggtttgtgacgagatgcctgcgctcgccgtggacgccgctgcacctgtcgcgcacgccttcgcgtgcgacgcggcgcgcttccccgcgccgctgctgggccccgccgccgcggctgcggcggtggcggagaagccggacgcggccgcgtggtcggccgacctctcgtccgcgctgtacaacgtggacggctggggcgcgccgtacttcttcgtcaacgacgacggcgacgtcgccgtgcgcccgcacggcgccgcaaccctgcccgggcaggagatcgacctcgccaaggtggtggccaaggccgccggcccgcgctccggcggcgggctcggcctgccgctccccctgctggtgcggttccccgacgtgctccgccaccgcgtggaggccctgaacgcggcgttcgactacgccgtgcgctccaccggctatggcgggaggtaccagggcgtgtaccccgtcaagtgcaaccaggaccgccacgtcgtggaggacattgtggagttcggcgagccgttccgcttcggcctggaggccggctccaagcccgagctgctgctcgccatgagctgcctcgccgcgcgcggcaacccggacgccctgctcatctgcaacggctacaaggacgacgagtacgtctcgctcgcgctcatcgcgcgcaccatggggctcaacacggtcatcgtgctcgagcaggaggaggagctcgacattgtggtcgacgctagccgccgcctcggcgtgcgcccggtggtcggcatgcgcgccaagctgcgcaccaagcacgccggccacttcggctccacgtccggggagaagggcaagttcggcctcaacgccgcgcagattctctccgtcgtcgccaagctcaagacccttggtatgctcgactgcctccagctcctgcacttccacattggctcccagatcccgaccactgctctgctcggcgatggcgtcggggaggccgcgcagatctactgcgagctcgcccgcctgggcgcggccatgcgcgtcatcgacgttggtggaggcctcggcattgactacgacgggagtcactcggcgcagaccgacatgtccgtggcatacagcttggaggagtacgcggcggccgtggtggccgccgtcggccgcgtctgtgaccgcaagggcgtcgcgcatcccatcatctgcagcgagagcggccgcgcgctggtgtcgcaccactctgtcctggtgttcgaggccttctcggcttcggcgcccggccgcattgacccggccacgggctacctgctcgacgagctcaccgacgactgccacgccgactaccgcaacctcatggccgccgcggtgcgcggcgacttcgacacctgcgctctgtacgccgaccagctgaagcggcgctgcgccgatcagttcaaggacggcgttcttggcctggagcacctcgccgcggtggacagcctctgcgagatcgtcgcccgcggcatgggcgccgccgagccgccgcgcacgtaccacatcaacctgtccgtgttcacctccctgccggacatgtgggcgatcgggcagatgttcccgatcatcccaatccagcgcctcggtgagcgccctgcggtcgacggcgtcctctccgacctcacctgcgacagcgacggcaaggtcgaccacttcatcggcgggaggcacagcctgccgctgcacgagctccccgtccacggcacccgcggctactacctcggcatgttcctcggcggcgcctaccaggaggccctcggcggcctccacaacctgttcggcgggccgagcgtggtgcgcgtgtcgcagagcgacgggccgcactgcttcgccgtcacgcgcgcggcggcggggccgtcgtgcgccgacgtgctccgctcgatgcagcacgagcccgaggtgatgttcgaggtgctcaagcagaggaccgacggcgccaccgccgccgcgctcgccagggcgttcggcgcaatgccgtacctgtcgttcgacccggaggccgcggcgatggccagcggggagagcagcggcatgagcagcgactcggaggggtcggccgccggcgcggcggaggaggatgacgacgagtgggagttcatgcgggggctcaccgtgtgaccgaggcagccatcgccggcttcttggtgttcacgcgaggagttcttgcacctccttctcctcctccattgtacctgtcgcactgagcagtcgtcgtcgccgtcgtgttcgtcgccgtcgccgacggtaatctccacccagtgtgtggttgtatcgtgtcatggtcgttgtcgtcgggcgtctcgtcgccgtagtctcgccggagtttctggcgccacctttttatttcgcaagcgtcagtgtccactgtttcgctctccttttgaaatttcatcagagaataagatgaggaacaaataagtttcgttcgattaaaaaaaaaaaaaaaaaaaaaaaagactagttctccctcgtgc

SEQ ID NO: 1496 - DNA, 1122 bp, Oryza sativa
  Clone ID: PAT_MRT4530_101357C.1
gccgccgccgaccactctcctccgcgtccgcctcgtcgccggctagggttccacgggttcttgcccgccccgcccgccgcccgcctcgcgggctgcgcaggcaaaatgtctcggtatgttgaccctaatgaccgttacgaaccacgtggtcgtaacagcaggttgtatgtgggccatatttctctacgtacaagggcagaggatcttgagaacctgttcagcagatatgggagggtgcgatttgtggatctgaagaatgaatatggctttgttgagtttagtgatccccgggatgcaaatgatgcgaggcttgatcttgatggccgaaagtatgatgggagtgacatcattgttcagtttgcaagaggggtcgaacgtggtcttggaggttctcgtggatataaagccagacccgcacatggttctgaccactgcttcaactgtgggatggaggggcactggcaccgtaactgcactgctggtgactggacaaataggtgctatggctgtggagagaggggtcatatattaagggaatgcaagaacagccccaaggatctcaagcaagagagaggctactcaaggtcccgttcacctcgtcgcagaaggagcccaagctatggcaagagtggacccccttctcattggggtagccatggtgctgatcgtgaggaaaggcttcattcaagaagggatggccgcggttacagccgcagccctcggcgccatgattcgccttccaatcagagaaaccacagccctaggcgctatgctttaccctccaatgagagatatgatggcactaggcgctacgcctcgccttcttatgggagagaccgcagtcccgggggcaatgctttgccagccaatgggagaagccacaacctcacatcagatggcatgaacccttcaccaagggagagagatgatcagaatgggagccacaggagaggtgacaacgattacctgcccagtaagagagatgatcagaatgggagctacaggagaggtgacagcgattacctctccagggagagagatgattacctgtccagggggagagatgatcagaatgggagccacaggagaggtgacagcgattacctgtcccgcgaccgttga

SEQ ID NO: 1497 - DNA, 287 bp, Oryza sativa
  Clone ID: PAT_MRT4530_101358C.1
ccggaccgcaaataccgacgcgagccacccatcaggggtaccctcatgcgtcctcccacgagcacgacgaccatggcgattgaagcagtagggtggaatacctcacctcttcgacttggcgaaacggccaactctttcagcagtcagcagatacaggaacacctgaaggagacgctgatccataagagcgaggggctaagaacatccagactcgtgggagactgaggagaaaaagacagtcccaaagggagacatcccgtttcaacaggacctcaacacgatggacc

SEQ ID NO: 1498 - DNA, 162 bp, Oryza sativa
  Clone ID: PAT_MRT4530_101359C.1
atgcagattgagatggtgatggtggatatggagctcggcggcgatggcctcatcgactgtgtggcacttcaccagggagatggagattttcctaggggtacgccagttgcctatgtggaggggaatctcctaggtggcaggttaagactgaatgtcacctag

SEQ ID NO: 1499 - DNA, 561 bp, Oryza sativa
  Clone ID: PAT_MRT4530_10135C.1
ttgaaatttttaaaaaaatttttttttttttttttttttttttttttttttttttttttttttgaccgaataaaatggaggtaggtaaatatttatccctaaatggaaaatacatctaacatatacatttacaatttttttaaacccaggaagaaaaacaatgggtcaattcccgggaaaaaaaaaaactatttttataaaactttttgacacaaataatgggcagctactcaaaataaacccagccccttttataaaatgttcttaaatttttttcccggtttcaaatccacaacaatgacagtgattttatcctccctgccttttttaaaaacaaattttattaaataatcggcagctttttgggcaacaaggtcggtggatccttcaccctcataaaacaatggtaatgcaaccccatttttcttgtcccacaaaaagatctttcggcgtgccactttgcatgccttttaatttaacacaacatcccacaacccattgtttgttaaaataaaacagtcattatccttcgcccctgaaacgaccataacttccggtttt

SEQ ID NO: 1500 - DNA, 242 bp, Oryza sativa
  unsure (1)..(242): unsure at all n locations
  Clone ID: PAT_MRT4530_101360C.1
tactaattactagttagttaatggttctagtacggatttgatgtttttatgtaatggtcaatgcgagtcaaagatgatgaaagctgcaggcatttgcagtgggcttgcctacaaagcaagacacgggccaaccaaaaccaaccgctctcattttgggagtcatggctttngggccaaaggaacacacccctgtnccgtngcgatcatgcgtgcttgatcngggagcttttacgcgcttaccg

SEQ ID NO: 1501 - DNA, 445 bp, Oryza sativa
  Clone ID: PAT_MRT4530_101361C.1
attggaggatcaccgcgcgattcgaactgtgctgccagtcgccactgtcgtgtcctgacgctggggcgacctggttccctctcggtgctggatgcataggtgccccgcgcgcgaggcgtcggttccgtggttcactggccgccaattgccggcctcacatcccgcagccgtagcccctggctcctcaaccactcggtctccagttacgtttcatcggttagttcaggttgtgtttagtttttaatattgggaagaacccctgggataaattgatagtttggaataaaaaattaagagtttatgtgagtaggaaagttttagatgtgatgcgatatgatggaaagttggaagttttgaagaatttggtgtgaactaaacataccctgagaagtaagtttattagtcacccaccaaaccatagaccgaattgctctgtcaaaaaaaa

SEQ ID NO: 1502 - DNA, 599 bp, Oryza sativa
  Clone ID: PAT_MRT4530_101362C.1
aatgcgtagtggaagacattccaccagaggagcttcatgcaaaaatgcaagatcctgactgtgttgaagaagctcagtggattgatgttcgggagcctgatgaagtagataaagcttctcttgaagggtttaaagttctacctcttcgacagtttggaacttggggaccagttatgacagatgaatttgatcctcagaaggacacttatgttctgtgccaccatggtatgcgctcaatgcaggtagctaaatggctgcaatcacaggggttcagaaaagtttacaatgttgcgggtgggattcacgcttatgccgttaaagccgattcttccatcccaacttactagacatctccatgatcaccaatgcaacgtcagagccttttctacgtgttcgtttttcaggccaaaccaaaagcatgcttagtatagaatgataggattttccacgatgattttgtacggaatatcggtaccagaaattcagagttaagttttgtcgttctcatgctgctgtcatgtactagcagttctcttgaaattttatatggaggatatatcacttttattagtttgaatacaagggaaatacctgggagg

SEQ ID NO: 1503 - DNA, 1742 bp, Oryza sativa
  Clone ID: PAT_MRT4530_101363C.1
cccacgcgtccgtgttcatctgcgctacgccacgacacgacacgacacgacacgagacgagagaggagtcggcaatggcggaggggtcgcggtcgccgctgaggtcgttcgtggaggtggcgccggggtcgcacttccccatccagaacctccccttcggggtcttccgccgcaggggctcgccggagccggagccgccgcgcccggccgtcgccatcggggacttcgcgctcgacctcgccgccgtctccgacgcgggcctcttccacgggcccctcctctccgcctccccctgcttccgccaggaaacgctcaacatgttcctggggatggggcgtccggcctggaaggaggcgcgcgccacgctgcagaagatcctctcagctgatgagccggttttgcgtgacaacgaggccttgaagaagaagtgccttgttcccatgagcgacacagagatgcttctgccaatcacggtaggagactacaccgacttcttttgttctgtgcaccatgcaaggaattgtgggttcatcttccgtgggccacagaccccagtcaacccaaattggtttcagcttccagtaggttatcatggtcgtgcatcctctgtgattgtatctggaacagacatcattcgacccaaagggcaaggccatccaacaggagattctcgaccttattttggtccttctaagaagcttgattttgaacttgagatggcagccattgttggaccagggaatgaattgggaaaacctatcgatattaatgatgctgaagaacatatctttggcctaatgataatgaatgattggagtgccagagatatccaagcttgggaaactatacctcttggacctttccttgggaaaagtttcagtaccacagtatcaccctggatcgttactatggatgccctaaagcctttcacctgtgaagctcctaagcaggaacctgaacctttgccttacttagctgaaaagaaccacgtaaactacgatattcctcttgaggtctggattaagcccaaggagcaaagtgaaccatcaatggttgcaaagagtaacttcaagcatctgtattggactttaacacagcaactagcacaccacactgttaatggatgcaatctgagaccaggggatatgtttgcaactggcacactaagcggacctgagacagaatctttgggatgtttgctggagctaacatggaatgggcagaaggagatatcagttggaaactcgacccgcaagttcctagaagatggggatgaggtcatcttgacagcttgttgcaagggtgaaggctacaatgtcggattcggaacctgcactgggaaggttctgcctgcacttccatgatccaacatatagaggatagcctgctttcatctcatcagtgtgtcaataatctctgaagaaagcatgcaatgaggcaatgtatctagctagttacatctatattttagtgcttagtgatggtaaaaatactaataaggtatgcttccctgagctttacagaagggatgtaattaatgttctccagttacaataagaacttatttgaagtcgtcaaagaaacaaaaaaaaaaaaaaacaatcctagatgtgaaaaaaaaaaaaaaaaaaaacgcatgatcgaacggttccgcgcgttgaggccaaaaaaaaaaaaaaaaaaaaaaaaaaaaaaaaaaaaaaaaaaaaaaaaaaaaaaaaaaaaaaaaaaaaaaaaaaaaa

SEQ ID NO: 1504 - DNA, 2850 bp, Oryza sativa
  Clone ID: PAT_MRT4530_101364C.1
atggctggctacgtcactattattttgttgctgttgctacccgcggcggtgtccggcgcggcgagcggcggcggcggctgcattggcgccatggtcgacgacacgagccgtgcggggaaggaggagaagctcgccatggaaatggccatggaggacttcacggtgagcggcgtggacgtcggctcgccggcggtggcggtggtgctgtgcacgatggcgtccaatggcgacccggtgcgagccgcctcggcggcgctgtcgctgatcaacgagaggggagctcgcgcgctggtggggctccactcgtggcaggaggcggcgttcgtcgcggagatcgggaggcaggcgatggtgcccgtgctgtcgttcgccgcggcggcggcgccgtcgacgtcccggcggtggccgttcctcgtgcgggtggcgcgcggccagcacgcgcagatgcgcgccgtcgccgcggtcgtcgggtcatggcaatggcggcgcgtggccgtgctctacgaggacgccgactacggcggcggcgccggcgtgttcccgcacctcgccgacgcgctccgcgctgtgggctccgaggtcgaccgccgcgtccccgtccccgcgtcgccgtccggcgacgccctgcggcggtcgctcggcgacctcatgggcgggcagtgccgggtgttcgtcgtgcacacctcggcgaaggtcgccgtggcgctgttcgcggaggcgagcaggatggggatgatggcgacggggtatgtctggatcgtcaccgacgccatcgccggcgccatcgactccctcgacgccgccgccgtgtccaccatgcagggagtcatcggcgtgaggaatcatatctccatggacaccaactccaagaacaccagagaccgcctcatcgcgaggttgaggaagaggttccggtcacagtatcccggcgacgacgacgacggcggcggcggcggcggcggcgacaacgacaagacgagagggccgcactacccggctctcctcgcctacgacaccatagtcgccgtcgcgtcggccatgcggaagaccaacgccaccgctccaacccgcgccaccgatccgaatccaagctcgccggactccggcgagacgatcaagatcgccgtgtcgtcgaacgggaccgagctgctcagggaggtcaagagcgtccgcttccgcggggtgagcggcgagttcggcttcgtcgacggcgagttctcgccgccggtgcggttccagctgatcaacgtggcggcgccgagataccacgagctgggattctggtcgccggagcacgggttctccaagagcgcgggaggctgcagccaccgcggcggcgacggcggcggcgagtgcgagccatcgatgaggttcttggggccggtgatctggccggggaagccatgggacgtgccgagggggtgggcgccgccggcgaacggtagccccttcaccgtcgccgtgcccgagaaggccgccttcccggacttcgtgaaggtgacgcgccaccatggccgtggcggcgacgacgacgacgaaccgagcttcgagggcttctccatcgacgtgttcaaggccgccgtcgaacacctgccgtacaacttccactacaagttcgtctccttcaacgggacgtacgactcgctcatgcagcatgactacatgaagagctatgacatccttgtcggcgacacgagcatctcatcaggaaggtacaaattcgtggagttctcgcagccgtacaccgagtcaggactggtgatggtggtgccatttagcgcggacacgtgggaccgttcgtggatcttcctccggccattctcgccggcgatgtggctcctgatcgccgccgtcaggctgtacaacggcgttgccatctggctcatggagcgcaggcacaacggcgactaccgcggcggcgtctggaagcaggtgaccatcgtgctctggctctccctcgccgccctcctctcgccgggggagaaggagaggcggctgaggagcagcctctccaaggcgtccatggcggtgtggctgctcgtcgccgtcgtgctggcgaccaactacacggcgagcctgagctcgctgatgacggcgcagcggctggggagggaggcggcggtgacggcggagtcgctcaggtccgccgccggcgcggtggtcgggtgcaccgagggctccgtcgtcggcaggtacctcgaggaggtgctcatgttcccggggcaccgcgtccggaggctcgccggcgacgaggagcaccgccgcgcgctcgtctccggcgaggttaaggccgccttcctccgcgtgtcgcacgccaagctcctcctcgccaagtactgcaacgagctgatgaccaccggacccgtctaccacgtcgctggccttggcttcgtgttccccaaggggtcgccgctgctggccgacatttcgcaggcaatcctcgaggtgttcgagaacggcaccatccagaggctggagacggcgatgctgtcggcgtacaactgcacggcggcggcggcggcggccgccatggacggcggcgctggcgacctgtaccgcctcggcccggagaactactggggcctcttcctcatgaccctcttcgcgtccaccgcctcgctcgccgcctacggcgtcttcttccaccacgacaccagctgcggcagcggcggcggcggcggcggcgccgtcatcaccggcggccacaggaagcaaggtgatggccgtaaggattctgccactgttgacccaggaggaagcagccatggtgatgaagcaccttcatcagcatcagtcacagctgggcatggaggaaaggatacagagatggtagtaataagcatggcatga

SEQ ID NO: 1505 - DNA, 327 bp, Oryza sativa
  Clone ID: PAT_MRT4530_101365C.1
ctacgagtcgcggatcccgtcaggtcgccggcgtccgtgcccgggcagtccagccaatgccaatgcagatgtcatactcgtcgacacccacgaccccgagatgtgcttatgcctcgtcaacggcgacgcctggaggagttccgcattacttccacacccctcaccaagaacacgatcccggccatcgccgccgtgggagggacgcggcaaggcgtggacagtggacaccggcaacgtctggctgctgcagtctgacggtgagctgttccaggtccttctcggtttcctctccgacgagctgccgggcttggcgcgcgtgcccgacat

SEQ ID NO: 1506 - DNA, 660 bp, Oryza sativa
  Clone ID: PAT_MRT4530_101366C.1
atgaccaacctccccacgtggccacgccaccgtcaacttctccattgggcgttagacttgcacgagtccgccccgtgccgatgtcatactcgtcgacacccacgaccccgagatgtgcttatgcctcgtcaacggcgacgcctggaggagttccgcattacttccacacccctcaccaagaacacgatcccggccatcgccgccgtgggagggacgctgcgattcatcttatgcgaatggaacgcggatgagatgtgcaccgtccactttgacttgacctctcctcccgaccgtcctctccgatccggtcgccaagttcgacgccagtacaccggcaaggcgtggacagtggacaccggcaacgtctggctgctgcagtctgacggtgagctgttccaggtccttctcggtttcctggacttcgctgacaggaagatcagcgcagtctccgtgtacaggatgacctctccgacgagctgccgggcttggcgcgcgtgcccgacatcggagtgcaaaaaccctcttctctattctcaggttatgcccagtcagcgcaaggtgccaccgttctgcatgccgggaccagggtttgcgaaatcacgtggttacggggctcttattaccgtgggatacgagctgagatcggttatcggcggttag

SEQ ID NO: 1507 - DNA, 409 bp, Oryza sativa
  Clone ID: PAT_MRT4530_101367C.1
tctgcagaattcgccctgaggcgtgtcgcggccgaggtactttttttttttttttttttttttttggtttttttttttttttttttattttttttgccactggctacctaatgcgagcggcgtcggctaggagcccagacgagcgccgccagccccagtgacgctggggtggacgctcagccacaaccgaagggggggggggggagccctcattcttttttaccctacaagggcttatcatgagcgggccgcgctcgagttccagtgtcatgcgggactcacttgcagtcggacgatcggctgccccagatacctcatatctgggccgctggagctcaggcttataggcctccatgggatcttataggcgctttcaagctttgcagcatactgggaagaagcgtgaacc

SEQ ID NO: 1508 - DNA, 316 bp, Oryza sativa
  Clone ID: PAT_MRT4530_101368C.1
tttgtgttttgaaattcttgggttttaaatttttttttttttttttttttttcacaaaatctttagctgtaagaatgcttataggttagaaaagacactaaacctaacaatattatttgctaaagagacaaaacagggaaaatgacgaggggatggggggaccaaaaacaaaaaaagtacgagggggggagccaacaaaaaaggcagcctgcctgcctatggaggcaagaattgatctcctttccccttaccaaaaaatccaaacttggaaaggctccacccgacaaccctagttcatgggaactagccaagcccc

SEQ ID NO: 1509 - DNA, 489 bp, Oryza sativa
  Clone ID: PAT_MRT4530_101369C.1
gttatcactcctccaaatatgattctgccctcttgataaaaaaatattgtcttcaggtttgctttgcataaattttagatttttcttgattgcatattattgctatatggcactgaacaatgaaatttatttctaaatttgtaggaagtctgaaaatatctaaacataagtcagaaactaatgtacatgtccagattgagccctgggttattccctgtactttacccattctccttatctacttgtcttgaaaattaatgagacatcaccagcaattctttgtatgattttggccatgttactcatggtttaaatggagctgctggcgtctcttaaaaaaataatttggtcatgcactatagaagaaaatcatggtgtttgtttctgctttttttcttgtctctggaggtaatatattgttggctcagattgtcagacagattttgcatacttcattgttgacggcccgaggagtcggggagtggatga

SEQ ID NO: 1510 - DNA, 1133 bp, Oryza sativa
  unsure (1)..(1133): unsure at all n locations
  Clone ID: PAT_MRT4530_10136C.1
tttttttttggggttgggnnngggncttncntgggcccgaaaaaaaaatccaatttaacccnnntttggaaantgggntttttccccccccccnccttantgggggggccccccccnnanttttttccagaaaaaatantatttttaaaattnccttngggtgggggtgggaaaggaaaatantttgncnnccnaaaaagggngggnagntcccccnaanaaaaaatggccttangggaaatantttggtngggtgggggaattttttacctaatttaacctaaatccctcaaccttgaatattcctggaatggaattggaatattttacccttttattgaacgaaanaacatttattgaagtttctttccgtcctccgccttnccnaatgnaaataaacttcccctccccctccccctggggntggcggttcnttaaactttttcccgccctggtttctttccnaataancaacaagggngtcttgttgtaaatttttcanaancccccnattcttgaaaagttctaagttgccctggaaaaaaaatttttaaaaatttggggntttttttccntccccnccagggggagtacttggcggattnaaaccanaaaaaaattgcccccccccccccccnggtttggttgttttgaataaatttnanaaacctaaaaaattccgttnaaaccattccnaaaccattgnttttttttttttttaccttnnnaaataaattggggaaaaagaaaaanaaccaggggnnccttattttttcttnccccaagccttaaaaatttcctcccttggaatggttttcnngggaaatttttttnaaanaaaantttnnaatttccctcccccnnaatttcccncctctgnaatngtttgggaattnggggcnnnntnnnacccnnattnnaaaatttnnttncccnacccnnntttnnantttccncggggggggggggggttnaattcctttttncnccccccnaaaaaaagggaaaaaganttggtttttcntttcccnanncccttggaaaannccttgnaaaattttccccccccccccttttttggggnnnntnccnccccnantttccttttccccnnaaannccggntccccctcc

SEQ ID NO: 1511 - DNA, 1057 bp, Oryza sativa
  Clone ID: PAT_MRT4530_101370C.1
gttattacaagatcctgtgggtcatccatcttctcacttctcggcgctaatatagtacagggagatatatggagcaacaaatgtgtacatacggttttgctctagtacagggaaacactgcgaaaagcggtgctagaggcctattctctcagcattgtaaagataccatggttttttatgaggttctaatgcttggtgttagcattttgtaacgttcagatccttgcgatcgatggagctacctgtgcagccattacaggccatttccaactgctacgtagtaactaaaagcacattttgcagttacagaatcccaagtacttaatccttgggaagggtgagatcatcagcagaagctaccctttttccattataacgctgcttcccgaaggagaatggaacatatctgtattttatcatatgaagaatctgtcgcttcattgtgactgtaaacaaaaccacccaatagaatagaagaataggccaaaacacaggcacatcgaacacactgaagaacgtcaggacaaaagcaatacagaatgctttaacaatggaataccagcatttgaactccggaaggcgacggacgaaagggcggaactcgtcagatgcgcgggtggggagcgcggcccccccctcgccgagcacctcggcgacctcggggtcgacctggggcgagaggaaggcgatgaggaggttgaggatgtagatgccgagggcgtaggtcacgatgtagtaccctcccgcgaaccagacacgcagcgcgcccccggccgccacgccggcgaaggccagccaccgccgcccgacgtggggcgtggaccggtccagcaggtgctggaaccgcctggacgccatcgcgaccgcggaggagacggcgaccgccgggcccccgccgccgccgccgccgccgtcaccgacagcgggggcggcggccgggacggcggcggaggaggaggagggatccatcatggcgtcgggcggggcagcgctgggatctcgtgctcgtcgcggtggccgaacgtgagggatcggggggctagtttaaggcctacac

SEQ ID NO: 1512 - DNA, 540 bp, Oryza sativa
  Clone ID: PAT_MRT4530_101371C.1
atggcggcgcgcgcgcacgacgccgccgcgctcgtcgtcaagggccccgccgcggtgctcaacttcccgggcgccgccgcgtccctcccgcgcccggcctccgccgccccgcgcgacgtgcaggccgccgccgcgcgcgccgcggccatggcgctcgacgccgtcgtccccgcgccgccgtcgccgccgcctccgttaatgccgccccaggcatcgccatcagaggcggctcgcgcgcacgcgctcgttgcccaggtcgaccaggacgacgacgacgaggagctggaggagatcgtcgagctgccgcccatcgacgagctcgacgccgcggcagagctcgtgttcgccagcagcggcgctacgacgttccactacgaccccgccgccgaccagccgtggtacgaccagccggcggcgtgtctgcaggacggcggcggcggcggcattgccgtgcacgacgcgctcgggttcgagctggaccatgtctgggcggacggcgtcgtggcgtccggcttcggcgcgctcctgtggaacatgtag

SEQ ID NO: 1513 - DNA, 294 bp, Oryza sativa
  Clone ID: PAT_MRT4530_101372C.1
ctaccgtcgtcgcagtccctccggcctgctggtggcgacgccgccgcggcagagcagccgctgctgcgtgcacgtcggctggtagcagcagcaggagacgtgttgctcctccaatgcaagggtttgagggtccggatcgtcgatgggaggatttccatgcatcaccgccatatcctccttttgggccaccgatgccgttaccatggggtcctcctcctgttggttttcctccttgtccaccatggggttggtgtggtccatgggtgcctcctgctccaatgacttatgagccat

SEQ ID NO: 1514 - DNA, 174 bp, Oryza sativa
  Clone ID: PAT_MRT4530_101373C.1
atgacgcgaatggataaccggattgctgtccacttccacctcaaagatcaccctgaacggaatccggttgtgcgcttctgcacatttatgaatgctgatgatgcggccgtcttcattaatccgatcaaagaggatgtgagcgccttcgccgatctgctaagtcgttttggaaag

SEQ ID NO: 1515 - DNA, 827 bp, Oryza sativa
  Clone ID: PAT_MRT4530_101374C.1
atggacgattcacagggagtgtttaaagagatcattgacaaggacgttgttgcttacacttcgatgatcactggttattcagaaattgtggattcagttgcatggaatgcatttgatattgccattgatatgctgcagggcaacttggaagtaaaccgtgtgactatgataagcttactgcaaatagctgggaatttgggagcacttaaagagggcaaatcactccattgctattccataaggagagcacttgttgtctcagattatattctagagacctgcattgtgaacttgtatactcgatgtggagcttatcaatcagcagttgctactttacagaattcaaagggaactgcagcttcatggaatgctatgctttctggtcttactagagctggacagagttttgatgcaatccactatttgtctgtgatgctgcatgagcataaaataactccagattctgtcaccttcgcaaacgtgatttctgcttgtgttgaggtatgctatttcggctatgctgctagtattcatacctacttaataagaagatatatacctctggatgttgttttggcgactgctcttgttaaggtgtactccaaatgcaaaaaaatcacgatatcaagacatctctttaatcaactgattgttaaagatgcagtctcctataatgcaatgatgtacggttacctacataacggcatggccaatgaggccacctccttactcaattacatgatggcagaaggtattgttccagattttgcaactgttcttagtctgcttgctgcttttgctgatcaaagagatttagtgagagggag

SEQ ID NO: 1516 - DNA, 2136 bp, Oryza sativa
  Clone ID: PAT_MRT4530_101375C.1
atggagctggtggcgcgcgctgctgcgggggctgacgccgcgggcggagcagctgctgcagctgtcgtccgggggaggggaggccgccgccggcgggtctcggcggggcggaagcggaagagggaggaggcagagaggtcggcggcggccgtggctggggtggggaagggcgggaagaatgcctccgcggcggccggggaggaggccggcggcgccgacgggaggaagcgggtcaccgtcttcttcggcacgcagaccggcaccgccgagggcttcgccaaggcactcgctgaggaggctaagtcaagatacgacaaggcgatattcaaagttgtggacttggatgagtatgcgatggaggatgaggagtacgaggagagattgaagaaggagaagatatcgttgttcttcgttgcaacgtacggagatggtgaaccgactgacaatgctgctaggttctataaatggttcactgagggaaatgagaggggtgtttggttgaatgacttccagtatgctatttttggtcttggcaatcggcagtatgagcatttcaacaaggttgccaaggttgttgatgagctcctagttgagcaaggtggaaaacgtcttgttccggttggtcttggagatgatgatcaatgcattgaggatgacttcaacgcatggaaagaaactctctggccagaattggatcagttacttcgggatgaaaatgatgtttcaacaggcactacctacacagctgccattcctgaataccgggttgaatttgttaagcctgatgaggcagcccatttggagagaaatttcagtcttgcaaacggttatgcggttcatgatgctcagcatccttgccgggccaacgtggctgtgcgacgggaactccacactcctgcttctgatcgttcatgcactcacttggagtttgacattgctggcactggtcttacgtatgaaaccggtgaccatgttggtgtatacacagagaactgcctcgaggttgtagaggaggcagagaggttgttaggctactccccagaggcttttttcaccatccatgcagacaaagaggacggtacaccactaggtggtggttctctggctcctccattcccttccccgattactgtgaggaatgcgcttgctagatatgcggatcttctgaattcgccgaagaagagtgctttggttgcattagctacttatgcttcagattctactgaagctgatcgtctgaggttcttggcctctcctgctggaaaggatgagtatgctcaatgggttgttgcgagtcaaagaagtctattagaagtgatggcagagttcccttcagcaaagcctccactaggagtcttctttgcagccgttgctcctcgtcttcagccgagatactactcaatttcatcttcacctagcatggcacctaccagaattcatgttacatgtgcacttgtccatgaaaaaacacctgctggaagggtacataagggagtctgctcaacatggattaagaatgctattccatcagaagagacaaaggactgcagctgggctccagtttttgtgagacaatcaaacttcaaactgcctgctgatccttcagtaccggttatcatgattggcccaggaactggtcttgctcctttccgcggattcttgcaggagaggctgtctcaaaaacaatcaggagctgagcttggtcgctccgtattcttctttggatgcagaaacagcaagatggacttcatctatgaggatgagctgaacactttccttgaggaaggagcattgtccgagctggttctcgccttctctcgtgagggccctacgaaggaatacgtgcagcacaaaatgtcgcagaaacgttgctcatatttcctacctttgtctgtccaggcttccgaaatctgggacatgatctcccagggtggttacatttacgtctgtggtgatgccaaaggcatggccagagatgtacatagagttctccacaccattgtacaggaacagggatcacttgacagctctaaggctgagagctttgtgaagagcctccaaacggaggatgatgtctccaagagggatttaattatacatgagaaatcatatatccttgttcatgataatgtttga

SEQ ID NO: 1517 - DNA, 207 bp, Oryza sativa
  unsure (1)..(207): unsure at all n locations
  Clone ID: PAT_MRT4530_101376C.1
cttgtttctagccatttgctattatttgctcctttnccctntttatgtaccaangttagattcagtcatgtcagagcctngtgttggctttaaacaatgtattctttccaatttccaactattgncggtaaagttatgcaactttttgtgtgtttnaaangnangntaatnantataaacccntatctcgtgattatcacagnacac

SEQ ID NO: 1518 - DNA, 203 bp, Oryza sativa
  Clone ID: PAT_MRT4530_101377C.1
tccccctccccccactactcctttctgtctccaacccctcgcctgctgctgcaccaaaacctaccttcccctccccgtattctaatggtgctgcaaccaatcctggcacatgctgctagcaatctgactcccatcatcctgcgcgctgtcgagtagctccgtgaacctacctgcagcctctcctctctctctctctctctctc

SEQ ID NO: 1519 - DNA, 736 bp, Oryza sativa
  Clone ID: PAT_MRT4530_101378C.1
atggagttcaccggatcatcagcggcggcggcgcgggggtggcgccgtcaggtgatgtcggggaaggtggcgtgggcacggagggcgctggcggcggcggcggcggcggggagggccctgcccgccgtcaccctcggcgtgggctgggtgaccgccgccgccgggagtcctccccgccatcgccgggcgctgggtcggcggcgaggcggggctcgccatggagcgcggcggcttcgccgtcctcgaggccggccagttcgcgttcgcgctcctcgtgttccccaccgtcgtgccgcagctgttggccatggcgatggagaggctgcgcgatgctgggcctccgaccctgatggaagacagggagatgctggtaagcacaattgctgcaatggaattgtccaccctggagcaccatcctgaacgcagaggaaaatggaaccagctcgctcaagaaatcgtgttcccacgcagcattggcttcgtcctcctaggggttgcgatgattggctggctgatcactggattttcaccagaaaacgaatttagcagacagagtattggctggatacttgctgatgttggatttttgggttggcatgctctagcaggattctttctacttccaaaagtgatccgcgcacttcgggcgacatccctagtttcctccggatctcttaattaccattgcttagctttcagttcgcctctgaccatcaaattaaatgtgaataactaa

SEQ ID NO: 1520 - DNA, 570 bp, Oryza sativa
  Clone ID: PAT_MRT4530_101379C.1
atggaggggagcttcgccgtgccggccgccatccccgtgcgccagcgcgtcgccatctgcatctggtggcagctgcggcgaggcgagcgtggaggcggaggaggcgaagcggcagcgaggaaggacggcgcagggggtgacacggagcggcggcggcggcggatgaggcgaggcggcggcgaggaaggaggggagcttcgccgcgtcggccgcaacgatggaggagagcttccgaatgttgtgcagacgacgttcgttctaccatcggctgtgagggactgggatggtcaattgatggaaggcgaggcaattcctggactgttgacgtcggtgatagaacaggacaatgccgaccttattacacgtgaggaatttttttttatgggggtgacgctgatcccagatcttgggctcttggcagcgtccaacacggattggagcgctgatcttgcagctcacgcgttccctcgtgacgaatggacaactgcaaataatttgcaaatcgctagtgaaggatcttatgtgatgagtgatgaactgatgatggcatctcttctcgtgtgtaactag

SEQ ID NO: 1521 - DNA, 165 bp, Oryza sativa
  Clone ID: PAT_MRT4530_10137C.1
ttaaccgcgtcgagagtagacaaggggagccggcgccgtggatccaactggggcttctccgacgccgtcgccatggatccgaagctggtggaggtgactctatcttttttacgatttaaggaagtcttttgctggaacttctgccttcacctgagatgacctgtt

SEQ ID NO: 1522 - DNA, 708 bp, Oryza sativa
  Clone ID: PAT_MRT4530_101380C.1
cgggctgcaggcagatattaacgagtgcgacctcagaagagcagagcctgcaaagtacgaggaactttacccttgttccagtcatagcaaatgccatgacacggagggtggttatgactgcaaatgctgctttggacatcatggggacggtaaaattagtggcaagggatgtacgcccataattcccgcaccttatgtcgccacagtaggtgagctgatttttagttcttcatttatactaaccactgatatgaattaagtactagctaataataattactaattatcaattgccagtgatttctatatttctgtttgtttgcatatttcagcaactgctttcgctgtggttgctcttgtggcgcttgcatggttcatgcgcagggggcataagagatgggagcggagagggttctttgacagtaacggtggcaaactactggaggatatggacatcatccaattcaccgaggaacagatagagaggataacaaacaagaagcgcatcaagattgggcagggtgccttcggtgaggtatacaaaggaacccacaataaccaagacgtcgctgtcaaatactccaagacaattggaaacttaaagggcgtgacacgaactcgtggcatagagggattcattaacaagatcgccgtccaaagctccattagcccaagtgatgatgcgcttggccatgaagcgtccgtaaa

SEQ ID NO: 1523 - DNA, 189 bp, Oryza sativa
  Clone ID: PAT_MRT4530_101381C.1
atgacagcacgcggcctgcaccatcccaagctgacaaccgcactccccgagctgacaaccgcactcacgctcgtttgcgcgcaagatcaagcatgcacagttgtgcctcactacataggcacattccatggtaggtccgaaagcaatgctaaccatatggcctacacgccagcgacaccaaagccatag

SEQ ID NO: 1524 - DNA, 360 bp, Oryza sativa
  unsure (1)..(360): unsure at all n locations
  Clone ID: PAT_MRT4530_101382C.1
nncnncctttttttttcttntcttaccaaactaactgacatatggaaaattaaaacataactttttcaccaaataccacnaaatgttcangccctaaaatacagcaatacccatacatccaacatagcaaaaatggcgaacatcacacactcagataaagctataaaaaactacggctccacgatataggctcctaatgacaaccatggcccttagtcgacctcctccatcttgctctctccggcgtcgtcctccaacggcagcatttctgcgtcaacctcaacaaactcgtcctcgtcgatgctcaagcctagcttaaacatcccgtggatcctggtcccgaaggttttggggtcctca

SEQ ID NO: 1525 - DNA, 656 bp, Oryza sativa
  Clone ID: PAT_MRT4530_101383C.1
aacatccacctcgagtcaatcaaaccaactaccaaaatgactggcttcctcaactccattgctagccacgcaaaggctcaccacgagagcgtcaacgctgcttgcaacgcctactacgggggctcactgcctgcctcacgaaccgcctcgcctgagacatcccgcaactcctctgttgccggtccatcatccgcaccaaagaaccccaccaacgcctccaaggcctggaaggcactcaagaggcaccaccaggagatgaacgccgcctttgccgtctactacagccccggcaactctccatcggcatcaaggaactcgtctgccgtttccagccccaggcacagtgtcgaggcaccaagccactctgctgagcacgagctcaaggaggtgggccccaggaactaccagaagatctggaaggccatcaagaacagggcggttgagcaccacaagagtgtcagcgccgcttacgaccagacctacggcatgcacattcaccaatagacggctttgagaaagaatgagagagacgtagagagcatcgaaaggaaccgtggatgcaattaataattgggaatggggggaaacggtcaacaaaagtgcttttttgggatagcgatataccactgtgggattgggtacctttggcgtttatg

SEQ ID NO: 1526 - DNA, 148 bp, Oryza sativa
  Clone ID: PAT_MRT4530_101384C.1
acctatcagcaacgatgtcttcagccagcacggtcgcacgtggatgcgccaccactcgtcgctccgcagcttcctcctgcccagccctcactgcagccccgccccgccggctctgctcgcttgtttctggtcgccggcagccggctag

SEQ ID NO: 1527 - DNA, 195 bp, Oryza sativa
  Clone ID: PAT_MRT4530_101385C.1
aagcttcattccgaaatattctcccaatctcataaactttctcaagccctccaaccagcatccttttcaaatgcagctctgttgcaatcctcaagtaaagatctctttgcagtgagttatggtgggttataaatggtcttgcttcagcaccacctgctgctccctgtttagcccggttggaaaaaaaaaaagctt

SEQ ID NO: 1528 - DNA, 646 bp, Oryza sativa
  unsure (1)..(646): unsure at all n locations
  Clone ID: PAT_MRT4530_101386C.1
tnnaattntantacgactcactatanggcgaattgggtaccgggccccccctcgagtttttttttttttttttttttnngtccagccatnaacngtnaaatttnnaaccnacccatgtcacatttcaactcagancaatattaacggtgatcaccaccnctgggcatctaaaaacacnacttcgcngnncanctanggcnacncatcactcanggtaagntactttaanggaatnactcnganagntccgnntgtanacncnacncatctnttgtnnngcncgcattgangagtacttncacggacatggtaccgcntggcacgacatagatnaactnacgacgggnaccgatgaaaatattccttccctctgtacatccatgtttgantctcccgaaatttcnagcataagaaacnagttgaaatctggnaacccaagtctcttgnacantaggctggttgtcttngggagttattctggaaancaagggaaaatgccttgaaccaaatgcnctttttnggtttaactcaaatcntnttgcnataaatncgccccggtgaaatttggcaacccnttngggaancccctcattttngttanactttttccnnntnnttnttcacaagttttccnttttcnaatccc

SEQ ID NO: 1529 - DNA, 246 bp, Oryza sativa
  Clone ID: PAT_MRT4530_101387C.1
atatgaaatatttactggaaaatttgggggttaatttcccacttttgtcattaactacaaatactaacacattctaaaattatcaagcaaaaaattcccatacaaatccatccataacaaacacatgtaaaaaacctcttttttcctatttacccttataacctttctaaagaacctcttatttcatccaactctcatgttactatttcatacatataaatcttgacaacctaatgatactttata

SEQ ID NO: 1530 - DNA, 493 bp, Oryza sativa
  unsure (1)..(493): unsure at all n locations
  Clone ID: PAT_MRT4530_101388C.1
agctaaattaacccctcactaaagggataancttgcggccgctctgttatttttatggtttacttgttctttaaggccaagattaaatatgccgtatttgatataaccattacgattaatgtgttacctgtacagaagcgtgaagggatttggcaacataattcaaccttttttgctatcacgtttcaacatgatttaaaacttctgtgaggagcgaaagagctacactaaaatcattattagtgaaaaataaatgacaacttatggaaactaagtcttcaaaagttagaccagtttaatagaagctctttgggcagcagacagcatagctgcctttagtggacaggcctgatttccctggccctgggcaattccattcttgccaccacctgcctttactttgaggggctcactcaatggtgtcaaccaatccatccccttaaagactggatcacccctgggaggcacaccagcataaaggaccctcgtggcc

SEQ ID NO: 1531 - DNA, 629 bp, Oryza sativa
  Clone ID: PAT_MRT4530_101389C.1
tctttgggtcagtttcctaactgtaaatcaagagggctgagcggtgtcatctctcaagttctttgctgttccaaactcttgtttgagaagtcatctttcaccaggtagagggagacaggagaacacatttggagtctgaatttgtctctgttcagagagctgcactgatttatggggacgagtcagtggaaggagatcatctgcctttgatggatgtcagcaacatgcacgctctggcttctgctgttcttctgcagccaggaatggaggagaggaagttccagggttggctgtgagaggaaagaagaagagaagctatgacatggtggggatggcactgatggtacttgcaagcatttattgagtgcttattgtatgctaggcataggatcatcataattatgaagaagcaactattatttatccttgctttacagatgaagaagttaaagctgtgctgaagttcatagagttggtaagtagcagtcacgggatttgaacccaggttgtctgactccagacttcatctttttacccctgtggcaaaggttgctggtgtgaattgctcttcttgtctagactttgtgtttccactccaggctgactgtatctcttccaggtactggagt

SEQ ID NO: 1532 - DNA, 468 bp, Oryza sativa
  Clone ID: PAT_MRT4530_10138C.1
atggggaggcaacgagacggtgggttccacttgtcggtgacggataggaagcttctggattggattgatggtgagaggaggagacggcgccagaaggaggtcgcgcgtggtgttttgggtcaacgatctcgcagcggcagtatggctgagcgggtccgcgcggtggcagtgatgcgggaccagcgacgagacacaatgctgaggcagggccggccgaggggcttaccaaattttggcgttaacaacttggtgcgaaagatggtggcacagcgcgatgctggctcgagctcggccgagaggagcggtgcggggtcggccgagagaaacggcgcagtggggcatagcgtggactggcccgttgcgtgcgacactgctggcgcgacgcggagctgcccggtcgcattgcgtggtgcaacatgctccgtgggatcaatgagttggacgaatggcgttgcacaagttcagtag

SEQ ID NO: 1533 - DNA, 603 bp, Oryza sativa
  Clone ID: PAT_MRT4530_101390C.1
atgtggaaggagaccggtgatctgaaggagaaggctacatcagataatgtcaagaatattgttgcttttgctaaagatgatgtggatttaggagtagattccatttctcccgcccccatctggatcgatcccaccttcgccggccgccgtcgcacgtccctgtcctccctcttcacttggtatggcggtggggtggcgtgcaacatcacagccgacgtagcaggaggcggccggtggccaaggcggcggctgtgggcaacgacggcacaacgagtgagacaggcggcgactggatcgacagccaagggcggcggggatggcggccgtgggctggcgcggcggcgcttggcgtctgggaggcggcgggatctgaccgccacatctgcccatcgcatccgcctccgcctgcctccgccgaccgccgcatccgcctccgcctgcctcccgcctccgatgaccgcccgcgcccgcccacctggttccgcccgcgcccgcgcctgcccgctcccctacgcccgcgcccgcgcctgcccgcccccctccgcccgcgcatacgcccacccgccccccgccttcacccgtcggccgccccctgcctggtag

SEQ ID NO: 1534 - DNA, 1611 bp, Oryza sativa
  Clone ID: PAT_MRT4530_101391C.1
atggacgcgccgaatccgacgagatcagatgcaaccacgacgccggcgacggcggacgacgacgccgccgtcgactactccaacctcccgccggatatcgtcgccgacatccacgcccgcctcacccacctcgaccgcctcaccgtcgccgccgtcttcggcgccgcgggccactcgatgaacctggaggagccatggctggccatccccggcggcgagacgacgacgaccgcgccggcgccgcccaccaagctctactccatctccgaccgccgcgccgccgccgcacgggccggggaggccgcgatgaggggctgcttcttcctcggcggctccggtgacggttggctcgtcaccgccgacaagaggtcgcggcttcgcatggtcaacccggtcaccggagctcaccgcgcgttgccggcgatcaccacgtgcccgttcttctacacgacgagctgggccggccgcggctcccacgtcaacctcacggcggggccgttcatgcgggtcaggcacggcggcggcccgccgccgccgccgccggagcagctgatcggcacgtcgctgtacacggtgaccgccggccaggtgcgccagtacgtgtaccgcaaggtggtgctctccgccgccgccgcgtgccccggcagcagctacgccgccatgctggtcctctccccggacctcggcgcgccgatgttcgcgacgtccgacgacccggcgtggcgcgtggcgccgtcgcgcgacggcgtcgaggacgccatccaccatcgcggccgattctactccgtcacctacacgggcgtcgtcgaggagtgggaccgcggcggcggcgggttcaccagcagaaccgtcgcgacggcgccgctcaagcccgacgacctcaagaaccgcaagtacatcgcggcggcgccggacggcaagctgatggtggtggtcaagttcttcaaggacataaaataccagaccagaggcagggatggatatttgcggagaacgcacacggtcacggacaagcgtgtgctgttcaagctgctggtgctcgacgacgaggagagcgggaggtggaggaagaaggaggaggaggtcggggacgcggcggcggcggcgctgttcgtcggggcgaacgcgtcgatgtgcgtggcagcgacgagcggcggggacctcgccggcggatgcatctacttcaccgacgacgacgtggcgcggggtcgtccgttcgacaagagcaaggacgatgatcactggcgttacagggaggacgacagggagatcgtcgccggcgtgtacagcctcgagaagcacagggcgcacaagctgccgttgctccagcggcggcggcgcacgcccagttacggtcacgatcacgacgacgacgacgataactatgatggcaatgccgatgccgatgacaatggtggcggcggtgatgatgatggtgaggatgaggaggaggtgcagataggcaagatctggccgccgccggtgtgccgcagcgcccgctccaaccgccgcctgctcctgtgcccaacaccagaagaggggatggaggagactatcgaggagaggacgccgcccgccggaggaggagctccgctggctaggggagggcac

SEQ ID NO: 1535 - DNA, 141 bp, Oryza sativa
  Clone ID: PAT_MRT4530_101392C.1
atggcgctggccaacgaggtggggttgtggacctcgacgtcgaggctgagcggtggttggagaccggcggtgaagagctacaccttctgtccttccgccgctaattcccccagggggtttgagcggagcggcggcccgtag

SEQ ID NO: 1536 - DNA, 233 bp, Oryza sativa
  unsure (1)..(233): unsure at all n locations
  Clone ID: PAT_MRT4530_101393C.1
ggagggncnctggccggcttcctcctcctcctctccacctccgccgccaccaccgccgccgccatggccatcggntctttcatcgcgtcgaggctggccaggtccaccggccacgccctcgnntccgtcgcctctaaggctccgatggcccgtaacgcggcggcgtctcctctnttgtccaggcttggntcagtggctcgtgcgttcagtcaaagcctgccgncgtggatgtn

SEQ ID NO: 1537 - DNA, 1002 bp, Oryza sativa
  Clone ID: PAT_MRT4530_101394C.1
cgggctgcaggaattcggcacgaggcgcagcagaggtctcgttccgtgcggtgccccccctgctgccgcccacccatgccgctgggggcggaggcggagccctccctctcagcgccccgcgggcggcagccggtggcctccgcggaggcggcggccgtggtgccgcgcttctctaccggacctgcttgtcgcggccgtacacaactggccgagccttgggcctcagttgccagaggagaagaaccagatggaagccagtctttgccttggaaacaggtggaccatctaacgctgacaaccaagacttcgaagatgatggtggctttcttggcagaacaaggctgggaagactcatccaggctgctgcgagggaactacttgaaaaactgaattctgccaggaacaaatcccccacaaagatattccttgtgctccttggcttctataccgccaatgcattggcaacagtcctggggcagactggtgactgggatgtttttgttgctgctattgtagtggctaccattgagggaattggcatgctcatgtacagaaaaccggccagtaggcctcctggacgattttggtcaatgatcacaatggtgaactactggaaagccggcgtatgtctgggcttttttgtggacgcgttcaaagtgggaagctgagtttccaaatcaccttcttatatgtacttacaagatttattcagctgacaatgatacaacgagtgaactccaagggtcgaagctgctcctgtggtgttgtatgcagatagatatgctgtgaactttacttcggctataaaatgtacatatgatgtagtcttgtcttgtatgaaattcatgtagatatattatactctagtttgatgcccatctgttcctatagacaaaataatgaagcctgttgtaagatgactctgtagttggctatgtccacaccaggcacactatttaattagctacttgtcttattgactaaaaaaaaaaaaaaaaaaaa

SEQ ID NO: 1538 - DNA, 155 bp, Oryza sativa
  Clone ID: PAT_MRT4530_101395C.1
agccgaaagcttccgttttcggttttacattttaatttagaggttttacccagaaaccaatcgggcgcaggtttccattcaaaatcctttctcgcgcttgcttgcgggggcacatttttaaacacccgccgtccaatgtttacaaaatgccaccc

SEQ ID NO: 1539 - DNA, 1042 bp, Oryza sativa
  unsure (1)..(1042): unsure at all n locations
  Clone ID: PAT_MRT4530_101396C.1
gttcttgctggccgccctcagcaagtgggccctaagaagaaagcatccaaggttacatccaaaaggcaatcagagcaactgtaagaacttacaatttaagaattttgctgcacatgaaaggaaaatgaatctctatgcaaggttactccgtggtgccctttgactttatcctgtcgggttggctaggcctacttgaggttggtcgagctcagttgtcaggataagtcaacaactcaacatgatacgcgattcttaagtgggctactgtagggattaatcagaagctgtgccatagcagaaggcagacctgtggtggatttaggacacttccagttacctcaccaacaaattgccaattgaaaactgcgtcctggatctagagcagcaaacttctgtccaatagatggttgaaaaacaacacagattcctgtggatctctatcttgtaggctgcaatgttcaaaggggacatgattgttcctcaccaaaatcttgggagatgtcacttttgaaaaagcttaccataggattgctgcggactttggagggagaatcttatcgaggaccgtcttttatacttgtatctaatcatgatcagcattcagtgagcttcctgcgcatctttattttcatttatccaattttgcatatccttgcctttatgactgtatccgagcatcctatcgttaatgatcagggatgacaaaaccttggaatcagccaaattggcatatccaaccccagaatagtgagtttggattcttgcagcaaagtggtagggcctgatgttaatttgtggtgaatagcaatttgagcaatagtgccagtgttgaacaatggcatatcccctggtgtacagcagggaatatgcatggttgaaggatgtgagtggaagaggtaggagatatacccaacttgtccatgtctccttgaatggtctgtactggctgccttggccgtagtnngtgtgttgagattgccgggtagctttgtgattgtggcactttntatactaatcgattgatgagatagattctctttac

SEQ ID NO: 1540 - DNA, 510 bp, Oryza sativa
  Clone ID: PAT_MRT4530_101397C.1
acgaggatttcctttccagtggtttcgcgatggcgagcacgccggagccggagacgacggtgggagactacgagctgcgggagcggctgggcggccggccgccgtccacggtggtgtggcgcgccgtggagcggtcgagcggatcccccgtggtggtgaagcaggtgcggctgactggcctccccagcaccctccgcgacagcctcgactgggaggtccgcttcctcgccgccgtcacccaccccaacatcatccgcctcctcgacctcatccagacccagagcaacctgtaccttgtcctggagctgtgcgagggaggagacctggcggcctacatccagcgcaacgggagggtggaggagcgcgtcgccagcaatttcatgagacagatcggtaattcacctagtaatatttgccatatcaatttcatttctagccctagtagcatctcttttctcttgttgccccccaatctatcacattacccgcaagcttagttagttgtgttac

SEQ ID NO: 1541 - DNA, 902 bp, Oryza sativa
  unsure (1)..(902): unsure at all n locations
  Clone ID: PAT_MRT4530_101398C.1
ataataccgacgagatcgtagtcgagttggttcgactagatcacacggcgacttggctcctgtaggctccggcttcgtaggctgtggtggatgtgttggcggtggatctggcggaggggaggccaccgccgcccgagggggggggagagagagtgcggtggaggagaggataaggaaggaagagaaaggatgaggatgagggggaggccatcggttcgggggagacggcggcgggctcggcgacggcggcggtgggctcggcaacggcggcggtggggggctcggcgacggcggcggtagatggcttgggcgacggtggcggcggtgggctcgacgacggcggcggcggcgggctcgacgacagtggcggcggggggctcggnggtggcggatccattggtggggagggcggccgcngccgatcnggcggtgtgggtgccggcgggggggggtccggcgatggggaaggttgtggcgactgatccggagcctgggatctctggggcggggcgtccggggggttctgggttggcgcgcttccttgggagtgggggcagctgctccatcgtgtctgggcctgccgttttcggcgctgggggactgtgaggcgtcgtggggtgaaatgcggtggttgtgtagtgtgtaggcgggtgtgtgctggtggagcggcggcgtatttcacggtgaccggaatttgtgtggggggggggggggttgatgggggcggacgctgattgctcgttggggggaggcggggggagtggcggttgtctttgtgtttatgtgggtgggtggcctattatagtgtctgttggtggggggggccggggtgcggggtggtggtggttggttgagccgttggtaggggtggtgtcttggcgttgtggggtggtctatttgtg

SEQ ID NO: 1542 - DNA, 301 bp, Oryza sativa
  Clone ID: PAT_MRT4530_101399C.1
atgattcttctcttcttcttcttccactagctagtaagctttactccttcagcttgcttgttgcatgtatggcatgggaagatctggactcgcatcgtacgtcgtttagcatcgagcggccaggatggggcggaggaaggtgcagctgaagcggatagagcacaacatgaacagggcggtgagcgagtccaagaggaggcacggctgtgataaaaactgccacgagatcgtcgctcgtgtgaagggcatggtggtcctgatgcgcctcgcggagacgggggagctctacgagctctccatt

SEQ ID NO: 1543 - DNA, 266 bp, Oryza sativa
  Clone ID: PAT_MRT4530_10139C.1
tttcccacgcgtccggtcgcttctcctactcctccctaacggctacgcttccagaaccttctcgaagctcccgctccccccccccttccgctccaatggcgaaggaaccgatgcgcgtgctcgtcaccggcgccgcaggacaaattggatacgctcttgtccccatgattgctaggggcgcgatgttgggtgctgaccagcctgttattctacacatgcttgacattccaccagctactgaatctcttaacggccctaagatggag

SEQ ID NO: 1544 - DNA, 129 bp, Oryza sativa
  Clone ID: PAT_MRT4530_1013C.1
aaaatcaatttttatttacaacacgggcaaaattccttaggcggacactaccacattagaccgtaatattaggaataaaacagtaagggggctatatgtaccattatagaagaactttaaataatgata

SEQ ID NO: 1545 - DNA, 419 bp, Oryza sativa
  Clone ID: PAT_MRT4530_101400C.1
ttttaataaatttccccttttttttttttttttcttgttgtttttttttttgggactggggggcccccccccccggcattttcagaggggatgcattcatatccggttacattcaggggaacatcaagaaacggggtccacctgcccggagaagggacaaaaagcaagtactatgcaaaagaggctatatttggctattggccattgcttatgggctctatttcggttgttgcagggcaggcgccttcaaaccttggcccttgcaggtgccttttcaccaaggccacgaaaatgccggcgcgggtgaagagcttgttgggcgggccgttttccaatatttgggcgagggaaatgacgggaaccgtgtcggcgctcttgaccggggatagccagtgagacattaaaagcacgggcctccc

SEQ ID NO: 1546 - DNA, 165 bp, Oryza sativa
  Clone ID: PAT_MRT4530_101401C.1
atggtgacgtgtgcatcatgggcacatgatgacacggtgacattcgcggcaccttcaagagcgccgttgcctccgccgctcgccccgaggccatcgtcgccgcttggccccgacgacaccgtcgtcgctcggccgccgagatccacctccgccctctcctcctag

SEQ ID NO: 1547 - DNA, 200 bp, Oryza sativa
  Clone ID: PAT_MRT4530_101402C.1
gctatttccacttgcaccacgtgaaccagtatggaaggatgtttccccgcatagccacgattgcccccctccccattatgtgaacgcctgttctgtcatgctctttatgatctcccaccagaaatggggatcaaacatggtagatgaagaataggagcatcaacatgatgctcaagtgtgattgtcaggatgacctgtac

SEQ ID NO: 1548 - DNA, 232 bp, Oryza sativa
  unsure (1)..(232): unsure at all n locations
  Clone ID: PAT_MRT4530_101403C.1
cncgtcngcgaggtcgtcntctccnncaggaggtgggggcgccaggtcgangcgantggggggagcccggaatcaggaagatgatcgcggaaaccagaggraccgcgaccgcgagcncgcgcaggnggaacagacccaacgccaaggcccccagganggnntcaccccggagnagcgccgcgagaggganaagaagccgctggcaggagaagaccgcgaagaagccccgcac

SEQ ID NO: 1549 - DNA, 327 bp, Oryza sativa
  Clone ID: PAT_MRT4530_101404C.1
atggagggatacgaaggacggacagagctatcaccacatgccacctacctcactttccgtggagcacccaacaaacgagggcatcctccttttatagcttggaatgacggttgtatggcaattgtggaggtcggtgcgcccttaaccgtcattggggagctatcagggacgtccacgtggaaggccaagatcagagatgccagtggtgaggcgcagcactccgtcgacgcgttggactcggaggccatggagtccatcgagtcgcaggaatccatcttcggcgtgctgctggactcagtcgtggccatggagtccgtcaaggcatag

SEQ ID NO: 1550 - DNA, 660 bp, Oryza sativa
  Clone ID: PAT_MRT4530_101405C.1
atgtcgtcgacgccgctgctcccggttctcctctccaccatgatcctcctctccgccgtctccaccaccaccaccgcgctgacgcaggacttctgcgtcgccaacctgcccctcggcgccgacacgccgtcgggctaccagtgcaggccggcggcgacggtcaccgccgcggacttctacagcggcgccctggccaggccggggatcctcatcaggcccttcaacaccagcctcgcctcggcgttcgtgcagcagtaccccgccgtgaacggcctcggcatctccgcctcccgcgtcgacatcctccccggcggcgtcgtgccgctgcacacccatccggccggctccgagctcctctacgtcctggacggcgccttggtcgccggcttcatctcctccagcgacaacaaggtgtactacaaggaggtgagcaagggcgggatgttcgtgttcccgcagggcctgctccacttccagtacaacaccggcgacacgacggcggtggcgttcgcggcgtacagcagctcgaaccccggcctgcagatcctcgactacgcgctcttcgccaacaacctgccgacttcctacgtggtgaaggggacattcttggccgaggccgaggtgaggaggctcaagtccaagttcggtggcagcggctag

SEQ ID NO: 1551 - DNA, 285 bp, Oryza sativa
  Clone ID: PAT_MRT4530_101406C.1
atggtgaggaaggtgttcgtgctgagcgacatggagctggatgctggcgcgtggcggtcgcaagacgagctgaacaccatcaggtgcaagttcgccgcgaaggggttgtcggcgccggaggtggtgttctggaacgtgggcgcgccggcgtcgacaccggtggtggaacctcaggagaacgcgggcggtggtgagcggctactcaagtgttggattgatagactcaacgtgtgtattccattggtgcatagcacggagtactacaagaagccccgtggcccatga

SEQ ID NO: 1552 - DNA, 480 bp, Oryza sativa
  Clone ID: PAT_MRT4530_101407C.1
ccggccgggacgtcattgtggatatataccaccactgaataacaagtaactataatcgacagataactaaagccgacgaggtctctacaggcgaaacacggatcctgcagagagagtggcgtaggcggcagtggtacaagcggcgctgtctgtcactcatacgccgaagcctgtttcgcctatcgcttaccagagcaagaacaagaacgagccagccaataagcccaaaccagctgcacccaacaagaagtgataaacttaactggctgcctgcctctactacacactatgtatgcaaaccgaaagactggctaatcacggggcttaatcttcaggattcagatcaggtttgagctgaacactgaagaagtgaacagcacctggatacagctaatgttacctgtgcacacttcacacagtcctacacgatgccggatgcatgtgtgatgagacaatcaaatgattgagatactatactct

SEQ ID NO: 1553 - DNA, 667 bp, Oryza sativa
  Clone ID: PAT_MRT4530_101408C.1
tcttatctccctctccctcaacaattctcttctcctctccacccctccccaccggctcacctcctctcctccctcccaatccgatcggaggaggggagcaacggcagtgcggcgctccccctctctccctccccactggaggagggggagcgacggtgacagcagcgatgcagacatgggggacgcggcggcggcgtggacggcgacgtctgcatggatgggccgacgacggcggtggtggcggctccccctctctccctccccgctcctagatctggctggaggagggggagcgacgacgacgtggatggcgacgacggcatggatggggcgacagcggttgcccggacggcgacggcggtgcggacgcggctcccctcccctccctctcctagatccggcccctacgaggagaggggagggcggtggcggtggcggaaacctccctccctcctagatccggcctgaggagggaggggggtggcggcggccaccgcatgcaaaggagtttgccggcgacgacgatgatgttgtttcttttttttttctaagtttacatgttgattgccgtggatttgaatccaatgttttgtgttgatgaatggatgtttgtgattggattctgtttcttggatgagatttgtcagaacttgtgatttgtgatttg

SEQ ID NO: 1554 - DNA, 669 bp, Oryza sativa
  Clone ID: PAT_MRT4530_101409C.1
gggctgcaggaattcggcacgaggtattaacagaaattaaggaagtagcaagtcaaaacgtagtttagaacgtgcctttagaaagcatagcaccaaggtgcctcggttcatacactgtcctttattttctttatgttggctagcttcgagcgatcttccaatggtattatcgtgaaccagtacacttcagtgttacgtttcaatactcatcattttcggcgtgacaatttacaaatccatttttttaatttcatatacctgtaatgcagatgttctgatttttatttcagtggaaaagaaatgagagccgtggttcatggtaaggcgacaaagagtgaaggctgtgccaggatcaatctgaagaagaggagatcccagacttttcgacttcaccgcgtacctcctgatgttttgcgtgtcatactatcacaattgtcattccaaagaagctgcccgtacaagcattgtgtccaggaagtggaaacggctttggagatgctacccaaagctggtcttgaccggagatatgatgcttggcagcagcagcaatgctgcaggagaccacccaacatggaataaaacaacatttatcaggcgtgccaacagtgttgtgcggcagctatcatcatcgtcagctacgctcaataagttcatagtgaaatttcccct

SEQ ID NO: 1555 - DNA, 1360 bp, Oryza sativa
  unsure (1)..(1360): unsure at all n locations
  Clone ID: PAT_MRT4530_10140C.1
cacgaggattcaatccaggcatccggctgaggaggcaagcggcggcggcgcggcgctacgggccgacggccgacggcgacactgcgacagggagctgcggtggtcggtgggggctctgcagccggcggggcaggcgggcgcgcggcctctctgggaggcaggcggcgtgggcgcgctgcggtgcggccgcactgggcattggcgcggcggccgcnngggaggcgggngcagccagccagcgcgcagggcagccggcaacaggcagtgaggcaggcagggcagcagcaggtctatacattttccatggcgcttgtggtaatatgtgggcagccttgcagtggtaagtcagcagctgcacgcttgtctcgccgctgctctctgctcctccacatctggacctcactgtccgtatcattgacgagtcatcactccatcttggacgcaatgatagctacaaagatatggttgtagagaaaaacttgagaggagttcttagatcagaagttgataggtctgtatcacgagacagcataatcntcgtggattctttgaacaatattaagggataccggtatgagttgtggtgtcttgcacgggcatctggaataagatactgtgtgcttttctgtgatacagaagtggaccattgtagggaatggaacaccaagcgtcaggagaaaggagaacccacgtatgataataatatattcgatgatctggtaagtagatttgagaagccagataggcgcaatcgttgggattctcctctttttgaattgtttccatctagagatggagtaatggaatcgtctcctgttattgctgaggctgtatcatatttgactaagaaagtggactctaagacaagagatgtgaaagttctccaacctacaatagccactcagactgctcggacaacagaagctaattccctttacgagatggacaaagcaacgcaggaggtgatcaatgcaattgttgaagcacaatcttgtggtcttgggcttcccgtgaataagatttctcttggtcctgacctaccaactatatgtcttcaaagatcagtcggtctgcctgagcttcgaagcctgcgacgcactttcattaagctggcagggcagtacagcttgagtggacctcccccaccagcagatgctgatagcgcaacgaggatgtttgtggactatttgaacagggaaatcagttcctgatatcaatttctgatggattgaccctatgtaagccctctttgtcttgtgcggcaaaggcattgaaacttgaaactttttattgagcctaacggattgttttcccctctgaacttctgcataaataaccagaaaaaaaaaaaaaaaaaaaa

SEQ ID NO: 1556 - DNA, 571 bp, Oryza sativa
  Clone ID: PAT_MRT4530_101410C.1
cgggctgcaggcaaacagctggctagcgagctacatcagtgaccagtagtgtgcattgttagcggtaggaagtgttacggggcgatcgtcactgatggctccggtctgcatctccgacgagcgttcagttgcggtttcggcggagcggttttggaaggtcttctcgaacccgcccgccatgcccaaggtctgcgctggtttcttcgacgctgctgaggttgagggggatggtgggccgggcaccgttgtcattctgaagtttaaccctgctgttaagcaagggttatacaagacacgtgtggtggcacgtgacaacgcttctcattttctcaagtcagaggtgctggaggtggcgcttggcagggcaggcaagctcaagacacacttgacggagacgaagcttgaggccaccggtgccggctcctgtatggccaagctcagggtggagtgcgagcctgaagacggtggctcgttgtcgccggagaagcagaagataatcctcgagggctacttcggcatgctcaagatgattgagaactaccttgtggctcaccctgccgagtacgcctaa

SEQ ID NO: 1557 - DNA, 627 bp, Oryza sativa
  Clone ID: PAT_MRT4530_101411C.1
atgaaaccgagccgccgccccttccaacgcctccagccgcccgccaccgccactctagccaatgccgcgctgcgccgctgcagccaaaagctccgccgcatcgtgccgcaccccggcatccactccgttcgccccctccacccccgcagcaccattcccatcgtggtgccaagctaccgccacctgtaccgcctccagccgcacatcgccgccgtcctagccaccgctaacccatcctccccgttcgccagatcccgccggccctcggccgtgcctccggcgtggtcgggagtcgccggaatgccgttcccgcctcatcccgtgccgaccaccgccatcgcttccgtcgccgaccgcctcctcgtggtcatctcgccgtcgtgccctctggtgatcatccctcttccttccccgccgcctcctgtgctgtgcgccgccgttccttgcaccgccagtgttggcgccggtggccgtccggtcgtgcgccgccgctacccagtcgggttggccggcgagccaacccgcctctctgctgcgcaccactaccgtggaccaagtccacgatggaccaaatcctttggcccgctgactcattgggcccgcccgtcggcgccggctctttgctga

SEQ ID NO: 1558 - DNA, 414 bp, Oryza sativa
  Clone ID: PAT_MRT4530_101412C.1
ccatattatttttttttttaagcaaacccccaaaaacataaaggagggaaacgtttaaaactgtaaggggaaggtggtaccactttcttttaacaccaaatcaaacgggaacaaaaaattaaactcccgacaatttatttgaaaagagggggatgatatctccaaaggaagtaaaaagagagagagacctagtaaactcccaactttcaactgcaaggcacttttttgaccctaaccggggaagagaagcgcttgcacaaaaaaaaaaaaagtaaatgcgccatgccaaaccaaaaactttcgcagctaaccaatctttttaacttatatacactttgggaaggaaaaactttttttaggcagtcaaaaaacatgggctaaaacaaagcaaagggaagaactaccctactgctg

SEQ ID NO: 1559 - DNA, 2527 bp, Oryza sativa
  Clone ID: PAT_MRT4530_101413C.1
atgacctgccgccggcagcggcggcggcggcggacatccccggcggcgccggcgccgccgccggtgcttccgccggacaacgacgacctcatccaggagatcctcctccgcctcccctcgcatccctcctccctcccccgcgcctccctcgtctgcaagcagtggcgccgcctcgtctccgaccccgccttcctccgccgcttccgcgcccgccaccgggatccccccctcctcggcgtcttcaaggacgagctccaccaccccgtcttcagatccgtcctcgacccgccggatctcatcccgcccgaccgcttcgcgctgcggctcgacgactaccgcgccgcgagcctcctcggctgccgccacggcctcgtcctcatcttcaactacaacacctgcgagttcctcgtgtgggatcccgtttccggcgatcgccgccgcgtggccgttccgcaggagctcgacggtggggagagatccgtcatgaacggcgcggtgctttgtgccgccggcgacgacggccacgtgcacggcggcggcttccggtcctgccacttcaaggtggtcttgatcggcgccagcaagatggatgggcgaatcttcgcctcaatttactcatcggtgaccggcgaatggggtgatgccatcttcacagggcctgtatccaccatctactattttggttcacctgccatacttgttggcaactccctctattggttgctatctgtgtccgggcatcacattcttgagttcaatctcgagacgttgaccctagctgtgatcgatggcaattggccacagatgaatttttctagcgattgccactattgtatcatgcgtggggaggatggtaatgtcggccttgccattctgtcgtacagcggattccaaatgtgggagaggaaggtcactcttggaggtgccgcgaaatgggtgctgtggaagactgtcaagctgcatgacattcttgggctgagttctgctgtgcagagagagaaaacagatatcgtgggatattccgaggatcctaatgcgtttattttagtggtggatacggatttctacatgttccgagttgactcaatgcagtccaagaaactttttgattgcaatgtcgtcacccgctgtcatcccttcacaagtttctacactgcaggtttggatatggagcatgtcgtatcagcagtaaccggtgaactggtcacccggttcatctcctacctcatgagcaagtactcaagaagacatgaaatctcagaggagaagcagctgaaaagactgcagcagcttctcctacgagtttccatggttgtcgaggaggcagatgggcgatacatcaccaactccgggatgctgatgcagctgaaggcacttgctgatgccatgtacagaggccaccatgtcctggacatgttcaggtgcaggaccctaattcaggaggatcccatcaaggaggttagcaacccatttcctcccctcaaacgtttttgcaaaattgttgatgcttctggaaaggacaaggccaggcaccttgagttgcacagaactttggaaatattagaaactgctgttgatcacatggcagaatttgttgttcttttgggtggatgcgatcggatgtcaaggagaccatatgatacctatctttacatagataacttcatgtttggccgtcattctgaaaagcagaggctcctgaatttcctattggaatacaaccctcctggtgtgcagcctgctgttcttccaatcattggtgctcttggagttgggaagaaaactctggttgcgcatgtctgcgccgacgagagggttcaatctcagttctcttccattttgcatttgaatgaaggtgatcttttgggattagcacacagtcatactctcttggcagggaacatgttggtggttgtggagtttgtttcagatgtgaatgagatgaattgggaggaattctatacatccctggcacaaatgaatcagggaagcaaggtggtcaccataagcaggcttagaaaatcagagaaacttggtactgtgaagccaatggctcttgacatccattcagacgaagaattgagctacctcttcaagacgctcgcatttgggagtgcgaaccctaaggaccatccacgattactgcaaatagccgaagaatattgccatgcagttgcagttcatagggtcacttgccgcagcgaatgctcctgcagatgcattgagagggaatttggatgtcaacttctggcttggcaggctgaacaggtgcattacactggctgaaaagaacttctccttgtacggtgagcatacaaggttacttcttgaacaaggtcatcgtgtagacatcaccaactttgattcatctccagctgctccattgcacatcgtaccaggtgttggtgccaatagtacagggaaggacttgccaagggttaaatttacagaactattactagatcctagtgttagaccaaaagatatgatatttgtcaaggatatatgtctctttgtatatgtgtag

SEQ ID NO: 1560 - DNA, 1024 bp, Oryza sativa
  Clone ID: PAT_MRT4530_101414C.1
cgcacgaggagtactccctcctccatcgctcgcacgcacgtcgccccccgctcctacacacgcccgcccgcctcttccccgccaaacaaaccaccccccaaatcttgtcctccctacccactatatacgccaagaaaacgcatacaaacaactcctcttctccttcctagcttcctccccttcctcctctagttcgtggacactagtacgatggttgggccgatcgtgatagcgtcggcggggctggggatgctggcgggtgtggccatggcgaaccggaccatgggcggcggcggcgacgggcggcagctgccggcggcgtcgaggtgggacgcgcggccacggtgcgccacgtgcggcggcagcggccgcgtcgactgcctctgcaaccgctggtccgacggcgactccggctgccgcacctgcgccggctccggccggatgccctgccgcagctgcggcggctccggcaccggcaggccgctccccgcccgcctcatcgcccgcggccaccaccaccaccacaacccgccgccgtcgtcagcgccgggacgaggcggtgactacagctgatgatagccaagccaagaagacaaaaaagtatatatatgtacatgtccatattcatgtgtggatcttgattatatatatacatatatgtatatatgtatcgatcttcatcgtcgatactgcttgctcatctacaagatcgactatgcatatgttcttgtgttgttcgagttgggattgttaagttgaatttacacaactcaagaagatgtggggaaagaaaaaggagctggggcgagaagccgacaactgcaggttcatcaagttagaggccatggagagatgaagatagggggatagctagctagctaggcaagtgatcagttttgttggccaagggaaagttgtagttcattgttgtggctgtaatatatatgcatagaattcgttattataaagattaatttccagatttggatcttcaaaaaacaaaaaaaaaaactcgacctcgtgc

SEQ ID NO: 1561 - DNA, 331 bp, Oryza sativa
  Clone ID: PAT_MRT4530_101415C.1
cggcccggcagcgtacgtcggcgtcggcgtcgtcggcgttcgtcagcaaaagagagagagacagagagctacatcgagagagagaggacgggggctctcacccaagagacgcggcggcggcgtctgcggtggaggcggcgaggaccgccaggcgacggtgagagacaacggcggcgtcggcgcggggttgccctaggcagtggcggtgaaggagaagccgatgctcgatctcgatggaaaaacgtctaagtgttggtggaggagacgagggcgcaccgggaatatttatacccccggatctttactcccggttggtgagaagaaccgggag

SEQ ID NO: 1562 - DNA, 420 bp, Oryza sativa
  Clone ID: PAT_MRT4530_101416C.1
ccgtgcttcagcggcgaggagcggacggaatccgagcgcgcgctcgacggcgtggcgccggtgctgaacacgcggcggtcggacctgtcgtggaaggcgttcctgccggagggggccgaccggaaccacccggcggcgcacgtcgtcaccggagacgacgacgacgacgccgaactgcacgaggcgttcccgccggcgatggtggtcgtcggggggctcgacccgctgcaggactgggaccggcggtacgccgccatgctgcggcggaaggggaaggcggcgcgggtggtggagttcccggaggccatccactccttctacttcttcccggagttcctcgccgacgatcaccggaagctcgttggtgaaatcagggcgttcgtggaagaatgcatcacgtccaagcagcccactgcttag

SEQ ID NO: 1563 - DNA, 525 bp, Oryza sativa
  Clone ID: PAT_MRT4530_101417C.1
atggagtacgtcgagtcgctgaagtccgtcgaggtgccggactccgtcgacaccctggacatcgtcaacgcgctggactccatcgaggggctagaatcggagatggcgttggactccgtcgaggtgccggactctgtcaaggtggtgctggagtccgtcgaggtggcgccggactccgtcgaggtggtgcaatgtcctcgctgcggcacattccatgctggcggcgtcttcggagaagcatgcttccaagctcgccgccgtgctcgcaagtgtgcccattgtggccttttacatgaagactacgacctcatagcaaggtttttgcataacatggaaaagtttgattgtgagttatacattcctgatgtggagaaacttcaaatggatggtgaaaccatacttcttcctgagcacgttatcaaaaagttggacgagatctacagtatgaaggagttggaagatgcaaagatgaagcaagaacaggagactagcaatgcattcagcaagcaaggatgcttcacatga

SEQ ID NO: 1564 - DNA, 284 bp, Oryza sativa
  Clone ID: PAT_MRT4530_101418C.1
cccgcctcttctagggcgggcccacatacatctggcagttttcataggtcatagactgccctcacagaccaacacaactcttttctgcatatgttgtcctcactcgtgtgcatccgagatgaatttcccgatcggtcacccatcccaaattactccaagacaagcatgcctaaccttagagttcttcagagatcggcttccggaaaagaagttgcaacttgttgatatgagtattctattaatcctattaagccctaggccgggatgttacagggcacttccat

SEQ ID NO: 1565 - DNA, 474 bp, Oryza sativa
  Clone ID: PAT_MRT4530_101419C.1
atgaggggagaggataattttagtagattttttaagggtgagggcagtggcgtggccggcaagtggaccggtggcagaggacgacgggggacattgacaattggtgtctgccgcggcgccgaggacgaggagactgcctgggcctgcgatggagaagaggacgagatgtggagggcttttgttcttgtgggtgttgatgcgcttgcggtgagcacggaggacgcggtgggaggagcggcgagcgggagaaggaaaggggataaggcagaggcttcactgtatgctggaccagaatcgaacgctatcactgaagctgaagattctgaaatctatgaagaccctgaaatctatgaagatccagatgttgtgagggaattttttgagacacatgttaggctggaatgtattgcagctgatggctctttaggcatgagtgttgattctgattggagcctgaagtacagcggtcgttga

SEQ ID NO: 1566 - DNA, 576 bp, Oryza sativa
  Clone ID: PAT_MRT4530_10141C.1
atgatcaagcatgtgaatcttgacctgaagcttttctgtgatacagaagtggaccattgtagggaatggaacaccaagcgtcaggagaaaggagaacccacgtatgataataatatgtatagatcatattgggtaatcatggaaggagggaggctttggcaggttagagcagaagaagagtattgtgggggaagggttgcaggggatagaagggaaagattcgatgatctggtaagtagatttgagaagccagataggcgcaatcgttgggattctcctctttttgaattgtttccatctagagatggagtaatggaatcgtctcctgttattgctgaggctgtatcatatttgactaagaaagtggactctaagacaagagatgtgaaagttctccaacctacaatagccactcagactgctcggacaacagaagctaattccctttacgagatggacaaagcaacgcaggaggtgatcaatgcaattgttgaagcacaatcttgtggtcttgggcttcccgtgaataagatttctcttggtcctgacctaccaactatatcctttactgtttga

SEQ ID NO: 1567 - DNA, 503 bp, Oryza sativa
  Clone ID: PAT_MRT4530_101420C.1
atggagtacgtcgagtcgctgaagtccgtcgaggtgctggactccgtcgacgccctggacatcgtcaacgcactggactccgtcgaggggctagaatcggagatggcgttggactccgtcgaggtgccggactccgtcgaggtggtgccggagtccgtcaaggtggcgccggacttcgtcaaggtggcgccggactccgtcgaggtggtgcagtgtcctcgctgcggcacattccacgctggcggcgtcttcggagaagcatgcttccaagctcgccgccgtgctcgcaggtgtgcccgttgtggccttttacatgaagactacgacctcatagcaaggtttttgcataacatggaaaagtttgattgtgagttatacattcctgatgtggagaaacttaaaatggatggtgaaaccatacttcttcctaagcatgttatcaaaaagttggacgagatctacagtatgaaggagttggaagatgcaaagatgaagcaagaaca

SEQ ID NO: 1568 - DNA, 480 bp, Oryza sativa
  Clone ID: PAT_MRT4530_101421C.1
atggcggtcagatttcgttgcccgggccaagcccccgagcaggaagccgacgcacggggtcccccatcccccgccgccgcatgcgcccgcggcatctgcggctgccgaagcggtggcctccgtgccaacgccggcgaggcgcagctcggcgggggggatggcggagatccgaggcggccgccgctgctcgggagactcgccggaagcaacggcatcttcctcctcctcctcgtcgtcgtcatcgtcgtggatagtgcgatgtttcgtatcaatgtagcagtaacaagactacaagtctacagccctaagaggctatggccaggaaagaaaaaacacacagtcacaccacgcatctacgaccaaaatccaccaccgaagatcaaagcaaactacgatatcccaaagggaatggatattctaaatggcgtattcaggaagaatgtggcaccgagagtgctcccaccacctgctctgagatga

SEQ ID NO: 1569 - DNA, 504 bp, Oryza sativa
  Clone ID: PAT_MRT4530_101422C.1
atggagtacgtcgagtcgctgaagtccgtcgaggtgccagactccgtcgacaccctggacatcgtcaacgcgctggactccgtcgaggggctagaatcggagatggcgttggactccgtcgaggtgccggactctgtcgaggtggtaccagagtccgtcgaggtggtgcagtgtcctcgctgcggcacattccacgctggcggcgtcttcggagaagcatgcttccaagctcgccgccgtgctcgcaagtgtgcccgttgtggccttttacatgaagactacgacctcatagcaaggtttttgcttaacatggaaaagtttgattgtgagttatacattcctgatgtggagaaacttcaaatggatggtgaaaccatacttcttcctgagcacgttatcaaaaagttggacgagatctacagtatgaaggagttggaagatgcaaagatgaagcaagaatacgagactagcaatgcattcagcaagcaaggatgcttcacatga

SEQ ID NO: 1570 - DNA, 507 bp, Oryza sativa
  Clone ID: PAT_MRT4530_101423C.1
tcatcctccagccgccgctccacaagccgcctgccgcctctcaagtctcagctccgttgccgcccctgtgcgccttccgccggcgctcaccattctcagggagagagggggggatagagagaaggggatagcgagcactgcgccggagaagaaggtggcggcgggccgcggcggcgctcggggcagacccaacaaggaagtcctcctcctcctcgtcgctggactgcacgaaagcgaggcgacgaggccgaagatggcgagcatctcggcgagcagcgccttgggcctccccatggcggcctgcacgaatgccaccgccgcggtgctgttcgacgacgcggcgtccctccaccccatcgcggcgtccgccgccgccgagacagcatccccggcggcggcgaaggtggccgccacggccctctcgacggctgctctgatggcgcagaggaggaggcagctgaggtagcccgggagctggaccagcatgagcaggagcacgacggccat

SEQ ID NO: 1571 - DNA, 454 bp, Oryza sativa
  Clone ID: PAT_MRT4530_101424C.1
agaagataggaggaagcaggcacgcgtgcaggagccgggacggaatagaggggccgacctacgcgtccgggaatgccaaagggaccagagagaaaaacacccggcgttggcgagaggagcataggctaaacatcaggacactggcatggtgacacgagctgaatgcaaagccacacaccacgggtaactggaagagagaacaaccgtcaagtaattcgcaagagacgagaaagtgacaatgccccagacatccactaccattatagcttaggctgctacaaaagatgagatcgaggggagagttgcacagctgacgagagagctgtgtcagacagactaacaataggaatctgagaagggggatgaaagaaaggcagagctaagtggtggagttgcggaaataaaggatggaggtgaaaccgagacagagtttgaggaacggaagctacaaata

SEQ ID NO: 1572 - DNA, 222 bp, Oryza sativa
  Clone ID: PAT_MRT4530_101425C.1
atggggggccgagacggcagcctcctagggcatgaaatgcggcgagtcgcgcggcaggtcgacgcggtcgtcgtggaaggtgagctcgccgccgccgctctgcccccgcccgccgtcgtggcgaggcaggtcgacgcggtcgtcgtggaaggcgaaccgagagaagccgccggagctcggaaaggccttgcaactttgcaacttgtaactctgcgatcctga

SEQ ID NO: 1573 - DNA, 515 bp, Oryza sativa
  unsure (1)..(515): unsure at all n locations
  Clone ID: PAT_MRT4530_101426C.1
gccgtcaagtcggtcgaccgctcccgcctctccgacgacctggaccgtcgctcgccgcgctcgagcccaagctggcccggctcgccgccgcgggcaacccgggcgtcgtgcaggtgcacgccgtctacgaggacgacgactggacgcacacggtcatggacctctgcacggggcccgacctcctcgactgggtccgcctccgctgcggccagcccgtgccggagcccgacgccgccgccgtcgtcgcgcagatcgccgaggccctcgcgctctgccaccgccgcggcagtcgcgcaccggacgtcaaagcccgacaacgtacctcctacgacgccaccggggacgggccgcacacgggtgcgcctcgccgacttcggactccgccccgtgggtcggcagacgggatcagcgccgaggggctcgtggggacgccgcactacgtcgcgcccgaggtggtcgccgggggccgagtacggggagaaggccgacgtgtngaacgcgggggtggtcatgta

SEQ ID NO: 1574 - DNA, 348 bp, Oryza sativa
  Clone ID: PAT_MRT4530_101427C.1
atggcggcggtggttccggcgaacttcggtgagggtggcagccatggtgagcatcagtggagcaaggggagcacggtggtggcggcagctcggcctggggcggcctggagcagcggcgcgccgtgcagccgacggcggtcgaacagagcggcgacgccgggaggcggcgccggcggcactccggcgtcggattggatggggaacgagaggggaaagggagtactaagcatggcgaatccgtttttaccttcaatttcagaggatttgcaacttgagaaacgaaggagttacgcaagtgggaagctggaggtgtcgtctgggcattcgttcgtctgttcgtcctcgtga

SEQ ID NO: 1575 - DNA, 975 bp, Oryza sativa
  Clone ID: PAT_MRT4530_101428C.1
atggaggactcggaggcgatggcgcagctgctcggcgtgcagtacttcggcaatgaccaggagcagcagcagccggcggcggcggcgccgccggcgatgtactggccggcgcacgacgcggccgaccagtactacggctcggcgccatactgctacatgcagcagcagcagcattacgggtgctacgacggcggcgcgatggtggccggcggcgacttcttcgtgccggaggagcagctggtggccgacccgagcttcatggtggacctgaacctcgagttcgaggaccagcacggcggcgatgctggcggcgctgggagcagcgccgccgccgccgccgccgccaccaagatgacaccggcgtgcaagaggaaggttgaggatcacaaggatgagagctgcacggacaacgtcgcgaggaagaaggcgcgctccacggcagcaacagtggtgcagaagaagggtaataagaacgcgcagtcaaagaaggcgcagaagggcgcgtgcagccggagcagcaaccagaaggagagcaatggcggcggcgacggcggcaatgtgcagagctcgagcaccaactacctctctgatgacgactcgctgtcgctggagatgacttcgtgcagcaacgtgagctcggcgtccaagaagtcgtcgttgtcatcgccggcgaccgggcacggcggcgcgaaggcgagggccgggcgcggggcggcgaccgatccgcaaagcctctatgccaggaagaggagagaaaggatcaatgaacggctaaagatactgcagaatcttatcccaaatggaaccaaggtggacatcagcacgatgcttgaagaagcagttcactacgtcaagttcttgcagctccaaatcaagcttctgagctcggatgatatgtggatgttcgcgccgatcgcgtacaacggggtcaacgtcgggctcgacctcaagatctctccaccgcagcagcaatga

SEQ ID NO: 1576 - DNA, 537 bp, Oryza sativa
  Clone ID: PAT_MRT4530_101429C.1
tcggcacgaggagatgatctaactaatcaactagccctttgcaacgaaaccttactaaccttgtattagtagaccaatgtggggttttactaggctgaagtcttatggcagaatggcatattttatgttgtagtatgttgttatcaactgtacagttcaccaaaatgtgatcaaatcctgagattccactgataccaagcaactccagtataaagagcccatgttatagcagcagttgttcgcataccaagtttccgaccatgctagaggacatcatacttgatgcctttgaggttcactgttgggattgttggttatactggagacttaatatacgggattacagatgtttgaaaacaatacggacatgaggaattaggaaacgaaggtactaactggacgtcgctaggtggtcaccggttagcagactcagcacctatttgtcagtaagaggcagtaaccagtctacctggggttcggtacatggatgggatcagcattcaagcaattcaggcggtggcgatgcatgaacatcag

SEQ ID NO: 1577 - DNA, 617 bp, Oryza sativa
  Clone ID: PAT_MRT4530_10142C.1
cgggctgcaggaatcggcacgaggccccccccctttttttttttttttttttttttttttttagcagtcaagaaagagtggagttgtagtgaaaagcaataacaagcatcattccaagggaaagtttttaagtaaaaggtcatgacaagcatcattcttgatcaaaagtctacaggatgaaccactaaacaccggggtcctactaacctgccttaccgggatcttgttcagttccttgcactaattgactgacctccctccatctccagccaaaaaaaattctgccttccaatgttgattctattagtacttctgcaatgcaagagattcttccacatctccaatcaagaatgcatgcgcctcgattaacttgtaatcttgcaagatgtatagccttcaacaacaaaaaaaaatgaatgcattgtcacaaatgatgagatgaaatgaaatccatcactctcactcagcttcgtcttcttggagtgaatcttgtgaggatttagacatgcatggcgttgtggggggagagcttgatttgaggtgttgggatcagaatggcggcggcctgatgctgccgctccagctaccgaagttgtctcctggtccgggaagttgct

SEQ ID NO: 1578 - DNA, 703 bp, Oryza sativa
  Clone ID: PAT_MRT4530_101430C.1
acctagtacacactattggatggcgataactacacgatttcttataggttcattgaatggcttacttggaccaataagagcttatgccgttgaagtttgtcgaccagagcatcaatccattggattgtcattggttagcacatcatgggcaataggtctcattgttgggccagctatcggtggatatcttgcacaggaaacactacataaacatgcaacagaaagaaatggagattgtaaaattggatctttgagtacacatttggttgactccgaagagtttgtcaagcaacacactggaccagctaaagataagagcttatttaaaaattggccattaatgtcatctattgttctcttctgcattgtctcctttgatgacatggcttacacagagatattttctctatggtctgaaagtgacaaacaatttggcggactaaatttctcgtctgaggatgttggtcaagttcttgcaattacaggtgctagcatacttatataccagacatttatctacccacatattgtgaaagttctaggaataatcaacacttctcgggttgcagtaattctttctatggcaattctttgtagttatcctcctatgacatatctctcaagacccttggttgtccatagtagtaaatattggatcgatgcttaaaaaataactttgtgtttactatcattacatgctctt

SEQ ID NO: 1579 - DNA, 498 bp, Oryza sativa
  Clone ID: PAT_MRT4530_101431C.1
atggccaatggattgcccggctccgcatggcccaagcacggctgtgcctgggctgagaaaagagagaaaaagatgcacgtggaagcctacgagcgtggaaacatgaccgagaaatctgagtcgtcgcgctcgcgccttagcaattccttcttaggtttgccaatatcatcgttatttcccttcttatacttcatgataagagacttgcatgttgcaaaaagagtagaggacattggattctatgcaggttttgttagcacatcatgggcaataggtctcattgttgggccagctatcagtggatatcttgcacagccatcagaaaaatatccaattctatttttagcaaactcattatttggaaggttcccatattttctaccttgtttatgtatatcgatcttctgcttcgttattcttataagttgcatttggctcccggaaacactacataaatattcaatagaaagaactgagattgtaaaattggatctttga

SEQ ID NO: 1580 - DNA, 1155 bp, Oryza sativa
  Clone ID: PAT_MRT4530_101432C.1
atgcacgtggaagcctacgagcgtggaaacatgaccgagaaatctgagtcgtcgcgctcgcgccttagcaaatccatcttaggtttgccaatatcatcgttatttcccttcttatacttcatgataagagacttgcatgttgcaaaaagagtagaggacattggattctatgcaggttttgtagcatactacaaccgggctttacaggcttatgccgttgaagtttgtcgaccagagcatcaatccattggattgtcattggttagcacatcatgggcaataggtctcattgttgggccagctatcggtggatatcttgcacagccatcagaaaaatatccaattctatttccagcaaactcattatttggaaggttcccatattttctaccttgtttatgtatatcgatcttctgcttcgttattctcataagttgcatttggctcccggaaacactacataaacatgcaacagaaagaaatggagattgtaaaattggatctttgagtacacatttggttgactccgaagagtttgtcaagcaacacactggaccagctaaagataagagcttatttaaaaattggccattaatgtcatctattgttctcttctgcattgtctcctttgatgacatggcttacacagagatattttctctatggtctgaaagtgacaaacaatttggcggactaaatttctcgtctgaggatgttggtcaagttcttgcaattacaggtgctagcatacttatataccagacatttatctacccacatattgtgaaagttctaggaataatcaacacttctcgggttgcagtaattctttctatggcaattctttgtagttatcctcctatgacatatctctcaagaccttggttgtccatagtagtaaatattgcatcgatgcttaaaaataactttgtgtgcaaactaccggtgtacatggtagtacaagttactatcaatacatgctctttcattcttcagaacaactctgtgccccagcatcaaagagcaaccgcaaatggcttagccaccactttaatgtccttcttcaaggcatttgctccagcaggagcaggcattctgttttcgtgggcacaaaaacgccaacatgcatttttctttccagtggctattgattaa

SEQ ID NO: 1581 - DNA, 267 bp, Oryza sativa
  unsure (1)..(267): unsure at all n locations
  Clone ID: PAT_MRT4530_101433C.1
cccgggtcgaacccacgccgttcttctcccgngcgttactagcaacgatgaaacatggggggagagggggtgaggcggtgtcatagctactggcgtaccgggnaacctggctactagcnnncttctgtatgtagctaggttattnggggctgttcactgtgtnngtgatttggttacttaaatnnaatttgtgtttcctttttatttctggaagcatgtactgatgaaaataaatgaggagggggagggtgttctnntctgtttaac

SEQ ID NO: 1582 - DNA, 671 bp, Oryza sativa
  Clone ID: PAT_MRT4530_101434C.1
cccacgcgtgagggagagggtctgggtggattgggaggacctcatcctcgaggacaccgtgccgctcgtcggcttcgtccggatgattctgcactccggcaagtatgaaaatggtgatcgactgagccctgaacatgaaaaggcaattttggaacgattgcttccttatcacccacaatatgagaagaaaattggatgcggtattgactaccttacggtagggttacatccagaatttgagaactcaagatgtcttttcatagttaggaaggatggtgagcaagttgatttttcattctggaagtgcatcaaaggtctcatacgacaaaagtaccccatgtatgcagatagtttcattctcagacattttcgcaggaggcaagattaccgaattagtgactcgtaaaattatttcttgtaacatttctctgattttgatttggcccatttgcccttaatgccctgtgatcttgcatacgttcaagcacacgtggaaggttcccgttctaagtatctcgttgggctcgatacaatttccttctcctgtgtgtacatatagggtagtcttccagttgaacttcgcctgactttgcagcacgctcattcttgagaagttatatatgtgctagttcttggctgaatgttgcaattcaaaaaaaaaaaaaaaaaaa

SEQ ID NO: 1583 - DNA, 173 bp, Oryza sativa
  Clone ID: PAT_MRT4530_101435C.1
tctgcccactgccaagagccctgtaagattcaatccgcgcgtttgagtttttgttcatcgttgatggccacagggcacgtgatacctgtagcctgaacggtcttgggccccaagccttggaataagcaagggagagggatgcctgcacttggagcgtgagtggtattttagcc

SEQ ID NO: 1584 - DNA, 321 bp, Oryza sativa
  Clone ID: PAT_MRT4530_101436C.1
aaaccccaaagaagggaacttatttatttccacaaggggaattaaaaagacacatccctcgggtcacagccatgagtccagaacttttattaacatagccccatgtaaaaagggagttatgctatgccctaaacttatttgcaacttgggcccagccgttcctggccccgttcaaaggaatacccgatcataatatccagaataccctaccagggctaatggggggggcaaaaaaaaatgattgggcatcccctggtaaaacacaacaaactggggttttctgaatcttccccaagggggaaaaacaatgattattcaagg

SEQ ID NO: 1585 - DNA, 413 bp, Oryza sativa
  Clone ID: PAT_MRT4530_101437C.1
gtgaccatagctatgcccagatgctctatagactggagctgctgcaatatgaagatggtactcctgccagatgaagcaccagatgggcacaggtattcatttcagttcttgtcatgcggcagcctgaacctgagtatggaagagaggacaactgatgggattcgaagatggatcactcctacacgtcacttgcacttgctccaagtcacgcatactaccgtcgcatgagctgctccgtcctgaagtcacagcaagctggtccttgatgttgtcaatctgagggaccactgtttcttactttcattaaaatgttttgacgcatttaagctggaagcatttcaagataatgagtactgatgtaccttctgccacctggggtttcccatgcacatagaattttccgttttcttcct

SEQ ID NO: 1586 - DNA, 117 bp, Oryza sativa
  Clone ID: PAT_MRT4530_101438C.1
atgccgggccacgtcggcacggggtcaggcggccaaattgcttggcgcacgcagggggaaaaggctcaagttgatcgttacaccttcagggcctcagctcaccctggagtaaagtaa

SEQ ID NO: 1587 - DNA, 391 bp, Oryza sativa
  Clone ID: PAT_MRT4530_101439C.1
aaaatttctatccgccgccgccgccgccgttgacgccgccatggccacccaaacccgccccctcgtctccgacaagggcctggaggtcgacatgcacaccgacaacagcagcagccacgccctcagcgaggtgttccgcgcgccgctccgccccgacgtgggccagttactcacaggctgctggactgcaacaggcgccagccctacgccgaggcccgccgtgccgaccaccatacctctgcgtagtcgaggggcacggaggcgcgccgagttcgagaatgccccgggtacccgggggcgggacgaaccgcgcagggcaatggagcctttggcaacatgtgccccggcgggcgcatgctcgggcccaccaagacatggcccaagcggcacc

SEQ ID NO: 1588 - DNA, 869 bp, Oryza sativa
  Clone ID: PAT_MRT4530_10143C.1
atggactccgtcttcctcctgcagaaggaggagttcgtcatcctccatagggcacgtaaaccatttgtcttcaatacgtaggtgaagttagttaacttttctgatggcgaaatgggttcctacgagcttggttgcaggagcggcagcagccgagaaataaagcggatcggcccctgcttcagcgagccggaggccgacgggggctcctgcacttccgcgccgacatcatgctgctgctgagctacagcagcatcaactacatcggggtgggcaagatcctcaagaagcacggcaaccggaccggcggggggcttggcggccctgctggcggagacggtgcgggagctgcggcacttcttcaagacggagacggtgtcgcgcaagatcctcaagaagcacgacaagcgcaccggcggcgcgctggcggcgccggtggcggaggcggtgcgggagcggcggcacttcttcaagacggagacggtgtcgcggatggtgcgggagtgcgaggcgatgatggcggaggcggcggtgctgccggcggaggcggcgcccgaggcgctcgccgcggcggcggagcacgggatattccggaacaccgtggcggcgctgctcaccatggaggacgtgcggcgcggcagctccacccacgggcgccactcgctgccgccgctcaccctgccggactccgactggctccgctccttccagccgccgtcccccatccccatccaatgatttctttttttttttgctgcttcttaaataggagcggctaaataatgtaaaaatgcgagttaccatacatacagacgaattcatacgtgttttggctttcaaatattcaaatgtaatacgaattttcctctaaa

SEQ ID NO: 1589 - DNA, 579 bp, Oryza sativa
  Clone ID: PAT_MRT4530_101440C.1
atcatgtaaaatcaaagtgtgtttgattcttattatgtgatgaacaattggcatctgagattattggcttcgatatttggagattattggtgaagtggttttggagatgattggatttgcaggtgttaaacaggtaccgctggagatttggtccggtcagatcgggcatgggttgccgctaaagatcaatgcacgtggttggtgaatattctatatagcatacgattgagatattgtgtgcgtatgggatgcagagtcgaatttggaaggagtccaaatttggtacaattggagtttgtaaagttggtttcttgcacgggaaggtttcttaggtggattaggacttcttatatgagtttggttcgtggctttaggctgcctacctcatgtataaatagagagggagggtctaactggcggatcaccggcggccaaaccggtggcatcgcagcggttagaccgacggcggcttcaagtggcagcttcagatcttggtggtctgaccggagaatcaatctcaatcagactgatagcttccaggcggtcagaccagcacatccttcggtcagaccatgatct

SEQ ID NO: 1590 - DNA, 725 bp, Oryza sativa
  unsure (1)..(725): unsure at all n locations
  Clone ID: PAT_MRT4530_101441C.1
ccacgcgtccgcagcgggcttttccgcggagaacgaggcgaggcggtggggaaggctccggcgagcctccgcgcgcgccgcgctggtgctctgctcgctgacgatgattccagtcgtcgtcgtcctccaccggtgtgcggtctcctcctcctggccggatcgggttttcgaagccaagcacatcgcgggagccggcgagcaagatatgcaagatgatctgcctgatgatctaactgcatctcagtacatcggctatgacaaatttctgggtggtcttctgcaagagggatttgatgaagtatcctgccgaagcaggtatcagtttgcacggtaccacaagaacttcacaagaataccttcttcatacctcttagaaaggttaaggagacaagaagcattgcagaagaagtgtggtccaggcactaaatcatacaagcaagctgtgaagctgctgaggtccagtcagggcgtcaacatgacgacagattgcaactatctgttcttgacagtacatgctgggttagggaacagaatgcttgagattgcttcagcatttctttatgcactccttacaaaccggattttgcttttggaccgtatcaggagatcggtgacctttttctgggaacctttccaggaacctcgtggctaatgcctttcggatttccctctaactatgggngaatttactcagagtagcccagagagctatggaaacatgctgc

SEQ ID NO: 1591 - DNA, 2067 bp, Oryza sativa
  Clone ID: PAT_MRT4530_101442C.1
ctggcacgaggctagcttcctcgctgcttcgcccgccacgtcaccctcctcctcctccccttttttttctctcgctcgcctcgccatccatggcgtcgatggcgaaccagcagtagtagtagtccaccccaacgacgcgcgcgagccagctccggggtacccgccgctcgtgcccgggggggaagggggtgcaccggggagccgtcgcgccgcgcggctctgattcttcccgttcccggagatttgaaccatggagtctttacgtgacatggtcctcccaccaggatttggattccacccaaaagatactgagctcatttctcactatctgaaaaagaaaatacatggccaaaagattgaatatgagatcattccagaggtggatatatacaagcatgaaccatgggatttacctgcaaagtgcgatgttccaactcaggataataagtggcatttcttcgctgctcgtgacagaaagtatcctaacggttctcggtcaaatagggcaacagttgctgggtattggaaatccactggaaaggatcgagccataaaaatgggcaagcaaactataggaacgaagaaaactttagtttttcatgaaggccgcccacccactgggagacgtactgagtggatcatgcatgagtactatatagatgagcgtgaatgtcaagcctgccctgatatgaaggatgcatatgtactttgtcgtattaccaaaagaaatgactggatcccagggaatggcaatgagttggacaacagtgatcctcatccagaaccatatgatgctcctccatcagttatcagtactgaacagctaaatcctgctgctgaaccagttgtcggtgttgaagctgcaccagttaccgttgctgaacctgacggtgttactacgtcagctatcactgctaatataccatctcctagtgatgacattaatctggatgattggttgaatgaactatttgatcctttctttgaccctgaacagagtctggcttctgctgatctgtctccagatgaacaaaatgttgaatcatcgaacgtaggtgctttggctccaaaggtggaacaagactattctagtcctaacgagaacgtagtagatgatacggagtacttgttgcctgaagatgtttacaacatactgcaccctggtacagatgacttcaatatgctccagaatcctttggatcagtaccccattcaatatgcaaccgatgtttggagtggaattcagaaggaagaactgtggtcgccccaggccaatgctgagcctagtcagtcgaatgaagctgctgataatggaattataagacgttatcgtagtatgaaaacacctgaaactagtgtgccgcagttcaagggtaaaactcaggctaaaatgcgggttgggatcaacaagatggctacgagtagttctgaatctatcaaccagactatcaagtttgagaacagtggtcgtcttgttgagcaccagaagaaccaagcgcatgatgtagcttctaccaagcggtcagacgcagggaagccaagtacagagctcagcagcaatcgaggatttctcaggggtatccgaaatgcatttgcaggctgttcggatgctcgatggaacatgatacttgttgcgggtttcgctattggagtcgctgtggtagcgcttcatataggccaacgccttggattaagccagagagatcagcagcatacctagcctttaggtttgcaggttactgggtttctatgctttttgcaatctggagaaacgtaaacaaactccgatctttggttggtgcagaacatttgatgtatgcgccgttttttttgtgttggttttgtacatattattatcttcggttttggtcgacttttgttctcgccagctagtagtactatgttgacgaatgtagaagaaaacctcaaaaaaaaaagaacaaatgaaaaaaaattgacgatgaaaatttatataattaaccgcttgcattgtactaaaaaaaaaaaaaaaaaaaggcatgattctaaatacacgcacttgtggatgactacggcatttttcctctg

SEQ ID NO: 1592 - DNA, 810 bp, Oryza sativa
  Clone ID: PAT_MRT4530_101443C.1
atgcggcataccagtttttggacggaacggcgttgcctgccgcgcgagcgtggcgtggcgccggggtccccatggcgagttggcttggcccggccgcacggggggagcattaaacccccgttggcctcttccgccccgaaatcccgttgcccccgacggaaatccggcaaggtagagcccgcggagtgcgaccgtgacggcgaccgcgaccacttgcagactcggacaaagctaaaagatcctcgtacttgttggtgttatactactacaaaggaggccactcctgccgactgtgtccaaaacagtacacaagtagctgtgactgcctggaccctaagtttcgtgcttaatggatctacatccagtacgtatacgcaggtcctcaatcatacggtccaagtcaatagaacaaaagaaaaatatcgcaccagctgccggtacgtacgcaggtatatgattgggagaattttagtagtattactccagcagcaggcagtactagtcagcaagcagctgcctgggcatcgatctgcagcaagccaacgaaccgtagccgcgcagacgtcgatccgtcacgcaatggcactatggcagcgaggggacacgcggggccaccccggcctgccggccgaacgcgacggacgaatcgatcgatcgatcgatcgatcgcccgcgcgcccgcgatcgaaagctacggcggtgacggccaccggacgagccacggccacgcgcacgctcgtgctgactgcggaccgcgcgcccgggttgcaaacggcacaggaatcccttgttgcaaccgacgaaccgagc

SEQ ID NO: 1593 - DNA, 535 bp, Oryza sativa
  unsure (1)..(535): unsure at all n locations
  Clone ID: PAT_MRT4530_101444C.1
ccactccctgtttctaaagagatagtgaatgccaagggccgtttccgtaattcctcagaactcctccaagagggacacagtccctccgccagattccttcagcttcgttcaggaagacacagggaggagaggggctgcagcttcttcccaggnctttcacgctcgttcctctctaatggccttgaaatgtatcattatgcaaatgtgaattttcataccgaatttaagaagaggttgttggacttttcttttttcaggaaaaaaacaaaaaggtcccacgtgcagtcattcattcatggcttctttattttgtaacgtgaattgtaactatgcattctgcaacggggggaggagacggcagacgggaaggaggtagctttgcatcttgttctacggtttctgtgtccatggtgtccccacgtcctggcagggaagggggtcaagagcaggaagcggcagggtggcgaggtcggcacagcgaggtagcaagagcctgtggctcgtgcccgccagtgagggacaggctccgtcccag

SEQ ID NO: 1594 - DNA, 1554 bp, Oryza sativa
  Clone ID: PAT_MRT4530_101445C.1
atggagtctttacgtgacatggtcctcccaccaggatttggattccacccaaaagatactgagctcatttctcactatctgaaaaagaaaatacatggccaaaagattgaatatgagatcattccagaggtggatatatacaagcatgaaccatgggatttacctgcaaagtgcgatgttccaactcaggataataagtggcatttcttcgctgctcgtgacagaaagtatcctaacggttctcggtcaaatagggcaacagttgctgggtattggaaatccactggaaaggatcgagccataaaaatgggcaagcaaactataggaacgaagaaaactttagtttttcatgaaggccgcccacccactgggagacgtactgagtggatcatgcatgagtactatatagatgagcgtgaatgtcaagcctgccctgatatgaaggatgcatatgtactttgtcgtattaccaaaagaaatgactggatcccagggaatggcaatgagttggacaacagtgatcctcatccagaaccatatgatgctcctccatcagttatcagtactgaacagctaaatcctgctgctgaaccagttgtcggtgttgaagctgcaccagttaccgttgctgaacctgacggtgttactacgtcagctatcactgctaatataccatctcctagtgatgacattaatctggatgattggttgaatgaactatttgatcctttctttgaccctgaacagagtctggcttctgctgatctgtctccagatgaacaaaatgttgaatcatcggtgagtttcttcacagtcactgtgtttgcagttcttagcctgtgcatacttgctcatcgcgctatcttccttcttaatttacagaacgtaggtgctttggctccaaaggtggaacaagactattctagtcctaacgagaacgtagtagatgatacggagtacttgttgcctgaagatgtttacaacatactgcaccctggtacagatgacttcaatatgctccagaatcctttggatcagtaccccattcaatatgcaaccgatgtttggagtggaattcagaaggaagaactgtggtcgccccaggccaatgctgagcctagtcagtcgaatgaagctgctgataatggaattataagacgttatcgtagtatgaaaacacctgaaactagtgtgccgcagttcaagggtaaaactcaggctaaaatgcgggttgggatcaacaagatggctacgagtagttctgaatctatcaaccagactatcaagtttgagaacagtggtcgtcttgttgagcaccagaagaaccaagcgcatgatgtagcttctaccaagcggtcagacgcagggaagccaagtacagagctcagcagcaatcgaggatttctcaggggtatccgaaatgcatttgcaggctgttcggatgctcgatggaacatgatacttgttgcgggtttcgctattggagtcgctgtggtagcgcttcatataggccaacgccttggattaagccagagagatcagcagcatacctag

SEQ ID NO: 1595 - DNA, 651 bp, Oryza sativa
  unsure (1)..(651): unsure at all n locations
  Clone ID: PAT_MRT4530_101446C.1
ccacgcgtccggtggaatctgaaactgcgggatgcgatactccttcatcctccagtgcgtcgccttccctctcggctgatggccgagcgcgagcgtgaggctgttcaccctgccgatcacctcgccgtcgtcgtcgacgacgtcggcctccgcgctgttagacttccagtaccccaccgccgtcgtcttgatccccctcgccggccggacgccgcgctccttgtaccggctcctcggcgagaacacgtaccacgccccgtccaagctcttcccgaggccaagatctcctgaaaagaaaacaagaactaagaagttataatcgtgttcgtcatcaagaacattacgatggagtgatcataggatcgatcgatccatctgaccatggagttcgtctaggttcaacttgcagacgtccaattgcttgatgacgatgatgttggtcggcatggcgtcgcggaggttgtattttggtttgaggaagtggatgatgagttcttggtcggtcggcgtgaaccgcactccggngatatcggagtacggggacaccggccgatccgcatcgccgacatcgccgtgtcggggaacaatggcgagagcggatgtagctgcaggtggctcaccaccgtcgaccaccaccgcttcctccgcgct

SEQ ID NO: 1596 - DNA, 435 bp, Oryza sativa
  Clone ID: PAT_MRT4530_101447C.1
atgggggaaaggaggcggcggtccacggctcaccccgggcgacggcggcgacagaggaggcggttggagcagagggagacggtggtgcggctcgggtcgacggggacggcggcgttccagcggtgggcgagctcggcgaggcggtggacggggtcggcggcgatcgaaagctttttgactccacacgtctccgtgttcccctgcaactactacgaccttgcctccatgtccctccacgacaacaatgaccacgcttcgctcctcgtatcccactccacgatcagcaatggctcacaacaaccatccccaactccacaacgcctcatgctcacggggtgcttccgtggtggatcctccacggcggtcactggtggcaatcataaagggcttcgtcgcaatgatctcttcatcgttgtctcactccacaacaaataa

SEQ ID NO: 1597 - DNA, 1374 bp, Oryza sativa
  Clone ID: PAT_MRT4530_101448C.1
atgctccttcgatctgggcggcgcctcgccgccggcggcggcggcggcggcggcggcgcaccccgaggctctcctcccggcggaggttcccctctcaactcgtctcgccgctcctctcgtcgaccccgtccgagcgggagcagccccacctcctctccgggccagatccggtctcctcctgacgatggcgatggccagccaccacctcctcgtcggaggaggcgtggtgaacctccgtctccatctcccgtgccaggaacagcaacaagcgaagccgccgtcgcgggcctccccatccccgaggagatccaggaggaaatcctgctccgcctgccggccaactccgtcctccactgccgcgccgtgtgccggtcgtggcgccacatcgcctccacccacgcgttcctcctccgccaccaccgccgccagccggagttcccccttgtcacctccttccgaaaccccgcacccgctgaccaatggatgcccaactgcctcgacgccatcctcctccgatctgcagagcgccgcccaatcttcagtttcccgcgacccttttgtggaggtttccccatcacagcctcctgcgatggcctcctcatcgttggcgggtacatctgcaacccgaccacacgccaacgcgcgcccatttccaggtggacgattgacaatatcgtcggattataccggcatgaaccttccggagagtatcgcgtgctctacttcgcttcgtcagataccccttctgaggtgtattgcccgatttgctactgtgtcctcgcggtgggtagcaacaagccgaggcaaatcccgtgttcagtgacacccatggatgaggagatcataggagcaccgggcccgatgatctttggcaggccggtactcatccatggcaatctgcacctgcattggaagaaacggcggggaacacgctacaataggatcctagtcttcaatacggtggcggagtcattccggcaattgcgcccaccagctgtgaatcctcggaattatacaaggttacttgccatggatggcatgcttgctatgtccgttagcaaagaacgtgtgatggacatgagcatcttcatgttggaagactacgatcatgaggtctgggtgttccggtacaagattaagctgccaacaatggagatcaggcgtttccaagatcagggtgattggtgggcggaggttgtgtccgaggagggagatattcttgtcagttgttttggctggttgttgcactgtgacaacaagggtaatttggtgtccaaattccagtacaatgatgacttgccagcaatcagtcctcatagaatcaaggaaagccttattcagcacgcctttttcaaggaaggaacaaagaaatga

SEQ ID NO: 1598 - DNA, 2111 bp, Oryza sativa
  Clone ID: PAT_MRT4530_101449C.1
ctccgccaccttcgcccttctagaaccttcccgcgtccgccaatggcgacctgctcgtgggccgccaccacggcggcggcggcgcccccccgcccgcccgccaggtgccgctcgcgcgtcgccgcgctccgccgcacggccgccgcctccgccgccgccgccagctgcgtcctcgccgaagcgcccaaggggctcaaggtggagcaggcggatgcggtcgagccagcggcggcggcggcggcgcggagggacgtggggccggacacggtggcgtccatcatcctcggcggcggcgccggcacgcgcctcttccctctcacgcggaccagggccaagcccgcggtgcctgttgggggatgttacaggctgatcgatatcccgatgagcaactgcataaacagcaagatcaacaagatctacgttctcacccagttcaactcccagtctctcaaccgtcacatcgcgcgcacttataacattggcgagggggttggatttggtgatggctttgtggaggtgctggcagctacccagacaacaggggaatcaggaaagcgatggttccagggaacagccgatgctgtcaggcagttcctgtggctatttgaggatgcaaggctcaaacgcatagagaacatactaattctatctggtgatcatctgtataggatggattatatggactttgtccagaagcatgttgacaaaggtgctgatatttcagtcgcttgtgttcctgtggatgagagtcgagcttctgattttggattgatgaagactgacaagaatggacgcattactgattttctcgaaaagcccaaggatgaaagcttgaaatcaatgcaactagatatgggaacttttggtttgcgcccagaagttgcagatacatgcaaatacatggcttcaatgggaatatatgtattcaggactgatatcttgttaagacttctaagaggacattatcctacagcgaatgattttgggtcagaagttatcccaatggctgcaaaagactacaatgtgcaggcctatctatttgatggttactgggaagatattgggacaataaagtcattctttgaggcaaatcttgctctcacagatcagtcgccaaacttctatttttatgatcctgtgaagcccatattcacatctcctagatttttacctccaacgaaagtagaaaactgcaaggttctgaactctatagtttcccatgggtgctttctaacagaatgtagtgttgatcgctctgttattggtgtccgttcaagattagaaccgggggtgcagctgaaggacaccatgatgatgggggcagattactatcagactgaagctgagagattttctgaattgtctgatggaaaagtaccagttggcgttggagaaaacaccataataaggaactgtatcatcgacaagaatgctcgaattggaaagaatgtaatgattatgaactcacagaatgtgcaagaagcagagagaccattagagggtttctacattcgttctgggataacggtagtgcttaaaaatgcggtgattccagatggtacagttatctagagaatcaccaaaggaaatatttgcagatatcaatcccttctggtttgttgcatttgaagtacatctttgaaactcataaggggatctgagttcgaccttcaacgtcgatgcagcaaataaacttaatacagtgcaaaggttgccagcttatgaatgaggctaggaactgagggatatatcacctgcatcggcatggcaagaacgttttggttctttcgtaagcgtcaaaagcaatatatcaagaacttctgccatgcacatgaatacaggatatatataatacttagaaatatttcatgtcggtaattgtatatgcatgtagaagcgagagggtataatctgttgtgagttaaatgtgattacattgagtaataataattacttgtagaagaagtacatttctgtcacgttgtagggtttatcttgtaccgcaaaaaatcactgactgttgcttatccatgaattaacttcctctgatgtatatttatatttgtgaattatcaagagatcgaaataaatactgtactactcttagattg

SEQ ID NO: 1599 - DNA, 425 bp, Oryza sativa
  unsure (1)..(425): unsure at all n locations
  Clone ID: PAT_MRT4530_10144C.1
gnnaaaccaaaacatagggggttttattttttttttttaaaggtgggtagtatttttttttttttcaccattacataagcttaagcaataacagataacaaatctttcttcttctttgggtaaaattttcaaacccaatccctttttaagttcttttttttgggaaggttgggggcatgggcataaatggcagcggggggcaggttaagaattacaatgctgggcaggggggaaacaaaacaccttaatgggacagagcaaaagccttcgaaggggggcttttaggcagaaggtttctcccacttggggggctttaccaccttccaggggaagtctgggtcgtccctttcaaagtgaccgtaagccgccgttttggggtagcgtccgttgccgttttttttggggtcaaggttgatgattattat

SEQ ID NO: 1600 - DNA, 1190 bp, Oryza sativa
  unsure (1)..(1190): unsure at all n locations
  Clone ID: PAT_MRT4530_101450C.1
ggaattcggcacgaggctttttctcggctcttatggacttcgccgacgctccgtcgcacgataaaaatgtcgatttcaaaacggatataccctatacaggagactcgctggtggtggtgagggacgcgctgctgtcgcagctccagcaggatcgcctccggaaggacatcatcgtcgccgagctcgccaagatagagcgcgccatggctctgcgcgatgtctcgcagtcgccgacgccccggcacgccgccgccgccgccgccgccggaaagactattacaactgtggctacaccggccaagaaaccatcgccttcagagaaatctgaaccggcagttcagaagtcgatgccaccctcggcatggagctgcgccgtgtgccaggttcgaacaaccagcgagcgcaacctacgtgatcactgcggaggtcagaagcaccagtccaaagtcgcagcactggagaagacaaccaaggccatggcgagaacgacggcgaaaccttctcccggtgcagcagcaagatggggctgcagcatctgcaacatcagctgcaacggcgagtgcgatttcgatacccacctgaaggggaagaagcatcaagcgaacacccaggccttactggaacaaaacaagaagagctcagtgaatccagagtcacagggaaccaaggcggcggcagcaacactgatctgcagagtttgccaagctaagttcacctgtcagtcagacttgcagagccatctcaaggtcatgaagcaccagctgaatctccgggcaccatcttcagatggctctagcttcaccagtgcaacctcggagagtttgagtttggaattgtattcttgcaaggtttgcagcgtgaagtgcaccttcgagaggatgctcgcgtaccatctcactgggaagaagcacctgaaacaggagaatttgcagttgtcctgcgagatctgcaaactgcagtgcaacagcgagaaagtgctctctgaccatcgttatgggaagaagcaccaggcgaagctcgagaaagtgcttcaggcaaagctcaatgcgacggaatgagatgcgtctgattctgattaaagatgctggcgttttgacttttgagcaacgancatttaaattatcgncggcactgtatgattatttcagattattaatccttgattttgggacttaaaaaaaaaaaaaaaa

SEQ ID NO: 1601 - DNA, 130 bp, Oryza sativa
  Clone ID: PAT_MRT4530_101451C.1
cggagcagatcgacgccggaatgggacggggaggcagccgtctaggccatggctgggccaatctggcgggctggggaagacgaagatgacgccaaggctgggccaacctgagcttaaaatgtcagaataa

SEQ ID NO: 1602 - DNA, 354 bp, Oryza sativa
  Clone ID: PAT_MRT4530_101452C.1
gtttctttttttttttttttacatcacaccaaccctttactcattcacaccctaacaattcacccacaactttcccttggcccccccggataaaactggacaaaattattatttatttccacccaactaccaactactccggttcggttttcttcgtcagggaaagacaactgaaacccctgtttgccccccctttacctaataacggcaatgcaccgttttcctccctccccagggttattacttccatccatccggcatggggaaattgttccccttccctttgggccctccttcaacctttgatcaactccctcccttatttttgaatcttggccctccccccttccaaac

SEQ ID NO: 1603 - DNA, 2042 bp, Oryza sativa
  Clone ID: PAT_MRT4530_101453C.1
atgcccccttgccggtgcgcgcactcgcccgagggggagtgcgccgccgtcgagtggccttgcctcggcgcccctcccccgttgtctcccctcagcggcatcggctacggccggcggcggcagacgacggccggcggcggcggcggactcccgcgtggtgtctgcgacaaccggctgtggggagagggaggtgctgaagaagagatgatagaggttacagtcatcctcagattatcagattgccatgaagaaaagatgctgttttccacaattgaatcaataaggaaaattggaaaatgtgccataaaaaggaacataccggagatcgaattcgacgccgatggatccatcttcttcttcagcggcatcatcgccgattgctgtaggggcaaggaaagaagtgccttccctgcaagcgactctggggcatctatccagaaccaaaaacagatttcctcgcataaatatgccatcctagatgtagactccactttacgagttcttgagttcatctccgacgaagagaggaggatgatggctcagttcttctgccgtatgtgggacagagcacaaggcaagctgtatgtggtgaggatttgcgacaaggtgttcaccgagctgtccgacaagaacacgcagctcctggacatcagctccctccatgttgccaccctcatggtttacaactcgattaacaagcagttagctggtccacataaggatcctccatgcatgaatgttgtcgccaagcagatggagcaatacaagaaggaaactcccgaggggataacactggaagagttccggaggctgatcatggagtgggtccgcaaggacctgcggctcgtcctggcgaacaaggcggcggtggcgatcatggcggcgccgctgctcgccgtcacgaccaagagcgccggcaggcaggtgccgagggtcgggcccgccgtggagaaggtgcccacgccgctgctcttcaccgtcttctccgtcggcctcatgttcctgcaggacatccgggcgggcaagcagataaactccaagacacaatcgcccacgtggcctggcaccttcggggacgtcgggcccgagggtgaggtgtccgccctcctcctgatttccccgaggggggtcggagagagctggggatttcaccctgagcccccggccgaaccggcaaaggggggcctgtgcggtctcccgagggagatacttccatctcctatcttcttcccttccaaaacccccatctcatcccactccggcgtctcctccgccgacgtcgccatggggcaagcctgggcgtctctccaggataaactccaagggaggcaatggaaggagaagcaggtgaggaagatcacggacaaggtgttcgaccgcctcaccgaggacaccaagaagcgcgagcaggaggccctcaccttcgaggaggtctacatcgccgtcctctgcgtctacaacgacatcaacaagtacttaccagggccgcactatgatccgccctccaaggagaagctcaaggccatgatgaatgagtacgacatcaacctggacgggctcctggaccgggaggagttcgcggagttcatccggaagctgacggcggagtcgctgtgcgcgatcagcttcaagctgctggtgacgctggtggcggcgccggcgctggcgctggcgaccaagagggcgacggagggcgtgcccggcgtcggcagggtggtgcgcaaggtgcccaactccatctacgcctccgtcatcaccctcggcgtcgtcatggcccagaaatccaccgagggcgtcgagtagacggccatccgattcgagcctgcgagattcagagctcgcgagctcgatcgaaccgacgacgtcgtatgatcgtaacgtgtaaatgctgcactaggcagcagggatagatgctgctgctgctgctttgatttgttactattttgtttgacgctttaatgggagttgttttaaaattgttttaaaattttcgcatgtaatctctcgctttttttttggcagtaaaaaaaaaaaaaaaaaaa

SEQ ID NO: 1604 - DNA, 228 bp, Oryza sativa
  Clone ID: PAT_MRT4530_101454C.1
ttgttttttttttttaatttattttttttgtgaccataggtactaatgctatttctctttattcttgggaaaaacaaatgaaatgtgtgaaaaatgcaaagcctgagtacacgtgaccattggagccggaaaatctgattagcaaaagggcgtgtgttatctgtacatacactggccacataaataccggctagtaacatgagacaaaaatgccatcttcaaaacagg

SEQ ID NO: 1605 - DNA, 316 bp, Oryza sativa
  Clone ID: PAT_MRT4530_101455C.1
ggagatgacgaggtcgagcatgtggcgcacgcggtgggactggtagaggcgccccaggccaggcccacttacatctgacagcttttataggtcatagactaccctcacagaccaacacaattcttttctgcacactttgtcctcactcgtgtgcacccatccctaaattgctctagaccaagcacacttaacctcagagttctttagagatcggcttccggaaaagaagttgcaacttgttgatatgatttttctattaatcctattaagccctggaccgggatgtcacagcctcgatccgctgccgccgctgctc

SEQ ID NO: 1606 - DNA, 364 bp, Oryza sativa
  Clone ID: PAT_MRT4530_101456C.1
ccggccgacgtgaacgttacgtctctcagagtgttccacgcgtgtgtgaatatcccctcctcatcctgcgcggtcgactccgccaccgtcgccgggacgtccccctcactcccacacgcaaatcgcacggtgaacagctccagaatacgcgaggcgttgtgcagcactgccggcaagtgcaacctgcgccgaaagaatacacctctccttaacactatcaacacatatgtcaacagcaatcagaggactctcaaaagagccggagtaaacaccatccatgtgatcgaagaggttaacactttcacggatgatgtggatattcggatccagaatcctacagggcaagctttcattggcgcctata

SEQ ID NO: 1607 - DNA, 2073 bp, Oryza sativa
  Clone ID: PAT_MRT4530_101457C.1
atggctgacggccaccactggaacattgtcaagataccgccgattgtgcaggagctcgccgccggcgtccatgagccgccgagccagtacatggtcggcgagaaagaccgccctgccatcgccggctccgacatgcctgagcccatccccgtcgtcgacctcagccggctgtctgcctccaatggtgaagacagcgccggcgagcttgccaagctacgctccgccttagaggactggggcctcttcctggtaaatggttatttggtactataatggaggggagcattctcagtgagatgatcaatgtgacaagaggattctacaagctcccactggaagagaagcagaagtactccaacctggtgaacggcaaggatttcaggatcgaagggtacggcaacgacatggtcgtgtcagagaaacagatcctgaactggtgcgaccgagatgttctgcatgagtacactatgaggtgcagggagatcaccagccttgtgctcgccagattggccaggctgctcggcctgcgagagggctacttcgtcgacatgttcgacgaggacgccacgacgtacgcgaggttcaactactaccctcgctgcctgaggccggaggatgtgttgggcctgaagccacactccgacggctcggtgatcaccgtcgtctccgtcgacgacaccgtcagtgggcttcaggtgctgaggcaaggcgtctggtacgatgtgcccgtcgtccccaatgctctgctcatcaacatgggggatggaatggagataatgagcaatgggttgttaaagagcccggtgcatagggtggtgacgaacgccgagagggagcgagtgtcggtggtgatgttctacgcgctggatccggagaaggagctggagccggcgccggagctggtggacgatgagaagaggccgaggcagtatgccaagatgaagatcaaggactacttaagtggcttctacgagacttttgcaagagggacacgagtcatcgacactgtcaagatggaggggaaggggaaggagcaagatgtggagatgaaggagcctagcgtggcgacgatactgacgagcttcgagaactcgttcgatgggttcgggtctatgagcacgccgctgtaccagacggccacgtttaagcagaaaatagcagagatagctcattaccatggtgctcttgttttagtagacaacagcatcatgtctcctgtgctctcccgtcctctagaacttggagcagatattgttatgcactcagcaaccaaatttatagctggacatagcgatcttatggctggaattcttgcggtgaagggtgaaagcttggctaaagagattgcatttctacaaaatgctgaaggatcaggtttggcaccatttgattgctggctttgtttgagaggaatcaaaaccatggctttgcgggtggagaagcagcaggctaatgctcagaagattgctgaatttctagcttctcatccaagagtaaagaaagtgaactatgcaggacttcctgatcatcctggacgatctctacactattcccaggcaaagggagcgggttcagttctcagtttcctaactggttcattagctctctcaaaacatgttgttgagaccacaaagtacttcaatgtaacagttagctttggaagtgtgaaatcgctcattagcctgccatgcttcatgtcacacgccagcatcccttctgcggttcgcgaggagcgcggcctgacagacgatctagtcaggatatcggttggaattgaggatgccgacgacctcatagcggatcttgatcatgctctccggtctggtccagcttagagcctgtgaattctgtgcccttcctgttcgttagggatgtagatgtggtcatgtgggtgctatctgtgtgggtgattgattcattggtcaactcaataagctgctgtgtcatcgagggaataaagacaatctatcccaaattttttaacaccatatggtgaccaactgaccatgatatggtcttaatcaattgatatttatagaaggtttctttgaactgcaaaaaaaaaaaaaaaaa

SEQ ID NO: 1608 - DNA, 244 bp, Oryza sativa
  Clone ID: PAT_MRT4530_101458C.1
ggggattgttttagtggggtgtgttttttttaaactggatgaggcctattataatacacagagggaatatggggggaaagcacaggagccatggaggaagagggttgctaaaagagaaaaaaaatgaggggagacataaaagggggggaaaaagagagggggggggcacaagagaaagaaaacggcttgaattgccaatagagcggtgaggaaacagacaaacgcgccggagaactgcagaaaa

SEQ ID NO: 1609 - DNA, 2604 bp, Oryza sativa
  Clone ID: PAT_MRT4530_101459C.1
atggcatcactgctcaactcatcaccatcctccccttgcgaacccacacacgcgcgcccacagccgcggcgcccgcacccgatccccatccccgcaaaccctccccccacttctcccttcctccaaaccctagctcacgctctcatgtccaccgccgcggacccctcctccctctccggcgactcctccccgacctcctccggcgacgccgaatcctcctcctccccgtcctcctccgccgccgccgctgggggctccgacgaccccgcccccgtcgaccaagtcgtcgcctcgggctccggtgcaggcggcgatggcgacgccgccgcagccgtcccaacctcgccgcgcattggcatgtacttcgagacggaggaggacgcgtacgagttctacaaggcgtacgccgccaggctcggcttcgtcgtccgcaagtccaacaagtccaagaactcgcgccacaccgtcacccgccgcctcttcgtctgctccaagcagggattccgccaagaacccaagaagccgcctcaggacgaggccgccgcggcgtcgcccccgcctccgcggtgcccggactcgcgcactgggtgcctggcgtcgctcaccatcaagctcctcccgtcggccaacgcgttccgagtcaccgactttgccaccgagcacaaccacccgctcgcctccgccgcgcccgccgtgtcgctggcattgctgccgccgagctctgtccgccgctcgtacaagaagcgaaagcgtggggtgatcgtgtcccggatctttgtttgttcccgcgagggagttagtgcccgtgccaagcccgagagtattgccattgtcagcaacaatgctagcacagggccatcaggcacacctagaccaggccctccaccgacgcggacagggtgccaggcaagaatggtaatcaagatcaccccatgccggacgtaccgggtggcaaagtttgttccggagcataatcatccacttgccaatccagatagtgtgcacaagctgcggtcgcacaaaatgagggctcgagctcatgagcttggggcaggggaactgcatcgcagaaagcatgggaaaggtgtgcaacttggggatgctggagcagtgctggaatacttggaagagctgcaggtagggaacccttcagtgtattatgcggtaggagtggggcctgatggaaaatcagctgcaaatttcttctgggctgatgcagagtcaatgatcgactataggagctttggtgatgttgtttgctttgatacaacatatgagttaaatgggtatggaaggccatttgcattgtttgttggtgtggacaaccacaaacagatgcttgtgtttggtgctgctctgctttatgatgagagcattgaatcattgaaatgggtattcaaggcgtttgctgatgcaatgtgtggtaagcagccagacactgttttgattgatgagcgtcctgagtgtgctatggcagcagcagaggtttggccaagaagtagccattgcacaagtgtgtggcatatctaccataactcaaagaggcacttgaagcaggtatttgaaggctcaaagagttttgccaatgctttaagccattgtctctttgaatgtgatgatgaggtggaattcttgtcagcatgggaaaaactaattgagaagcatgatgtaggtgagaatgagtggctcaacaaactttttctggagaaagaaaaatgggctttgccttattggagagccttgttttctgctgatatcctcaccactcttaggaaggataatatgattaatgatattaaacgggagctcagtgagcaagaagatattctgcagttcttaaggcgctatgagaccatgcttgaggagcatcggtcaaagaaattgcaggctgatgttgatggaagccaggtgacattgccaatcccatccttgcgaatgttaaagcaagcttcaagtgcatacacgcccgaagctttcaagatgttccagggtgagtttgaggcttacatgaattgcatgtccttcccatgtggtggacttggcacaatctcggagtataaaataacacttgatgagaagccatcagagagcattgtgaaatttgatgcactagatggatcagctacgtgcagctgtaggaagtttgaatctgttggaattcagtgctgtcatgtactaaaggtacttgatctcaagaatataaaggaactcccagaacaatacattttgaggagatggagaaaagacgctcgttctgtcagaataggggaagaaccttctggtggatctagcagtatgcgttcagcctcagaagtccgcttcagtactatgtgccgttttcttagcttgatagcttcaagggctgccagatctgaggaggcaacgtcttatatcgaaagtcaatcaagtgttcttctgaagcatctagatgatattttacaaacaggttatcctgatataggaaatcatgttgttgcttcaagtagtcaaccaatttcttttgtgggaaaccaacttcctgaccatacatcacaagcaagaggagttccacagaccacaaatggtataaatttgaacatttctgccaaaatcatttattactga

SEQ ID NO: 1610 - DNA, 1050 bp, Oryza sativa
  Clone ID: PAT_MRT4530_10145C.1
ctatgcgaattggtccagatgttcatcggtgatggtgcaaagcttgtccgtgatgcctttcagcttgcaaaggagaaatcccctggtatatatattggggattggcgggacgaaacatgtcttgcgctgttccttctctgcttgatatatactgatagaagttgactcgtcccttgcgtaattgcgttcacgtgtgtttggcttcttgcgtgtcaaaacatggttagatggcaagttggcaacattggtgagcttccaggagtgggtgcaaaaaattacaagatcaagcaatgcaacattgcctcttttatgttggaagaaaaattgcaacagcggagcttctcttacaaggaacttgcgtgagcttgacatttctccaccagacggtgtttctgaagcggcgagcttgtcgtttaaatcgcatcgtgttcccttgcatagttgcagtcttgtcgaccaacagctccagacgatcacctctctcgagtactttgtcaatgttgtcgatcataacattccggacctgatccatttcacctctcatccgagatattctatctgcgttgggatcgtttgagtagtagtccatttgttggcccaaaaccctcgagaactcatcattcatcgcataagcaagagcagtgagagcagcacgaccatacgtcttgacaaaccttccgtggatatcctcaagaaacgcgaagggaatccgtcgtccggcggcgtcgtcggccatgcagagcgcggtgacgccgtcggtgcgcttgacgtggaacacgtggagatcctgcgtgtaggagatgttgcaatcgccgccgccgccgccatcgccggcggagaggcggtcgaggatctgccgcgcgacggccccggcgttggggaacgccgcgtcgccgtgctccgccatcaccaccgcccccctcgccaccgccgcgtactggatcctccccattgcgatcgcgccttctccctctctctctctctctctcgcgcgcgcgctgatcgcgtggtggagcggaagaaagggaggaggaatggacttggtaattg

SEQ ID NO: 1611 - DNA, 1213 bp, Oryza sativa
  Clone ID: PAT_MRT4530_101460C.1
atggctgacggccaccactggaacattgtcaagataccgccgattgtgcaggagctcgccgccggcgtccatgagccgccgagccagtacatggtcggcgagaaagaccgccctgccatcgccggctccgacatgcctgagcccatccccgtcgtcgacctcagccggctgtctgcctccaatggtgaagacagcgccggcgagcttgccaagctacgctccgccttagaggactggggcctcttcctggggagcattctcagtgagatgatcaatgtgacaagaggattctacaagctcccactggaagagaagcagaagtactccaacctggtgaacggcaaggatttcaggatcgaagggtacggcaacgacatggtcgtgtcagagaaacagatcctgaactgggagatcaccagccttgtgctcgccagattggccaggctgctcggcctgcgagagggctacttcgtcgacatgttcgacgaggacgccacgacgtacgcgaggttcaactactaccctcgctgcctgaggccggaggatgtgttgggcctgaagccacactccgacggctcggtgatcaccgtcgtctccgtcgacgacaccgtcagtgggcttcaggtgctgaggcaaggcgtctggtacgatgtgcccgtcgtccccaatgctctgctcatcaacatgggggatggaatggagataatgagcaatgggttgttaaagagcccggtgcatagggtggtgacgaacgccgagagggagcgagtgtcggtggtgatgttctacgcgctggatccggagaaggagctggagccggcgccggagctggtggacgatgagaagaggccgaggcagtatgccaagatgaagatcaaggactacttaagtggcttctacgagacttttgcaagagggacacgagtcatcgacactgtcaagatgtcagaatgagattgttgtcgtaacggtgttggatcggtggaatatagctttctaataactagatgaaaccccgagcttcgttgcgggcacatttgagaacatatgtaaatatgcatattagtatgaacaattagattgtattgtttgaacctaaaaacaaaatacataccgagcaagttaagctgcttctcgctatgtcaggacagctatatagcaatcctttgtatcattcctaattgttcaaataaattaaagtgatatgacatat

SEQ ID NO: 1612 - DNA, 335 bp, Oryza sativa
  Clone ID: PAT_MRT4530_101461C.1
cccacgcgtccgcccacgcgtccggaggattctacaagctcccactggaagagaagcagaagtactccaacctggtgaacggcaaggatttcaggatcgaagggtacggcaacgacatggtcgtgtcagagaaacagatcctgaactggtgcgaccggttctaccacatcgttgagcctgagtcccggatagcccatagcctctggccaacacagcctccttctttcagagatgttctgcatgagtacactatgaggtgcagggagatcaccagccttgtgctcgccagattggccaggctgctcggcctgcgagagggctacttcgtcgacatg

SEQ ID NO: 1613 - DNA, 464 bp, Oryza sativa
  Clone ID: PAT_MRT4530_101462C.1
ttttggttaacttgctcggtatggattttgtttttaggttcaaacaatacaatctaattgttcatactaatatgcatatttacatatgttctcaaatgtgcccgcaacgaagctcggggtttcatctagttattagaaagctatattccaccgatccaacaccgttacgacaacaatctcattctgacatcttgacagtgtcgatgactcgtgtccctcttgcaaaagtctcgtagaagccacttaagtagtccttgatcttcatcttggcatactgcctcggcctcttctcatcgtccaccagctccggcgccggctccagcgcgtagaacatcaccaccgacactcgctccctctcggcgttcgtcaccaccctatgcaccgggctctttaacaacccattgctcattatctccattccatcccccatgttgatgagcagagcattggggacgacgggcaca

SEQ ID NO: 1614 - DNA, 1438 bp, Oryza sativa
  Clone ID: PAT_MRT4530_101463C.1
cgccaacatgagcgccgccgccgccgccgccgccgccgccgcaatccccacctctctcggccgcctcttccacctccgccccaccccgaacccctcccggaaccttagcggcagctcagcgcaacccctcctccgcctcagctaccacccacgcctcacgctctctcgccgcatggaggcgccggcggcgatcgccgactcccacggcggcggcgacctgagcgcgtccgcggtcggcgcggaggcgctgggcgccgtcgccgctccggatttcgatgtggagatgaaggagcctagcgtggcgacgatactgacgagcttcgagaactcgttcgatgggttcgggtctatgagcacgccgctgtaccagacggccacgtttaagcagccttcagcaaccgataatggaccttatgattacactagaagtggtaaccctacacgtgatgttctccaaagccttatggctaagcttgagaaggcggatcaggcattctgcttcaccagtgggatggcagcactagctgcagtaacacacctccttaagtctggacaagaaatagttgctggagaggacatatatggtggctcagaccgtctgctctcacaagttgccccgagacatgggattgtagtaaaacgaattgatacaaccaaaattagtgaggtaacttctgcaattgggcccttgactaaactagtatggcttgaaagtcccaccaatccccgtctacaaattactgatataaagaaaatagcagagatagctcattaccatggtgctcttgttttagtagacaacagcatcatgtctcctgtgctctcccgtcctctagaacttggagcagatattgttatgcactcagcaaccaaatttatagctggacatagcgatcttatggctggaattcttgcggtgaagggtgaaagcagcttggctaaagagattgcatttctacaaaatgctgaaggatcaggtttggcaccatttgattgctggctttgtttgagaggaatcaaaaccatggctttgcgggtggagaagcagcaggctaatgctcagaagattgctgaatttctagcttctcatccaagagtaaagaaagtgaactatgcaggacttcctgatcatcctggacgatctctacactattcccaggcaaagggagcgggttcagttctcagtttcctaactggttcattagctctctcaaaacatgttgttgagaccacaaagtacttcaatgtaacagttagctttggaagtgtgaaatcgctcattagcctgccatgcttcatgtcacacgccagcatcccttctgcggttcgcgaggagcgcggcctgacagacgatctagtcaggatatcggttggaattgaggatgccgacgacctcatagcggatcttgatcatgctctccggtctggtccagcttag

SEQ ID NO: 1615 - DNA, 457 bp, Oryza sativa
  Clone ID: PAT_MRT4530_101464C.1
gttaaaaataaaatatgggcaaaagaaaactacataaaagtctatttatacaaaaatgactaacaatggacagacttgcaactctcctatctatagactggaacaagattacccttgaaagcctggctgacccattgaataggctccatataataaaaaaaaacaccatctatctttagtgcactccataaccgtttagaataagagcgttaaggtatgaccttccttgcttcagaacataattgctcaacatcattcccttgaatgggatggtgaataatgagctttactgaacctgaattaaggatgcctttcattccagaaggcatcagtttccctgtgccgagaagagtaataggtatcacaggagcaccgagttttgtagccacactgaatgcaaccttcttaaatgcacctagcttaccatcttcgcttctagtcccccttggaaagaaaa

SEQ ID NO: 1616 - DNA, 951 bp, Oryza sativa
  Clone ID: PAT_MRT4530_101465C.1
tcaggcgcgggagtggccagcggaggaggaggacgatatgggcgatgagagggaggccgttgtgtcccgcgtgaggccagcacgtccagtgacggtgaagatgggcgcgtccggcggtggaggccggctagtccgatggcggtgaggttggggccagcgtgtccggaggtggcgaggtggagcccggcgcgtccggaggcggcgaggtggagcccggcgcgtttcggtaggctgacagcaagagatgcagcgagtgctagctgcgccgtcggtgagctgagagaggcggatctgggctggctggctgtggggcgctaaggcggtggagttccaagttggcagaggttgttcaggcggaggagctttggggcggcgatgataggggtgtctgtggaggtttgcagacgaaagcctatcttgggattgcctgagtcggcaatggcgacatccttggggcgatgtcgagcgtccactctccccctcctcgacaggaccctccaggtgaaaaccaagtccagttggacgggcaacggtgatgtctttgacgctatggccttcttgaaggcattgtctaggagcgccgcgcggcctggccctcgcctcttcttcaatgtgttgtgtgaggagctacagctcgtggtggcggtgccggttgggaaatccggcacctatgccgggttcccaagcggtaccgaggaagtggcacatatgttggaaatcaaaggtgctagttccaaaaccatgacctttgaggctccaggtattccaaaaaaaaggcatcgagtagcttcccttcaccccgcccagaacacatcaaagaacatcaagaacatccaagaacacatcaacatgaacatcaagaatattcttcccaaccaccgggaaccatcgaagctactcatccccatcaagaacacaatcacaaaatacacatcaagaatagatagataa

SEQ ID NO: 1617 - DNA, 1551 bp, Oryza sativa
  Clone ID: PAT_MRT4530_101466C.1
atggcggcggccaacgccggcgccatggtgcgcttcgtggcggcgttcttggcggcggtgctggtgatgatggtgccatgcgcgccgcgggcggcggcggcggcggtcggggtgaactggggcaccgtgtcggcgcaccgcatgccggcgcccgtcgtggtggagctcatgcgcgccaaccgcatcggcagggtcaagctcttcgacgccgaccaggccgccctccgcgcgctcatgggcagcggcctgcaggtcatggtcgggatcaccaacgagatgctccagggcatcgccgcctcccccgccgccgccgacgcctgggtcgcgcggaacgtgtcgcgctacgtcggccccggcggcgccgacatacgtcactatgaagcttctacttgtcagagtagaacacaaggcatgcaaagatggtacattgctgtgggaaatgagccattcctgacaagctatcaggggcaattccagtcatatgttcttccagcaatgaccaatattcagcaatcattggtgaaagctaatcttgcaaggtacatcaaactagttgtcccatgcaatgctgatgcatatcagagtgcatctgttccatcacagggagtgttcagacctgatctgattcagattattacccagctcgctgcttttcttagctcaagtggtgctcctttcgtggtcaatatctatccattcctcagcctttaccagagctctgatttcccacaagattatgccttctttgatggatctagtcacccagttgtggatggccctaatgtgtactacaatgctttcgatggcaattttgacacattagtttctgctttgagcaagattggctatgggcagctaccaattgcgattggcgaggtgggttggccaactgaaggggcaccaagtgcaaacctgactgcagcaagggcattcacccaaggcctgatcagtcatgttttaagcaacaaaggaactcctctacgtcctggggtgcctccgatggatgtatatcttttcagccttcttgatgaagagcagaagagcacattacctggcaatttcgagcgacactggggagttttctcatttgatggacaagccaagtaccctctgaatcttggattgggcagtccagttctgaaaaacgccaaagatgtgccatatcttcctccacggtggtgtgttgcgaaccctggtcgagatcttaacaatgtcgagaatcacctaaagcttgcttgtactatggctgattgcaccaccctctactatggtggctcatgcaatgctattggggagaagggcaacatctcatatgctttcaacagctactatcagctgcggaaacaggacgcccagagctgtgatttcgatggacttggcatgatcacttaccttgacccatccatcggtgactgccgctttcttgttggtatagatgacagtagaacatctacaatctattcttcaggtgactgttctcggaggcgctttggattgtggatcttggcgttcttggtaattgggttccttcagattggggtttatttgtga

SEQ ID NO: 1618 - DNA, 156 bp, Oryza sativa
  Clone ID: PAT_MRT4530_101467C.1
atggcgcgagggattggccggtattgctccggattagaaaatgacgcattttcaggatgttgcattagcatagtaagatttgggaaccctgagaagtccgagggcagccgggaggtggcagctcctgagctccaatttggtgagctcgcggcatga

SEQ ID NO: 1619 - DNA, 598 bp, Oryza sativa
  Clone ID: PAT_MRT4530_101468C.1
atgcactgtctgttgctgctgcttgctagctcagtcctcatctgtcgccccttgccgattgactcgggaaccagcaagagaatgcttgatgcagatgcctcccaactcccgtggggtcgcgtcgttgtcggccggcttggcacgccgaccgcatccatcggcggcgccgccgcctcccccgtccgcgctgctcctcccaccttcaacgccgccgctgcaggtgcagaagaagccaccaccggatgccgccatcttcgaggggatgccgacgcgagacacaggcggcccttacccgttcgtgggcgcggcgggagagcggaagaggtgggtgtgtcgtggctggcagagggggcgtggagcgcatcggtggatagtgcggtggcagggccgagggtggcgaggccgaggatggcgaggacgcagccgttctagtggcccgttttcttccttccgacggccaacctccacggcggtctcgatctctgccgccgccgctgctccggccctcgcccgcacgccgcagtcgccgctctagtgctactcccgggtctccgccgctcgcgggccgccgcaccgccaccgccggcaacgacgccac

SEQ ID NO: 1620 - DNA, 113 bp, Oryza sativa
  Clone ID: PAT_MRT4530_101469C.1
attgcactacagtacaccagagctctctaacttgtctgccatggtccgctcctccaccgccttactagctcaattgcgcacaatgtctggggaggagtaagtctacacatcca

SEQ ID NO: 1621 - DNA, 762 bp, Oryza sativa
  Clone ID: PAT_MRT4530_10146C.1
aacttaaaaagggccattttcttcgatagatgggaaccatggttagatggcaagttggcaacattggtgagcttccaggagtgggtgcaaaaaattacaagatcaagcaatgcaacattgcctcttttatgttggaagaaaaattgcaacagcggagcttctcttacaaggaacctgggacaattttaggatcggaatgaagcttcgtatagaggtgtactaaatacaagacggtaaggtgaagccgtggcacatatatacaagcactatgtatattattacaagaaggatgaataccgatgcggctgtgagcttgacatttctccaccagacggtgtttctgaagcggcgagcttgtcgtttaaatcgcatcgtgttcccttgcatagttgcagtcttgtcgaccaacagctccagacgatcacctctctcgagtactttgtcaatgttgtcgatcataacattccggacctgatccatttcacctctcatccgagatattctatctgcgttgggatcgtttgagtagtagtccatttgttggcccaaaaccctcgagaactcatcattcatcgcataagcaagagcagtgagagcagcacgaccatacgtcttgacaaaccttccgtggatatcctcaagaaacgcgaagggaatccgtcgtccggcggcgtcgtcggccatgcagagcgcggtgacgccgtcggtgcgcttgacgtggaacacgtggagatcctgcgtgtaggagatgttgcaatcgcc

SEQ ID NO: 1622 - DNA, 201 bp, Oryza sativa
  Clone ID: PAT_MRT4530_101470C.1
atgaccacagatcctcctcggggtcctctcgtcgcagtgggcggggatatcaccgacaagaacagggagtatcatggccgctggtttcaagtggggagctgcagctactcgggcggtgtcgttttggccaagcgcatcggcaccacagacagcggcgaaagtggagccgcgtgggagcagactggtggaggcagcatgtag

SEQ ID NO: 1623 - DNA, 454 bp, Oryza sativa
  Clone ID: PAT_MRT4530_101471C.1
aggacggaacgcacaataatatatatcggactttatccacagctatcacgaagtgaaaacattgcagtgttcaatattagtttagaccactacttcgtcgcaagcaccacactatcagggtgagcttactaactatgaggaaagccatgtgaacctatgactgggcaatgtagaagatactgcactgctctggcttaacctggcacatttacggctgctgcctcgcttactggctatgccagaccaatcacacgctacatatactcggctggtgctgaagactgcgtattaccctgtatgcgacgagaccaaggcgtaagaccccggcttgaacgacaaccactggcatccgtaacactctgactactacaacaaccaatcttgctgcagagggatcaatatgctctcctggcgaatgataaccatccacacgatggttgcacagttactatcg

SEQ ID NO: 1624 - DNA, 570 bp, Oryza sativa
  Clone ID: PAT_MRT4530_101472C.1
atggagctgcacctggttctcaacttctgggtgaagaatgtgctcaaagtatgcatgaggccaaaatcctacaattcaaaaggttcagccgaccacttcgccttcacaccggcatcccccgcccactccctgcacccaaatccgtcgttgtctcgccgcttccatgacccttccgccgcggactcctcctcctcctccacctaccgtcgcacaacatcttccacctccacctccacctcacctacctccgccgcaaaccctcaccactgccgccacatctttgcctcttcctcctccccaaccgccattgacaggttcgacaatggcatctcgcacctcaactccttcctccgccgccagcgcaccgccatcggtgagctcggcttcggtggacgcccagcctcgaggtccatgaagatcgtgctcgccgccgcctccaccaagaagacgcgggcggggtcagccgcggcttcggtgggcgctcaaggcggcggtggagcctctcgaggcggcgctcactggccgcctccccctccctcccaggctcgccagccgcctctcccgggataa

SEQ ID NO: 1625 - DNA, 252 bp, Oryza sativa
  Clone ID: PAT_MRT4530_101473C.1
tccctccgcgtgagcggcagcaagtgctcactgcgttcttcttctcgatttatctaccttgggtactagatcagacgctaacaagcgaccatgtgcggcagagacaccatccgccgaggcatccggtcgtgcagatccctgagaactttatttctggaagagcgccacattactgataagggtggcgaatggctccatgaatctgctgccaacaataccgttctggtgacactgaactcctacatgactgaa

SEQ ID NO: 1626 - DNA, 567 bp, Oryza sativa
  Clone ID: PAT_MRT4530_101474C.1
ttaacacttagggcaggtactatactcggttttacggttgaggacacaattgttttggtgaaatccagttgctctcctagtctccccacaagcagccgccacaggccagccgacgcgagctcggtgcctcggcctccctgccacgccgccgcatccacgccccaagtccttcagcgccacctcgccaacccagccacacttcagcgccaagcaaggccaggcgtccagcttgatgttgccatcctcgccacgaagcacctccccaagcccgaacgcctcagctacagcatgttctcttctttgtttttctggaagctgcagcatgttcaatccaagtatccaacgacttttgcgttgattgatttcgtctgtttgtacgaatgggaatggcatcgattaacttccagttgatatcgctgtgcatacacgtcctcgtccctgtccccggacagttacgaattgcccgtcccttggccctgtcccagccctcggggatgttttttcgccgtccccgccctcgtgcgggatttcggggactcgtgtgatcatggtcttcgtctggttcat

SEQ ID NO: 1627 - DNA, 369 bp, Oryza sativa
  Clone ID: PAT_MRT4530_101475C.1
gaggggggggggggttttattttgtttcataatatgggctaaaaaataacttttcggggggggcagaataaattctgaacaacctaacacctgaacaaaggtatcacacgccggggggtgtaatcaagctattaatattattcaacaccaaaaagggtttttttaaaaaaaaaagaaagggggccatttagtatctcatcatcaaaggcaggggggaatttttctttcatatcataatggcgctggccaagacccttacagatgaaaccatcgctctttattgcgaaaacaaccagttcccaaattatgagatacataacagggggcccaaactccataagataccatgccccaatagaaaagaaattt

SEQ ID NO: 1628 - DNA, 2447 bp, Oryza sativa
  Clone ID: PAT_MRT4530_101476C.1
aatctccttctccagctctcaaccgtatatccggtcccttctcccgtcgtcactgccgtagtgctgctcctcctcctcggtggaggcccacgcggtgcggggggaagcctggtgtcacggaagttgtagccgagaaggagacttcgccggatggcgaagaggaggaggtgcgcgggcgcggatggttcatggttgatgagattggtatggacatcctcaccatcgccttgcctgctgtgctcgccctcgccgccaaccccatcacggctctcgtcgacaccgccttcgttggccatgtcggttcgactgaacttgctgccgttggagtatccatttctatcttcaatctggtatgcaagctgctcaatgtgccattgctcaatgtcaccacatcctttgttgccgagcagcaggcagtggatgcagctgaaatttttagtcctcgcataggaaatgaaatttcaataccccaagagaaagcaagtaaacaaaggaggtttcttccagcggtctcaacatccttggctctagctgctggcataggattgatggaaatggtggcactgatacttgggtctgggacactaatggacatcgttggtatacctgtcgattcagcgatgcgtgtacctgcagagcaatttcttactttaagggcatatggtgcacctccagtcatagtagcacttgcagcacaaggtgcttttcgtggattcatggatacaaagacaccgttgtttgccgtgggtgttggtagcctagtgaatgcattgctggatgccatatttatttttccacttggtctaggtgtaagtggtgctgcattggcaactgtgacttcagagtacttgacagcatttatcctcctttggaagctgaacaacaaaattgttctgctctcatggaatatcattggtggagacgttgtccgctacctaaaatcaggtgcactgctaattgcaagaaccattgcggtagtcctgacattcacactgtcgacatccctggcagccagggaagggtctgttccaatggctggatatgagatatgtttgcaagtgtggttaacaatctctctgctcaatgatgcactagctcttgctggtcaggctctactcgcaagtgaatacgcaaaaggaaactacaagaaggcccgcgttgtcttatacagagttctccagattggaggcataactggtgtagcacttgctacaatcttgttccttgggtttggatatttgtccttgctgtttacagatgatccagcagttttagatgttgcccaaactggagtctggtttgtcactgtttctcaaccgataaatgctgttgcttttgtggccgatgggctctactgtggtgtttctgactttgctttcgcggcgtactctacagttcagatttctattcttgtcatattccattgcattgttttatttgctggagctgtctcatccgcagtactgcttgtggccgctcctaagtttggtcttggtggaatctgggctggccttgctctatttatgagtttgcgagcaattgctgaccacaaagatacacagcatgaacaggaaagctatgggcctatcgtatctggaggcccaataagctccaaggatagagccggagtgggaggcagggcagcagaggcgcagccgagcagaaagaacatcaggaaggagaggctgaggcctgagggagacgacgacgagggaatcaagggattcggaatcggaatcggagaaggaaagatgccttgcctcaacgtgtccaccaacgtgaacctcgacggagtggacacctccgccgtcctcgccgacgcatccaagaccgtcgccaccatcatcggcaagcccgaggcctatgtgatggttgttctcaagggttcagtgcctatggcatttggaggtacccaggagcctgccgcttatggcgagctggtttccattggtgggctgaaccctgatgtcaacaagaagttgagtgctggcattgcctctatcctggagtcaaagctatccattcccaagggccgcttctacctcaagttctacgattccaagcgctcggactttggatggaacggcaccaccttttaggttaaactgtatgcctgtggcttcaagatgcatgaaacctaagaattcctaatatcttgttcattgcctattggaggacaatgcagtcgatgtatcagtttaatgtcaacaagagtcaccgtggaactggaaatatgcttctgaatgcggggcttttaactatttgccatgtttagatttggcaaataactatttgccacccctatctcaatgacatgtgggtccacatgtgtctatgacgtgtgggttcagcggcaaaaagttaattgccacatctaaatgtggcaaatggttaaatatcggtctgaatgcaatttggcatgcttgagttgagagctctgtgtgtgt

SEQ ID NO: 1629 - DNA, 396 bp, Oryza sativa
  Clone ID: PAT_MRT4530_101477C.1
atggatatctctgagccaaataaaggctacgcgagctgcggctcggtgttcgatctgtgcctaacccaaccgaacacccggcgccaccctcgccaatcgctgccgtgccacgcgcctgccttccgactcgtgcgccacactagtcgtgcccgtgcgccgcaccgcgtcatgccaagctgtgtgggcccgccgccgaccaagcggccaaaagcccgcgccaaaggctgcgccgccacgggtgcccgcgtcatcccgtcccctcgcgcgtcgccctcgggatggagtgataatggccaccacgggatcacgccgtcgccgggtgtcgaacacctggtgggcgccggctgcgccgccgccacagggcttctcggccagtgtgggtggcggggtgtttaa

SEQ ID NO: 1630 - DNA, 276 bp, Oryza sativa
  Clone ID: PAT_MRT4530_101478C.1
atggcgccagaaacactcatggtatattatggttatagagttcatccgcaaacgcacggatataccattatagcatttcacccgaggcgagcgaggctgccggtggcagagggcgaagcagcgacgggcggagcaatgcggctgcaggctagtgaggcagagggcggcgggcgaacggggcagtgggaggcgagtacagcggcggccatggacaccagagccgcccgtccttatcggtcgtgcgattgctgcccaattccgacggcgcggggatga

SEQ ID NO: 1631 - DNA, 404 bp, Oryza sativa
  unsure (1)..(404): unsure at all n locations
  Clone ID: PAT_MRT4530_101479C.1
cttgagaattggataaatnaatgctcacaggaaaaatataaatctgcaatacaatcataaanaangtcacatccaagaaacaatatgccaaaagtacatgtggaaaaccttcaagattgaaatcaatgactgaacaggtatcgatcggtgaaaaataactgaaaacacttaataacagtaccagtagcacttttcccccacaaattcttcttcagttcaatttgtcgtcaactcactcctccattgccgaatcaaatcttcattgtcatatgacattactgcacctgtgcacaaaagcaaaaagagatatggaatcaagatatagattcctcatggtaaattttataggggagtttataccgctcaacctatgacaattaaggattctcaattcacacaccatc

SEQ ID NO: 1632 - DNA, 324 bp, Oryza sativa
  Clone ID: PAT_MRT4530_10147C.1
atggccagcacgtacttccctgatctttgcttcgatcgcatggcacaagctgataaaacaattcgccatcaatcgccgtctgacattgtttcatctctcgccgcggttcctgatctccggccgtcaatggagaatgcgcacgctgaaggtgacgttgccgtcgagctccctgatggctttgccctcatacttgctatcgtgttcttgcatgtgatgactataaaggacaacaattatataactaacagaaaaaccattctgaagctctactggactaaacaaaagattgccacaaagttatacttcaaatctaaggagcactaa

SEQ ID NO: 1633 - DNA, 496 bp, Oryza sativa
  unsure (1)..(496): unsure at all n locations
  Clone ID: PAT_MRT4530_101480C.1
atattttcgcataatttatcgatgctttcgttaaatattgagtcccatcggtttgcctaataagctaaagcaaaagataaaattaaattttcgaacttaatttttgaagttgattttaagatattttgaacgtattttttttagcattggtttttaagtcgttacgaacaaatatataaaagttttacctataaaataatttttatttcctaatgagccgttttgacttattagaaaataagagcaactgatgaggctcattgacaaatcttatcgatacctttcagcgagtaataacaaatgtactggaagacgctggatacacangggattgcacgctttctttggaagattttaccaggattatagatcatcctggcctaaagatggaggtggaagtgcctattgactagtggcccgtgcatacctctggttttggttgctgaacataactgtgcctaatcaatgggacatgcaatgcaccagaagaacgggc

SEQ ID NO: 1634 - DNA, 1170 bp, Oryza sativa
  Clone ID: PAT_MRT4530_101481C.1
atggagtccgcatggacgaatctccccggcgagatcatggagctcatcgccgacaaggccggcgacgcgctcaccggccgcgccctgtcccgctcggtctgccggtcatggcgcgccgccgtaccggagacgccgcggctcctgctccccgccgcggccgctcgcggcgccggcgacgagtacgcgctcgtgttcccgctgtcgcgcgggtggtcggtcgtcgtcgacgtccgcgacacgtcgtgccgcctctcccacctcgccaccggcgcgacggcgccgctgccgaggctcaacgccgtccgcgccaccgccgggtcccgcgtcgtgcacctcggacacggagcacgccggcaccggagacgaacagttctggatcaagatcaagtttctctggtattccatgttcctcgaatccgacctccaattctcacacttgctccgcttcgccgtccatgtcccggcggcggcgagcacggacggcatgctgatcatgatgtaccacccggttctggggacacgggcatggtcttctgccggcccggcgacgccgcctggacgaagctggacaaccccatcgacgacgacaagcatgtctacaacttggtcgagttcgcctacctggacgggaaggtgttcgccatggacaggggcggcaccacggcggtgatcgacgccgccacgctcgaggtgctcgacctcgtcgacgcgccgccggggacgcgcaacgtctcgaacaagctgctcggcaccgccaatggcgacgacaccgtcatgtcgctcgactacctccaccttgtcgcgctgccgagcaagctgctcgtcgtcagggtgcgcgtcaacaagtcgtcgtcggagccggagggcttcgacgtgttcgagctgggacgacaggatcatcgcgacggcgagggcaagctcgcctggcgcgaggtggccggcgacgacgtcggtggcaactacgacctgttcctcgacgaccaccacgccacctttggcggcggcggcggcggcgccggcggcgattccggtagccggatttactacgtgcacgacgggaaggaggcgtactgctacagcaagcggcatggcgagctggaatgcgtgtactcggcgccggagggtagcgaggaacagtgttccaccatgcctagctggtttgttccatag

SEQ ID NO: 1635 - DNA, 372 bp, Oryza sativa
  Clone ID: PAT_MRT4530_101482C.1
atggcgcaactgggtggtgcgctgctaggattagcatcggtgatgcctcttgcctccgccactcacgcatgcgcagcccagcccaccgtccggggtcgtcggcaatggcgttctgcaaccatgcgggggtggcgtgactcacggcgaggcgctcacgcttcctcgagcggcggcgcaagttccgagagtggcaggtgggcgagcaacctcggcctcgccgctgggcctagcgatggtgccgtcgctgttggcgccctcaacggagtcagagaagacgacggctatggtactttgtttgagtctagcggggtgtgcctcgagctgcttaaaaagaggggagtaatgtcatgggctttgggccgggaatcctag

SEQ ID NO: 1636 - DNA, 705 bp, Oryza sativa
  Clone ID: PAT_MRT4530_101483C.1
atggaaaacatttacacacttgtccctcctccgcacaacacgcgggaccgaggcgatatcgctcttccattccgcaggaccggtggtcgcgtaggacggacgtgcgacaccgcctcgctcccgcagcccgggagagcagcagcgtggtggagggcggtcgtacgcggtcccaaggccgtcgcgcggcgccatggcgcgggaccgcagcggtcgtgcggcgccgccgcgagggaccacgccggtcgcactgggagctttctaggtgaaccagggatggctgttctttgcgattgtcgaaggaaggcagcaagatggatttcttggagtgaggataatccatctcggaggtatctgacatgtgcaagagctcgggatggtggctgcactttctggagttggtatgagccagaaactacaccttatttgaggcaagtgttaaatgatttgcacaatgttgttcgtggtttgaaggaggagaaatcaattctgagagcatctcttgtgagtgcaagagcacaaattgatgagctgacggctgtgcacaatggagatgtggctgattggacaagaaagctaaaggagaaggatgatttagcttgtgaacttagagctagagttgttcagttagaagagggaaggaaacttctgttgctaattgttgctggactagtattgctgatagttgcattatggcttaggggatag

SEQ ID NO: 1637 - DNA, 276 bp, Oryza sativa
  Clone ID: PAT_MRT4530_101484C.1
atggcctacttgggaggctcaccgatccaccacctccgggcctgctacttggccaccctgagcaccgctacatcgatccgccgccacgttgatccccacctccgccgtcgattttctgtcgttatcacatcgatccccacctccagtacatctatctgtcgtccccgcatcgatcaacgccagggaggtagaggggagctcgagctcatcgccttcttggcggtggcgtcaaagagagggagggcagaagcggcgcagctgagaagggaaagctga

SEQ ID NO: 1638 - DNA, 4830 bp, Oryza sativa
  Clone ID: PAT_MRT4530_101485C.1
atggccgagccacatgtggtgccggaaacacttagagagcaattggtcagtgtttttagagaaacatttgatgtggaacctaagagtagagcacgcacttatcgaaaaccatatcctgatttttacgacacagtgccatacccccgtggttttagagtgcctgatttcattaaatttaccagggatgctgatgtagaattgaggttagcacacctgacatcggtcaagcaaaaatataatgagcctgttgttgattatattagaagatttagagacacaagaaaccgatgttttagcctagcattatctgacaaggaccttgctgaactagcacattctggattacttccacactttaaagaaaagttagaggacgatgatctcatgtcatcggatgatgagaatgtggatatgtgtgtagccgaatggtcatgggcatcgaaatctaaaccatttgtttgctccgctttgaagccggtgtcccaaaagaattggcaagaagaaatgaaatttacttttgatgttgctaagtgtgatagaatttttgattacctattacaagaaaaacaaatcaaattgcctaatggtcatgtcattccatcacccgaggagcttaaacgaagtgcatactgtaaatggcataattcacactcgcatgctactaatgattgtaatgtttttcgtcgacaggttcaatcggccatcaatgaaggacgattgaggtttgctgagagcccaaaaatgcaactagacagtaatccctttcctgtcaatgtgattgattttgagaatagcaaggtacttgttcggccatctcaggccgaatccactaaaaataaagctgtgatagttagtgatggtggtatgcatacagtgaagactcctagttctgggtctggtcagagtagtttgccaaggatgattaaacctagaagcccagaaattggtcggtggaaggttaatgagagtaggaacaaagctacaaaaagggttgaaaagccgaagcccacattcaaagacctttcggcaaaatatgagggaagagccggcaaaggagttgctagccggccaaataattttaaaagaccaagatcacctccaatgcaagggtttgagggtccggatcgtcgatgggaggatttccatgcatcaccgccatatcctccttttgggccaccgatgccgttaccatggggtcctcctcctgttggttttcctccttgtccaccatggggttggtgtggtccatgggtgcctcctgctccaatgacttatgagccattccatccgatgccctatcaaccgttccacccagtgccatatggaccattccatccagtgccatttgaaccattccatccaggttgggaagcaccaaggaggccggtgtttgataggctgtcatggcctagggatgaccgatctaatcaaaggaatcggtcttatgatgagaaaaatggtggattggtgaataaggtgcatcgtgtgaaagaaggtggcgattcaggaggaaattcgagtgcagttttggcagcaaaaaatgatcagtcgacgagcggcaattcacatgtgagtaacaaagtgattagtactgcggttgctacagaacaggcccaggtgaacagtgctccgactgctacagtaccagcccagatgaacagaaccgcaatcacagccgtgcctgccgaaatgaacagttcttccgctgcagtgccagcagctgattgtggtggtggttcatgtggagaaaatgtgtctatgcagcccggcaaaggtaaacagctccaatggtgccctccagatattggacacactcggaagcggaggctgcaaagattacgcgcacaagagttgagacagtctaaggctgagaagatgagagaagaaattttcaatgatatcaatcctgaacccatggtacgtgttcgcagggaatggagggcgaaacaagttgcagcttcagttcaagaaaacagtgatgaagagcatgatctgttagaatgtggttccccggtaattagagatggctctccgcttccagaaagaatggatattaatatggtttttacactaccttctgaatttagggtcgtcgatgaagagattgcacaattatgtcttgctcctaaagatgttatttttgaaaagcctgatgaatcgagccgccatatgaaaccattgtatatcaaagggcatattaatgggaggcctatttctagaatgttggttgatggtggagctacagtgaacttaatgccatattcagtttttaagaaattgggcagagaggacagtgagcttctaaaagctaatttgacacttaatggattcacgggagagccaacagaagctaaggacattatttccatggagctaactattgggagcaaaactctccctactgccttcttcgtcgccgaggtgcaagagcaatatcggtcaaataagaacgatatttgggaggctattgatgattttgatgaagtagaaaaattaggacaaggtttttcgtcggctgaccctttagagaaagttgatataggtgatggcaccattcctagaccgacatttataaatcaaaacatgacagccgattataaagttaaagtaattggtttacttagagagtatgtcgattgttttgcatgggaatatcatgaaatgcctggacttagccgagagctagtagagcatcggctacccattaaatctgggtttaggctttataagcaaccacctagaagatttaattctaatatgtacgactggatcaaagaagaaatagaccaattattaaaggcgggttttattaggccgtgtaggtatgcacaatggatttccaatattgtccctgttgaaaagaaaaatactgggaaattgagagtgtgtattgattttagagatttaaataaagccacccctaaagatgagtatcctatgcccatagctgacatgctaattaatgatgcatcgggacatagagtgattagctttttagatggtaatgctggttataatcaaatatttatggccgaagaagatatgtctaaaacggcctttcgttgtcctagttttgtcggtttatttgagtgggtcgttatgacatttggtttaaaaaatgccggtgccacttaccagagagctatgaatttaatctttcatgatttacttggtgttatattagagatatacattgatgacatagttgttaaatcggaatgtatggatcaccatttagccgatttatgtttagcgtttgagaggatgcgtcagtatggtttaaaaatgaatccacttaaatgcgcctttggtgtgtcgtctagcaaatttctaggatttatagtacatgagaggggcatagagatagaccctgccaagatagaggctattagaaaagtaacagcgccgcagtgtaagttagacatgcaaaaatttttagggaagaccgatgtcataaaatatatgttgcaaaagccgattctaagtggtagaatcggaaaatgggcttatgctttagtagagtatgatttggcttacgaatctttaaaatccatgaaaggccagattgttgttgattttattgttgatcataggattaatgatgatatgaagagggttagttactcgtctgtatgcccatggaaactttactttgatggctcagcttgtagagaggaacagggtgttggtgttgttttaatttcaccaagaggcaatatttttgagacatcggtccatttagaatatttttgcaccaataatcaagccgagtacgaagctcttttgcgaggattgcaaattttagaatccatggatgtaaagaatatagaggcgtatggtgattcgttattagttgtgcaacaagtttctaggaattatcaatgctttgatggatcactgaatatgtatttggagaaatgtttggagatcatagcaaatttagatgattttgttattaaacacatttctagggaagagaatgttctagctaataatctagcgcaacaagcatccggttatcgagtcagtagagatgggttgcttttaaaatgtctaagtttagaccaaagtaaggttgctatgggtgaagtacatgaagagcatattattcatagattcggcataccacaaaccttgacaactgatcaaggatcatcatttatgtcacatcaagttcgtgaatttacggaatcttttaaaattaagttgctttgttcatcaccatactatgctcaggccaatggacagaccgagtcaagcaataaaactttaattaggctgataaaaaagaaaatagaggaacatcctaaaagatggcacgaggttttgtctgaggcactgtgggctcatcgtatatctaagcatggtgcaacaaaggtaacaccatttgaattagtatatgggcaagaggccattttgcatgttgaggtgaatctggacgcccttagattggccagacaaaataatttgtcggcagtagattatcacaacttaatgatggacggaatagatgaggttagtgatgaaagattgaaagctttgagagagattgagaaagataaattgagagtagctaaagcttacaataaaaaggtgaaggaaaaatcgtttcaaattggagatttagtgtggaaaacaattctgcctgttggttcaaaagataataaatttgggaaatggtctccaaattgggaagggccatatagaattgtagaaatagtccccgggaattcttattttgtgcaaagtctacgaggatataagttgcctagagcttttaatgggagatatttaaaaaggtactatccaagtgtttggcaagatgcttaa

SEQ ID NO: 1639 - DNA, 1188 bp, Oryza sativa
  Clone ID: PAT_MRT4530_101486C.1
atgtccctcctcctcctcctcctcctcctcctcctccttagcttattctctggtgtgtccgccgaagtgccattgacgcggacgcatgtcaccagcctaccaggcttcaacggcgcgctcccttcccgcctcgagacggggttcgtacgccaaaagttcttcgccatcatgttctacttgaccatgaccagatatgtgaccgtcgacgaggagaacggggcagagctgttctactacttcttcgagtctgagggcgaccccggcagcgaccccgtcctcctctggctcaccggcggcgaccgctgctccgtgctcagcgccctcttcttcgagatcggtcagcaacccaacagcaaacaagccccgttgtcacccaagagtgtcagatcatgtggcccattgaagctggtcatcgagccctacaacggcagccttccgcggctgcactaccacccttactcgtggacaaaggtcgccagcatcctcttcgtcgactcgccggtcggcgcaggcttctccttctccagggatcccaaggggtacgacgtcggcgacgtctccgcgtcactgcagctcgtgaaattcctctccaactggttcggtggccatcctgagtacctcacgaatccgttctacgtcgggcgagactcttatgccggaaagatcgtcccatttatcgcgcagaagatctcagaagatattgaagcgggggtaagaccgactcttaatctcaagggctatgtagtagacaatccaactacaggcgaaaggatcgactacgaatcaaaggtgccatatctccatggtgtcggaatcatttcagatcaattgtacgagctactaaatgaagtttcaaagccccacattttgtacaagaagtgcatttatatgtctctcatcccaaaatttgagagcatggacagaaagatcctgaaagaggagcttggaatactaaagcatcgacctccgcgcccttcaatacaatgtgttagctattccaactatttgtcatatttttgggccaacgataacgtcacacgagagtatctcggaatcaagaagggaagcgtggatgaatggattagatgccacgataacgatctaccgtacaccaaagatatcaagagcagcatacagtaccatcacaatgttacattaaatggttatcgtgctttagtatacaggtaa

SEQ ID NO: 1640 - DNA, 623 bp, Oryza sativa
  Clone ID: PAT_MRT4530_101487C.1
ggaggaaacaagaactttatggtcctttattatgttatttttttgtatacaaagcatgagaagagatctcgtgagaaatgatcacggccaattccaataacagaagagatctcctgtttttgtataaaccatgggaaatggtcacggccaattccaaatccaagtgctacggcagtaccatttcccatggcacagtatattctcgtcgcaaaatgaagatatctgtatatttgccaaagaaaaggaacaaagggagaaaagaatcgacattttcacgaaggtgaagcatgcagacatgctagtacacttgctgcaagatcacctagtacagacagacaccagcaatcactagtcagttgacatgccagtgctatcctctacattcccaacccaacagaagccagacgaaaacctctagccaacaacagtgcacgcaatgaatcaacaaccttagttagggcgtgtatttgagttaaacaggtgcattcaccttatgcaattagcctacctacactacacctctttttccgctggagaaaagcagacgagagatgaatatcctactttctcaagttctccctttctgaagcagccgtattgtacttttgccctgtagaacaacg

SEQ ID NO: 1641 - DNA, 480 bp, Oryza sativa
  Clone ID: PAT_MRT4530_101488C.1
gaaaggggacagaaaattcagggtccaccaaggggaccgagtctaccccagcaaaggacccaaaatggaagggccccggttccccaaaaacgggaacagggcaaacaagcgggtggaaaaaaaaagggctcccaaatttccccccccaacccccacgggaaatagggcccattcaggagaaatctccaccgcccgggggggggcccggttgtccttcggcccccttgactgaggcccatttaaccaaaggggggaacccccctttccccttaaaaagtgggaaaaaaggggccttgcaaaaaagaaaccctcccaaagctgcaaaatgggaggggaaaagggcccaccccccgggaaaacatttaaaccagaacttggggaaggcctgcccttaaacgggcacctttttaaaagagacccctgttttacggaaaggggcacacttctcctgtgcccctaaaaacatgcgggcggttttgc

SEQ ID NO: 1642 - DNA, 301 bp, Oryza sativa
  Clone ID: PAT_MRT4530_101489C.1
atgacggttgtgacggttggaatggtcggaaataccctctagccgtcattgggggctaatccacaccatcctggcgaagccctggatcgcatggcactgaggagggttcggccgaaccccctggttcggccaaacctagggccggcccaatctagcccaattttggctggcggcctcctccgttgttcttctccgtagacttgtgaattttggcccagtttgtcatatcaattctgagttcttggcccattcatacatatgtctggttctcaacatcgtccgattgatttatcatctgtgt

SEQ ID NO: 1643 - DNA, 921 bp, Oryza sativa
  Clone ID: PAT_MRT4530_10148C.1
ggaattgaattattgaatacacgcaattacgcgtgatgaagcaacattctgttatcaaacttttgcggatgggaaaaaactactcctttcattttataatataagactttatattattgttcttctatattaatgtagatattaatgaatctacacacacatatatatatttagatttgttaatatctatatataaatatagataatagtaaaaagatttatattatgaaaagtcgtgtccggcaaggacatattatatattttgggtataaatatgacccaagaccttgtaaacaaattaacgacagttcaatcgccaccttttctactttcattgttttcgacgagttcttgctttcaagttgggttgcaacgagttcgatctccagcaagagacatatttttagaaatagattatatatcattgatatctacagccgatcgggtagatttaattttatcttgcttctttctttattgctgatctggttcacttcacatcggcccaatattgaacgatatgtcatcggcaatacagccgatcggctatcgtttaaaccaactggcatgctcagaaaccaaaagcaattctttggacctacactggagttaagcaaatcttccaggccagtgtcatgcgtgatgactgtaaatttatatctcaagtacatttctcacattttcagcaacaaatgcaaaaatgttaagacgacgactggatcaggctgaacgacctgtccatctgcacggactgcagcaagaacgtcggcttcttgagcctcgcgacgaacacgacgagcagcacggcggcgacgagcgcgaagaagacgaccgagagggcgaggtagaggcagagacatctcgccgactgaggcggcggccagtgagcgccattgttgcagctctcctcgcaactctgac

SEQ ID NO: 1644 - DNA, 337 bp, Oryza sativa
  Clone ID: PAT_MRT4530_101490C.1
cgtgcgaaaccggtgctgtaggtcgcactgatccgccggaccagctggaggtacgacgtccacggcgctgcgacaggagaagacgcgcatgaccgcacgcatcttctcctgcatccggtcgaagtgcgaggaaggtaccagcgaaggtagtcacggtagttctcctccgtgtgtgggaagagctcggggagaggcaaaaatcgccctagcggagggcggcaagggggccgcctgcaaaattccatgccccccctcgccgcccatttgcaggcggccccccgcacagtataaaatcgccctagcggagggcggcaagggggccgcctgcaaatttcgt

SEQ ID NO: 1645 - DNA, 333 bp, Oryza sativa
  Clone ID: PAT_MRT4530_101491C.1
gagaaaccagaaataagctggagttatctactacttagattagaatatactatatatacagaaatgctaagtagctaactatgcagaaatatatattgaatgaaaagcactgcatttataaacactatggagtatatatgaactactacacagcgacagccggggcagaaagttaaagcaactcactgagggcatgcaacacaatcacgttatactcggaatgcacatacacactggcagaatcacatttcttcagctgatcagctagcatattatctgcgaggctgacctacaagagcctcatgatggccctacttagcggacttgcaccat

SEQ ID NO: 1646 - DNA, 835 bp, Oryza sativa
  Clone ID: PAT_MRT4530_101492C.1
atgaacgggatgaacatgaacgccaccgacacggaagcatgtcctgtaccattggagttggaactcctagctcatcccttccctgagtatcaagtctcaactacagaggaaaattcttgcggtggttcacagttgcatcaggtgatgggagccgcgaccgacccgggttacctcgaaactataaaacggctgcctcccttccgaatcggtcacacaaagatcatctcgaacacctactccgacaccggaagtaaagcagcgcagcaacagcaaagaaatcaacccagaaagaggaaagaagatcatctcgatcatctctgcgcatacatggggaactgcgccgtgacgcagcacgccgtgtcgtgggccgacgacggcgagtgggagctgccggagtcgggggaggaaggcaccgcgccgccgaggagcggggctcacatgacggaggtgaccatcaggatcaccaagcggcagctgcaggagctggtggacaagagggcggccgccgccggcggcggccacggctaccacgtctaccggaagagccggcggtcggccgcggagcttctggcggacatcatgaacgccggcgaggtctaccaccagcactacagggtggcgcactggaagcccgcgctgcagagcatcccggaggccgccatggagtcatgacacgtcctgcagcggcgtggccaacttcgtttgcttttctctggctgcatccttgcagcttcgttcgatggaacacagcttttttgtgacctatgggtgttgttgttctctcctagctcagattccacgaacgatgtaaattagtaggatgattaagtgatga

SEQ ID NO: 1647 - DNA, 633 bp, Oryza sativa
  Clone ID: PAT_MRT4530_101493C.1
tgcagctcacagctcacagctcactccgcttgccgcttccggcttccgctctcgctctcgctcttccagctcgctgtgttgttcgatcgtttctgccaccgctggcgcccggccatggcgtgccgcgggcggagggtggcggtcgtaatgatgctcgcgcttcttgtgctctgtttccacgctgctgtctgtgcgtctgcttcgccggcggtggtgtcgcgcaaggcgaatttgtccggcaggaagggtggtttggcggctgcggcgactgcggagagagcactgaagaagaggatggtggtggccgtggcggcggcggccaaggatcagagtggagtgcttaaacatggcaagaaactcagctccggtgatgtcgtcaccgccaaaactgccacgaccaagactccggtgaccgccaacaccaagcttctgaaggaggacaaggcggcgaagctcaccaggaagtcgccggagtacatggcgaataccaagaccaagaaagcattcgagtccaatgctgttgatgtaatgaagattgaggaatcgggcgagaaggcgcaggcggcggccgcgacgaagacgaggaaatcggcggaggaggtggcggcggcgctggcggaacaggacggcgcg

SEQ ID NO: 1648 - DNA, 930 bp, Oryza sativa
  Clone ID: PAT_MRT4530_101494C.1
atggcggccggagaggcgagggcgcagctgcagtacgggttctacaacacgtcgtgccctggggtggaggaggtggtgcggagcgagctgaaggggatcttctccaacgacacgacgctccgagccgggctcctccggctgcacttccacgactgcttcgtccgcggctgcgacgcctccctgatgctcaactcccacaacgccaccgccgagaaggacgccgacccaaacctcaccgtgcgtggctacgaggccatcgaggccgtcaaggccaaggtcgaggccacctgcccgctcgtcgtctcctgcgccgacatcatggccatggccgcgcgagacgccgtctacttcagcgatggccccgagtacgaggtggagaccggacggcgcgacggcaacgtctccaacatggcggaggcgctcaccaacctgccgccgtccgacggcaatgtcaccgtcatgacccaatacttcgccgtcaagaacctcaccatgaaggacatggtcgtcctctccgccgctcacaccatcggcgtggcgcactgcacctccttctccaagcggctgtacaacttcaccggcgccggcgaccaggacccgtcgctggacccggcgttcgccaagcagctggcggcggtgtgcaagccggggaacgtggccagcgtggagcccttggacgctctcacgccggtgaagttcgacaacggctactacaagtcgttggcggcgcaccaggcgctgctcggctccgacgccggcctcatcgacgacagcctcaccggcgcctacgtccgcctcatgaccaacgacaccaacctcgacaccttcttcgccgacttcgccgtctccatgatcaacatgggcagggtcggcgtcctcaccggcaccgacggccaaatcagacccacctgcggcatctacgtcgactga

SEQ ID NO: 1649 - DNA, 4695 bp, Oryza sativa
  Clone ID: PAT_MRT4530_101495C.1
atggtcgaggtcctggaagcagaggaagcggtggcgcctacccccaccccgtctgggagtggggattcgggcgaaaaccgtgaccctcgtcaccatcgccatggctctcaaagtcctccccgccgcgagccttcgcggagggaggatccaacccgttcaagcggtacggccctctccccgcccccaggaggagggaggtcgcgacgcgtcggagcacgtcgccgtctcgactacggagacggtggttcgccccaaggcgcgcttcaggtggtgggcgcccttctgcggcatccccaggtgaacccggagccggagacccccgtgcggcgctggctggacgacgtggccaacttggtcaccgctgcccagcggcagttggccacgggtggccaatccaccgccacaggttgtagggctttcgttgcgagtctccagaatgtctggtggcccccgaagtttcgccccaatctcacggagaagtatgatggcagcatcaacccctccgagttcctccaaatctacaccacgatcatcgtggcggcagggggtgacgaccgggttatggcgaactactttcccatggcccttaaggcccacgcagtagtgtatgcattccggaacggcgtgcggcataaccgcatgctggagaagatcgcctccaaggagcccaagaccaccgccgagctcttcgagctggcggacaaggtggcccggaaggaggaggcgtgggcctggaactctcctggcaccggtgcggcggctgcggctgcccccgagtctgcccctcgctctaagcggcgagataggagaggcaagaggaaaccggcccgttccgatgacgagggccatgtccttgcggcagagggcccacgtgggccccgcgcaaaggaaagattaccggcgataagccgagctccaccaccccctccggcggaggccgggttcaaggctatgaggcgggaacttctggccgctgttcccacccatgaggcgatccggaaggcgtgctggtcggaggtaaagctcacctttgaccagagcgaccatccgacggtactcgctcggggagggaagttggccctggtggtctccccgactatccacaacgtcaagatgaagcgtgtgctggtggacggcggggccagtctgaacatcatctccccggctgcctttgacgcgctcaaggccccggggatgaagctccaaccgtcgctgccaatcattggcgttactccgggacacacgtggccgcttggtcacgtcgagctcctagtaaccttcggcgactccaccaatttccgcaccgagcggatcgacttcgatgtggcggatctcaatctgccctacaacgcggtcctgggcagacccgcgttggtaaagttcatggccgccacccattacgcctacctccagatgaagatgccgggtcctgccggtcccatcaccatctttagtgatgtcaaagtcgccctcgcctgtgcagaacagcgcgcggacaacctggcggcggccacggggccgcaggccccggaggcccccgcgtcccgcgcccccaagaagcgcctcaccttggccgacgaggaaggcgcgctcatctccttcctgcgggcgaattctgacgttttcgcatggaagccgtcggatatgcccggggtccctagggaggtgattgagcaccgccttgccgtgcgaccggatgcgcgacctgtccggcaaaaagtgcggcgtcaagccccggagcgacaaaccttcatcagggaggaggtggcgcggctcctggaggctgatttcatccgcgaggtgattcatccggagtggctggcgaacccggtggtcgtcccgaaggccaacagcaagctgcggatgtgcatcgactacacagacctcaataagcgcatgactcgaattactttaagtaatcagatagggcgcaatgtagaggcgtatgtcgatgacctagtggtaaaaacgcgccgccaggacacgttgctgcaacacctggccgagactttcgatagtcttaggtccacacgtgtaaagctgaaccccgataatctcttcccgaggcatagaagcaaatcccgagaaaatacgcgtgatagagaggatgcgccccccagcaagctcagggatgtgcaatgtgtcgctggatgcatggccgccctgagtcgatttatatcaagattgggcgagagagcgctgcccctattcaagctcctcaagcgccccaggccgtttgtatggacggaggaagctgagcaagccctcaatcagctgaaagcttacctcacttctccccctatcctggtggccccggggccggaggagccattgctactctacttggctgcgaccccccacgtggtgagtgccaccctagtagttgaacgcgaggagaccgagcaggaggtccctccggctcgtgatggcccctcgtcccccaaagcccccagcccccgggaggaccccgaggcccccggaggagaaggcgaggctttggcaggaggccccgagccctgtgatcccaagataatccggaatcccccgggggcccccgagcaggcgcgctccggatcatccgcccctgacaacacgaaccggcccgcccgaacggtgcagcggcccatctactttgtcagcgaggcgcttcgggatgtgaaaacccggtacccgcaggcccagaaaatgctttacgccgtattgatggcctcgaggaagttgcgccattacttccaagcacatcgggtttccgtggtaacatcgtaccctctcggccaaatcttgcacaaccgagagggcaccggacgggtggtaaaatgggccatcgagctggctgagttcgacctgcacttcgaaccgcggcacgcgatcaaaagtcaagtcctggctgacttcatcgcggaatgggccccagtggacgaccctgttccgtccgaaccccctccctcccccgaagagaaagaggacccaaacgccgacattcgtggcggacactggattatgcatctcgacggctccctcacccttcaaggcgcgggtgctggagtcacactaacctcgccaagcggagacgtcctcaaatacgtcgttcggctcgacttccgagccacgaacaacatggcagaatacgaagggctcctcgcaggattgagggcggcagccggaatgggcatccgccgtctcctggtcctaggtgactcccagctggtcgtaaatcaagtatccaaagagtaccaatgcaccgaccctcaaatggatgcatatgtccgcgaagtacggcgcatggaacgccacttcgacggaatcgagctccggcacgtgccccggcgcgacaacacactcgctgatgagctgccgcgtgttgcgtcggcgcgagccccacttcccccggggacctttgaagaaaggcttgtccaaccatcagcacgaccgaacccctcgaggggctccaacgacatgccctccgccccgattccttccaactcgcgccccttggagcccgagggggaccgcgcagaagctgaaaagcttgcgcgcatctctaagcggtacgtccttgtagaagggaccctctaccggcgtgccgccaacgggatactcttgaagtgtgtttctcgagagcagggcatcgagctcatagccgacacccatcagggcgagtgcggggcccattcggcctcgcgaactttagtcgggaaagcctttcggcaaggcttttattggccgactgcattacaagatgcccaagaatgggtccggcggtgtaaagcgtgccagttccacgccaagcagaaccaccagccggcccaagccttgcaggtcatccccctctcttggccttttgcggtctgggggctagacatccttggacctttcaaagcggctcgaggcgggtatcagcacctgtacgtcgccatcgacaagttcaccaagtggcccgaggcttaccctgtcgtcaagatcgacaagcattctgccctcaaattcatcaggggcatcacctctcggttcggagtgcccaaccgcattatcacagacaacggcacccagttcaccagtgagctgttcggcgattactgtgacgacatgggcatcaagttatgctttgcctcgcccgcccaccccaagagcaacggccaagtcgagcgagccaatgccgaaatcctcaaaggcctaaaaaccaagacatacaacgtcttgaagaggcacggggactcatggctcgaggagttgcccgccgtgttgtgggcaaatcggaccaccccaagccgcgccaccggggaaacgccgttttttctggtgtacggcgccgaagcggtcctaccctccgagctctccctggggtcgcctcgcgtcacactgtacagcgagaccaaccaggatgaccttcgccgcgatgatctcgattatctcgaagaacggagaaggcgagcggccttgcgtgccgcccgctaccagcagagcctgcgacgctaccatcagcgccacgtccgggcccgatcactgcaagttggcgacctcgtcctacgccgcgttcagtcgcgcctagggctgagcaagctctcgccaacgtgggaaggaccatacaaagtgatctgcgtgccccggccaggctccgttcggttaaccatggaggacggcacagaattgcctaacccctggaatatcgaacacctccgtcgcttctatccataa

SEQ ID NO: 1650 - DNA, 124 bp, Oryza sativa
  Clone ID: PAT_MRT4530_101496C.1
aagctcatatagtactatactacaaaactatgctccgtacgccccaaggttcaacgggccagggaaccttccaacagcccaagccaacggctctccccagggtttacaattccgacgaaatccg

SEQ ID NO: 1651 - DNA, 1082 bp, Oryza sativa
  Clone ID: PAT_MRT4530_101497C.1
cgggctgcaggatgcttatgttatgtgtaggccttatgcttttgaaaagtttggagctatctgacaccgaagttggaagcagtggactccagcatctatctggtctgttttcacttatgaacaataatatttctagctctaaccctttttagcagttaagtgccatgcaatgtcattcatgttgtaaaacactggataataggacttattctgcatctttggcatgaataatgtacaagattacttttatgaagtgttttcggcaagtggcaaaacataaatgtgttaatgctacagttttatgtgcatcttgtgattgtttttatcattttattttcttaatctctttactgcatgtattgtagatttgtagtatctagcatgtgaacagttactgaataatatgtttgcaaccagtgaatgttcagaaaagtgaaatgattaatacatgctctcatcgtatccttgttatgtctgatcatcttagaaaacttgtcaagttgtgcaacgatttttgtacagttttctcaatccgattataatgcttaactggcacaacctgctacatcacaaatcctctgcagttatttttgttattatctgtatttggttgtcgttgcacgggcatttgaagcatttgattggaaagctattaaacttttacaggccttcggaatttggaaagcatcaatctctcgtttacgttagttactgataccggtatgaagaagatatctgcactgaattcactgaagtcagttaatcttgacaatcggcagattactgatgttggcttagcagcacttacaagtatgtattatatgctacaactttggtaatgcatgatacttcttttgtacgaattgcactaatataataatgatcagtattggttggcgctaactgctagctgcagtttttttttcttcgcaactttgttttggatctcactgattatgaatttgtgtggcatttgctgaatttttccatgcctttgtttttatttatgtttgataccttgcatctcgtgggggttttggtgtaattttgcaagatcatatgtaacttgatctattaacatg

SEQ ID NO: 1652 - DNA, 4257 bp, Oryza sativa
  Clone ID: PAT_MRT4530_101498C.1
atgaagcgtgtgctggtggacggtggggccagtctgaacatcatctccccggctgcctttgacgcgctcaaggccccggggatgaagctccaaccgtcgctgccaatcattggcgttactctgggacacacgtggccgcttggtcacgtcgagctcccagtaaccttcggcgactccaccaatttctgcaccgagcggatcgacttcgatgtggcggatctcaatctgccctacaacgcggtcctgggcagacccgcgttggtgaagttcatggccgccacccattacgcctacctccagatgaagatgccaggtcctgccggtcccatcaccatctttggtgatgtcaaagtcgccctcgcctgtgcagaacagcgcgcggacaacttggcgatggccacggggccgcaggccccggaggcccccgcgtcccgcgcccccaagaagcgcctcaccttggccgacgaggaaggcgcgctcgtctccttcctgcgggcgaattctgacgttttcgcatggaagccgtcggatatgcccagggtccccagggaggtgattgagcaccgcctcgccgtgcgaccggatgcgcgacctgtccggcaaaaagtgattcatccggagtggctggcgaacccggtggtcgtcccgaaggccaacggcaagctgcggatgtgcatcgactacacagacctcaataaggcatgccctaaagatcccttccctctaccacgtatagatcagatagtcgactccactacgggtctcttcccgaggcatagaagcaaatcccgagaaaatacgcgcgatagagaggatgcgccccccaacaagctcagggatgtgcaatgtgtcgctggatgcatggccgccctgggtcgatttatatcaagactggacgagagagtgctgcccctattcaagctcctcaagcgccccgggccgtttgtatggacggaggaagctgagcaagccctcaatcagctgaaagcttacctcacttctccccctatcctggtggccccggggccggaggagccattgctactctacttggctacgaccccccacgtggtgagtgccgccctagtagttgaacgcgaggagaccgagcgggaggcgcgccccgggtcatccgcccctaacaacacgaaccggccccgccgaacggtgcagcggcccgtctactttgtcagcgaggcgcttcgggatgcgaaaacccggtacccgcaggcccagaaaatgctttacgccgtattgatggcctcgaggaagttgcgccattacttccaagcacatcgggtttccgtggtaacatcgtaccctctcggccaaatcttgcacaaccgagagggcaccggacgggtggtaaaatgggccatcgagctagctgagttcgacctgcacttcgaaccgcggcacgcgatcaaaagtcaagtcctggctgacttcatcgcggaatgggccccagtggacgaccatgttccgtccgaacccccttcctcccccgaagagaaagaggacccaaacgctgacattcgtggcggacactggattatgcatttcgacggctccctcacccttcaaggcgcgggtgctggagtcacactaacctcgccaagcggagacgtcctcaaatacgtcgttcggctcgacttccgagccacgaacaacatggcagaatacgaagggctcctcgcagggttgagggcggtagccggaatggtcatccgccgtctcctggtcctaggtgactcccagctggtcgtaaatcaagtatccaaagagtatcaatgcaccgaccctcaaatggatgcatatgtccgcgaagtacggcgcatggaacgccacttcgacggaatcgagctccggcacgtgccccggcgcgacaacatgctcgctgatgagctgtcgcgtgttgcgtcggcgcgagccccacttcccccggggacctttgaagaaaggcttgtccaaccatcagcacgaccgaacccctcgaggggctccaacgacataccctccgccccgactcctgccgacccgcgccccccggagcccgagggggtcgaccccgaccctcctccgcgccccccggagcccgagggggtcgaccccgacccccctcgccaagtcgcatggatgactgacatccgggcgtatctcgacggcaatactcatcctgaggaccgcgcagaagctgaaaagcttgcgcgcatctctaagcggtacgtcctcgtagaagggaccctctaccggcgtgccgccaacgggatactcttgaagtgtgtttctcgagagcagggcatcgagctcatagccgacacccatcagggcgagtgcggggcccatccggcctcacgaactttagtcgggaaagccttccgtcaaggcttttattggccgactgcattacaagatgcccaagaatgggtccggcggtgtaaagcgtgccagttccacgccaagcagaaccaccagccggcccaagccttgcaggtcatccccctctcttggccttttgcggtctgggggctagacatccttggacctttcaaagcggctcgaggcgggtatcagcacctgtacgtcgccatcgacaagttcaccaagtggcccgaggcttaccctgtcgtcaagatcgacaagcattctgccctcaaattcatcaggggcatcacctctcggttcggagtgcccaaccgcattatcacagataacggcacccagttcaccagtgagctgttcggcgattactgtgacaacatgggcatcaagttatgctttgcctcgcccgcccaccccaagagcaacggccaagtcgagcgagccaatgccgaaatcctcaaaggcctaaaaaccaagacatacaacgtcttgaagaggcacggggattcatggctcgaggagttgcccgccgtgttgtgggcaaatcggaccaccccaagccgcgccaccggggaaacgccgttttttctggtgtacggcgccgaagcggtcctaccctccgagctctccctgggatcgcctcgcgtcgcactgtacagcgagaccaaccaggatgaccttcgccgcgatgatctcgattatcttgaggaacggagaaggcgagcggccttgcgtgccgcccgctaccagcagagcctgcgacgctaccatcagcgtaacccgtcgccgcgccgagccaccgccaccgccagcttcgccaccgcaaggggaagtccggccgcctcttatttccccctctccacccctcgagcaccactcccaccgcacacccgaggccgccgcccctttcaccgcctccagccgcgtcgcgccgccgcttcggtcgacgtcgactcgcgccgttgcctccctcagctccgcaaggacgaggaggacctcggccgccgcccctcttcgccggaaatccgccggagctcctccttcctcggtcgccggtcaagggcgaccccgtccgccctccgtcctcgcaagccgccattgggcaatcgtcgtcgccgtcctcttcctccgcgtcggccgccgcttccggtgaggatctctcctcccttcctttttttccggtcccctttcttgccgaccgccgcctcttggggtgcgtcgccgtccccgtgcgcgccgctgtcctccggccacccgccgccgttccacgtcgccggctgctgcagccggttgccgcctcccccttgcccccttgccgcctcccccttgccgccgccgcgccatgtctcggccgagccggcttcatgccgtgcccgtgccccagccgcgccgcctcgtggccgtccgatcggctttgggccgatccgggccgtcggatcccgtggaccggcggtggaccgcctcggtggtcccggtccacggtggaccggcgcctttgtgccgctgaccgtcagagtcagtggatcagttcaagacaacaagctaccagctgagtcagagcaccttgctctggatcagagccaaagccagtttgttttcaaagaggaagcacctgcaacctcagacagtacgccaccaagtcttcagcagaccagcacagctaagtcaccaccaatcccagaggcaacaaatgctacctacagtggttatggttttcaagagcagtttttgcaaagtgtccaactatccatggaagatgtacgacagggcacctctcagagggttgttccacaagtcggtcagttcagttttgaggaatcaactatgcaactcgacaccgaagtcaagctagaagcaggacagtcatgccagtag

SEQ ID NO: 1653 - DNA, 219 bp, Oryza sativa
  Clone ID: PAT_MRT4530_101499C.1
atgctgaagaccttaagggaggacggggttgacgcgaactcggagcagtatcatcttgccaaagagctactaaggtcacgaacacgccgcaccgtcttcaagagattcgattcgaaggaaactcgactgaagtggctgcagtggtcgtggcagaaccgaaaagcaatgtatgttcatcgtctctcgctttacggcctcgccatcatcgtcagaagatga

SEQ ID NO: 1654 - DNA, 530 bp, Oryza sativa
  Clone ID: PAT_MRT4530_10149C.1
gatccccgggctgcaggaattcggcacgaggggaattgtatatagcatatgaaactaacctatgtgttttaatgcgttctaggatgtatagtccaattaacctcgcgatgcaaatatttttgagagttacaatgcacctagtctctttcaaatttgttctatatttccttgtgagaccacgtaggaatacttgttttgggtagttcctgcagttttctctattttgtactatgttgcatttgttttcttgtgcttcaattcaaacaaatgccacaaaccatttttggcaacaccctctttatcccccccccccccccccttttttcacagatgcagtaacaaaagccagccaaaaaatacgtcccactcaaggaccacctccaaaaatttatttttagagacgatcacttaagtcaattacatatgaaaatgatatcattttgagatgcaggcatgtaatatgtccgcactctatatatttttttaaaacacctaactttttcatataacgatggaagaataaaaacttt

SEQ ID NO: 1655 - DNA, 474 bp, Oryza sativa
  Clone ID: PAT_MRT4530_1014C.1
taaacttctgaaatccattccttacatacaacagataggtaatttactggttgttccaaagaacacaaccttagagtctaagtgtcaggattacggataatgcatatctcctattctacgacttatggaatacaccgataatgtataccttcacgtacacggatcgtttccatgtatatcgtttggaatttgttccaaattacggagaatatctctacgagtcaagcgatttcgaaagtcctactcagatccttacttgggggtaaagatgatacacggtataaaagggaccccagggagagatgcaaggcatcgaatttcattgccaacacacccaccatagtttacgaagccagagtacgcgaagccaagtcgccgcgagatctcgtcgaactcatcggtatctgttgtttcctcgttccaacgtaccccaatactcaactcatccggtgcacaagtatgactcgtcgacat

SEQ ID NO: 1656 - DNA, 480 bp, Oryza sativa
  unsure (1)..(480): unsure at all n locations
  Clone ID: PAT_MRT4530_101500C.1
aaatatcgaccggggggaagaacatggattatatagttctatttgaaaaaaaaaggtagctactaactagcaggtgggggcaaaaaaaaactatgcattattcgtactaatattacaaacacacaaacctatacgggctggcttaattagcaggaaaggaaaggaaaggaaacggttttagcacccatgtgcatattcttgaagggggggcagggcgcaaatacccttgggggcccaccaccttgggctgctgctgatgccccacccggccggcgtcgaaaaaaagggccacgggctccaactttggaaattttctgcagccggcctaattttttttctcctccggacaaacccggggagcctggtcaaaaaaaacaacgggctgggagaaaaaaaccttgcccgcctcaagcggggggccgttgataaaaccaacccctaaaattttgtngtaaccggtaacctttgcctggggcgggc

SEQ ID NO: 1657 - DNA, 258 bp, Oryza sativa
  Clone ID: PAT_MRT4530_101501C.1
atgagcctccgccgctgccaccgcaccgtcgagcaccgcaccacgccctccctgctcggcatgctcacccaggtcaagtgcctcgtcgtcgtcgagacccaggagatgtacgccgcgcggaggcaggccgaggaggaccgacgcgcccccaggcccccgctcatcgtctcccacacccgccgccgccgcggggagcgcccgccgcagaggcgcactagactcaagaatgctagcgacaaggattgctcaactcggtaa

SEQ ID NO: 1658 - DNA, 906 bp, Oryza sativa
  Clone ID: PAT_MRT4530_101502C.1
ctatgacgtggcacgcacgcatgcgccggctcggattctctggatcgacccacgttttcgtccacgcgtacggcaatggtggcctgggcatggccgctcgtcttcctcgtctcgtgctgctgttcttggacccagcggcgaatcttggttgctgcgaccactgacgccaatgatgttactgtcctcaatgcgctattcaccagcctcaattcgccggggcagctgcgcggttggcaggtgaatggcggtgacccatgtggcgcctcatggcagggcatcacctgctctggatcatcagtcacagcaattaaattgccgagcttggggctttcggggaatctggcctacaatatgaacaccatggagtccctagttgagcttgacatgagccaaaataatcttgggggtggccaaaatattcaatacaatcttccaaataagaagcttgagaggctcaatcttgctgggaaccagtttgctggaaatgtgccatactcaatttccacaatgcctaaacttaagtatctaaaccttaatcataaccaattacaaggaaatatgacagatgtcttttccaaccttccaagtttatcaacacttgatctctccttaaattctcttactggtgatctcccacaaagtttcacttctctgtcaagcctgaaaactttgtatctgcagaacaaccaatttactggatcaatcaatgtccttgctaatcttcccctggataatttaaatgtgggaaacaaccgttttactggttggattcctaatgagctaaagaaaataaatagtcttcaaaccgatggcaattcttggagcacaggtccggcaccaccaccaccaccattcacagcacctccaccatcacgcaaccgtaaaaaaagcccaggcagacactcc

SEQ ID NO: 1659 - DNA, 398 bp, Oryza sativa
  Clone ID: PAT_MRT4530_101503C.1
gaaagattgattagagagcaatgaacaggtatgcatatacgcacatattaaacgccagtacagacgtacacgtatagaccgatagatagagtctctagcccgagcattttaaaacgtacacatgaaagacgtgtagacgcagacacgcaaagccgcatgggcagagccgaatgtggccagctgatgcactgcacagtctgcagtgcgacaggatttacagtccttgaagttacgctctttagggacattaacggcacctagtcggatttcctcggcgagcctctggaacgcggcgttagacgacccggtctgatcgacggcctttctggacggcgccttgacgggcacggcctactgcctcggctttctccctggcttgccgtccccgctggccagca

SEQ ID NO: 1660 - DNA, 277 bp, Oryza sativa
  Clone ID: PAT_MRT4530_101504C.1
cccacattaaaagcttacgtaaaaaaagttcctcccaaataaaccccctaaaaaaataggggccagattttttttggatatattctttggccctgacaaaaaaaagccggccccaaagcgacgggttttttttaagaggaaaagcttggtttaaactgacccttttcacttgtagggggaacacaccaacttaaaacaccctggtgggttcccccagggggctttggaggtaaaggcccctaaaattttgccagttttttttaaaaagggacccggg

SEQ ID NO: 1661 - DNA, 562 bp, Oryza sativa
  Clone ID: PAT_MRT4530_101505C.1
ggaacacctccaccgttttggcggccgctctagaactagtggatcccccgggctgcaggaattcggcacgaggtgccgtggaatggaaggagaaggcagccgtggcggtcgcacctggtgggacttcgtgggtcaatctacagaggttgatcagtgaggtattctgttcacgtaaagacccgtgaatacctgagagtgctattactaccgtaagtatgttctgtacttcgatcgactcgaatacaacaaaagaggcgtcctacagctagatgttccacgttgtttgtcacatccatcatataccctatataatactccctttggattttaatagataatgttgttatcttttatatggtatttgatcgtggttgtcttgctttaaaattttatacgagtgccatttattttatcgtgacttgtattacatctaaataattttaaaacatgacttatattttttatattttctctaataattttgtaataagactaataattaaatgctatatcaaaagtcaatgatattatatattagagaaatagaggtagtagacagatg

SEQ ID NO: 1662 - DNA, 439 bp, Oryza sativa
  unsure (1)..(439): unsure at all n locations
  Clone ID: PAT_MRT4530_101506C.1
gcacgaggctcatggagtgcatcctcagcggcctcctctccgtcgacggcctcaagccgcactcggatgagctgctgctggttgctttttttttttacctcgccatttgatcgctgcacagagatcgaagggagggcctgccatggccgctcaacgtactcccgccccctctccgccctccactgccttctacacatcggctcctccctctccactcccccngcttttgcacccaccaccgcatcccccgcccggagaccggcaacgacggagggttagcttcgacgagcgaccgaccacngagatatgatatgagttcatctgcgcncttccctcacagcgtccacctgctgatcatcctccaaaacccggcggaatggtaaagccgcctacctcttgcgtccgcctgagggatgcagtcgctgaacatgtgttgctc

SEQ ID NO: 1663 - DNA, 261 bp, Oryza sativa
  Clone ID: PAT_MRT4530_101507C.1
ctcctataaccctacctacgcaagatccctgactctctccggctgatgactcggagccgaccacaagatgatgttgggactcacagtgcagcgactgcggctctacgagagctgcgccatgctcagatacattttgtcccacaacaatctgtacttgaacacatggctcatgcagaacgaggtgctgaactctaatgcggaagagacgctgactttatggaagaggacaggtgtacgaatgcattgcctataccaagatct

SEQ ID NO: 1664 - DNA, 1557 bp, Oryza sativa
  Clone ID: PAT_MRT4530_101508C.1
atgtcgctcatgcgaggcggtttcggtttctccccggcggttgcggcgctgtactgcgctgctctcgtggtggccggcggcctcgggagccggccggtgctcggctgctactcgcgcatcttcagcttcggcgactcgctgacggacaccggcaactacgtccgactgacggccggcaggaagcccagcagcccctacggcgcgccgccgtacgggaggaccttcttcggccgccccaccggccgggccagcgacggccgcctcgtcattgacttcatcgcgcaagagttcgggctggccaacgtgacggccattcaggtgggtgccgggccggccgacttcccgcacggcgccaacttcgccatcatctcctccacagcgaacaacgcctccttcttcgcccgcaagggcctggacatcacccccttctccctcgacacccagatgttctggttccgcacccacctgcagcagctcacgcagcagctgaacggcggcggtggcggcggcggcagcatcctgagcgacgcgctggtgtcgctgggcgagatcggcgggaacgactacaacttcgcgttcaacaagggggtgccgcgcgagacggtgcgcgcgttcgtgccggcggtggtggacaagctggcggcggccgtggaggagctgatcgggatgggggcgagggcgttcgtggtgcccgggaacctgccgttcgggtgcgcgccgctgtacctcaaccggttcaggggcgccgccgccagcgagtacgacgcccggacggggtgcctggcctggttcaacaagttcgccgagttccacaaccgggttctcaccgcgcggctcgacgacctccgccggctgcacccggacgtcaccatcgtgtacgccgactggtacggcgccatgacgagcatcttccaggccccaggaaaactaggtgagtgcaggggtagagccgtagaggtcaagcgaacatggaattcagcggtgtccggttcggacgcgtctggctcatacgcaattatgcatccaaattccaagtgggcggataggggcaccgtcacgccggggagggcgagggcttcatggatccccgtggcggcggcggcgggggcgtgggacatcgatgtcgatggtggaggcatcgagcgggttgagcggtggctccggcggcgtgcggcgaccccgttggcgttggagagcgagggggtgtcagaggtgtctcgcgacgcggtcggcgtggggaggggcgccggcgcgtcgatctgtctggagccggtcggcggtggggcgtcatggacccccgtggcggcgacggcgagcgtgggacgtcgacggtggaggcatcgagcaggattcacaaacgcgctggggtcttgctgcgggaaccagagcgtgccgtgcggcaaggcagggtgcaccgtgtgcgaggacccatcgacgtacgtctcgtgggacgggacgcacccaacggaggcggtgtacaagctaatcgccgacggggtgctccacggcccgcacgcctcccctgtccctctcgccaagacctgcccgcccacctga

SEQ ID NO: 1665 - DNA, 1166 bp, Oryza sativa
  Clone ID: PAT_MRT4530_101509C.1
gcacgcggctcctttactgtgaagcaaacccacgcatcttcagagaagcaaacccaacaaaaaaaaaaaaaaagaattttcaggttttcttctcgctttcaccggagaaggagaaggagaggaaggtgttgatcgaatcctcctccaatcgcgcgcgattcgatccccgttgctggccgctcgctcgctcgatccctcatccgatctgaatcccccgatctgatggcggccaaccccggcaacaagatccgcaacgccaagctggttcttcttggagatgtgggcacgggcaagtcgagcctcgttctccggtttgtgaagggccagtttgttgagttccaggagtccaccatcggcgcggccttcttctcgcaaaccttggcggttaacgatgagacggtgaagttcgaaatctgggatactgcagggcaggagaggtatcatagcttggctccgatgtactatcggggtgcggctgccgcgatagttgtctacgacatcacaaatgcggcctctttcacacgtgcaaaaaaatgggttcaagaacttcaagcgcaaggaaacccaaacacgataatggctcttgctggtaacaaggctgatatggtagaggcgaggcaggtgccagcagaagaggcaaagacctacgcacaagagaatggccttttcttcatggaaacatctgcgaaaacggcgatcaatgtgaacgatgtattccacgagatcgcaaagagattgcttcaaggacagcaggctcaagacacaccggctggaatggttctcaaccagagaccagctgagaggatggtgagcagttcttcatgctgctcataattcaagtgtggagtatgtgacaactacataatgccatggcctgaaatccaggagaagtgtgtatgcatcagagatgcacacaaagcttgtaaagtggctgctgccatcccagctgctgtttcttattttgtcatgttcgttctgtaaatgtgaatactagggtgtcgctgcagaaattcagatgtattactacagtgtatgctcttgcttaagtatttctcgacactgaaacagagtaaagcaaagtctagtcagattcgttttgtttgcttcaattcagatcatgcagtgagcttgcttttataaaaaaaaaaaaaaaaaaaaaaaaaaaa

SEQ ID NO: 1666 - DNA, 523 bp, Oryza sativa
  unsure (1)..(523): unsure at all n locations
  Clone ID: PAT_MRT4530_10150C.1
cgccttgcgtccgntcctttttcccatcgcnggggagaggctcgccttccgtctcctgncgcgcncacgccgccgacgccgcgacgcgncgcgacgcgagcgccntncgtgagcgcggtttgaggagaggtgaggtgnggtgcgtggcccttggactttcgnggcgaatccccgcgtgcgtgcgtttttgagatggtggtgcggcgcccgcccctgctgcggtggnggaggaggggacgacgactacgccttctactactctttcttccnggacgccgccgccgccgccgcgtcgccgctcggcctcggcgacgccgtcgctgtgtccttcggtggacggttgcggttgaggggaggtggtggggttggggcgtgcggcggcgcccccgtcgcgtccgggatggttggtcctgttgggggcggtgttgggggtttcggtttgtcgcggtccttcgtctcgttgctcccctcgctcgccgttctcgttggcggtgggtctctccgtccgtgccggtgccttcgg

SEQ ID NO: 1667 - DNA, 1310 bp, Oryza sativa
  Clone ID: PAT_MRT4530_101510C.1
atgaccatgcatcttctctccggccaacggctgctcctcccgatcccatgcggcgcctgctatcgctcgccgccatccccggcgatcaagccgtccccgcttggactacgcccattcaccaagtcatcgtcgtcgttgcccctgcatctgcatgcagtctcgcccgccaccgttgcaaccgacggctcctccacctccgcgcagccagatagttgggcagagttcgcgtcgcgggtgtccggcgagtgggacggatttggcgcggagttcacggcggccggcgacgccgtcgagctaccggagaacgtggtccccgaggcctaccgcgactggggcgtgcaggtgttcgactggcaaacgcagtgccccactctcgccgacccggccgcgccgtgcgacctccactacaggctcgtccgcctgctccccactgtcggctgcgaggccgacgccgccaccgtccacacctcgcaccagcgccacgcctcctccgcctccgcgttcgcctactccgccgccgggtcgtacgtcgccgcctggcccaggggccccgcgccggtgctcgaggtggagcactgcgtcgtgcacccggacaaccgggaggtgagggtccgcctcgtgcagacagtggcgctcgccaaggaggcgcggctccgcggcgtcaaggtgttctccgagcagtggtacggcccctaccggaacggcgaccagctcggcggctgcgccctccgcgaggccgcgttcgccgccggggagaagctcgccgcctccgacgtgaccgggcagtggcagagcgacgccgcctccgccgcgaggttctccggcgagctggaccccgagacgggcaagttcgccgggttgacgcctgatgagcccggtgagagattgagccgagacgacggcgatggaatcgtgacgctgccgaagcagctgtggagctcgttcaaggagaatggcaaggacgagttcgtgtgcgaggtagggtgggtgctgggccatggcagcgccatcacgtcgaggctttcaacagagtacacagccaagaaatgagagatagtcgtttcgcgcgagtcgcgtgtgtcggagggaacctgatcaggatatcaaaattgtcaggttcgatgatttttatgtagaatagaattatagccatacacaaatgtcttacacgcccgggtgtatactaatcaaattggcctcccgaaaggagtatacatgagtacatatactgacgctgttgcctgcatgatctagctaaaagtaatacagcacgccgctttctgaatttatagggaaaaaaaaaaaaaaaa

SEQ ID NO: 1668 - DNA, 479 bp, Oryza sativa
  Clone ID: PAT_MRT4530_101511C.1
gccgccctttttttttttttggtaatgtttctggaattgttgatctgcaagtgagggtcagccagagttggtagacactgcacggccactgcctccctctcctcacctaaccccaccacagagcgggatgagccgcaggcaggaccagccttgacgccacccaattgtacccctccctgcactcctgcaacgaacaccggcttcaagccggttggcagtgccaaccgagcagacagcagcagcagcaggcttgcttgcacccaaagctcggcaaagaatttgacagcaaaagctgccgacgcaccctgtgccactcagccacacaagctggagcagcatcacccaggcttggcgtgcttgccactgcccacacacaccacgtgctgtacaacacaacacgtcagcgtcaaagaatcaggtctggacgctttccacagacatgtcgttttgttgcagccccaggcgagcgagcaaaacac

SEQ ID NO: 1669 - DNA, 141 bp, Oryza sativa
  Clone ID: PAT_MRT4530_101512C.1
tatccaggttcaattgcttcctttaagaccatgctatgggggaaaaatctggcatgggcgacggccatagagatttaaaggcttaaatatggcaagctccctgcagatgtacggtcatcacctgggcaagctaatcacagg

SEQ ID NO: 1670 - DNA, 887 bp, Oryza sativa
  Clone ID: PAT_MRT4530_101513C.1
tttttttttttttttttttttttttttttaaccgaggaaacacaacgccggttcatcaccggcgactcgcaaagttattagtcggatagtctgtagcatccaccgtacatgataacgcacgcggattaccatctttacaaatcaaaacatgaacacccccccacagtctacagatgccactcaccacagataacgtacgagcttatttcccacggcgtggccgcgtcactcgctcacgccgcggcggcgcccgctcctgcggcggagcatttgtcgcggatggcctcgagcttgtagggcgcggcgtcggtggccagccactgctcgacggtgaacagctgctgcgcgcaccccttgtgcgcgcccgtgacggtgacctcgacgtagttgcagtaccatccgtggtgcgggccggtgccgtcggacgccacccgcatccagcacggcggcgcggccatgcacgggccgcggccgctgaagatgtcgaggttgccgcgctcgaagtaggagtggccctcccccatcaggccgccccacgacggcaggtccgtgatccccaccccgttgccgtccgcgccggcaagctccagcgtgatgttcgcgtccgtcccggccttccagatcgaccccgtccggatgtacaccgtgtacacgcactccatcttgtccccgccggccacggcgccggcgccggcgtcggctcccctcaccagcttgatgcgagtcgggaggaggtcgcggcgcccatgcgctggcacggtggcggacgacgcgacggcgaggaggaagaggagggaggcggcgaggttagccatggatccgatccgaatcggatcgagggagctagtggcgatgtgtgttgtttcggctgcagcccggggatccac

SEQ ID NO: 1671 - DNA, 195 bp, Oryza sativa
  Clone ID: PAT_MRT4530_101514C.1
atggcggtgcgggatcggaggacgaatgatggctcaggcagtcaggctccttcaccggccggggagaagaaggagaaggaagggggtgactcgtgggatccatgctggcaagtcatagtggcacaccacgtggaaatcgagccctcgcccatcccaagtcaagtattgttcacactaggagaaaaggaaaaatag

SEQ ID NO: 1672 - DNA, 199 bp, Oryza sativa
  unsure (1)..(199): unsure at all n locations
  Clone ID: PAT_MRT4530_101515C.1
gcgggtcaagctcttggagtccaatactatgaggtggttgcgaatgtggtgttttttgttttacaccgcgcttccttgnccatttcgtggtaggactatggctgatgcgtaaatgctgtctattgcatggccaaataacaaaatcagggcaaacaagaggccaggtatctcccattgcggaggttgaagttcgggaatg

SEQ ID NO: 1673 - DNA, 1047 bp, Oryza sativa
  unsure (1)..(1047): unsure at all n locations
  Clone ID: PAT_MRT4530_101516C.1
tccccgggctgctggtttcggctcgtggatcgaaagtaacgaatcctggaattgcatgaatgcggatgtgccggagtgacataaaagaaaacgatctgaaagaatgatacaaagctcgcgacatatactggccatgcaagtaagcaacacttacaggccttagctcagggaagaaaataattcaagattttttttcctacgtcaaacagttatccacctgtactagcacaacagaaggaaatgaatagaacaaaagaaatagacagagaaaactgaaaaatgtgggagaaaaagaaagaaagaatgcactattgcttattatacaatgatgatctgcctacaaaaagtatagcttacaagctaggagctgccatgggatctgaaagatgacatggaatgcgctgagactgaggcagtagggctgtttatctccctgtctccattggcagctctaccctttccactaatcatgctgacaacctcctgagaaacatccatgaaccaatcgtcacccgggaggacactgtcagggttcattccagtagctgaaaatgcagccattgctctatcaataatatccaatatgacttgatggacgtgcctagacaagaatcgaccttgtccaaagataattacaaattgcatatccaggtagaattgctgaaggccaaggggacccaaaggcttcggtccctgttcaatctcttcccagaaggcttgatcctctgagagccatagtatgactgtctcagtgagtcgcatcattagcagagtagcaaatctttctctgccgacaaacatatctgccgcaatactggccatcctatttagctttgcatacagctcctggaaaataagagatggggcccattctggctcttcaacagtattgtccatgctaatatacatgtctgcactgagatgggtctcaccttcatctgtaaatataagttcaagagcatgctgcctgcangaaactatcccttaatctgtccaccatgcgttgtaatttccgtttccattcaccctcgtgccgaattcctgcag

SEQ ID NO: 1674 - DNA, 1020 bp, Oryza sativa
  Clone ID: PAT_MRT4530_101517C.1
tatatccaagcgtaggagtgaacgctaaaaggaaattcccagatccatggacacctccactctcctcatcgctctcacgctcgtcctcctcctgctgctgctgaccgcacgacgccggcgaagcgggaggctgcggctgcggctgccgccggagccaccgggcctcccgctcgtcggccacctgcacctcttcaggaagccgctccaccgcaccctggcgcgcctcgccgcccgccacggcgccgtgttccgcctccgcctgggatcccgccgcgtcgccgtcgtcgtgtcgtccgcgcccgccgccgaggagtgcctcggcgcgcacgacgtcgcgttcgccggccgcccccgcctgccgtcggccgggatcctgtcctacggctggtccaccatgggcaccgccgcctacgggccctactggcgccacgtccgccgcgtcgccgtcgccgagatcctctccgcgcaccgggtgcggcagttcgccggcgcccacgcccgcgaggcgcgcgccacggcgcgacgcctctgccgcgcggcgtcgcgccagcgccacggcgccggggcggctgcagggcgcgtgcgggtggagctcaagtcgcggctgttcgagctgctcatgaacaccatgatggccatgatctgcgacaagacctactaccgacgacgacggcgaggtgagcgaggaggcgaggtggttcagggagatggtggaggagacgatggcgctgagcggggcgtcgacggtgtgggacttcctgccggcggcgctgcggtgggtggacgtgggaggggtggggcggcggctgtggcggctgcgcgagagccggacgaggttcctgcaggggctgatcgacgaccagaggaaggagatggagcacgacggcgacgggcgtgagctgccggcggcggcggcgaggccgaggagcatgatcggcgtgctgctgtcggtgcagaggcaggaccccgaggagtgccccgaccagctcatcagctccttgacagccttaatttttagca

SEQ ID NO: 1675 - DNA, 523 bp, Oryza sativa
  Clone ID: PAT_MRT4530_101518C.1
gcaagttgatagtgctgcggtattccataatgcaagcacacggttctgtgatggggctcgctttggtctaggtgctgaggttggcataagcacagggcgcatacatgctcgggggcctgttggcgttgatggactcctaacaactcgatgcattttacgaggaagtggacaagtagtgaacggcgacaagggagttgttttcccccactcttcaacatctctggtttcaggtgaagtggcttgtgaaggagctgttgtagagcaattttttgcagacgctcaccgtgctcctccttgagagctgcttctctgagcgtggcgacgctggtgctttccatgataaagatctggctggtgtagggcggtatgctgctgaagccggagacatgcacatcgcagaagcctaatcatcagactggagcctcaactgaaccatcccgtatctgatctgtttagataaagacagttatattagaaatcgccaataagtctcggacgaaaattcccagcatttcacaactta

SEQ ID NO: 1676 - DNA, 114 bp, Oryza sativa
  Clone ID: PAT_MRT4530_101519C.1
ggatgggagaccaatatttcagagttttcagcaagtaacatgctcacggactgccgtgactggccgtacatcacacaaaaagagaactcaattatatccttgaagggtcagtaa

SEQ ID NO: 1677 - DNA, 2595 bp, Oryza sativa
  Clone ID: PAT_MRT4530_10151C.1
atggggagagtggaaaggattttgggtggttacgaggatcctgcacatcaaattttcttgcacgcaccagaagcactaataaagaacagggaggccgaagcttgggagcgacgaaagagttggtggaggcgcagaggaacacagcagcagcagcaacaacaacccagaggaaggcccagaagaagaaaacaagaggagaaagcacggaagtggtgcgacgacatctatgggttccaagccttccttgggattgccatctacgtcgccatgtggttgggcaaggtcgccgctgtggccacctgcatagctctatcctcgaagcgtctcgagaagcaagactatctggaatccggggacaatgagaaaggtgaccaccagaacatcaggtggtccctcaatatcttctacagtctggtgcttgcccagggaatcatcttcatctgcatgctactgaacccactgactgtttattttgtgcttaaggtccgaaggaagtacaagctatttgagccctctggtctcaagataatctaccgttacaagaagtacaattacctggggttcattgctggcaatgtacgtgccaccctcaacatgcacctggtcacctttgccaagaatttggcagtgtccaacacgatcgatgaccagttagctggtgttcgggccatggaccgcatcctcatgtcagtggagtttagaagcctggcccttaggaggcttcgagcttccatggaacccgacgatttggggaagctgatcgatatgctaggcttcgtcagtaccatggaggaggaacagaatatcatcagaggccatgctgcaagagttgtgctcaaattcagtcctgaccttatgcttcagagttatcctcaaatcctctacctcatttcctcttccctgctcagcacatccaacaagagggtgtgcaagtgcaacatggactctgacttagtctggtttggcctgcacatcctggacaagctcacggacaacccagaaaattgcaggaaagccaaagacgatgacagtgatctattattgcccatgattatagacctagccaacctttgtggacatggtcatggcaacagcgtaaggagtaacactaccatttctgactcttggattgaacaagagattattcctttgcttcaaaaagaagatgatattcctcttcctttcatcaacaagattgaccaagaaattattgttggcatggcactcaacatcttgagcaagctgatcgctgtgccgggtgaggctggggaaaaactaaggaaagaaacctcaaaagacttgcacttcctgacaaacactgggatgatcatggagcatgtcgaagcaacaagagtcatatcatgcttagctgtggataaggaagcacggcaagacattggcaagttgcctgagatcatcaagaaacttaaggattgtctactttccaagacaccatatgtaaatatgacgaaagtagctgccaagttgttgcttatggagtacaccagtgaggaattattaaaccgtgttctgcttttcatcgaggaaaatcgtactgtagaagatcaaagcttttcactaccaatttcagccttcatagaagaactttatcttgatcaacttccccagagcgtggtacagagacttgatctggaagatgtactttcctcgccacgggtgaatcactctgaagcagctgctaaagcattaattctgctcactacaggatgtgaaaacaatgttgaagctttcctaaaagggatcaatgaaaaggagttgaacaagatagtgaatgtgctctcttcagaagacagagataaagaaaagagaagggcgctggcacaatttgaaggacgacatcatctggacccagaaacattgcgcatagtcaaaaaaataatcttggctgagggtgaagaacaggaaacaagtatgcatgcaaaactcctgcagaatttgcgtgcctactcaggaccaaaagaatttgatgagtacatgaaattaatagatgcagcactgccaaaggtgctcaaagcagtcgtagatgcagtggcgactttggaggatccatcatcatcagaaaatctgaaccatgtaaaggatgacctgtggatcaaacaaggcaaagtactagagagctttataggcctcgcagtgcagatttgtaggtccccgaacgcaacgagtgatttctccactgcactaaaagatgccaatcttactgtgcacacattcatcaagaagcttaagaagatattagaagtctacaggtctccaagtactgattttccatgcataagggtatccacacttgagttaattacttggatggtcgaagaaaacagcagctacagggaaatactcctaaaatgtggaatatatgaggaactgaatgaagtggcaaggactgctagaaaacttgagagcttcaagctgtttcactgcggtgttgggattcctacggatggtccaattgaatgcatctcttcccgcgcaactgaattacaagaaaagcttcagcaaagccccaattttgagaaaagatacatctgctatggagaacatgcaagcagcatatctgttttaattgcttag

SEQ ID NO: 1678 - DNA, 296 bp, Oryza sativa
  unsure (1)..(296): unsure at all n locations
  Clone ID: PAT_MRT4530_101520C.1
tccttgctattgttgcatgcaacgcttctgcacggnttgatgctcttagtcaaagttatagacaatatcaactacaatcgcattttctgctacagtaacaagtgcttaacccatncantgagttggggggggggggggatatcatattggnaacccnnttntggnaaccagttacgtttgaattgataaacaaccaagttatgttatttttgtgtngacaacatcttaggttggttttgcaacaatttttattataggccattagtagtgtttatgttattgtttataactacagt

SEQ ID NO: 1679 - DNA, 377 bp, Oryza sativa
  Clone ID: PAT_MRT4530_101521C.1
ggcccggggaagacaagtagacaaattgctcaaacagaatggggggaaaatttgggaagacagatcggggagatttttttatagttgccctttcacaggacacaagggaggggggctttcgtccctttaggagaagggagacaaacaagcccatgttggcatgaatgccttaattttaaggattggttttagggatgcaaaaaatttgggggttttattgagtcctttaattgcctttcctaccccgaccggggaaaccacgcccgccaccttgggcaccacctggtgcttcttccctaacttcaccggctttgaaggggccaccaccctttttggcattggacttattgccaatttttatgtcctccgggaaagga

SEQ ID NO: 1680 - DNA, 143 bp, Oryza sativa
  unsure (1)..(143): unsure at all n locations
  Clone ID: PAT_MRT4530_101522C.1
ncttctccaagaagtaggcttcgtccaagccgtcgaggatgcctgtggagtgttgttcccgctgcagttcaaacaacaaaactcattggcagtcaaccaggagttgaatggaattaatgaactagaagttaaaaagaagaagg

SEQ ID NO: 1681 - DNA, 218 bp, Oryza sativa
  unsure (1)..(218): unsure at all n locations
  Clone ID: PAT_MRT4530_101523C.1
ccngggatcttagggatggggcngtaacacattttttttttttttttttctttttatctaccatattttattaacatcatatccacctaaccctcaccaaaaaatacaaactaaaaaactctctcactctcaaagcccaaaaacaatctaacccctcttatcaaaaataaattcctcacctatcctacaaaaacaaaatacgggggaaacaagcaccc

SEQ ID NO: 1682 - DNA, 1448 bp, Oryza sativa
  Clone ID: PAT_MRT4530_101524C.1
gaatcggcacgagcgcgcccgtgccgggcgcatcgatcggcgccggcagttttcgaatttggggtttgagaaggttgaggaggagttgggaggttgagaaggcggcggctgattcgttgggttcgatcgggctcatggcgacggcttccggcgatcagtcggcgggttccgcggcgagggcgtcgaagctgaggtacccgctccggtcggcgagccgggggaagggcgccgccgatgctcctccgacgagcggctccgtggcgaggagaccaaaaccatctttggatgtcagcaagagcgtttgtggtcttgatctttcatcggtgaaggataattcagccaaacctccacggaggcactcaatacagaccaagccaggtgttagccccaggccaactcctacaggaactatcactcctgtgtcattggttcgttcaaggaggtccgatagtcaagggaagtttgataccccgatatcagaagtttccatgtccacagcaaggcgcaagttcagcactctgtcctcaacctcatattggatgacacaaatcaggcttgcagaggctgcttccaagcactctatatcgttgggcttctttaagcttgcacttgaatcagaatgcgagcctctggatcgtatgagagatgagctaaaggcttatgttgtccggcatggccttgcaacagagttggaggaaccagtgaaggatattcttcaggtttacaatatcgtggaggatcttgagaagctaaagatcactgtgaactcttcagaacagccgaaaaagtctgacaaggctgctcatagtgccaccaatgtgtcaccaaagggtaatctgaagccaagatcgctgaattctgatgcagctcaaagtaaggaagcagctaaaaaagacaacattcagaagaagcctgatgcaaaggttagaggctcctacaaccggaatcctgcaaaagaagccatcaccaagaatactggtaagaaagccaagaagcaggtcaaggggcagaaggaagattgcaatggaggcagcgaggctttgccagttggtacagagcaagaacctgttgatgtggtgaaggaggtgacaaatgaagataaggagaatatgggggacagtgaaatgccaatggatcttggcatagcccaagaaatctagaacaaccaaaccgacttcagattcaaatctttttatcgctggatatgaagtagagtgtgtggtgcttgttttttcccctcatttgttcatatatcgctggagcttgccttattatcaaaaccataaagaggtctttaagtgtgtagtatggtttgcagggtggatgtttgctttattatccctttgttaagtttgcaattctgaattgtccagtcatgcatctgaatataattgaattctttatttgtgtgataaaaaaaaaaaaaaaaaaactcgaactagttctcc

SEQ ID NO: 1683 - DNA, 1398 bp, Oryza sativa
  Clone ID: PAT_MRT4530_101525C.1
ttttttttttttttttatctccttttcgttttccagtacatgataacacttgtaatagctgtgatgttcgacaatgatcaaaacaaagcccaaagatatacagaaacaaataggtacaacaatcagaaaagcgttgcattctaaatcacaacccatccaaagtagaaatgcagctgatgtaaagatactaagtactaaacaataggtgattgaatgttctgttggtttgcttgcaaaaaaaagaataggtatggcagaatcttatcaaaatgtgaatatgccaaaaaactgaagccgtcacacaatcttcctactgctcagccttcttcacctcttccgatgactcgggttttgttggctcaaccttcatcacctcttcccattgcccatctgatgcttgcttccacagagttatgttgttctcaccagcagctacagataatatgtttccagtcaaggaccaggaaaccctccaaacaggggacccgaagtcgtgcatgacctttccctcccacttatcaccaactttccctctactccaaatgacaaccttcccatcttgagaagcgctggcgatggtcgccttagctaagcccaacactggtgcccatgcaacatctctcacacagtctgtgtgaacatctgaaggaagagcactctccagtttccagccaccattgacaaatccccagaccttaacaactgagtcaaaaccaccagagacaagcttataaacaagctctcctgaaccagccagagaaccaagtgctgttgctggagcccaggagattgctgtcacaccaacagggtgagctcgctcaatccttgcagtgtcccatcccccatcagctcgcatagtcatgacagaaatggttccatcagaagacccacaggcgagacaaagaccaacctcatatggggcccaagcaatggagttgacagaggacttgtggtcagtaaatacatgggcttgagaccagtggcctccagcaccctccttccaaatgatcacacgcccatcatagctgcaggatgcgaggatagtaccatacttaggatgggcccatgcgacacgccacacagggccatagtgcccgctgagtgttgcaaggagctgggatggggcagatttgccgcctatgctggagatcttgacagtggagtctgaggaggcagttgcaaggcgcttgccatagtagtcgatagctgaatcatggaccatgtccttgtggtccaactctattttcttcgatgacatggttcaaagctgtagtgtgccacaacctctaagtcctccacaattcaggatcccctcccctgccctgctctgctcgccggatggagatcggcgcccctcccctgttcagccgcgactcgtcttggcgcaaggagcggagg

SEQ ID NO: 1684 - DNA, 2497 bp, Oryza sativa
  Clone ID: PAT_MRT4530_101526C.1
gcccatccccttcagcggggggaggagcagaaagcaccagtctttctctttctctttcccttttgctgctgccggcgaagacggcggcgatctgagcgccgggttgacggcggtgccgcgggggaggcgccatggcgaggaagcacggatggcagctccccgcccacaccttgcagattgttgcaattgtggtattcttccttctggtggtcgcgttctatgcgttctttgcaccatttcttggaaagcaaatccttgagtatgttgctataggtgtttatacccctgtggcatttgctgttttcatcctttacatccggtgcactagcattaaccctgctgatcctgggatcatgtcaaagtttgaggatggctttattaatgtaccagccaacagtgatgggctgcaaggcataaatttgccccagaaaggcaatagcacaatcggcacacagtctccaacatctacttgtagaagctctcttgatggtcattctaatcagcgaggtttgtctacaagggacgcaaacgattgccggaagcctgatgagtcagaacaagcagctaatggtgaagaagctttgttttgcacattatgcaatgccgaggttcgcaaattcagtaaacactgcagaagttgtgacaaatgtgttgatggatttgatcatcattgtcggcttgcaattgaatttggagtgggcattgctgttattgtactatgctttgttgataagaatgcattgagcaacattcaggacaagcttgggaatggcatgactcgtgctccatttgctgttatagtgggtttatttacacttctttcgttagttgcctgcatacctttaggggaacttttcttcttccacatgatactgataagaaaggggatcacaacctacgactatgttgtggcaatgagagctatgagcgaggcagcaccagaggatgatgaagaagcacatatcacctactcaccatcaaattcagcaacaacaggattcagtgttggaagctcacttggcctccaccacaagggtgcttggtgcacacctccaagaatatttattgatcaggatgaagtgattccacatttggaccctgggatggtaccttcaacggttgatcctgatgctgctggatatgccgaaagagcaaacaaatctaagaagcctgtcaaaatcagtgcccggagccttgcaaagctagatagaaatgaggttatgaaagctgcagcaaaagctcgggcatcatcctctgttctccgaccagtagacgctcgccgtggtcatgaaggtgatcttagctccagcggaaatgccagtgttaggagtagcatgagtgttgactacagcggcacaaaggaatcaagaggtgagatgagactgtctcctcttcagaactcatacccccaaagccttgcaagccaggatgactacgagactggcacacagactgcaagcagtttgagcagcccggttcacatccacaagcttgcctctcattctcagtttcatgcacctcctcatcaacctccaccccctgaaaggcctgtgccggggatagtgccagggatagtgcggccgcctgttcctaccacacagataaccaacccaatgttccagtcagccacatcttatgttcgggagaaccggagagcctctgttgtctgggaccaggaggctggtcggtatgtttcagtgcctgcgcagacaagggcagttcctggtcttgatctgccagcaagaaccccgcgtttcttggcaaatccaactggtgagtcaagcaaccatgggaaaaatcttgcacctgcaaacgcttcttcctcggcaatatcatcagggcagccatctgagagattgacgtacactgggcagtcgatattctttggcgggccaattctgagcacctcaggtacgaacgctcagaggagcgaagcgggcacaagagcacgacctgatggaagtagtgatcctcctaatgccttccagcgtgatacccggggcgagagagcacgcacgggctccttcccggtgtttgctcctgggacttttcagaagaacccaccatttgacaagtgatttcctgttcttgatgtcatctctgctcaagagcttccatgacaatagaatgaatgatgcatctgcacttggatagttcagatcagttgaagaggctgcctcttctggtgcagccacaagaagtagcaaaaaacagagagagagaggatgatttttagaatactttagagaaggttgctcaaggactaactttgttcaatgttcagagagtgacattcactgactggtgcgcgtgtgttttgtttgcgtgcgtgttaggaattcagaaatttgattcgtgacaggtggtaggagagctaattgttcctgatatgaaatgttgatcatctccctccagttgggcttcgtgcgcgctggagatgtttggagtgttctttgcagttgctgtttattcatctaaaacaagtgcctgtcccttc

SEQ ID NO: 1685 - DNA, 257 bp, Oryza sativa
  Clone ID: PAT_MRT4530_101527C.1
ataggatcaatttattttttttaccacaactttttatggatggaattgtgttttaatactttaaccccggaacacaaaccaacgacgatgtcttaaaaaaaacgcttgctttgccaccatggctggaaagctgagctgagcctctaacacaaggaacacgaaatcactattaaccaaacggcaacgagcgaagaagatacagggtcttttttgactgaagatacacaaagaggttcggtttctctgtcccggggttt

SEQ ID NO: 1686 - DNA, 561 bp, Oryza sativa
  Clone ID: PAT_MRT4530_101528C.1
atggccggcggaagcacgaatcacaagctcctaactgaagccgcagttgggggagggaggaggaagaaggcggcggcgccgcacggacggccggcgagctctacccccgcgcaggacaccggcgagctcctccccggcgtgcggaccgccggcgagctcctccccaggcgcacggactgccggcgagatccacccggcgcgccgacgctgacgagctccttcccggcgcgcggacggccagtgagctcctccccggcgcgcggactgccggtgagctccttcccaggcgcgcggacggccggcgagctccacccccgcgtgcggacgctggcgagctcccccgtggtgcgcggatggctggcgagctccacacccgcgcacggggtgcgcggatggcatgcgagcttctcccccgcgcgcggaccgccagagagttcgcgggacggccggcgagctcctcccccgcgcacggatgccggcgagctcctctccctgcacacggacggccggcgcactcctctccatgcgccgtcaccgtcgccgccgcccccgccccgcctc

SEQ ID NO: 1687 - DNA, 669 bp, Oryza sativa
  Clone ID: PAT_MRT4530_101529C.1
atggagaggagtgcgccggccgtccgtgtgcagggagaggagctcgccggcatccgtgcgcgggggaggagctcgccggccgtcccgcgaactctctggcgccatccgcgcaccacgggggagctcgccagcgtccgcacgcgggggtggagctcgccggccgtccgcgcgcctgggaaggagctcaccggcagtccgcgcgccggggaggagctcactggccgtccgcgcgccgggaaggagctcgtcagcgtcggcgcgccgggtggatctcgccggcagtccgtgcgcctggggaggagctcgccggcggtccgcacgccggggaggagctcgccggtgtcctgcgcgggggtagagctcgccggccgtccgtgcgctgggggaggagatagcttacgacgacgacaacctctgaccatagccaacaagcaggggctccttaaacaatgcctcatcatcttcgccgccacgggcgagacagacaatggccatgatcggctatccccagtgccccaccgcgtcgttatcaccactatcaacatcaggcgcaaccaccgaccctcctgcctcctccctctccacgagcacgacgacggaacaacatgtaggggacggagggaggcaccaccacttccacctcctcgacctcccccaccacggcagtga

SEQ ID NO: 1688 - DNA, 268 bp, Oryza sativa
  unsure (1)..(268): unsure at all n locations
  Clone ID: PAT_MRT4530_10152C.1
gacggcgtcacctcgatctcctctctctcctggtcgcgcccggcgcctctctcctcctattcgccgtgctaatcgaagaccggcgactgctgcactttctcccgcgggcctcgctgccgctccacaccctttccctcggtgtttcgcctccgcgccgtgttgtctgtagcctcncctttgggggggggggggccncccccttttttttgganatgaccgggagcggcctcttcgcggccggcgccgtcggggtggcggtggaccccgg

SEQ ID NO: 1689 - DNA, 346 bp, Oryza sativa
  Clone ID: PAT_MRT4530_101530C.1
gaagtggagaggtagcggccgcccctgggtggtggcagctgacgtggaggccggtgagatcgcagcagagggggccgtggtggtggtggaggaggctcgttggccccctccctctcggcgaccctcccccttctcctacagatccagagatggcggcggtggagaagactgcgggcgaggtggtggccgacgcagaggctggtgcggcgaggtggtggcggcggcgacggtggtggtggaggcttgcgagcatagtacaaaaaaccaggccagagggacggtctttttgctaaaccgagccgccaaggttgtgccagttccggtttttttccagttcaaccgctag

SEQ ID NO: 1690 - DNA, 3761 bp, Oryza sativa
  Clone ID: PAT_MRT4530_101531C.1
tttttttttttttttttttctaggaaaaataccctattcgctcggctctgttgacacagtgtcggaacaggtcaatatacgctcagctgacgaaacatctcgtcagatctgcatttttttttttttttttttttttttttgcttatgagaaatagcttcatcaatagcgcttttcttattacgcttgtagttaccagcaatccaggagagtatccgtggattcatacaggtgatattatgcatattaaatcaaaactgcgtagcgtggcccaggtttctcaacgggaatagcaacagcttctatatagaactacagattggattcatctcgctgttcgaggacgatgacgcagactggtcgaaagggtttgccacatgatggagttcatatctggctgttcgacgaagatgatgcagactggtcgaaagagtttgccacatgatggctgaggccggtgggaagtggtggcttgttggccgtcctatcgttctctttggcttcgtcgatgtccttctggcttaggaagcttggctggttggttgatgatagcagcctcgcccacatcctatcagtgatcttgaccttgttccgtgtggatgtcaccctatagaaaggtatgtaggcatgtctgccgttgacatttccaacagtgaagctatagccggccattgcaccatgaatagcactgtgggccagcagcgtgcagtagacattgtctgatgcattgcttggaatagctcggatcatgtaggtaggatctatatatttaatagtcatctccatctttttgctcttgaagtggtcctttatcttgtgagtcagccaaagaccaatatcaagcagtagcttatttcctgatgcatcttgctgctcagaagtagataaacttttggctataagatcctgccctgctccctcagcaacaacaataaccatgtgcttgttctctttcagccttctctctacatattgaagcaacccaccttcaccatccatataaaatggggactctggaattaagcagcagtccacatctcgacttgcaagagtagcatacattgcaatgaacccactataacggcccatcagttttactaagcctattccattctcagcactgcaagcttccacatgagctgaatcaatggcacgctgggcctcttctacggccgtatcaaaaccaaatgacttgtcaatgatcgctatgtcattatctattgtcttgggaatcccagcaacagaaacctttagcccacgttttcggatttccttgaagatctcattatgcacccttctgtgttccatctcctccaatgatatagacctgattaattccacgatcctgaatgttgtcaacaatcttttttgtatcatggccacctcgtgatgtgccaagaactgtcccacccctcttgtggatgtcatcgacactctttggcgtcagagtaaggtaattgctagaatcccacccagaagcccttgtatccattctgtataccatagattttgctgacattatacatgtgcgccaaaccacagacgagctctctgatgacagtgttaagaccagggcaaaggcctccacaagttacaatgcatgctttcacttcatctgactcaaaataaaccttctgacgaggtccagcacgacggaagtgaaccccccgccggctgttcttctgaacgaccaccttttggggtacagtgtcatcttcattaacaaaatattgcttgacagttgaataggctggatgatcttgtagtggattgggataagtgggggcatcggggaggtggtcgacgaggtgcggcacgtcgtcgaggacgtagccgaagtccccctcggagatcttcacgtaggcggcgtcggcgaggctgacggaggaggcgttgcggagggcgcggaggttggggtaggagtcgcgggagatccgcacgcacgtcgcggagaacggcagcgccgccttcatcgcgtgctccggcgccgcggggggaggcccgctccgcgcccacggatcctcgtcctcctcctcctccagccggcgctgctcctcgtcgtcgtcgtccggcggaaggatgatgtgggaggacgccatgagaagagcaagtggtcgggatcggaggaactcgctttcgcttcgtttcgcggcgggtttggggaggcgtaatcgaggtttagcctgtttctttaggccttcatttaatcccgcatcgccgcccgccatgtcgtccacgtccagaagcaaagccgagtcaattcccggcgtcgcgtaactggcttgcgccgcaggaaacgaaagctgacaccgatgaataggcaaatggcttaaccatgaggccataacatctgattctatattaaaatgtaaaacaggaaggacgatattggcgtgcgtctgaacaaaaacgcagcatgccacatcaccccatgatgccaatgtaagcggcgaatcttctttgcagttgaagaaatgtcatttaaagtgatctcctcaacagttttcaggaagtactcaataggtttcctttcaccataagtcagtacctgtcttccaatatcttcagaggccacgattcttgattccaagtccatcagaactgaagacttggtagcctctttagcacgatcaagttgttcttgtgtaacttttccaggagttgcaacttcatggagttcccttgctgccaaatccacagcacttgatacaaaatctgggttagtggttgcatgtattccaaaaaggccagaattgttgtaaatactgctgaaagcagagaatgattcgatctgtccataattgttcaagacacggagatacaaccaagaatgcattcctttcccagggccaccggtcgagaaggaccctcctccacccatgagcacctgaagcacagtcacaatcattgcagttttctcttgacgccagccacctggaacctcaaaggcaagtgcaatgtgtgtacttgtagaatctgcttggcaatgataatcccctcctacatacactgattttggctcttcaggacgtttcacactgggaaggtctgatagaagtggttctgcgactgaaaccaactcatcgtgctcaattcctgatgctgcaagtaccatcctgggggcagtgtagttttcagaaacgaattcctccaaggtagcaacatccaatctgttcaccgcggattctgaagccatcaaaggttttgccagagccccagaatatccagccgaatggagcgcttccataagtagaccatgtggatcaccagacacttcagatatttcagattttatcttctggagctgctctttgacctcccattctaaaaatgctgggttcctcacactgtcgatgagaacttcaaccatttctggtgcataacacttcagtgcatcataagtatagctcatttgttcgcgagaagcagatgcaaagacatttcctccaatggcttctacctccctaactaaccgcaagtgactccggtttgtcgtgctcttgaaggccattctctccaatagatgtgatgttccagatgaagaagatgtctcataaacagaaccacaatcaatgtacagtcccactgatacagccggaatcggtgatgtctccgatgcgatcttgatgccatttggaagagtggtgatctttgtcttagatggctctacaaaatctggcaggactggagaaattataacgcctgggagtggaacatcaagcggaggaagctggcttgagttaccaccaagcggacgcgtggg

SEQ ID NO: 1691 - DNA, 135 bp, Oryza sativa
  Clone ID: PAT_MRT4530_101532C.1
ttttggttttataccacaactatagccatctttatttttgtagtgactcacataagacagtgcgaaattctattgatcgagggagaaaaattttaaaggtccgaactagggaaaaaaatatatccattacccaca

SEQ ID NO: 1692 - DNA, 687 bp, Oryza sativa
  Clone ID: PAT_MRT4530_101533C.1
gacaaatagaaatactctttttactcgtatatgtttacagcttgttggtacaaatgggcaaacacgctaataaaaaaaacacctgacaccgatgaataggcaaatggcttaaccatgaggccataacatctgattctatattaaaatgtaaaacaggaaggacgatattggcgtgcgtctgaacaaaaacgcagcatgccactgaacaaaacgcagcatgccgccgaatgatttaggggccgcggaattgtggcagcatgatcacatgcttagttgagaacatgaatagggagggtagttgatcatgcacccctcatctgtccagcaaaaattgtgtatgggctctatttattccagtcgatggccatttggccactgcaaagctgcggcttgaaattccagaacaacccacgcaggtccaggtgctgaatgctcacttggaatggaacttgcgcctgacagattcgtagctaggcacatgaataacatcaccccatgatgccaatgtaagcggcgaagaaataatcttctttgcagttgaagaaatgtcatttaaagtgatctcctcaacagttttcaggaagtactcaataggtttcctttcaccataagtcagtacctgtcttccatatcttcagaggccacgattcttgattccaagtccatcagaactgaagacttggtagc

SEQ ID NO: 1693 - DNA, 177 bp, Oryza sativa
  Clone ID: PAT_MRT4530_101534C.1
atgagggggacgaggatgctgaccgactcactccacgctggaatgctgcgtcggagctccggcgaagcacgacatgaagcggcggtgaagctgtggctgccaagaggggaacccggtttggctccaaccgaccccgccccggcgttccccaactattggcatgcgaggtttccctga

SEQ ID NO: 1694 - DNA, 375 bp, Oryza sativa
  Clone ID: PAT_MRT4530_101535C.1
atggtggcgctgtcgggctcgcacaccatcggccggtgtgtcgccctccagctccttcagcaaccggctctagtagtcgtccggccccaacgccgggcaggaccccagctacgtggcagcgctggcgacgcagtggcgcagtgcccgcagcaggaggaggccgggagctggtgcccatggactggacgccgtcacgcccaataccttcgacaccaactaccatgccgccatcgtcgccaactggggattgccaatagtcccgactcgttccagaccgacttcgcggccgacaacgtcaagatgggctccatcggcgtgctcaccggcaacgccgccggcggcaccatcaggaccaactgcagggtggccagctga

SEQ ID NO: 1695 - DNA, 216 bp, Oryza sativa
  Clone ID: PAT_MRT4530_101536C.1
atggcgggttgtgagcacatggttttgaaggtcgtgctcatgataattaaggaccgactgagaagcggcgagaagtccgtgggggtcgctggggagtccatgcctttggtttttgaggggtgccgtggtggtacttcggggtatggcaacatgtgtggaatcgtgtcttgtgggtacagtggtacatctctggccagagtaaaactattcgaatag

SEQ ID NO: 1696 - DNA, 610 bp, Oryza sativa
  Clone ID: PAT_MRT4530_101537C.1
cgcgtctggcctacactccttgctccacttcgaagactgtactgcggacgtgctgccgatctccttgtgccgaccacatggatcgcgctaggctaagggactcctgctgcatatttgttacaatccattttaagagcgtcattgctgagtaccagaaaatactgaaagttggtgattacttgctcgctggggggcatctatctagttgatggacaccaccttcatccaagacaggtctggagacatgatctcgaatacctgataggacgatcttcttgcagcccgtccccgtccaggttgatactgagaagcaggacacttactgtatcagactgatgatgttccactgatgtttactcagaccaatgagaaggctctgaaccttggttcttatcacctagcaagcacatcactcttcgtgaagatctggacaccttgaggctgatctctaagcctgcgcctgattattctacctctcttgatgacgaaagagtttgtgaaacacctttcgaactaatatccgtcttcgaagatgacacacaggcttgcgaagaactgaattcgtatcagggcaacaaggcacagagcattgcgagatcgagagccatga

SEQ ID NO: 1697 - DNA, 324 bp, Oryza sativa
  Clone ID: PAT_MRT4530_101538C.1
atcctcatatgggaaggcgatttaactagggaagaagattttatttaaattgatatgaccctaaatttaaacagtcacaccccatgatttctgactttttttctaacggaggaactattttattggtacaattcaaaaccagacaccctccacagtggcaacgctccctgggagcactatagaatttaggggggagaccccatatgggtggcggggtaaacgccaacagaggttgggcttgagcctgaacctaataaaggtgacacccctaaattgctgcagttgcagcctgtgcacaatcgcttgagcaatactaaaggccct

SEQ ID NO: 1698 - DNA, 422 bp, Oryza sativa
  Clone ID: PAT_MRT4530_10153C.1
gaattaataaccggccactgaaatgctgttctgactaactgatatataaatgttagccatctgccatctatttgatggtcttgatgatgcaggaacactgtccagatgttctttgtcaataatcaataatacaacagtaaccaattgatatctctagtcaatataggagtatatgcagtcaaaatttgaccgaaatttgagcaatttgtttctcttcgatatgcagtgcatcgctacagagctatgcccatgatgacatatcagtaggttcatggatgatggggctgaatactacttatgttgatgacgaccgtttgtgctgcggcagttctagacaagagaaagtatgttcccacgcatgagttagcagcacgcatggttatgacggtgggtcctgatgaagaggtggcgctgtatatttt

SEQ ID NO: 1699 - DNA, 358 bp, Oryza sativa
  Clone ID: PAT_MRT4530_101540C.1
atccaaaacaggcacgaaaactttataaccatgggggtttattcaacgccttgatacatgatcaaagtcatggattgagaggggaaaagagtcatagtcgtccaacatgaaactgcggaatgatagtatggttgtaatcattgcggcagtacaccggtctgacagcacacacaaagcacacttgaattttatcggagtcgctaatgctgggccgcaacagcaagcgctgcctcagtcttttcatttgccgtctcctgcctactacgaatagcatctcacaactaacattgattcttttagaagattctgaaactgccctggaactccttggagtggacgagccactactagtacttct

SEQ ID NO: 1700 - DNA, 1707 bp, Oryza sativa
  Clone ID: PAT_MRT4530_101541C.1
atgtcgtcgtcgtcgtgcgcggcgggcgccgaggccaccgggctggtggccatggactgcctggtggctgcccaagaaggggttgtcaagtccaagaggatcatcctccggagatggcacgggagaagatcatcatcatcggcggcggcggcggcggccaagagaggctgcagcacggtcgacccggctgcaggcgtgaagaaacagctggaggagctatttgacgacgacgatctattccaaggcgcattcggcggcgggatcaacggaggcggcggcgacgacgaggaggggtggtggaaagagaggtgcttcgccgtcgacgacgacgacggcggcgtgtgggaggcgctgatcgagcaagaggggctcttctggttcgggagcttctggggccggacgacggagcaggtgttgtccgctcggcttgggcgtaaaccagaggatataatcaagttggatgcaaatgaaaatccatatggtccacctccggaggtagctaaagcattaggaaatttgaagtttccctatgtgtaccctgatcctgaaagccgtcagttgcgtgctgctcttgctgaagattctggtcttgaatctgagtacatacttgctggatgtggtgcagatgaattaattgatttaataatgagatgtgtactcgaaccaggtgacaaaattgttgattgccctccaacttttacgatgtatgagtttgatgcgtcagtcaatggtgcacttgtgatcaaggacgttgcacagattgtcaaagtggttgaacaggaaaagccaaaatccatatttctgacatctccgaacaacccagatggcagcataatcaatgatgaggatcttttaaagatccttgatcttccaatacttgtagtgctggatgaagcatatattgagttttcgagtcttcaaacaaggatgtcatgggttaagaagcatgataatttgattgttcttcggacatttagcaaacgagcaggtttagctggacttcgtgtgggttacggagcatttcctctaagcataatcgagtatttatggagggctaagcagccctataatgtttctgtagcagcagaagtttcagcctgtgctgccttgcagaacccgacttatttagaggaagtgaaaaatctgctactacaagagagggacaggctgtacgatcttctcaaagaaataccattcctaaagccatttcccagccactctaactttattctctgcgaggtcacatcaggcaaagatgcaaagaaaataaaggtggaagaccttgcgaagatgggagtaatgatccgccactatgacaagaaggaactaaagggatatattcgtatttcagtgggcaagccagagcataccgatgcactaatgaaaggcctgaaagcacttcaactgtgatcatcccatctgtttgacggaagcactgaagcacttgcccgtggtagtgcactagatgcagtctctcaatggaggttgcatcaatctaacacaaataaggtgcatcctctagggtcgattatgtctcaataatacactcttctgttttgaccagtggcgttttgtccagcatttttgtgttggtcgacttgggtttcttctcaaggtgattgttcgaagcaagaatttgtactccgtgccctgattggaataaatatgagcgtaaaagtatggcaagtctaaaaaaaaaaaaaaaaa

SEQ ID NO: 1701 - DNA, 292 bp, Oryza sativa
  Clone ID: PAT_MRT4530_101542C.1
gtgacggccacgggggacaaggcggacagcctctgcttcatcgaggtggtggcgcacaaggacgacaccagcaaggagctcctcgaatggggctccagagtctccgccgccaactccaggccgcccaacccgcagtagtaccgccattaccattcatcctcgatcccggccccatttgcacctacctgctgccttttatatataaatttcgataatattagtatactatatatatagatcatatagaatcatcgtacgaataaatgatggagtgaataaagctacaattttt

SEQ ID NO: 1702 - DNA, 1596 bp, Oryza sativa
  Clone ID: PAT_MRT4530_101543C.1
tcacgcgccgcgcgcgcgcgagcgaaaacaacgccgccgtgtgtcgcgactcgcgacgagccgacgacggcgactacaacgcccaggcgaccagcggcgcggtgacgggccactcctaaacgcgagcgtcgtgagtgggtcgacgtcgacccgactccctggcacgaatctcgaggcggtcgcgcgcgtgggccccgcgaatctcgttcctactcctctcctctcctctcctccgcccctcgcttggccctccgtggtgacacgagccgtggccacctgaaaaacacactccgcccgcgccgcacctcctcgttgatggatttcagcgtccgagctcgcatccagagcccgcaccggtcggccgcccacttcgtcgccggcgaggggggacgccgccgcccggcaacgtccagggtatccttccgctccatggcgtcggccgcttccgtggaggagcctgccgctgctgcggcggcggcggctgagacgaagaggggaccgagcggcgcctccttcatccgggaacacctcaggagtctcgccccgtaccagcccatcctgcccttcgaggtgttgtccgctcggcttgggcgtaaaccagaggatataatcaagttggatgcaaatgaaaatccatatggtccacctccggaggtagctaaagcattaggaaatttgaagtttccctatgtgtaccctgatcctgaaagccgtcagttgcgtgctgctcttgctgaagattctggtcttgaatctgagtacatacttgctggatgtggtgcagatgaattaattgatttaataatgagatgtgtactcgaaccaggtgacaaaattgttgattgccctccaacttttacgatgtatgagtttgatgcgtcagtcaatggtgcacttgtgatcaaggtaccgagacttcctgatttttctctagacgttgcacagattgtcaaagtggttgaacaggaaaagccaaaatccatatttctgacatctccgaacaacccagatggcagcataatcaatgatgaggatcttttaaagatccttgatcttccaatacttgtagtgctggatgaagcatatattgagttttcgagtcttcaaacaaggatgtcatgggttaagaagcatgataatttgattgttcttcggacatttagcaaacgagcaggtttagctggacttcgtgtgggttacggagcatttcctctaagcataatcgagtatttatggagggctaagcagccctataatgtttctgtagcagcagaagtttcagcctgtgctgccttgcagaacccgacttatttagaggaagtgaaaaatctgctactacaagagagggacaggctgtacgatcttctcaaagaaataccattcctaaagccatttcccagccactctaactttattctctgcgaggtcacatcaggcaaagatgcaaagaaaataaaggtggaagaccttgcgaagatgggagtaatgatccgccactatgacaagaaggaactaaagggatatattcgtatttcagtgggcaagccagagcataccgatgcactaatgaaaggcctgaaagcacttcaactgtga

SEQ ID NO: 1703 - DNA, 4296 bp, Oryza sativa
  Clone ID: PAT_MRT4530_101544C.1
atgtcgtccgcgtccatggcaggcgcctgctccttcctggtggcagcagcggggaagccgccgcgccggagctccctccagcggtgcttcatgacgcgcgaggggagcaagcgaagtgggggcgtcaacgggcgagcgcagtggcggaacgacagcgtgggtgggcaatcttcgcgcgcgtacaacggcctcaatggcagcgttgtccttccagcagaggaggtggacgtggaggccggtggcggcaaagaagagctcgagctgggggctcccgagctccgcggcggcggaggcaccagcggacagcacggagagcgcggaggcggcgtccccatctatgatgagtgcggaggtgagctgcgtttggaagttgcaggtccaaaggagggccaggccacgggcgagaaggcccgatgcggaggcggagacgaggagccccaacctgtggcggagcacgttcttctacaaggggacagcaccgaggacgccataggtggtggtgaggagggagtgggcaaggagcttgagccacgggagagctggggccagcgaggggggcggggagaccggcgtcgagtggcggagagggagaagataggtttggtgagggggtcaggaagactggcgagctcgccctcgccccacctccaacgccacaacacctgcctccgcgccttcacgaccttgtgtgtcacgtcggcgagattatctacagtgtcgcgtgcgttgtgttcatccggtgttcgttctcgcccgctcgctgattcgttgggatttcctgacaagatcgggaggaggagcagcaggggcgggcaagggcgcaacggcagcggaggtggcgacagcgctggcccggctcgcaagaccgacaagtgccacaactgcggcaaactcggccactgggccaaggactgcaggagcaagcccaagcaggagcaggcacatgtggtccaggaggaggatgagcccacgctcatgctcatgacgggtggctgcattgatgtggtggaggagacgggcgcgccgtgcgtgacaccggcgccgcccgcgccgcggcctcgcctagacgttgtcgagcttgtggagcagaaggtgtttgccgcgctggacgacgccaccgaccacgacaacaagcgctggatcctcgacaccggcgcgtcgaaccacatgactggctcgagggcggcgttctctgacatcgacaccaacgtcaccggcaatgtccggctaggggatggctcgctcgttcgcatcggagggcgccgcaccatcctgttcgcctgcaagaatggtgagcaccacatgcttcacaaggcctactacctcccgtgcctcgccgccaacatcatcagcgtcggccagctggacgaaaccggcttcaaggtgctggttgaagacggcgtgatgcgtgtgtgggacgagcaacaccgactgctcgcccgcataacgcgcaccccaggccggctctacgtgctcgacatcaatctcgcacggccggtctatctgatggctcgcgcgggagaggacgcttggcgctggcacgcgcgtttcgggcacgtcaacttcaccgcgctgcgcaagatgggcagagaagcactggtacgtgggttgcccgttctgtcgcaggttgagcaagtgtgcgaggcttgccttgctgggaagcagcggcgagctcctttcccgcagcaggcacttcaccgcgctaccgaacccctcgccctgctgcacggcgacctttgtgggccggtcatgccggcgacaccgagcggaaatcgctatttcccgctgttggtggatgactacagccgctatatgtggctcgtgctcctcgccaccaaggatgccgcgccggacgccatgaagcgtgttcaggcagccgccgagcgcaagagtggccgcaaactccgggcgctccggactgatcgtggaggcgagttcacggtcgggcacttcaccgagtactgcgcggagctcgggctgcgacgcgagttgacagctccatactcgccgcagcagaacggcgtcgtcgaacgccggaatcagtcggtggtgagcacggcgcgaagcatgctgaaagctaaggggctcccaggtatgttctggggggaggcagtgaatactgctgtttatctgctcaacaggtgctcgtccaagagcattgatggcaagacgccgtatgagctctggaatggagtcacgccggctgtccatcacttgcgcacatttgggtgtgtcgcacacgtgaaggtaaccgccccgacgaagaagcttgacgacaggagtcggccgatgatttttgtcggctacgagctcggctcaaaggcgtaccgtgtctacgacccggcgacgcggcgcgtccacgtctcgcgggacgtggtgttcgacgaggaggcgcagtggaattgggatggcgaggcagctaccaacgttgactccgacttcaccatcgagtacaccacggtgtaccacccagcgacggcgactccgacgcaaaccggcacggagcacgggggagctccagcctcgccgcgctcacctgcatcaggctcgactccgacaacaccgcctgtggcagaagtgtcgccggtggaatttgtctctcctccgcctgacgtggaggatgatcttgacgcggaccacgatgacgcgccactccgtttccgtcgcattgacgacgtgcttgggccggcgacgccgccgggccaggccgttcgcgagctgagcgaggagctgttcgcggtaacagcggaggagccggcgtcgttcgccgaagcagagcagctaagctgctggcgacaagcgatgatcgaggagatgcgttctattgaggcgaacaagacttggcggctcgttgatccgctagcgcgccaacgtccgattggactcaagtgggtctacaaggccaagaaggacgccgccggcaacatcaccaagtacaaagcacgcctggtcgcgaaggggtatgtgcagcggcaaggcatcgacttcgacgaggtgttcgcaccagtggcgcggctcgagtccgttcgcttgttgttggcgcatgcggcgtgcgagggctgggccgtgcatcacatggacgtcaaatcggcgtttttgaacggcgagcttctggaggaggtctacgtcgcgcagccgccgggattcgtcgtcgacggccaggaacacaaggtgttgcgccttgacaaggcgctctatgggctccgtcaggcaccgcgtgcttggtactccaagctggacgcgtcgctgctatcgcttggttttcaccgaagtgattccgagcatgccgtgtacatgcgcggcacgggggagcaacggctggtggtcggcgtgtatgtcgacgatctcatcatcactggcggcaaccccggcgagctgaaacagttcaaggaggagatgaaaggaacattccaaatgagcgacctcggcttgttgcagtactacctcggcctggaagtgaaccagacagaggacggcatcacggtgaaccagcgcgcctacgcggagaagattctgcagactgccggcatggtggccagcaatcccagccttaccccaatggagacgcgcctcaagctcagcaagatgagcaacgccccctccgtcgacgccactgattaccggtggatcgttggctccctgcgctatctggtgaactcgagaccggatttggcgtactcggtgggctacgtgagcaggtttatggagaaacccaccaccgaacacctggcggccgtgaagcgagtgctgcgctatgtcgctggctccatcggctacggctgccactacaagaggaagaaagatgcaagtttagtcggctacagcgacagcgatctcgccggtgacgtcgacactcgcaagagcacctccggcgtcttcttcttcctcggcgacaacttgatcacctggcagtcgcagaagcagaaagttgtggccttgtcgtcctgcgaggctgaatacatagcggcgacaacggcggcttgccaaggtgtgtggctggcgcgtctccttgctgaactccagggagaggaggccgacgccgtcacattgaggattgacaaccaatctgccatcatgcttagcaaaaaccctgtcttccacgatcgcagcaagcacatcgacacgagatatcactacatcagagaatgcattgaggagggcagggtgaaggtcgagttcatcggcaccaacgagcagttggcggatattctgacgaagtcactcggacgggacaggttcatggagctgcgttcccagattggcctcgtcgaagttcaaacaccgcgcaaggtttag

SEQ ID NO: 1704 - DNA, 580 bp, Oryza sativa
  Clone ID: PAT_MRT4530_101545C.1
acaacacaatcctgggcgtaagtttgggtttggaaaaagtaccccgaaggtctttcaactttgtcatcgagttacaaaatcatcccccaaccacaaaaccagatatccgggggttcccaacttataaaaccagggcaatctacgtccctcgggggttttgactccggttttgtccgatacggcaactgactcagggggggccccacgcgtaagcctttttttcccctcccctttccatcttttttcctctctcctttttttttcacgggggccgcacgagggaacagctgcacgggcgtaggcgggggggggaaggaaccccccgtgggcggcaggcaacggagcggcgcgcgggcggccggcccaagccggggtttccccaccaccgcctgttttcgtttgcgctaggagctgaaacctgtggcgggggcagtacgggcgtgccacgggggcgtgccggcgtacgtgggagggcaggcccgggaggaccaggcggaggctgaggacctgggcacaccactccggtcggggcgccactactagaaggccgacctcaactctggccccgtccgccaccccg

SEQ ID NO: 1705 - DNA, 246 bp, Oryza sativa
  Clone ID: PAT_MRT4530_101546C.1
atgggggtggcggcgcttgagttcatgagagacgcctccaacaggcgggacccacagcggtgcgcgcgtgcatcgcacgtgcggcgcgacagcctcgcgtgcaatagtagcagcggctgggctgggctggggatggggcggctcggcctggtgggcatgatgagccgacgcaagaagggtgattttaggatgcgacagaccaaacaacccttaaagaatctcgacctcgagattcggaagcactga

SEQ ID NO: 1706 - DNA, 183 bp, Oryza sativa
  Clone ID: PAT_MRT4530_101547C.1
atggcagtggcacgcgcgagccgcaaggtggatttggatgaggggggaaacgtgtgcgcgaatgcgcgatcgcggcaaaagctgcggcgcagtgctgatggggaagatgaactgtcgttccggactaacttctccaacatcgcagaaatcgtctcttctaccgttcaccgccgtccggaatgc

SEQ ID NO: 1707 - DNA, 358 bp, Oryza sativa
  Clone ID: PAT_MRT4530_101548C.1
cggtctcttgttcctctcctctcctctccagatcaattggatggcatctttccctggaacccaatatcgatagcttcactgttgcagacaacaaactggttctgctcaactttgaggacggccgcccagttcgatgaatcgatccgtggatccaattctgctctgctgaagctttgatctttctgattacagatgatgccattcttgtatgttgctctccacttggacgccaggatgcttccagggcaataaaatcttgttaagatctctaatcacatgcagcagctagtccactggatgatgcctccaagattcagatgccaagattacctcctgccgctgctgctcgccctttcgc

SEQ ID NO: 1708 - DNA, 327 bp, Oryza sativa
  Clone ID: PAT_MRT4530_101549C.1
tgagcaaaaacgacttatggtattgcgagcttcagagaaccataatctctagcctgcttcttgattgccaataagggtttcattggagtttcagccgattttatgacatcggacctccagccgatgtatgatttaatcttcggatcagtgcttattatatattgtttctagccgattggtttatactcgattatattacatcagccgattgcctttatatcatcatctacattgaacatatagccgattgcttaaaccctatcgctatcggctggtatcggcatcggctgaaatcattacatcggcttgtcagccgatcggttgttt

SEQ ID NO: 1709 - DNA, 306 bp, Oryza sativa
  Clone ID: PAT_MRT4530_10154C.1
atggagctgtggtttaccctgtcaggagagcctaccagatcaatgagaatgcacatgctgctggaggactcattctgtccatatttttctagttccaacttcgaattgcgacagctctattcggagtctcgaagccaccaaaaaggattggtggtgggagatttggcatcctcagccatcagatctccagaagatgctgattcaggagcgaagcaaaccataggaacagtttcagggggaacatgtcgtccccaagaaagaatgatactgacacatcattttgttctccgtagcatccgattttga

SEQ ID NO: 1710 - DNA, 2328 bp, Oryza sativa
  Clone ID: PAT_MRT4530_101550C.1
atggcatcaattggatggcatctttccctggaacccaatatcgatagcttcactgttgcagacaacaaactggttctgctcaactttgagcagcagcagctagtccactggatgatgcctccaagattcagatgccaagattacctcctgccgctgctgctcgccctttcgccggccgccgccgccgcccgcgaggtggagtaccaccattgccactgcgacggcggcggcggcggcggcggcggggggttgtggagcatggacagcatcttcaggtggcagaaggtgagcgacctgctgatcgcggcggcctacttctccatcccgctggagatcctctacttcgtcgccgggctccggcatctcctcccgttccggtgggtgctcgtccagttcggcgccttcatcgtgctgtgcggcctcacccacctcctcaccgccttcacctacgagccgcacccgttcatggtggtgctcctcctcaccacggccaagttcttgacggcgctcgtctccttcctcaccgccatcacgctgctcaccctcatcccgcagctgctccgggtcaaggtgagggagagcttgctgtggctcaaggccagggagctcgaccgcgaggtcgtcctcatgaagcggcaggaggaggcgagctggcatgtccggatgctcacccacgagatccgcaagtcgctcgaccgccacaccgtgctctacaccaccctcatcgagctctccagggtgctcggcctcaccaactgcgccgtctggatgcccgccgccggcgagatgtgcttgacgcacgagctccggcgagacggcggcggcgaggatggcgtcgtcggcgtcgacgacgcggacgtcgtcgaggtgcgggggagcgacggcgtcaagctgctcgggccggactcggtgctcgccgcggcgagcggcggcaaggaggagggcaccggcgcggtggcggcgatccggatgccgatgctgaaggtgtccgacttcaagggcggcacgccggaggtgatccagacgagctacgccgtgctggtgctggtgccccccgccggcaagagctgggggcggcacgagatggagatcgtcgaggtggtcgccggccagaaccgcgagctgctgcaggcgcggcgcgacgcgctcatggcgaacgaggcgaggcaggcgttccagggcgtgatgagccaggggatgcgccgcccgatccactccatcctcggcctcgtgtccatggtgcaggaggaggccctggcgccggagcagaggctcgtcgtcgacaccatggcgcgcaccgccaccgtcgtctccacgctcgtcaacgacgtcatggagatgtcggccgacagccgcgagcgcttcccgctcgagacgcggccgttccacctgcacgccatgatcagggacgccgcctgcgtcgcccggtgcctctgcgacttcagggggttcggcttcgccgtgcacgtcgagaacgcgctgccggacctcgtcgtcggcgacgagcggaggattttccatgtcctgctccacatggtcggcaacctgattggccgcaccgagcccgggcatgtcacgctccgggtgcgcgccgccgacgacgacgtgctggacgacaggctcggccagaggtgggatccatggtggccgtcctactccactggctactcctcggtgaagtttgtcattggtgtcaagcggcagcagaacggcgatgccggctcgccgctgtcgcggaggccgagtgggaagggcattgatctcagacttagcttcagcatgtgcagaaagcttgtgcagatgatgcaagggaacatctgggcgattcttgatccccaagggctaccggagagcatgactctggtgctcaggtttcagctgcaatcgccactgacatcatcaagccttggaggatcattcgagcagaagcactcgtcgccgtcgtgccagattgcaggcctgaaggttctgcttatcgacgacgatgacgacatcaaccttgtggttgctcggaagctattggagaagctcggctgcgtggtctcctcgccgccttcaggatcaggatttctcagctctgttggctcctcagcagcagccttccagcttgtcatggtgaacctcgaaatgaagagagtaaaagcccttgatgtcgcgacgaggatcagccagtacaggagcggccgatggccaatcgtcatggccatggcttccgaccagaaggcctgggagaagtgcgctcaatccgggatcaatggcatcctcaagaagccggtgattctgcaggagttgaaagacgagctggcgcgaattcttcagagcacatga

SEQ ID NO: 1711 - DNA, 1134 bp, Oryza sativa
  Clone ID: PAT_MRT4530_101551C.1
atggcgctcgtctccttcctcgccgccatcacgctgctcaccctcatcccgcagctcacccacgagatccgtaagtcgctcgaccaccacaccgtgctctacaccaccctcatcaagctctccagggtgctcggtctcaccaactgcgccgtctggatgcccgccttcggcgaaatgtgcttgacgcacgagctccggcggggtggtggcgacgattgcgttgaggtcgtcggcgttgacgacgcagacgtcgtcgagctgcgggggagcgacgacgtcaagctgctcgggccagactcggtgctcgccaaggcgagtggcggcaagcagcagggcaccggtgtggtggcggcgattcggatgttgatgctgaaggtggccgacttcaagggcgggacgccggaggtgatccagacgagctacgccatgctgaggagtcgcgggcgatgcgcgactggctggcggagcagaaccgtgagctgctgcaggcgcggcgggacgtgcgcgctcatggcgaacgaggcgaggcaggcgttccagggcgtgatgagccaggggatgcgtcgcccgattcactccatcctcggcctcgtgtccatgttacaggaggagaccctggcgccggagcagaggctcgtcgtcgacaccatggcgcacacggcctccatcgtctccacgctcatcaacgacgtcaaggagatgttggccgacagccgcgaccgcttgccgctcgagacgcggccgttccacctgcacgccatgatcagggacgccgcctgcgtcgccaggtgcctgactggccgcactgagcccgggcatgtcacactccgtgtgcacaccgacgacgacgacgtgctggaggacaggcttggccagaggtgggatccatggcagccgtcctactccagtggctactcctcggtgaagtttgcccacagccgccggtgctcgagttgcagccgtcgacatctgacaggagagagagagggggtgagagggaaagagagaaaagagatatttgacaagtgggccgtatcctttttaaaaataaaaaacttgcagactggactgccatgtagaccaaaaccgcttgcaaagctgctcggggagttttcatccggtatcgatagttga

SEQ ID NO: 1712 - DNA, 2970 bp, Oryza sativa
  Clone ID: PAT_MRT4530_101552C.1
atgttgctctccacttggacgccaggatgcttccagggcaataaaatcttgttaagatctctaatcacatggtattatctcgaatttatgccaaagctgcggcctttttattttcttttttacttaaccttgccaagttgcgctacggattcgccgcctatttctgacaaaagctcctccattttcctcccattggcgcagcagcagcagctagtccactggatgatgcctccaagattcagatgccaagattacctcctgccgctgctgctcgccctttcgccggccgccgccgccgcccgcgaggtggagtaccaccattgccactgcgacggcggcggcggcggcggcggcggggggttgtggagcatggacagcatcttcaggtggcagaaggtgagcgacctgctgatcgcggcggcctacttctccatcccgctggagatcctctacttcgtcgccgggctccggcatctcctcccgttccggtgggtgctcgtccagttcggcgccttcatcgtgctgtgcggcctcacccacctcctcaccgccttcacctacgagccgcacccgttcatggtggtgctcctcctcaccacggccaagttcttgacggcgctcgtctccttcctcaccgccatcacgctgctcaccctcatcccgcagctgctccgggtcaaggtgagggagagcttgctgtggctcaaggccagggagctcgaccgcgaggtcgtcctcatgaagcggcaggaggaggcgagctggcatgtccggatgctcacccacgagatccgcaagtcgctcgaccgccacaccgtgctctacaccaccctcatcgagctctccagggtgctcggcctcaccaactgcgccgtctggatgcccgccgccggcgagatgtgcttgacgcacgagctccggcgagacggcggcggcgaggatggcgtcgtcggcgtcgacgacgcggacgtcgtcgaggtgcgggggagcgacggcgtcaagctgctcgggccggactcggtgctcgccgcggcgagcggcggcaaggaggagggcaccggcgcggtggcggcgatccggatgccgatgctgaaggtgtccgacttcaagggcggcacgccggaggtgatccagacgagctacgccgtgctggtgctggtgccccccgccggcaagagctgggggcggcacgagatggagatcgtcgaggtggtcgccggccaggtcgccgtcgcgctgtcgcacgcgacgctgctggaggagtcccgggcgatgcgggaccggctggcggagcagaaccgcgagctgctgcaggcgcggcgcgacgcgctcatggcgaacgaggcgaggcaggcgttccagggcgtgatgagccaggggatgcgccgcccgatccactccatcctcggcctcgtgtccatggtgcaggaggaggccctggcgccggagcagaggctcgtcgtcgacaccatggcgcgcaccgccaccgtcgtctccacgctcgtcaacgacgtcatggagatgtcggccgacagccgcgagcgcttcccgctcgagacgcggccgttccacctgcacgccatgatcagggacgccgcctgcgtcgcccggtgcctctgcgacttcagggggttcggcttcgccgtgcacgtcgagaacgcgctgccggacctcgtcgtcggcgacgagcggaggattttccatgtcctgctccacatggtcggcaacctgattggccgcaccgagcccgggcatgtcacgctccgggtgcgcgccgccgacgacgacgtgctggacgacaggctcggccagaggtgggatccatggtggccgtcctactccactggctactcctcggtgaagtttgtcattggtgtcaagcggcagcagaacggcgatgccggctcgccgctgtcgcggaggccgagtgggaagggcattgatctcagacttagcttcagcatgtgcagaaagcttgtgcagatgatgcaagggaacatctgggcgattcttgatccccaagggctaccggagagcatgactctggtgctcaggtttcagctgcaatcgccactgacatcatcaagccttggaggatcattcgagcagaagcactcgtcgccgtcgtgccagattgcaggcctgaaggttctgcttatcgacgacgatgacgacatcaaccttgtggttgctcggaagctattggagaagctcggctgcgtggtctcctcgccgccttcaggatcaggatttctcagctctgttggctcctcagcagcagccttccagcttgtcatggtgaacctcgaaatgaagagagtaaaagcccttgatgtcgcgacgaggatcagccagtacaggagcggccgatggccaatcgtcatggccatggcttccgaccagaaggcctgggagaagtgcgctcaatccgggatcaatggcatcctcaagaagccggtgattctgcaggagttgaaagacgagctggcgcgaattcttcagagcacatgatgctgatgtttgctggaggtctgtttgtctaagagctctgaagtctgaatcggtaaaagctgtgaatcctgtgatcagtgtacaacctcgtcatccagcattgaagaatgaagaactcagaagaattctgtgatcagtgtacaatctcgtcatccagcattgcagaatgaagaactcaaaagatcttcgcggcgaaaacggggaacatctctaacgaaagaaagggtgccctgatggatggcaagaacacatggaatcttggcagcaatggcgtccccgagaaatcttcttcgcacaaattttgtaatatgagtttgagtgggaatacaagtcgtgtaattttctaatgatcgagatgtacactcgggtgaagtcaagggaattcgtacttgactctctctgtcaaagcaaatcatgagattggaatcaatgagatgatatctcaaaacaaaaaaaaaa

SEQ ID NO: 1713 - DNA, 600 bp, Oryza sativa
  Clone ID: PAT_MRT4530_101553C.1
atggcctcgcgggaggacgaccgcgccggccgcggtggcggcggagggcggacggagcaggagcggcggccgtccaaggcgtgggggatcctcatcttcggcctcatcggcgccaccaccgccaccttcgcgccccaaggtcctaaatgctatcttaagattgcacgagcactgcagatgggtaaaccttgtgctaggcaggttgctcaagttcgcagaagtgttgattgggtctacagtcagttcaataagatgcagacaacatcttggaggaatgcaagtaacagctctaaccgtggaagtttcagtgaggatgctaggagaagatattaccaacgtatgcaacaggaatatgaggaggaacaagagagagttcaaagaataagacacatgcaaagtgttttcaacagagagaggaacaagtttaggagaagttatgaagcttggagggagaatggccctccaggtggatataattatgtcccacgggacgactggtactggcagacagatacatcacactcggaacataaaaataggcggacatatactcctgcaggacctaggatatattttactgccatactcagtattaagtga

SEQ ID NO: 1714 - DNA, 127 bp, Oryza sativa
  Clone ID: PAT_MRT4530_101554C.1
gctgcaggctggtagctttacactgaattatcacagggcgaacagcaagatctccgatgagcataatgaggctcatagagggtgggcgacttgcctatggtcacacagcgatacagctggaatttaa

SEQ ID NO: 1715 - DNA, 1039 bp, Oryza sativa
  Clone ID: PAT_MRT4530_101555C.1
aacctctgatgggacaactcctagatttggcccacttttaagacagagctcacagtggcttgccactggggccctcgcgcgtcgcccaggcgttgcactgctgcccgggccatacaatccgaagctgcagtttcagtgaaagccttttgaagtatattgatccatataaaaaacatattttcaacatccgcatcgtcattccaccaccaccaccaccacttgacatgagtgaggcggcagcagcgcctgcagtcgggacgattccagtcgaattgcctggtttagagagatgcagaagcggtgctagatattcacagaacgaagtgacggctgaaacgacatcgttgtaattgtcagcagcagcaggggccgtgatttccactagctgtattgcaggagtgattggcacagcttcgttggtagcatggagttttgtcatcttgctaacagaggtaacggtcacagttatctgggcacctcggtggaaacgaaatgcaaatcctcccttcagaacttcatgatctaacttgtaccctataccgtagaagtaacgcaatacattgttgctggctttgctctctacaattgaccgcacaaggactgagatttgctctgcaccagcacctctcatggcacctccaacatgtcttatggtccaggatggcgtggactgagctaagtcacacaataaacgaacctctgatgggacaactcctagatttggcccacttttaagacagagctcatgcactctgacacgttcttttgggacaccagagaggccctggagaagaacctcaagagcatcaacatgctgggtctcgatgatcccctgcaccacgtactccatcaaccccaccgcttctcgctaccacaatccctttaacctaacagcaataatccgcggcgcggcgggggctgaggcgtcgggaagtgagccgatccgaggcgcaagagctccccccacctcgcaaaccccgcgtccccgaacactcccctctccgccactgaccgctcgccgtcctccgccgcctccacc

SEQ ID NO: 1716 - DNA, 361 bp, Oryza sativa
  Clone ID: PAT_MRT4530_101556C.1
atgggaagcttatcaatttgcctgtgttcagctctccagacacacttgggatactagctcaacttgagcacttataagtgtgtgctaaaccatgcattattctttgttcacccagtgacgggaggcagatgatactgtgctatatatatcagaccttacctattgacgctagcagaaccattacatatatctttgtggaagaagagttgagtgtcgacatcttgcagatcgcaggctggataggggactctgtgtcgatatctcaccggttggactagaccgactgacgatcctacagcatgtagcacccatgaacagtcttagcatctgtatacctctggttgatgctcggatcacacac

SEQ ID NO: 1717 - DNA, 157 bp, Oryza sativa
  Clone ID: PAT_MRT4530_101557C.1
aataggaaaaataaagaggccttatggaatgtacaatacttgaggggaggagtcctcactccatggaggtcaaatatttattatatataaccacccataccattaaaaaatcgtactacatactgacatccacaattctaaccctatcgccctctta

SEQ ID NO: 1718 - DNA, 342 bp, Oryza sativa
  Clone ID: PAT_MRT4530_101558C.1
cataccgatctttgcggacaactattgcggttggtgacctaaatgggaaggactagtgtaaccttccagctgtaaatttggtgcctgtatcatctaaacatggacggcgacgacaaggcaggaaggggccagcacaaggtggtgttaaactgtctcgggctgggcttgctgccggtgttgatgctaatgaaatactaggtgagaattcttaggccgggactgatgatggccattgagattcacctactgctgctggtatacctatgcctgcgcgtcactgtagctacaatccgggtgcaagacgtggactgtgaagctgattatcacagtgtgtcactcgga

SEQ ID NO: 1719 - DNA, 313 bp, Oryza sativa
  Clone ID: PAT_MRT4530_101559C.1
ttcttttctgcctctatccatcccattctcatgagagctcattgacctaatcaggagctttactcgaacataatagtataagtccagcaccggacaagcatctgattctgaattccgattgctgctgcctggggagaggaacggtaaggcttgccaacacggctccgaggcggcgtatccggctaatctacagtcactttggccttgcccgtggcgcgcccgccgcctcgcgccctgagtgaggtgtgtggtgctgaggggcatgcgatctccttcgcctgattactcctagtttctacgagcttgctacgga

SEQ ID NO: 1720 - DNA, 891 bp, Oryza sativa
  Clone ID: PAT_MRT4530_10155C.1
atggccaaattactttcctcactagccaaacttagccagcctactccacttgccatctgtgggtcccaccaccttccatacccttttcctctgttggggagcaatgtggccaagaaggagagccgatggtgcaacctcatcggtgaccgagggcgtggcaacggcgccgcatcggtggcctcccgccgatggtcgaggcagtggcgccttgtagtgcaagccggagaagcatgcaggaccaccgccattgtccgtcggtccagcgtcgccgtcgcccttgccgacgcgagcaagagggcccacgccgccatctgcctgaatccgcgccgccacccgaatccggctaatactttgcgggcttccgccagtgacctcttggggaacaaacaagcaagtggtgccttagtttgtgcccagttttctgcactggactacttggtgggcgtggcggctggtgcactcctcgccgagtgcagccactccgtccaccacccgacctcgcctcatcgctgtgcctgctggattccgccccgctgtgcgactccgccccgcacggatttggccggcggcgtggattcggggccgcacggcctccgcaccccggctctggcgcacgtgacggatggcgggccggccggacggacgccgggaccgcaccagcagcagcaacagcaggactacggcgacactcgagcttgcggggctggaggcggcgacaacggagcagagcaggaggcgcacggaggcggtgttagacgacgacggcagcagcggaatacgataatgacgaggcgagcaggaggccacgcaacggcggagttccgctcgctgtgcatcactagtgggaagaaagagaagaaggcaatgggatctgcatggcaagtgaagtag

SEQ ID NO: 1721 - DNA, 333 bp, Oryza sativa
  Clone ID: PAT_MRT4530_101560C.1
gtttatggccccatcaacaaaggagttacttgtggcgcaccccccccaaaaaatcccccaggccttaaatatggctggggccccatatgtgaaaaagggtggtaggcacaaggagggcaagaacgaactttatcatgacaccaagtttgcatgcgcacaacagatcggagaccaatgtggtttccacgtgtgccacaacatgtcaacacttctaagagagaaaggtagagctggcttcaagatctcacccatcaaccccccgctatcagaggcgaattgtgcgcctttattcttgcagaaataatgaacaagaaaggacgttttcatgccaaa

SEQ ID NO: 1722 - DNA, 399 bp, Oryza sativa
  Clone ID: PAT_MRT4530_101561C.1
atggctgtggccggggagggagccgcctcgatccccactggcggtgccaacgaaggtgccgaggacacgcgccagggatcaaagaatgagagagagcccgcggcgtccgaatcataccgcctccgcacgccgccgctgctgccgagccgccactgggtcggcgcctcccctcacgccagatcttacggaggggagggtgcagccgtcgccgctgtcgtcgtcttcaccaaaggctgccgcaaccttacatcccaccgctgccatcgggccaccactccgagccgcttctgggtcgccgccggcatcctaagaagaataaatgtcgacgtgtgggagtcgacctcgatccgcgccgtcgagggagctgcctcgatccacgccagggacaatacaaactaa

SEQ ID NO: 1723 - DNA, 273 bp, Oryza sativa
  Clone ID: PAT_MRT4530_101562C.1
atggcgggggactcggcgacgatggatccagtggtggggagggcggcggcgacggatccagcgatggggaggactgcggcggcggattcggcgatggggaggagcggcggcggcatgcgaggaggagctcttcctcttgctcttcctccggcgatggggaggactgtgggggcaaatcaggtgatcgttgatcccctcgtcccttcaaccaaacaaaaatttaggatcatcccatcctacaaaccaaacatgttgttatattatcgggagtag

SEQ ID NO: 1724 - DNA, 310 bp, Oryza sativa
  Clone ID: PAT_MRT4530_101563C.1
actatggaagacaacttgttgtctatttatctgacccaaagatggacatgtgacatacagatgatatctgcactcatggttcattcacgaaccacattcctgccaaaacacataagctgacacactactcggtggagctataccggcggccaccgtacggctgacggtgaatcggcatgtgaggtcagacggaggaggccactcggaccttgaggccgacagccatggagaggatggacatcataccgtacttgacggggtggtcctcgaccaggtcaaatgtgtaaaaaccggaaaaggatggctagcg

SEQ ID NO: 1725 - DNA, 957 bp, Oryza sativa
  Clone ID: PAT_MRT4530_101564C.1
atgagggtcaaagacgagggcgtgatagccgtcgaggatgatttcgctgcccggcggcgacgactccggcggcgagtaagggagaaggcgcgtccattggcgggtggctgggttgacgacgtggtggtcgagcaggatgaggccgttgcagtggtcgattatggtgagaagggatttttcgatttcgtcggtgtcgaggtagtccaggtggagggcgccggggatgggtggcctcgtcgtcttcgtccctgccgacggcgaggggcgggcgaagaagccgctgagagttggcacgccgatctggacaaagatgccgcggagcgtgcaggggaggagcgcagccgcgagggggtacactttacccacacgacattactaacccggatcacccagcccgtggggatcagccacgtcgggagacctccaagctttcatgacaaggcatttccaaagccgccacaggtggggcccacctgtcggccccttcttccacctcccgccgccgctccccaagccggccgccgccgaaaccgccaccgacgccgccggtttccccgtttcccgcgcccactccgcccgtaccgcacgcccacgtcgccgccctctccccgcatctcccggccccagccgctagggtcgccgccgcaccccgccatcggcgccgccgcgtccgccatcccgaggtccacctcgtccgctgttctcccgtccaattccatcgccggagctcgcatctcctcgcactccggtcctcccggagcccgtcgccgtcatcctcccgtctctcgtcgttgccgttcgccgtcgctcctccctcgcgccggccgagcccctcgcgccgccgcttcggccgccgccgccgtctttgcgccgtccgccgccgcctcccgtcgccggttgccgtcgctggcaaccgtgtgcgcgcgcgccgccctcgccataaccggccggccggct

SEQ ID NO: 1726 - DNA, 1652 bp, Oryza sativa
  Clone ID: PAT_MRT4530_101565C.1
atgatttaccctcaagcaatcggactcgggggcgaccgggtgaggcgaatttggcggaaaggcagcggcgctcggactcggctcggccggccggctggagcggaaaaggtaaagcgagctaagcctgaagacttgactcctgcagcgggcgactccattccacaggcaacccttgacggcagcgacgaaaccaacctcttcaagacatctccaactgggaagaacttcaactctgggttcgcccccgtccccagcaggcaacgggcagcccccctttcgtgccgcggtgaatccggaagccgatcaaccggacaccccggccgacccaactccatcacgcccaccctcgcctggggcatcccgcgaaccgggctgacgtcagcaaggggtggggcggcgccgacatgcgggccccactggacagaggcacaggagagagggagagggggcgactggcaggcgggacccaccggggcagcgtcacaagggggggggggaaagcggcgaggcgcccggtcggtccggctcggcttcaagccggccggccggttatggcgagggcggcggcgcgcgcgcacggttgccagcgacggcaaccggcgacgggaggcggcggcggacggcgcaaagacggcggcggcggccgaagcggcggcgcgagcgaccctagcggcggcgctacgcggcgggcggcgcggcaaagggagagagaggaagagagggggagaccgatcctcaccgaggggctcggccggcgcgagggaggagcgacggcgaacggcaacgacgagagacgggaggatgacggcgacgggctccgggaggacctagagaaaaggttgggaggggttagagagagggaggtggtccatggcgcacgacataaccgatcgaaggcggcggcaatggtggaagctcaccggagtgcgaggagatgcgagctccggcgatggaattggacgggagaacagcggacgaggtggacctcgggatggcggacgcggcggcgccgatggcggggtgcggcggcgaccctagcggttgctagaggcggccggagcggtggagatggcggcggcaggtgggcacacggtgctagggcgatagggagctcgggagcggacggcaaaagagggaaaaaggtggagagaggcgcggtggtcggttatatagaggtgggggggggccggacgtggccgggaacggcgcaatttcgccggagtagtggaggaggtggaggaggagagagagagagaggcgggattcaaatcgaatcccgccctctcgagcgcgcgcacgggccgggagatgcggggagagggcggcgacgtgggcgtgcggtacgggcggagtgggcgcgggaaacggggaaaccggcggcgtcggtggcggtttcggcggcggccggcttagggagcggcggcgggaggtggaagaaggggccgacaggtgggccccacctgtcggtgacccggaggggtttgggaggagggaggaaccagcttgggccggcccagccgagggaaggccggcgcgggaggtgaatggactgggccgacggcccaagaaaaaggaaaaaggagggaaaagaaaagataaaaaaggaaaaaggattttcccagggatttaatattgcactttgcttattttaa

SEQ ID NO: 1727 - DNA, 486 bp, Oryza sativa
  Clone ID: PAT_MRT4530_101566C.1
ccggactcgggctacgccgccgcgtgcggggatgccgcgggggactggatcctcttcaccagcccgacgcccttcaaccggtgcgtgctcctgcggtgcccctccgtgtcgttcgaggacgggggcgtgctgctcgacggcgtcaacgagcgcctcctcaccgaggagcggcactacgtcaacctgagccgcggaagcatccccgcggcgcgcggcggggatggcggcgccggcgacatattctaccagagggtttgcattcccgcggaggacggcggggtgatcgcgctcgattggccggacaatttggatttgggcaaggagcatgggcttgattccacggtgtttatagtgcccggcacgcctgaggggagcatggagaggggaatcaaggtgtttgtgttggacgcattgaagaatggctacttccccattgtgatgaaccccagaggctgcggcgggtcacccctcacaacacctaggtga

SEQ ID NO: 1728 - DNA, 1435 bp, Oryza sativa
  Clone ID: PAT_MRT4530_101567C.1
atgggcctcgcccaccggcgcctcctcctcctcctcctccacctgctgctgctcgtcgccgcggcggcggaggcggccgccgccggagcagggaggaaggagaagggtatcggcggcggtggggggctgcggttccggggcgggagcgggacgttcaaggtggtgcaggtggcggacatgcactacgcggacgggcggcggacggggtgcctcgacgtgctcccctccgaggccgccggctgctccgacctcaacaccaccgccttcctctaccgcctcttccgcgacgaggaccccgacctcgtcgtcttcaccggtgataatatctatggctttgatgcaaccgatgcggccaagtctatggatgcagcaatcgccccagccattaacatgaaccttccttgggctgcggtgatcggaaaccatgaccaagaaggtacgctgtcacgcgagggtgtgatgcgtcaccttgtgggcatgaagaacaccctttctcgcttcaacccagaaggaatagaaattgatggttacggaaattacaatttggaagttggtggggttgaaggaacattgctggctaacaaatcagtgctcaacctctattttcttgacagtggtgactattctacggtgccttccatcggtggatatggttggatcaaagcttcacagcaattctggttccagcaaacctcttcgaatctccagacaaaatacatgaaggaggaaccgaagcagaaggcggcagcgcctggtcttgtgtacttccacatcccattgccagagttcagcagcttcacatcatccaatttcacaggagtgaagcaggagggtatcagctcgccatcgatcaactctgggttcttcgccagcatggtggaggctggggatgtgaaggccgccttcatagggcatgatcatgtgaacgacttctgtggaaagctcaatggcattcagctgtgctatgctggtggatttgggtaccatgcgtatgggaaggccgggtggtcgaggagagcgagggtggtgtccgtgcagcttgagaagtcggacggcggcgagtggcgaggtgtgaagtccatcaagacatggaagaggcttgatgatccacatctcaccacaattgactcagaagtcctctggaacagaggctccaatggaaggcgcaagaagaatcctgatggaaagatgagatagtgatatagatgggaagacggggatagtgaaatgttgcaacgtactacacgttatgatgtgctgtttgccaatttgttttacaaaattttcgatttatgtaaatgaacaaaaacatggtacacgacacggcatgcacccttttcgcggttgtaattctcaccgagaaaacagtgaattttagtaaaaacagttactgtagttttaaaaaaaaaaaaaaaagaaggccgctcgcgatcta

SEQ ID NO: 1729 - DNA, 510 bp, Oryza sativa
  Clone ID: PAT_MRT4530_101568C.1
atggccagatctgttgctccaggcggcggagagccaggtcagcgagttggcggcgtcggtggcgtggagttggcggcattggcagatagagttggcggcctcggcggtgtggaggtggcggcgggggcggcggcaagcacgatagcgtcggaggcatgggtggccgcggcaggcatggaggcgcgactgttgtggccgccggcgggctgtggcaggccggcggctcgaggcgggtcgccggtgcgagcgggccagcgagtggacgtcggtggcaggcgtcggaggctgcggatccgaaggaagctgcaaaggtggaggatggcgcgctcgcagcggccttcttcacgatggcggggtggcgatggtggcggggttggtggtggagcgacagcggcggtggtggaggccagggggcggagaactagggctgtggcggctgtggctgtggttgttgtggcgaccgtggccgtgcctacggcgagaggaggcacgacggtctcggacagctag

SEQ ID NO: 1730 - DNA, 772 bp, Oryza sativa
  Clone ID: PAT_MRT4530_101569C.1
gaagtcatttacaatgttaatgcaaggcttgatcttgctgatttgaatattaaaccagaattgcagttgcagccaaatggagatgattatcacatgcctgaagctagatacacattgtctagggaaaaaaagattaaattctgtaaatttttgaaagaaacaaagttcccagatagctatgctgcaaatatcgaaagatgcataactgcagagggaaccagcttgcatgggcttaaaactcatgactgccacattctgttgcaaaggatattacctgctggtatgagaggtattttggatgatgatatatgtttagtgattgccgagcttgggaaattttttagggaattgtgcagccaaacactcaacaaagatatcttggttcgaatgaagacagaaataccagctatactatgcaagcttgaaaaactatttccacccgctttttttgatgtaatggttcaccttgctgtccatttgcctgacgaggcaatgcttcgagggccagtgcaatttgggtggatgtatcctgttgagcgacgattgtacactttgaagaggtcggttaggaataaggcacgaccggaaggctcgattgctgaggcttatgttgcagatgaagccctcacattctgctctaggtatatggaggatgtggagactaggtttaaccgagcaccgagaaatccatgattctcagatccatcggccttcaatattgatgtttttgggcacggtgttaatctgattggtgcatgtgactatggttact

SEQ ID NO: 1731 - DNA, 606 bp, Oryza sativa
  Clone ID: PAT_MRT4530_10156C.1
atgccgattgccgccagccgcgacgcgagtcgggggacttgggccgttggtttcccggaatggccggccaccacaccaccgaggcgaggcgactactactacttgtcggtcctggaccttgactcgctctctcctctcgccgtctcgcggcggcggcggctgctgtccgagtggccgtgcgtcgcgtggtggaaagctgtgagcgaacgcggcgactgcacgtacggcaccacttgcttgtttgttccccaagaggtcactggcggaagcccgcaaagtattagccggattcgggtggcggcgcggattcaggcagatggcggcgtgggccctcttgctcgcgtcggcaagggcgacggcgacgctggaccgacggacaatggcggtggtcctgcatgcttctccggcttgcactacaaggcgccactgcctcgaccatcggcgggaggccaccgatgcggcgccgttgccacgccctcggtcaccgatgaggttgcaccatcggctctccttcttggccacattgctccccaacagaggaaaagggtatggaaggtggtgggacccacagatggcaagtggagtaggctggctaagtttggctag

SEQ ID NO: 1732 - DNA, 163 bp, Oryza sativa
  Clone ID: PAT_MRT4530_101570C.1
gagggctatcaaacccaaaaaatctttctgcagccctcgggaaatttctttggaaagttccattttccaatgggtatccacccataaagaaagccaacagcaccccatttttggcaggctttcactttttatccccctacattagagccgccctctggggggg

SEQ ID NO: 1733 - DNA, 999 bp, Oryza sativa
  Clone ID: PAT_MRT4530_101571C.1
atggctccacacgtcgccgctcccaatcggccgatggatcagccggagagcgccgccgcgtccacgtcggaggaatccgagtccgcctccgcctcgcatcgggcaatctggttggattccgtttccatatcagtgaggattccgattccgccgcgtgtcgccaccgccgccgccgcaaccggtttccttgctaagccgccgcctccgctggcgccgctggtgatgtcctcttcctcctcctcgtcgtcgcagggtggcggccgccggcgcccgatgtcccgggcgctgatcgagcagcaccggccgtgggacgtggtggacaacatggccctcatcatcatcgaccagacgtacgccgccgcgctcgggatccccgggcggagggagatgggtgacgggtcggtggaggtcagcagcgccgtcgacgccgacgacccggactcgccggtgctcaccatcaacgccagcgccacgcgctgctgcgtcgccttcgacaccccgcgccgcgacgccgtgccgtacaagaagttcacctccccgaagcggaagacgcggcccgaccaccgcctcgcccgcaccatcgtctctgtctcgccggcgacgctctacctgagccaccgctccgactgcgtcggcggcgacagcgacagcaaggactactggtcgtgcgccgaggtggcccccgacgtggccgccggcggcgcgctcgcgatcctggacacgatcatgctgcggctggaggcggcgatccatctggaggagaacatcctcgtcaacgccatggagttcaactgcggcacgagctccgtcctcgaggtggtggccgagacgcgcaacgcgctggaagagatgaggcgagagatggacctcccggaaatgatgcagaggaggctgcacaagcgccgccacgtcgtcgtcggcgacgccgccgcggcggatcacgacgacgagtcggcggagaaggtgttcaagaagttcagaacaatgcgctgccgctga

SEQ ID NO: 1734 - DNA, 288 bp, Oryza sativa
  Clone ID: PAT_MRT4530_101572C.1
gttctgtgttatgcacatggctggaagcgaattgtgtaatgaaaatacagtaggccttgttcggttaatcctttgagggagagattggaggggatgttattccacacactatgtgtggtgtggaattattccccctgcaatcccctccaatcctcttcaatctcctctaaaccgaacaagcccttagccggattggccgaaagaagaggccagctaaatctttttagtgaaaatacatggtctaatcaaagtaattctgcatccttttgagacaaaaaaaaaaaaaaa

SEQ ID NO: 1735 - DNA, 408 bp, Oryza sativa
  Clone ID: PAT_MRT4530_101573C.1
atgcagccatcgctgcccttcctcacaatgctactggatccgggatgggaggggaagggccgccagccggatctaggaggtgggaacgccgccgccgacctcccgcgtccaccgctgcatgcgtacgttgtcgccgcacggccgtgcctcgccgccgtccgccccgcgccgccggccataggcctccccctgcccccttcaaccggatctaggagggataggggaggcaaggcgcgtcaggggtggatgtcaccgcccccgagcgtcactgtccccgtgccttgtcgtcgtcgacgccaacccagcgcctcgccgtcgtggatcccgccgcccccacgcgtcgccgtcgtcggttcccgccgcccccgtcgccgaatgcccacggtcgctgagggagaggagagctga

SEQ ID NO: 1736 - DNA, 204 bp, Oryza sativa
  Clone ID: PAT_MRT4530_101574C.1
atggcgccttccttgcttctaggccatactacaagaaggccctacgtcaccctctacgctccatgtgtcccccgaccagccggcctcttccttgtcggggtggtcctcagtgagagggcacgccaagccagcgttgccctggccgtggccaggaggaaggtggtggaggargaagagggcgcagaggggaagggaaggctctga

SEQ ID NO: 1737 - DNA, 599 bp, Oryza sativa
  Clone ID: PAT_MRT4530_101575C.1
ggtatgcccaatcaatatatatactaaatttattagataccactcaatgaaaaccaaaaaaaaatcccagaaaattaaaatcttctcaaatactgatacaacgataagtaaaacggccagttccaaaactgaaccgaagccaaactaaaaccatgccacataaatttgcacctctttgggatattccaaaaactaaaaaaaaagagaggtaaatttgatatttgggaaaaaaatttaccaagcagtcatataattatataataaatcccgttttaaacccatcaaataaaaattaaaaaaaccacttcatcgaactttaccttatgtgtataaaatatatatttttgggttaagaagaagaagctatgatcagaatcaaggaaggtagagaccactctgatcttggtcagacgacgtccattgactttgactccagtatgcatgatcaacggtactggttaaatcaaacagttgtttgatctccaccgccacttccccatccaacggttcaaatcccattttcggatcccgatgatcttccttgaaactcaacctgaccggttcgatctccaaactgttgctgctgtacagtttcacct

SEQ ID NO: 1738 - DNA, 561 bp, Oryza sativa
  Clone ID: PAT_MRT4530_101576C.1
atgaacgtatctgagatgaacagagctggaggcggaagaacaagtgccgaacaaagccatcaggagctcggggaagatgaactgaaatggccggacgacgggtggggaggaggccgacagggtaaggcgggagaggaggagggcatcgggggccagcaacgcggcgatgggcgacgccgtggcggcggcggcgacgcaggaaaagggttgtcgcagagggtgtggtggagggcgccgaggctgaagtgggcgaccaaccttgaggtcgcctgcattgttgaggaggagattctccggcttgatgccgcgattgtacacgccacgagagtggtagtaccggacagcaaagataagcttccgaaagtagtgttgtgcgaggtcctctatcatgcggctggacgcgtcgagcagggagaacagctagtcgccagcggcgaggtcgaggacgaagtggacctcgtggcggtggtgctacttggggagaatggccgcctcccgctcgatgggtacgggatggagatcctcgccgccgcggaggccatggcgggggttggggaatga

SEQ ID NO: 1739 - DNA, 408 bp, Oryza sativa
  Clone ID: PAT_MRT4530_101577C.1
atgggagcctttgctactcctgagatcgcgagaatacgtcaggaactagacattcttcgcttcatgatcgcgaccgaaccagctttctttggcctcgatcttgatctgttgcaactactatttcctttgcttgatctgttctccgcggctttaggccgccggccagccctcgcgccgccgccagccggccagaccccgagccgccgcacaagcccacgcgctgaccccgagcccgcgcgccgccggccagcccccgcgccgacgcaggtcgcgcgctgccggctagcccctgcgccagcctgcccagccgaccagcaccccgcgtcgccgccgagcccgcgcaccgtcggccagcaccccgcgctgccgacctcgcacgcctccgccgagcccgcgcgccgccgctag

SEQ ID NO: 1740 - DNA, 1145 bp, Oryza sativa
  Clone ID: PAT_MRT4530_101578C.1
cgggctgcaggaatcggcacgaggctaaagcatgtaaccaaaacaagggaagggatatggtccattcaattgaagttcttggcaacagagaagctgcaatgttatttgaggaagttgtgtctgaatccagaagtactaaagctggtcaaaagaaaaaaaatgaaaaacctcctgacagaatctgggaaatatgtggaggtctgcctttggcgattgttacaatggctggtcatgtagcctgcaacccacacaaaactcagaggaaatggaatgatgtttgcaactctctatttccagatacgctggatactcgttttaataagtcagatactctgaacccagaaggggttaccaagattcttaattattgctacaatgatttacctgctgatctcaagacatgctcactctatttaagcatatttccaaaaggtttcaaaattagcaggaagcgtttgacaaggcgatgggtagcagaaggttttgtcagtgagaagcaggggttgagtgtggaggatgttgcggagtcatattttaatcatcttgttagaaggaagataattaggcctgtggagcacagcatcaatggaaaagtgaaaacctgtcaggttcatgacatggttttggaatacattgtatccaagtcaaacgaagagaatttcactactgtgataggtggccattggcttgtgccaatgcacagcaacaaagtccggcggttatcgctccaaagtattgattccaaccatggaaaagcagtggagaaaatgtatttgtctcacctccgctcactatctgtttttggaagcttaaaccaacttccgtctcattcatttaagattggattagtacaagttctagaccttgaaggctgcacaggttttgaacagaaacatattaaggaaataagtaaattgctgcttctgaaatatttgagcctccgaaggacagacattgacaaaatccctgaatacatcggccaactccaatatttagagaccttggacataagggagacaaatgtggagcagcttcctaaatctataggccagcttaatcggatgagtaacatacttggtggaaacaaaataacaagaaaagcattaaagttacctgaagagataaagaatgaaaccatgagagcc

SEQ ID NO: 1741 - DNA, 649 bp, Oryza sativa
  Clone ID: PAT_MRT4530_101579C.1
ctggggttttttagtttttttattttattttattttttatattgtttttttttatttatttttttattttgtttttatttatttttttatatggttttaaaaaaagaaagggtgctaaggacagcaaaaaagggaaaaaaaaagcaagcaacagagaaaaaaaaaagaaaaaaaagggggggggggaaaaaaaaaaaaaaaaaaaaaaaaaaaaaaaggggcaaaaaaaaaaaaaaaaaaaaaaaaaaaaaacaaaaaaaaaagaaaaaaaaaaaaaaaaaaaaaggcaaaaaaaaaaaaaaaaggaaaaaaacgaaaaaaaaaaaaggaaagggagaaaaaaaccaggaaaacccaaaaaaaaaaaccccggacaaacctggaaggaaggacacggaaaaggaacacccaggggggggcccaagacgggcccaccgggaccggaaaggcccattaggggggcccccggggcaccagggggcggaccaaggggcgcaggagcaggttcatcggggcgagggaggggaacacgcggttaaaagggaggcgacccccccttagggggggggggggcaacggccaaggaagggggggccgacaaaatttggtagggggggaacgctgaagattccgggggggcagcggcgga

SEQ ID NO: 1742 - DNA, 616 bp, Oryza sativa
  Clone ID: PAT_MRT4530_10157C.1
atacttcgatcgcacttcgactacacgccgagtgcgccttttctcttcttcttattcccaaagccgctaaatctatcttcccttgcctaagccgacacgaaggagcgaccgcaacgcgcgagcccacatacgatatacaatggatgcaggatatgaacacacatttgggattctaggtgcttcaatagtaccagcgccatatcatacctaaggtcatgctaaggcagaaatgcttgagagtgatgagaatagaaccaagggttcccacatgtgatgaaattataatgcttgatacagataacaaatctagagctgttagcgctattctcgaattgaggcaggaccagacaatgagctcaccacagcaaggcgcgttatttgaatacctcgcgagtatcccaacagacactatctgaaacaggacaagctgactaagacacagaatatgttctgtagatgaaaacaaatgaagctaccctagttccttaaaaggactggagcaagcggaatgctgccatgcaaaggattgaggctgtggagatagcacactgtatatcatattgatgcctcgatatgctaacggagcacaaacagttgcctatgttgcgtgaccttc

SEQ ID NO: 1743 - DNA, 818 bp, Oryza sativa
  Clone ID: PAT_MRT4530_101580C.1
atcatccacaaaaccctaaacccaccaaacccgcgaaggcggcgacggagcatctatcggcttctccgatcgtacctacgcgcgtgccctaaaaagctagcgccggccggcgcgccgtacgtacgtccgccatgttgccggcgatgccgtcgttggcgatgctgttcgccgtcctcctcctctgcgtcgccaacaccctcgccttctccttcttggcggtcaggatcttccgcgccgacggcggcccatccaagctgaccgcgtccagcgtccgcaggtcgaccaagtgcatcctcgtcctcgcctgcgtcgtcgaggtcgccgtcctcttcgcctccctccgactcgccgccgaccgtcacgccctctccggcgaggtcgaccacatgcgcgaccagatcgaaaccctgcaggatgatttgaagcagtatgagcaaccgttctctgcgttgagtgattatctcggcctcagcgtgctagagctgggtagcgccgttggacgcttacgtgataaggaggaacatctagtcaaggaatatcgtgatctgaaactcgagattgaacaaattaaatctgatatacagtctctgcgacatgagaaggaagggagaggctaccataaggaaacattaggtggcacctcaaatcagcaaaaacaagagaataacgagaaaacaaagcaaccagcgatagatggtattatgaagtcattacgagcaaaagcaacaaagttgcagcaggtcaagataagctttccttgggagaagatgaagaaagccaagaatatattcagcatggatttcaagctacggccgtag

SEQ ID NO: 1744 - DNA, 309 bp, Oryza sativa
  Clone ID: PAT_MRT4530_101581C.1
atggactccccctgcctcccactcctcccattccctctcctctcgatgaggcagcaacgggctcaggcaagggcggtagcgggtgagggcaagagcgacggtctcgggcatgaggtatcccgccggcagcggcaactggaggggcggatccagtgccccctccccttcccgcatgaatcccgccaccacttcgcctcccacgctcacagttccaccaacagcggtgactggagggccagattcggtctcccctcccctcccgcacagatcccgccgcctctccgccccccatgcgcgtggatctgctag

SEQ ID NO: 1745 - DNA, 574 bp, Oryza sativa
  unsure (1)..(574): unsure at all n locations
  Clone ID: PAT_MRT4530_101582C.1
atggacctggaagcgtcgcatgggaaggtatcgataccaggcgctgtcacccagcagtaccgttgggcacaatgcggcacgggcagggcccttgatcagggaggggcctcctcctccccctccccctccacggcggtggcggcgcccgtctacgcccccacgccgcgggaccgggccctgcggacgccgcacagcgggtatcactatgacggcacggcgaggcccttttttgagggatggaacttcaaggtgtccattcccgagtgcaggcagagcttctgcttcatgtacttttgcttaaaaccctttgtttcgagatgggatgagtgatctggaatcggttcatacatggatcgcgcttcactggcgtcggggcacacattcttggcgcctttgataagtacatatgccagttcaccgagaaattcaataacttttggggaagtaggcatgaactaatgctcggaaacactttcattcccaataatggttcaacacccccagaaggggaggttccccctagacaggngagtttttatacaaaagagggtttatttatgtggcaccctatttt

SEQ ID NO: 1746 - DNA, 503 bp, Oryza sativa
  unsure (1)..(503): unsure at all n locations
  Clone ID: PAT_MRT4530_101583C.1
gatccatggagccggcgtcgttgttcagcttcgtgagcgcgatgataaagctggcgatgaagatcgccacggtggcgaagaaggctcgccagaaccagaccaagtgcctggagctctccgaccgcgcgcggcgagtcgccggcatcctgagcaactacaactacaagcccgcggctaccggcgaggcggcggcggcggcgacgtgggacatgctgggcagcctcaacgaggccctcgacgaggcgcacaagctcgtcgagtcctgctgcggagacggccagatgtacaggctcgtgggcagccgcgcggtggacgccaagctggacagcgtcaataacaagatcagcaactgcctcatggacctcctcgccgcccaaggcgcaggcacggcgaagaagattngatgagctgcaccttgtggttcgtggatcgncaatcaccaaccgtgcaagcaaattcgaacgccggccggtccgcgaaggataangatgaccagtcatcag

SEQ ID NO: 1747 - DNA, 518 bp, Oryza sativa
  unsure (1)..(518): unsure at all n locations
  Clone ID: PAT_MRT4530_101584C.1
gtaccggtaccggcccattcccggtgtcgnnacccacgcgtccggcccacgcgtaccgggtctgtgacttggtggcgctttttgtacctactctactggtattacggtttcgaatcccataggcgataggcgcatattccagttagttcctaccgacttatcaaaagcatatgcgctactagatggtgtttgtgcgggcttaggtctgtaggcatgttgttgtttacaagaccttacctgtcataatatggtgtttgtctcgccattcttactcattgtgtcgccacactgagctgtggtgagattctttgcgcatcgcttgttgtcgttgtaatacctatctagtgaagtaaactatggtctgatggaaaaatcagtgtcgctcttctagtctacgcctgtactganggctgtgcacatggaatgtatcatcttttgtctccgatagccatctggtttctggatttcctttcatatctcttctttccagaccacgacttctattaaaactcaggctt

SEQ ID NO: 1748 - DNA, 1747 bp, Oryza sativa
  Clone ID: PAT_MRT4530_101585C.1
cttctgcgctgctgcccgcccgcagcatcagtatggacctcgccgccgccgccgtggccgtctccttcccacgccctgctcccccgccgcgccgctgcgccccacgccgccaccgccgcgccctcgctccgcgcgcggcctcctcctccccctccccctccacggcggtggcggcgcccgtctacgcccccacgccgcgggaccgggccctgcggacgccgcacagcgggtatcactatgacggcacggcgaggcccttctttgagggatggtacttcaaggtgtccattcccgagtgcaggcagagcttctgcttcatgtactctgtcgagaacccgttgttccgagatgggatgagtgatctggatcgggtcatacatggttcgcgcttcactggcgtcggggcgcagattcttggcgccgatgataagtacatatgccagttcaccgagaaatccaataacttttggggaattcaagtgcatatattcttaggagtcttatttgttttggatgtagtgtgcattccatgcatctataaaggtaggcatgaactaatgctcggaaacactttcattcccaataatggttcaacacccccagaaggggaggttccccctcagtgcttctgtattaaagaattcaagtcaaagtatgtgccaaatgtccaaacagctaggtgggagtacagcactcgaccagtatatggctggggtgatgtcacgtcaaagcagaaatcaactgctggttggcttgctgcttttcctttctttgaacctcattggcaaatatgcatggctggtggcttatccacaggatggattgaatgggacggagagcggtttgaatttgaaaatgctccttcttattcagaaaagaactggggtgcaggttttccgaggaagtggtattgggtccagtgcaatgtcttctcaggcgcatctggtgaagttgcattaacggctgctggcggattaaggaaaattggattgggcgaaacctatgaaagtccttcactgattggaattcattatgagggaaaattctatgaatttgtgccttggaccgggacagtgagctgggacattgccccttggggtcactggaagttgtccggcgagaacaaaaatcatctggttgaaatagaagcaaccacaaaagaaccaggcactgctttgcgagctccaaccatggaggctggactagtgccagcatgcaaagacacctgctatggtgatctgaggctgcaaatgtgggaaaagagaaatgatggtggcaagggaaagatgatactcgacgcaacaagcaacatggcggcactagaagttggtggaggcccttggttcaatggttggaaaggcacgactgtttcaaacgagattgtgaacaacgttgttggtacccaggtcgatgtggagagcctcttccctatcccatttctcaagccccctggtctgtagcattgttcaggtcgagccatcgataggtagagatgaataggccctccaatcttgtcacaccttgagtcttgatctgttcctcacttagcatcatgttttcagccagagaactacagaaacagtaaaccaatcagcatggagtttattctcgttgggttagagaaaggcgcctttcgggtgaaatcatgttgcacaaatttttacagatcaggaatggatgctgtaattcaagaaaataagtataattcatcttaggcagttccatccaaaaaaaaaaaaaaaaaaaa

SEQ ID NO: 1749 - DNA, 281 bp, Oryza sativa
  Clone ID: PAT_MRT4530_101586C.1
tgtcaacaagaacaggaggagtaaagcctcggggtttacgttcccatgctacgcgacctccgacgaagagactaggcggtgaactcgcgcacgccaacccggtccacccaggcccagggccacctcggcggggatcgccagagaagggggtcgacgggcggagcgggcgctaccaccacatggacgggggagggggcgagtagggcgacggctggggagaggacaacgagccgctgacagatctgccgcgcgggctgccggagggggcgggggcccccatg

SEQ ID NO: 1750 - DNA, 204 bp, Oryza sativa
  Clone ID: PAT_MRT4530_101587C.1
atggagtggccgagggggtggggggccgggccgccggggtggagcggcggccgggacggtgatggagtgaagcacagtcaacacagcgtggtggagcggaggaccggcgcgtccgagatgatggagaggagcgcatgcaggcgagtggagccaagtgtgatcgagggaaaggagatggcatatgtaacgctccgcttttcgtga

SEQ ID NO: 1751 - DNA, 420 bp, Oryza sativa
  Clone ID: PAT_MRT4530_101588C.1
ggggggccaacaaaaatttccgaaaaaattaaactggcctcgcacaggtcaattttacatggtccaacaatgcaaagtaccacaagggaaaggcccattgaaagcccagctggggaactagatccaactatcgggaactaggaaaagccgctgcgggaaaattaaacagttcaaactggagataattttgcaaaacgggcccaattgcctgacaaccccttaaaaggggggattggagaataggcaaaagctggggcccaaaacattactgttacaaacaaaatttgaaaaccccggagcttctggcactaagcaaaatattgaattggggactacccaacttttggaaaacctttagttccgggggcattacaagaaaaggcctagcgaattaacctgggaaaagggttaactaaaaat

SEQ ID NO: 1752 - DNA, 978 bp, Oryza sativa
  Clone ID: PAT_MRT4530_101589C.1
ctttttttttttttttttttttttttttctctcgtgaatgttatctcatatcaaaatataatatatatagcacttgcgagtacatgtgaatgaacgaactgcgatataaatgtactgtaatcagtctccaagtataggagtacatataattgatttgagaacttaatcgattatcaaaaaaaaaaacttggaatggacgcatgcagtatttgtctgcaatatgatgagtgatgacgaccatgttccctgtcgtacgtagtagtaggtcaattaattaattagcgttttggcggcggaggcggagggaggacgtagtattgggcgagtgtctctgcgcaatccatgagcgcccagatggcatgaaacttgtcggcgatggcggcctcatcggcggtggaagtcttgtcggggcagccgctcttgcatagtgggggagcggcgcccgattcgaacttgttgcggaggaagctctggactttcgggtacctctcgacatcgatatccgcggggagcccggacatggccttggacacgtcgtcgaggctggcggcgcaggatgcgagacacttggggagctcatcaccgcccttctttgcggcggcggcggcgagcaacggatcggccagggccttggcctcggcgctccggttggctatgacgtgagagagcagcaaggctaaatcaacctggccggagagcttgaattttagatccgggatggtggccatcaccctcctacatggcctgtgctccctcgcatacatgcagatttcgtagtagaggtccggaagttccgagtcctccacacggtaccgaatgttctgatcctcctccaacacccggccgtgctcggaggctgccgcagcagagacgaatactgcagcaaggaagacaaggaaaaagaacaacgtagagcaattaggcgtgaatgaagccatggtcgttaattagaatcaagctgttttcccggacgcgtgg

SEQ ID NO: 1753 - DNA, 297 bp, Oryza sativa
  Clone ID: PAT_MRT4530_10158C.1
atggagccgtcggcgacgcggtggaggaggacggcgatggcggcggggaggatcgaaggcgacggcggcacgggatggttaggggatggcgatggagcggtggatgcggggatgcgggagcgatggagcggtggatgtgggagggatgaggcgaggagctgggtggggatcaactcatcaagcgaccgcaagtctaataaccctccccctgttcctccctcactatggcctgggtcccaacgctacagtgtcatctcctacctccggtcggactcccgcatctgcccgactgtttga

SEQ ID NO: 1754 - DNA, 948 bp, Oryza sativa
  Clone ID: PAT_MRT4530_101590C.1
atggcggccgcggctcaagcgacggtggcgccatcaatctcgtcagtagccaggcaacctcagcgattccctgcaccgagtactagtgggaattcgaaatttcctctatttaaaacatcatgcttggcaatgagccatggccttgtatccaatactgctgtgtcttcacaaccaaatgatggagctgctaaactcatccagcctgtagtcaaaatgtgtggcatcacatcagctaaagatgcagaaacggctttggaggccggagctaaacttattggcatgatactctggccaaactccaagcgttctgttgcgttagcagaagcaaaagaaatatcaagagtagcacagtcttatggggctgaatcagttggtgtctttgtggatgatgatgaagagaccatcttacgagtgtctgattcatgtgaccttaatctagtgcagcttcatggagatgaatctcgttcattacttcatgtgctatcgaagaacaatcgcatcatttatgttctaaatgccaatgacgacggaaagcttatcaacgctcttcctgatgaaaaatatgagcttgattggttcttggtggatagtgccaaaggtggaagtggcaagggattcaactggcagaagtttcagatgccgtctgttcgaagcaagaatgggtggcttttagctggaggccttcacgctgataatgtttgtgatgccttttatgccctgaaaccaaatggagtggatgttagcagtggaatatgtgctcctgatgatcacaatgattattctggtgtttggaggttaacctcattttgtttgcttaatgtggagaatgaagcagagtctcttctgaagcaagctgttcatttattcagcatggtagtggtaaatgccattggggttaaagtcgaaatagtgaccaaatttctgaggattttgctagtgatgcagtaa

SEQ ID NO: 1755 - DNA, 391 bp, Oryza sativa
  unsure (1)..(391): unsure at all n locations
  Clone ID: PAT_MRT4530_101591C.1
tcctggctgcttcccctctctacccttctctctacttctttactattcctatatcctntntttctatctcccattctttnnatccccatccccttccttcttactaccctcatccttcccattctatttattttatattccatatactacaaccattttaggcccttcncatacttatttcataaccctnncttactnattatcttttttataataataacacttttccantnctcatctacctttntcatcctaccatttttttaatctcaattccttctatatcctcnatacantattactcctttnnatttctacatcttccaattnataaattctatnctattaacttttcccanctttccattaacctaccaactacatttccaac

SEQ ID NO: 1756 - DNA, 919 bp, Oryza sativa
  Clone ID: PAT_MRT4530_101592C.1
ctaaatgccaatgacgacggaaagcttatcaacgctcttcctgatgaaaaatatgagcttgattggttcttggtggatagtgccaaaggtggaaggtcagattttgctcttattgcttcttctatgggaagtagaaaaattgctcaagtgctgaaattctctgtttattccttaatatgagatcatgggatttgtaatgaatgctcaaaagagtaaaagttgactcaaataacctcttacatgtttgtgatataccaacttaaacatcagcaccttgtagcactatcatgtatatgctagtagttcttgagttcaatattctacttcagttctttatcttgcataatgcatacttactaaaagttcttggagtacatgctaatttacttgcatatttccctgctagaacatgtatatggctgacatctacatcttagtgtatatgtttatagtggcaagggattcaactggcagaagtttcagatgccgtctgttcgaagcaagaatgggtggcttttagctggaggccttcacgctgataatgtttgtgatgccttttatgccctgaaaccaaatggagtggatgttagcagtggaatatgtgctcctgatggtatcagaaaagatcccacgaggatttcttctttcatgagaaatgttgaatccttgggcagatcacaatgattattctggtgtttggaggttaacctcaattgattgcttaatgtggagaatgaagcagagtctcttctgaagcaagctgttcatttattcagcatggtagtggtaaatgccattggggttaaagtcgaaatagtgaccaaatttctgaggattttgctagtgatgcagtaactaataagtgcactctctgtgtctcaagtcgaaggcaaaataaattgcagagtgcaacatagtt

SEQ ID NO: 1757 - DNA, 620 bp, Oryza sativa
  Clone ID: PAT_MRT4530_101593C.1
atggatccggcggcggcaatgatgaagctcgcgggtagatctagctacgagactcatgggcgtggatggatccggcggcggcacacatgggcacaggtggatccgacggcggcggagctcgtgagaggacttcggctgcaacggtgctcgtgggtgggcgtgagtggatccggcgacgacgctcgcgggcgcgggtgtatccggcggcagcaggaattgggcacaggtggatccgacggcggcggagctcgtgagaggacttcggctgcaacggtgctcgtgggtgggcgtgagtggatccggcgacgacgctcgcgggcgcgggtgtatccggcggcagcaggaatactcgccaccatctcccggcggttcttcagcaaatctatccagccggtggagcggtcgtcgacggtggcgccatttcatcccacgcagcgggcacagccaatggaacggacgagcggtcatcttcaagagagagggatgcggggaagagctgcagaggacatgccggcggccactcaatgttcgtgcagcctgccaggctgctactgctgcattactggggaagagatgagctctgcccgatcaggatagggactaataaaagaggaagatga

SEQ ID NO: 1758 - DNA, 1122 bp, Oryza sativa
  Clone ID: PAT_MRT4530_101594C.1
cggacgctgaattcgatcgagaatcaccatgatgacaagtagaatgttttcggcaatgcagatgctgatcatggtggtggtggcattggccgggctagctgccggagcgcgcgccggcgacatcgcgatctactggggccagaacggcaacgagggcacgctggcgcagacgtgcgcgaccggtaattacaggttcgtcatcgtggccttcctgcctgtgttcggcaagggccagacgccggtgctgaacctggccggccactgcgacccggcgtcgaacggctgcaccggcgtgggcgccgacatcaagtcgtgccagagcctcggcatcaaggtcatgttctcgatcggcggcggcgtcggcaactacggcctgtcctcccgcgacgacgccaagcaggtcgcggcgtacctgtggaacaactacctcggcggcacgtcgccgtcaaggccgctcggcgacgccgtcatggacggcatcgacttcgacatcgagagcggcgggggcatgtactgggacgacttggccaggtacctcaaggcgtactcgcggcaggggagcagcaagaagccggtgtacctgacggcggcgccacagtgccccttcccggacgcgtcgctcggcgtcgcgctcagcaccggcctgttcgactacgtgtgggtgcagttctacaacaacccgccgtgccagtacagctcgtccaacggcgtgggcaacctggcgagcgcgtggaagcagtggacgtcgatcccggcgggacgggtgttcctcggcctgccggcggcggcggaggccgccggcagcgggttcgtggagacgagcgacctggtgtcgaaggtgctccccgtggtgaagaagtctcccaagtacggagggatcatgctgtggtcgcggtactatgacgggctcacggggtacagcgacaaggtgaagtccagcgtttgagctagccagggtaagctcgtgtcaggtcggcgttcgcgtagaatcacacgtgccgcgcgttccctgcaagatggagtagtttctacacatttcagaacaaagcaaacatgtacaataagatggccggcttgtatactcatttagaagcagaaaaaattgtgagaaatttacgtgtt

SEQ ID NO: 1759 - DNA, 678 bp, Oryza sativa
  Clone ID: PAT_MRT4530_101595C.1
tactacccccacagcataactagaaattaggagtagaaaatagtagaaacatctctaaccagcaaagaacaggagccacacgaatctaatggccaccgctttccacaccatcgccgccgcccgcccccgccttcctctcgctgcgttcgcttgcctctgccccggcccccgccccgccaccagaaagcttagcctcacctccacggcggtctccaccatagactccgcgcccgctagttcgtcggacgccaagaagacgaccaccgtcttcgtggccggctcgacgggccgcaccggcaagcgggtcgtggagaagcttctggagaggggcttcggcgtggtcgccgggcacgacagacgtgggccgcgcccgcagaagcctgccccaggacccaaacctccagctcgtgagggctgacgtcatggagggcacagacaagttcgttccgtgcaccctgggccgcggcgccggtcgtctgggcgatgggggctccggcggccggtgcgtgccctgttgcgtccgtgggggcgggcgccacggagggcacagacaagttggtcgatgcgatccgtggcgccgacgccgtcgtctgtgcgacggggttccggcggtcgttcgatccctttgctccatggaaggtttgcccgcaaattgattgaagttcatcttatccaatc

SEQ ID NO: 1760 - DNA, 312 bp, Oryza sativa
  Clone ID: PAT_MRT4530_101596C.1
aagagtgcaacacgctttttcattgacgaatacaacatgaatatttatgcctcccaatacatatttatggaaccgaatgacagtctaagaccaacaaaaaaagatctctgatatacaaacaacagcggagctcgccccgaaccgaaactatccttacggggagtgacccacataagaaagcatccttgggggggagctagcaagcaaaatgagggtctaggtgacaaacaggggacccagagggggaagcaggttacttcccccactgcccaccatgaggtgtaggaatagatattagctaacgacccgggg

SEQ ID NO: 1761 - DNA, 2091 bp, Oryza sativa
  Clone ID: PAT_MRT4530_101597C.1
atggggatctccgccgccgccgccgccgcccccttccttctcctcgtcgccctgctgctgctgctgccgtcccccgccgcggccttctccttcacctacaacttcacctcggcggacacggcgccgtcgggcatcgcgttccagggcgacgccttcttcaacaagttcatccgccttacccgcgacgagcgcatcggccccatcaccagcagcgccgggagggccttcttctcgcgccccgtcccgctctgcgaccccgtctcccgccgccgcgcctccttctccaccgccttctccttctccatcgccgcccccgacccctccgccgcctccggcgatggcctcgccttcttcctctcccccttcccctccgtcctccccaacagctccgccggcggcctcctcggcctcttcaactccttctcacgcgggggcgcagcggcggcgcacccgcgcccgctcgtcgccgtcgaattcgacacctacaagaacgagtgggaccccagcgacgaccacgtcggcgttgacctcggcgggattgtctccgccgccaccgtcgactggcccaccagcatgaaggacggccggagggcgcacgcgcgcgtcgcgtacgacggccaggccaagaacctcaccgtcgcgctctcctacggcgacgcggcggcggcggcggccctgacggaccccgtgctctggtacgccgtcgatctgatggagtacctccccgacgccgtcgccgtcggcttctccgccgccacgggcgaggccgccgagctgcaccaggtgctgtactgggagttcacctccagcatcgacaccaaggaggagacggtaatcctgtgggttgtgttggggctctgcggtttgcttctcgtgctcgtcgccgctggcgtgctctggttcgtgtcgcaatggaggaaagccggagagctcgccgatggcgacatcgacgaggagatggggtacgacgagctcgccgacgaggagttcttcgtggagagcgggccgaggcggttccggtacagcgaccttgcggcggcgaccaagaatttctccgacgagaggaagctcgggcagggcggcttcggcgccgtgtacaggggcttcttgaaggagctcggtttggcggtggcgatcaagagggtgtccaagggctcgacgcaggggcgcaaggagtacgcggcggaggtgcgcatcatcagccagctgcgccaccgccacctcgtccgcctcgtcggctggtgccacgagcaccgcggcgacttcctgctggtgtacgagctcatgcccaacggcagcgtcgaccgccacctctacggcggcggcggcggcagcaagaaggccggcggcgcggcgccgcccctctcctggccgacgcggtacaacgtcgcgctgggcctcgcgtcggcgctgctctacctccacgaggagtgcccgcagtgcgtggtgcaccgcgacatcaagccgagcaacgtcatgctcgacgccaccttcagcgccaagctcggcgacttcggcctcgccaagctcgtcgagcacggcagccagccgcacaccaccgtgctggccggcacgctgggctacctggcgccggagtgcgtcatcacgggcagggccagccgggagtcggacgtgtacagcttcggcgtcgtggcgctggagatcgcgtgcggccgccgccccgcggagctcgacgaggaggacccgagcaaggcgaggctggtgccgtgggtgtgggagctctacggcaagagagccatcctcgaagccgcggaccagaggctcaatggcaagttcgacctcgagcagatggagcggctcatggtggtaggattgtggtgcgcgcaccccgaccacgcgcaccggccgagcatcaggcaggcgctgaacgtgctcaagttcgaggcgccgctgccgtcgctgccgcccaagatgccggtgccgtcgtacttcccgccgccggacttggtcgctccggtgtccgtcgaaggcacgtcgagcaccgatggcccaggcgtcagtgagtgtggatcgtctgggtccaatgccggaggaggatcggggatcaatgataggcttctcgatccatga

SEQ ID NO: 1762 - DNA, 1790 bp, Oryza sativa
  Clone ID: PAT_MRT4530_101598C.1
atgggatctacatcaggcatcgacgacttcgtcttccctccagggcagacgttccgtttcggcagcctcgacttcatcaccgacatcctcggcaagatttctcttcacgactcgggatcgaatcagttgggaagagatggcatctaccccgttcgacttaccgaacttggccaagatctaccccaagacttttctccgtgggacggcttcaaaccactcaggagagaccaccaagatctcatctccttcgtcaagttctgctcaagataagccgacgtatccaccaatcaccatgtggcttctggacgacctccccactgtattcggataaaggtagccttccccctaggtcgacccaatttggctttcggccaagatcgtatctagcttcagggaggtcggcgttatccttcaaccactcggatcttgctcatccatagaaattgctagctatttcagctcttccaccaacagctcccatgcgacactaagatcatcgactacgacgacttcaacgacgactacgacttcgataattttgccggctttgatgattattataacgacttcgatgatgactatgctctactctacttcggcgtctttatggccgaaacgagacggatggacagagggttggacaactcgtggacgaggaacgagcaagattggagcaggagcgccgggagcaagaatgactcagattggagcgagaacaccaggagcaagaccgactaagatcggcatgtgaacggcaagagcaagaacgctgcatgaaggaagacggagggccctggccgaatccagacgccgtgcccgacagctgattggccagacagtcattgatgacaccaacgtgttccttacccagcagcagaaatgtagttggagcaattactcttcttgataccatcatccccaataccctagatcatgtgacaccaacgctcgacaggatgaagaccatgatcgccgccacaattccgtacaacttgggagacagtcgacagcccaccgcttcgacgtatacaccttcgggaagccgactaccatctctcaggtaaagggattatcgtgagcccgaacgcagcaggaccaattctcgcatgcctcatgcgggcagggaacaccgggagcagttggttcactcaccagctgtcggacacagaggtcatcgtgcagatgcggagtaccagaactcctctcgagcacttgtcgatcttagggagaccttgaacgcacgccgcggagagagaaatgatcgaagacaccaacactctcatgcttttacaaacgacctatgtcgagtgaattggccggctggtttcaagctgactggtatcgagaagtatgacagtaagactgaccccgaatcatggctcaccatctacacactcgcaaatcgcgtagtaggaggagacagcaaagctattgtgaattatctgaccatagcgttagctgacttggccaggaactagctcaccgagttaccgtgaggcacaattggttcttggagcgagctccgcgaccacttcattgctaattttcaggggaccttcgaacaactaggaacccacttcgagctttacagcgtgattcaaaaacctgatgaacccttaagggattgcagtcggcatttttctgaaaagcgtaacaagatttctgatataaacgatgacaacatcgttgctgcattcaccaaaggagttcgcaatgagctactcattggcaagtttggacgcaagcctcctagaacgctcagtctgcggattgagaatatgaactcgttc

SEQ ID NO: 1763 - DNA, 346 bp, Oryza sativa
  unsure (1)..(346): unsure at all n locations
  Clone ID: PAT_MRT4530_101599C.1
cggcgtgttggctgctgctcatcagcaantcatagggggtattttttaggggagataatccgttttccgcccagcgcatacatccagaattggttccagatccaggcagccagccatctcaagcttgtctcttctcttggtattaagagcaagcacacagtagtctagcgaagcgagactgcgagagcagagcactgcacctgttctctagctatgagtggaggggaacaatggcttccgacaccaccgcagcaatggccctcgtgccgactgcttcccatcaccatcaccatcaccatgtcaagcagctgcagcttcctccgtctgtgttcgtctccgtgcccct

SEQ ID NO: 1764 - DNA, 404 bp, Oryza sativa
  Clone ID: PAT_MRT4530_10159C.1
aggcccacatgggatacggtggagaacaacaggggaccaatctgcttggagcaccagctggcagctctgcagcatatggggcacacaagatgctcttctcatgcccatggtgacacatggcttatggagcccatggagctttggtgtttacagcccatggctacagcaggtcaccacagcagccaagttcaacgcaatgcaaacgcacagccaccatggccaagttcaagcatgcaagcatgggccacagcatgttcggtggtgccaagttcaagaagtggaagtaatggccatgatctgatcatctgggaactctgtttagcctttaactgaagtgcttgcagcttgcctgtttaaaaccctaaaaccctctcgaatggtatctaaccaggatggacctttcc

SEQ ID NO: 1765 - DNA, 361 bp, Oryza sativa
  Clone ID: PAT_MRT4530_1015C.1
gtcgaccacgcgtccggcagcgatctgtggatctagtggtgaaggggatcttgaacgtcttgtgaccttgactttcattaggggttaactggggtttacattaattattacctactagtcgatcagcacgttgtctgcagtcaaaaaagaatccgaagctcgataaccgtgaagaatagcactaaattatatgccttcagccttcctaaagaaaggctagttggtgggggacacatcatcagtaaagagagcatcaattgcaaagatgaaaccaaaggaggaaatacagtacatcgtttttaatctctttggatagggatagttatcattatgaacttgatatgacagagagagctcagtc

SEQ ID NO: 1766 - DNA, 2578 bp, Oryza sativa
  Clone ID: PAT_MRT4530_101600C.1
gctcgagccccgccccctcgcccccgcgcgggggctagaggcaacaagaagctgcaggagagggtgcccatccggcgcaccgcgtggaggctcgccgacctcgccatcctcttcctcctcctcgccctcctcctccaccgcgtcctccacgacagcggcgcgccatggcggcgcgccgcgctcgcctgcgaggcgtggttcaccttcatgtggctgctcaacgtgaacgccaagtggagccccgtccgtttcgacacgttcccggagaacctcgccgaaaggatcgacgagctcccggcggtggacatgttcgtgacgacggcggacccggtgctggagccgccgctggtgaccgtgaacacggtgctgtcgctgctcgccctcgactacccggccgccggcgagaagctggcgtgctacgtctccgacgacgggtgctcgccgctgacgtgctacgcgctgcgggaggccgcccggttcgccaggacgtgggtgcccttctgccggcggcacggcgtcgccgtcagggcgcccttccggtacttctcctccacgccggagttcggcccggcggatggcaagttcttggaggactggacattcatgaagagcgagtatgagaagttggtccaccggatcgaggacgccgatgagccttcccttctgcggcacggcggtggtgagttcgcagagtttctggatgttgagagggggaaccaccctactatcataaaggttctgtgggataacaacaggagcaggacaggagatggcttccctcgtctgatatacgtctcaagggagaagagccccaacctacaccatcactacaaggctggcgccatgaatgccctgacaagggtgtcagcactgatgaccaacgccccattcatgctaaacctagactgcgacatgtttgtaaacaacccccgggtcgtcctccatgccatgtgccttctgttaggttttgacgatgagatcagctgcgcgtttgttcagacgccgcagaaattctacggtgccttgaaggatgatcctttcgggaaccagctggaagttagtttgatgaaagttggacgtgggattgcagggcttcagggcatattttattgtggaacaggctgctttcaccgcagaaaagtcatttacggcatgaggacagggcgagaaggcaccacaggttattcatctaacaaggagctccatagtaaattcggaagttcaaataatttgaaggaatcagccagggatgtcatttatgggaacttgtcaacagagccaatagtagatatatcaagttgcgttgatgttgccaaagaagtagctgcctgcaactacgagattggcacatgttggggtcaggaggttggttgggtctatggatcactgacagaagacgtgttgaccggacaacggatccatgcagcgggttggagatccacgctgatggaaatcgaaccaccagcattcatgggttgtgcaccaaatggagggcccgcctgcctaacccagttgaagagatgggcatcaggttttttggaaatactcatcagtcggaataacccaatcctcacaaccacatttaagagtctccaattccgacaatgccttgcatacctgcacagctatgtgtggcctgtgagggcacctttcgaattgtgctatgcattgttggggccttattgcttactatcaaaccaatccttcttgccaaagacatcagaagacggtttctacatcgcattagctctattcattgcctataacacatacatgttcatggagttcatagagtgtgggcagtctgcacgtgcatgttggaacaaccacaggatgcaacggatcacctcagcttctgcttggctactggcatttcttaccgtcatcctcaagaccttaggcttctccgagactgtgttcgaggtcacccgcaaagacaagagcacatcagatggtgattccaacaccgatgagcctgagccagggaggttcaccttcgacgaatcgacggtgttcattcccgtgacagcacttgcaatgttaagtgtcattgcaatcgctgtaggagcatggagggtggttttggtgacaacggaaggcttgcccggtggccctggtatcagtgaattcatctcctgtgggtggctggtgctgtgcttcatgccattgctgagaggtctagtgggaagtggtcgatatggcattccttggagtatcaagatgaaggcctgcttgcttgttgctatattcttgctcttctgcaaaagaaattaattgcagctggtgtgcagcaacaattagtccatactattatttgagcatgcaaacactaggtttcatcttcatattattatgtccgcaaacgttgactaagctctagaaaagtgaacaattcaatcactaattcgaagcaaaaactggttgtttactgtaagagagaatctactcgtcaatggcaagttgtcccaccggtccaaacttgatcaaagtggcatatatatagtagatttcctcttattgtacggcctgtatgcatgcatgaatccttcaaagtagaagcattggagcggtcccgtgc

SEQ ID NO: 1767 - DNA, 403 bp, Oryza sativa
  Clone ID: PAT_MRT4530_101601C.1
ggcaaatctaacggaggcttaaaattcctttccaaaaaacgggggggggcccccctttttccacaacaaacccaagccctgggggcagtaaagcttgcccaacccccggtaaatttttttgaaatgaacccttccccagttcaagaaatttcccagcttaaaatttcaacccccttaatgcctgatctgggaaattcccttccaaaggcttttttttggggcccccttttttttttttgtaacataaaacaatccacggcctttggccattttaaaaaaaaacaaccccacaaatagaccccaaaaaccgccggggcaccaagttttttcacaattttataaccaccgaatcccgcgggcaagaacagggcatgccaatttttttcgtgccggtgaccacccc

SEQ ID NO: 1768 - DNA, 419 bp, Oryza sativa
  unsure (1)..(419): unsure at all n locations
  Clone ID: PAT_MRT4530_101602C.1
tatagaatactcaagcttgcatgcctgcaggtcgactctagaggatcccccatattacgttctgtttgccatatgtttttattactatttcatcacggntgagtgattttgatggtaaaatgttagaagctgccaaagatttgggcgctagtgaggtgacgactttacgcaaaatagttttaccgttggcgttgccttcaattatttcgggttggttattaagctttaccatttcattagatgatgttgttgtttcatcttttgtgactagcccaagctatgaagtattaccactgaaaattttctcattagttaaaacaggcgtaacgccagaggtgaatgctttagcgacgattatgattattttctcattgtcactagtagtattaagtcagttagtattgagaaaaaaagtttaa

SEQ ID NO: 1769 - DNA, 1341 bp, Oryza sativa
  Clone ID: PAT_MRT4530_101603C.1
atggcgagggaggttttaaaggtgctcgaggctggtttggcagaaatcgctttggagctcggaattttgctggaggccggtaggggcaaggtggaagaggttggaacatcaatggtggatggcaaccaaatgttggttcccatggcggagaagatggccggtttggacaggagaattttagaaatactgaaggtggttttgccagtcccattgccgttttgtcaatttcctccagtgccggctggtggtggtggcacatctctgttggctgccggcagtggcttggcacaatttggaggagtggctgcacagcttggtggcgggatgattgcgggtggtgttgcgcagggatcgacagcagctcaacatggtgtcgggttgacaggcgccggtgcacaaactagtagcgactctggtggcaatggttctgtactggctgggatttctccttttggtgataatgtgcatcttcctggcggggtaggtggtgatcagcatttgaccgctgtaggagaaactgtggatggtcttggtttttttcatatccctctttcagctggccagagaataaaacatgattctaaggttgccctggttaaagtaactagaggacaaatgacggtgcagaatgttgtttctggattggagagattgattcctggaaattggaagtgggtggtggaagaaaatggagataacacttttcgtactatttttacttctactgcggaactgaaacgcatggtagaatggggaacaatacatactaaggttggtgatgcagaaatgaagataattgaaaggggagttggtaatgaggtgaaatatgtgttgccaaaggcagttggttcaatcttaggtattacaaaaatggttgatatgaattttactagaagatatgacattgctcgtttacaagttctggttttagatccctctcttatccctgatgtggtggatgtggctattggagataatttatatgagctgtgttttaaggtggagcaagaaaatgggtttgatgtgcctgaacccatcggcatggataatagtggtgatagagaagaaggaaaaggaacgtcttttgggccatcgactcaggttttaccacctgttgttaaaggatcatcagtatctgatgaggagtttgatgggcttgtggaggaatctgctggggcagaatcagttaagtctcatgaaagtctagctgttaagttagcggcagtacctgacgcgattctctcccctgctagacaaagcaagagaagagcaagtgatagtgatcaactcactttgcagagggctgaaaagattaaagctgggaggaatttggaggtttag

SEQ ID NO: 1770 - DNA, 511 bp, Oryza sativa
  Clone ID: PAT_MRT4530_101604C.1
tcaccggtgaccaaaaccacggtggaagagcaacggacggcggcggcgacgaggaagaagcggcggcagtcttcgggtcgacgacgacggcggtgctccggcggtcttcggcggcagcgaagcggtggacggggacggcgacgacctcgcgaacccgatggtggtgacggcgaccgacgacggctggagcgacggcgaagcacggtgctcagtcaattgctcccaatgcgccattagttcaaccgacagcaccagtatcggctcctgcacctgccagttcaacagcagtcgattcagcagacaccaccgaggcagcaagttgctcagccgattcaacagcaaggtttgtttcagaattatcaagggggcaatttgaattatcagtatcagcctccatcgccacaagttcaatatcagcagggaggatcggctcagccccagtttgttcctcaatacaatcagttcgagcctgtgccgcaacaagcacaaggagcacctcagcaacgaccat

SEQ ID NO: 1771 - DNA, 2619 bp, Oryza sativa
  Clone ID: PAT_MRT4530_101605C.1
ctaacgattattttctagagaagacacctggggaatatcacctataagactttcatccaaagttaaagaagactcatcaggtggaccaaatagacctttataatatgtggtaatatgtgcttttaagtttgcatcaccatttatgatgtggtcaccatcttgtaattgataaattcttgttttcctatgcttaccatttgctaccaaatgaaaatacttagtatttgagtcaccttccaaaatatctttggtcttagcccgctgataccatttaatttcctcttctctaagcaaacaagctaacctattcctcatataatgtttagcattaagctcttcctgagttaacaaggttgattcagcttttttatcaagtaaatcaagtttttctaacagggctttcttctcctttttataggtaccactagtttgtttagcccaacctcttaaaaattgtcttagtctgcgaatctttgcttgccacctctctagagaagtatttccttcatcaacacttaaccaaatttcctttaccatatcaacaaaaccatcccttaacagccaaccaccagaacaccccctgggaggtttacaatgccacaaaaaatctttcccgccacaaagatttttaagggcactagatgtaaaatctctcttaacagtctccgataaagcaatgaaatctagttgttgttcctttgtaagatcagaaataatttgggtccttgaacccatcaacctaactttcttgtcacttctcttttttatcgaaggagatatcatagaatcagaggtgatatacaaattataatcataatcaccacccgtatccattacctcctccatgatttcactacaaagtttttccaaaactgaattatcctccaactgatcgtcggtcaattcattttcaggaaaaacagtagaattatgcttgtctttcaaactaatacaatcacttaacctagcttcttccaaactccttatatccttaatagcattcacaaaattactatcattgtttgcatcgataaaacccagtttagaaagagaggacgaaataactttatctttaacattctgaacctccaaattcctcccagctttaatcttttcagccctctgcaaagtgagttgatcactatcacttgctcttctcttgctttgtctagtaggggagagaatcgtgtcaggtactgccgctaacttaacagctagactttcatgagacttaactgatcctgccccaacagattcctccacaagcccatcaaactcctcatcagatactgtcaatcccttatcttgcacatcactcccatccatatttttaccatcttctctatcaccactattatccatgtccatgggttcaggcacatcaagcccattttctggctccaccttaaaacacagctcatacaaattatccccaataaccacatccaccacatcagggataagagagggatctaaaaccagaacttgtaaacgagcaatgtcatatcttctagtaaaattcatatcaaccatttttgtaatacctaacattgaaccaaccgcccaaataattaaaaactcccttaactcagaaggtaagcctttgcattgaacccatacctttggcaacacatatttcacctcattactaactcccctttcaattatcttcatttctgcatcactaaccttagtatgtactattccccattctaccatgcgtttcagttccgcagcagaaggaaaaatagtacgaaaagtgttatctccattatcttccaccacccacttccaatttccaggaatcaatctctccaattcagaaacaacggtctgcaccgtcatttgtcctctagttactttaactagggcagccttagaatcatgttttattctctggccagctgaaagagggatatgaaaaaaaccaagaccatccacagattctcctacagcggtcaaatgccgatcaccagctaccccgccaggaagatgcacattatcaccaaaaggagcaatcccagccagtacagaaccattgcctccagagttgctactagtctgtgcaccggcgcccgtcaacccggcaccatgttgagctgctgtcgatccctgcgcaacaccacccgcaatcatcccgccaccaaactgtgcagccgctcctccaaattgtgccaagccactgccggcagccaatagagatgcgtcgccaccaccagccggcaccggaggaaactgaccaaacggcaacgggaccggctgcaatccaaagctaaaggttggagattgcccaaaccttagcccaggattatgcccaaaaattggcctagcttgcagaccaaaaccaccttcggtatttctaaatttttcctgtccaaaccagccatctcctccgccatgggaaccagcatttggttgcccaccattgccgttccaacctcttccaccttgcccctgccggcctccaccaaaattccgagctccaaagcgatttctgccaaaccggcctcgagcaccttgaaaacctccctcgccatgacctggatgaaagtttgcacgagcagcaaagctgccttgtcctccccctccatgaacaggacgctggttctttctctccat

SEQ ID NO: 1772 - DNA, 1309 bp, Oryza sativa
  Clone ID: PAT_MRT4530_101606C.1
ttttttttttttttttttttgaaaacacttgctgagatatgtagcttcgagcaataacgatgacaatcatcctaagtgcaggtactattttcaaaggtaatatttctagtgcacagcagcatattttgtaaaccagcatttaagagaaggtacagaagcgtcgcttgaattaaataaactgacaaggagatgtgcttttgtgagaagaggctaatcagatgggtcaaattctctcttgctcttgagggaagcccttttccttgaatcagagtctaattcatccatatcagatgaaattgctaggtacccataaagtatcctccttttctcgcctgtcctgttatctgtttcaaccagtaaagggctattatcagaacctacagactggttggctcgtgcatgcaaccaaccaatacgtccatgatcttgcctctcaaggaaatcagcaaggcgctcagcctccttcaagccagctgggctgtttgcaaacttgataagtgtcaaacccaagtgcccttcctttccatacaaggacttcgacttgccaccagcaaaacctagttctgaaattttcttatccatttctttattccccaaaccctcagcgcggccatctttcttcctccctgtagcagtgttgtgaatgataacagttggtggccatatgataaggtcctccctacttgcttgaacaaggtcagggagcaatgactggtatgccttagaattttcagggacttttgtataatcccatcccataaggacgcatagtgccttgtgcaaaccaagatggtcaatgaatgaatccacatttggtgggttgtaagcatgcatgacaagtccatgcacatcagcaaagtccttagaagacctgccgcaggcaaggcaggggacgcgtccaccttcaaggtagctccgcctctgcgccgcgctctcgttgagcatcttggcgtacttgagaaacgccctcctgagcgcgtgccggtccaccgcggcatgcggtggcagctgctgctgctgcggcggtgccgcctcgaaccggggttgcttggggtgcctgctgtggaagccctcgtcgtgctcggcgaggtgcttccgcttggcgtcgtgctgcgccagctgcagctgctgctgctgcggcggcggcggcgggtgatgcggcggccagacttcatggccggccccgcgcgggaggtgcgggagctggggcagaggggtgagctcgaaggggtaatcaggcggcagggcgaagtaggtgcgcacgctgccgtcggcgaggagcatggtgcggcggtccaggttgtggaag

SEQ ID NO: 1773 - DNA, 512 bp, Oryza sativa
  Clone ID: PAT_MRT4530_101607C.1
attcttgtcgcggctgatttacattcatcatatcaacgaccgcgtgtcagcacctacaacaagatcatgaacggcccctagtcacatcacactaatttgcaaaggattgttttatttacaagtaatttgccgagcaatatgccacacaattgaagaagccgactgacacagagcatagtacttcaactcaaaagaaagatgataccgatcagggacaaccaggttttcaagatccccgaaaagagctcaatcacatcttcggtgggccacaagattatgaatccaagaggaaatagaagctgattgatagggaaatcaacgccgtccagccagaaacacctcaatatcttcgatggtctgaagttggaatcaagtttgaccgctcggatcatcccgaccgagtggtccacccggggtagtaccccctggtactagacccagtggttcgcaatatcaattggcgacggcggctcatctaccccgggcgacggcgtcacgtggggctgcaggaa

SEQ ID NO: 1774 - DNA, 508 bp, Oryza sativa
  Clone ID: PAT_MRT4530_101608C.1
ggactagatgatctgattattcagagtttcaaacaacaaggtagtcgcttattacccacccacacacaacacagaacaggtacaagagatagcctctcaatctttactctcaagcatggacgatcttcaaggttcagggacctacaatactactacaaatggacgaatcatcgctccacagtcacccgccgcattcgaatttgatgcagaagacaactgacatacagcaattgattggaggggagttagccaaacacacttcagagcttacccttgagcctcttcttgaggacatccatgacggcaccgaagtcagccttcacgctgaccgggggattcgcatacttgcaggccatgtcttcgatcttgctgtcatggtagtcgatcttggactgtgagaacttcagaccatgagctgtgctgacgactaccgtgcggtcatttggcccgatgatgcgctggtcacggagcttgaacagcgctgcgagggcaaccccagtatgcgggc

SEQ ID NO: 1775 - DNA, 447 bp, Oryza sativa
  Clone ID: PAT_MRT4530_101609C.1
atgggaaccaaggtccctatcacctgctgcatgaggtgcccatggacacattatcacgatactgtaactcatgtcgctatcaaccaaattcaagggactattgagatacatctaaagaggaacgctccaagagctccaggcgcaacctcttgtgggttgtgctcggggtgcatctgccataagcccccaaagcacagcccctcatgggttgtgcttggagtacaccttcaatttgcccctgagtacggccccccgcgggttgtactcggggcacatctacagccggcagccaagtacgacccctcatgggatgtgctcggggtacatctgcctccgcgctcgaccgccgagtgcctagaggagcatatatgcatggaccctacgaagcctcgcattgaatgcgaggcggtgtataccaacccggcgtgcgactgggataacacgtga

SEQ ID NO: 1776 - DNA, 222 bp, Oryza sativa
  Clone ID: PAT_MRT4530_10160C.1
catagtgataatagatggttatcgaaagaatgtggggctcattgataaggttcgacgactttctgttcagtttttctattcgaaatatacaaaggtgccatcaaatatcaaaagatcacaagttcgttcacttaccttttttggactgttaaagtgtatgccttctattacagactttaagcttattcgtgttttaaaccttcaattagttggtcattctcg

SEQ ID NO: 1777 - DNA, 360 bp, Oryza sativa
  unsure (1)..(360): unsure at all n locations
  Clone ID: PAT_MRT4530_101610C.1
aaataagcnnacacttgcccctaaaaccccaaggacccccattaccnacttgtcnatntacntaaagaacntctataaaggaatcncgggaatgacacaggtgcactagatnctaaaggaaggtttgttcctgcaaattttgaagaaantttncnccaaacncccccaaattaaaacaaatnctttacctncctgggaggtcaaaaaaataatnctcccatncaaaatccnaataaccccnccctgggnggcccctnnccgggattggggggcgnaatttatgggtnttccccntttnataaaaacnanatnttnncccncgggatagtntngaaaggttntntnaaaaggggnngtttt

SEQ ID NO: 1778 - DNA, 2502 bp, Oryza sativa
  Clone ID: PAT_MRT4530_101611C.1
atgtcgtcctccgacaacctgcctactgtgccgtcaaccgagtacgatgagccaacccagatctacatcactggaagaacacctttaaatcttggccatcacttgagaaaacccacccgagaagagctggattacatggtacaagcgcgtatggccaacaaaaaagttcattgggataagatcggaatcggccaagcgcttgcccttaccatagccaactcagctaaggacggacctctgatggctgccgctacctatttctggtccagcaccatcaatgcctttctgttcaaccatggaccgatgactccaactttgatcaacaccaccatgatcactggattagatgtaacttcatcggctaaccctatgagtatgaataccaagaaccaatttgacttcaagaccaaaagcataggaggttggtctggctatgtagcggcatatatgggcaaagggcctatcactcctcgggagcatgtagctttcttactaatgtggctagaaaagttcctcttctgtggatccagctatggtcctacaaccaattggcaatttgtagccgaagccctggaatcaaagaagcaatttcccttaggcaaaatcctcctcggcaatctataccaaatgctgaataatgcatcagccaagatagctgtcggctcagtagtgggagtaggtggaccatggtggctgctgcagacttggctaaatctgatggtcatgaaagttgtcaatcggccatctgtgacaaaagctgaatttccaaggttggagccgattgtggaagatgcccggaagatggtcacgccggcgccgcctactggatgggatttctccacgggggattccatccgtgatgaagtttggagccgttttggttcaccggttcacttttcctctcattttagccgttctacgtttcgattagtggttgatgttcctcgttcttcgtttcgattgacctcgtcctcggtggcgcttgctcttagagcggcgattggtggttctccgtctgatcttcatgttgatcctttgattgatcgaagttttacttttctggtgtgttctaagaaagttggactctggatctactctctcagatccttttcttgtaaggatttctcggttcggtattttctctggaagaatggaggtcctgattggagacgggaatgggatctctggcaagctgagcaatataatgaatggaccattgtaaagcggcgatattcttcgggtaatcgttctcagcatttgataaaggcttcttctgtttttgatcgtcttaagtttgatattccatcatctccgaagaggattactcagaagtctgattctattgtctccaaggaaatttttcttgctaattctgatccgaaagctgtgggtctattcaagtttggttctgccatggttagggacctgctagtttatgctcccccttttatgtatgatggtatacatcaggtcaactttgtcagacatgatcagagtcctaactggcgtggtgctccatttactagaactgtctggtttttattgctcgatttccccctagattacatcaacatgcagtacatttgtctggttgtctcttctttcgggcagttggaggaatggtatcaaaatgacccaatagagggcaaagttttggtcagagctatgttcaaggactttgattcagtcccaaggaaaattgttcttcaagatcccacaagtggtgctggtgaatcctggaccatctctgtttttaccttggagggtgattttgctgatatttttccccctgatgaagaccttccccctactggtccaaataatgatgaaaatcctgatggtaatgatgatgacgatggcatggaaatagagattagtcttccaccttcccctaggaaaagagggaagaagagaacaccttttgttgactctcaagttagaaggagtggtagacttctggctcttaaggatggtttcaagaatattctgcaagaggatccaaacatgggtgttggaaagccaagagggaaggcagttaaaaagctgaaacagttggctgagaagattggatctgagatgtgtgggacttcccttgaggaggtttcaagcttggtggacttgggagaagctcagttcaatccatttggcaaaatcatgggtatgaaggattattatagacttgcagctgagttctactatggtacactggacctggatcctttaaaccattcttttatcatcttggttccaaagaaatctgtgccaaaagttctggtcaatgggatacctagaaaaaatttccactgcaagagaggagtaaggcaaggtgatcctctgccacctttactctttgttttaggagctgaacttctccaggtcattgttaacagagcttatgcaatgggtcatctatcaaagccttttccatcagactttgacccaaattttcctattgtccaatatgctgatgacaccctgctttatttgaaagctagtggttaa

SEQ ID NO: 1779 - DNA, 259 bp, Oryza sativa
  Clone ID: PAT_MRT4530_101612C.1
atgaagttaagcatgaaacgaccccaatagaaccgtacttctcgtatgggtctttccttcccgggagcgccagaactcctctcactgctagaaaccgtgtacgcctagagtgcatgaggactcaagttcatggagcgggtactgccaaagtgaggtggttgaaaggctttgccgtggcaattctcattcgttgggacgtagggtcatgtgttgggcaagtcacggagtacgggtaaagtgtacatccactgcagtgtga

SEQ ID NO: 1780 - DNA, 2112 bp, Oryza sativa
  Clone ID: PAT_MRT4530_101613C.1
atggggggttttaagaatactctgcaagaggatccaaatatgggtgttggaaagccaagagggaaggcagttaaaaagctgaagcagttggctgaggcaagtggaattgttttcccatctgattctctatcttctactgatttaaatcctgatatatcttgtgaatctgaaagtgatcttacctctgttatacctgctgattgtgatatatctttgcttcaaaagataggatctgagatgtatcacataccttgtgttgtgcaaattggaattgacatccctaaagctgacatcttcagatttgaaactttttggatagagcatgatggtttctttgatttagttccatttggcaaaatcatgggtatgaagctgcaagattttttccatgcaaatcaatctcttgctagtttggatcagccctttggtatctctaagttggacaaaattataaagaatttgcctatagacagggctcctgggcctgatggatttaatgggatgtttgtgaagaaatgttggccaatcatttgtcaggattactacagacttgcagctaaattctactctagtactctggacctggatcctttaaaccattcttttatcatcttggttccaaagaaatctgtgcccgaaggtataaatgactataggccaatatcactcatgggaatctctcttaagattctaacaaaaatcctggctgatagactgcaaaagtgccatcactccagaagggaaatagttcttctaaaattggactttgagaaggcttttgacactattgaacatgaagctattttgctagtaatggaagccatgggttttagtgctacatggcttggatggataaggaagatcttttcttctgcttcttcttcttcagttctgatcaatgaggtcattgtcaacagagcttatacaatgggtcttctatcaaagccttttccatcagactttgacccaaatttccctattgtccaatatgctgatgacatcctgctctatttaaaagctagtgggaaagctcaaaacttagctgcagtctttggttgtcaattgggatctttgccatttacatatttgggtttaccccttggtaccactaagccaaagacagtgattgatagcattgacagagcaagaagacattgtctttggagaggttctgaggtcaactccaataaaaaatctttggcagcctgggataaggtttgtaagcctaagagaaaaggtggcctgggagtgctaaacctttctatccaaaatcaagctttgctcatcaagtttttggaaaagttttacaataagaaggatttgccctgggtcaatcttgtttggtcctcctgttatggtaactctgtccctcatctgacaaacttgaagggctcattctggtggagagacatttgcaaattaatggatgtctttagaggtattgcaaggtgtcatctgaaaagtggaaatacatgctccttttggtatgatgtatgggctgatcaacctcctctttttcacactatgtcaaagctttgttcttttgctcaaaaccagaatgcatctgtctctgattttccgtccattgaggccgaaggaaattttacactacctttatctgttcaagcttttcaggagtttcaagagctcacttcttcccttgtggatatcgagttggttaatgaaaatgatgcttggtcttatatttgggggaatatgaaatattcttcacaaaaattatatacactgaatttcagagctattaagcctccagtccattttctatggttatggaagtgcaaagcagtttcaaaagtaaaggtttttgggtggctactcatgatgaatagattgaacaccaagttcatgctagattataagaattgtgctcctccggattgtgatctttcttgtgttctttgtcaatcggtagctgttgaagacttaatgcatctgttctttctatgcccgtttgcccaaaattgttggagtcttttaggcattacctgggatactactcttcctttggaaggaatgtttataaggggcaaattggattatcaggggagttgtttcatggagaaattcctttatgctgcttggcatatctag

SEQ ID NO: 1781 - DNA, 438 bp, Oryza sativa
  Clone ID: PAT_MRT4530_101614C.1
accactcgtccgacaatcacactctctctccactcagtacgcttctctggtcggtgtatgcggcgccgccgacgacgacgactgttgcctttgccacgcgccggaggttggtgcgtgcagacccatggccatgcagacgcggcaggcgagcctaggagcctggagggggaagtgcggcatgcacgcacccgacacacgaagatagcgagcgcggaccgtgattggttgtgtaagccgcctaactggcacctatggcgagcgggagccccttcgacctccgaagtggcgactacaacgacgacctatcgcagcctgtggccaaagctgacgtgccggctccaaaaggcgacgctgcacacgcctgcgcagacgggggagctccatgcgccaatgacggtggagcccatccggccgcatgagatttaggctccattccta

SEQ ID NO: 1782 - DNA, 243 bp, Oryza sativa
  Clone ID: PAT_MRT4530_101615C.1
ggcacgagtggttattgaagttgaggaaaataaaaaagaaccagaaaagccttcagcagaacagaatgaagaggagcagccaaacacatcaattattcctgaacactctccagaaaccagtgatgtcattgctgtagaagagaaaacaagagaaccagaaattgaggcagaggtattgaaagagactaacgactatgaatcgaggcttacagaaacagagaaagcagagccagtggttgctga

SEQ ID NO: 1783 - DNA, 4602 bp, Oryza sativa
  Clone ID: PAT_MRT4530_101616C.1
atggtcacgccggcgccgcctactggatgggatttctccccgggggattccatccgcgatgaagtttggagccgttttggttcaccgaaagttggactctggatctactctctcagatccttttcttgtaaggatttctcggttcggttttttctctggaagaatggaggtcctgattggagacaagaatgggatctctggcaagctgagcaagataatgaatggaccattgtaaagcggcgatcttctttgggtaatcgttctcagcatttgataaaggcttcttctgtttttgatcgtcttaagtttaatattccatcatctccgaagaagattgctcagaagtctgattctattgtctccaaggaaattgttcttgctaattctgatccgaaagaaaccccttcatcttctccggaagttgctcgctctctagtagtggcgtcagaatcgcaacctcaacgtaatccttcccctgctccaatggctaatactaaccctaatccccatcgcttcctgcgtgtggggcaagtggtacatcaaggtggtgatcgtgtgccaagaatcgacctctctgctgctaccaagccgccaaggtctcatgaagaatatgccattgctttggttgagccgatcttgccggaggaactttgggatgatcatcggattctaatttctgaatacattgagcaggtgcagcactttactgttcgccgtagttttcctcatgcttcagctgtgggtctgttcaagtttggttctgccatgcttagggacctactagtttatgctcccccttttatgtatgatggtatacaccaggtcaactttgtcagacatgatcagggtcctaactggcgtgctgctccatttactagaactggctggtttttattgcttgatttccccctagattacatcaacatgcagtacatttgtctggttgtctcttctttcgggcagttggaggaatggtatgaaaatgacccaatagagggcagagttctggtcagagctatgtttaaggactttgattcagtccaaaggaaaattgttcttcaagatcccacaaggggtgctggtgaatcttggaccatctctatttttaccttggagggtgattttgctaatatttttccccctgatgaagaccttccccctgctggtccaaataatgatgaaaatcctgatggtaatgatgatgatgatggtaatcaggataatatttggcaatttggaccacatcctatggttcttgctgaagaagaccaggattggaatcaggctgctgtgggccatcaggccatggaccttgaacaggctgctcctgagaacatgggccagattgataacaaccatggctggaatctagttgctaacagaggtttaattttcacccttgctgatgctttcaaagatgccttcaattcctggtctgccaactctctggcaaatttagcccttcatcctgcaaggcttaattttaatttgcggaatgaaattgtgtcgtatgattctttttcttttgaatcttctgctataatcctgagcccagaacctctagctgtcatccctccgcaggctgtgatgcctgttttgcctgaggatccttttggctcaatggtggaacattcttgtccttctactccaacaggcatggaaatagagattagtcttccaccttcccctaggaaaagagggaaaaagaggacaccttttgttgactctcaagttagaaggagtggtagacttctggctcttagggatggtttcaagaatactctgcaagaggatccaaacatgggtgttggaaagccaagagggaaggcagttaaaaagttgaaacagttggctgaggcaagtggaattgttttcccatctgattctttatcttctactgatttaaatcctaatatatcttgtgaatctgaaagtgatcttacatctgttatacctactgattgtgatatatctttgctccagaagattggatctgagatgtgtgggacttcccttgaggaggtttcaagcttggtggacttgggagaagctcaggaaacaaaaagatcttcttttgatcattcttacataaagaagtttgctcccaaacgttttgaccagtttgctttctctccatctgttggagcttctggtggtattgtaattgaaaggtttgctgttaagattactttcacctcatatcattctggtttggtttggactatagtttcagtttatggtccctgcactggtcctgaaagaaataacttcctgtcctggctccaccagttgaacattcctgatgatgacctctggcttattcttggtgactttaacttctatagatcagttacaaatagaaatagaccaggtgtagacatgaatgacattttcctatttaatgcaatgatcagtgatctgggtctagttgagctgcccctcaagggaagggctttcacttggagtaacatgcagcatagtcctctactagagcaattggattggttttttacctctactgcttggaccttaaccttcccccataccttagtaaagctacttgctcgatctacttcagatcacacaccttgtgttgtgcaaattggaactgacatccccaaggctgacttcttcagatttgaaaatttttgggtagagcatgatggtttctttgatttagttcaatccatttggcaaagtcatgggtatgaaggttgttctcagtttgagtttatgccttttcagcggcaagaacttttccatgcaaatcaatctcttgctactttggatcaaccctttggtatttctgagttggacaaaattatacagaatctgcctatagacagagcccctgggcctgatgggtttaatgggatgtttgtgaagaaatgttggccaatcttttgtcaggattattatagacttgcagctgagttctactctggtacactggacctggatcctttaaaccattcttttatcatcttggttccaaagaaatctgtgcccgaaggtataaatgactataggccaataccactcttgggaatctctcttaagattttaacaaaagtcctggctgatagactgcaaaaggtgatattggagataatcagtcagaatcaatatggtttcataaaagggagaactatacaggactgtctagcatggaactttgaattccttcatcagtgccatcactccagaagggaaatagttcttctaaaattggactttgagaaggcttttgacactattgaacatgaagctattttgcttgtaatggaagccatgggttttagtgctacatggcttggatggataaggaagatcttttcttctgcttcttcttcagttcaggtcaatgagatacctggaaaaaatttccactgcaagaggggagtaaggcaaggtgatcctctgtcacctttactttttgttttaggagctgaacttctccaggtcattgttaacagagcttatgcaatgggttttctatcaaagccttttccatcagactatgacccaaatttccctatcgtccaatatgctgatgacaccctgctttatttgaaagctagtggtaaagagctctttactctaaaggctttattgcaaaccttccagctgggaactggtttgaagttttacaataagaaggatttgccctgggtcaatcttgtttggtctgcctattatggtaactctgtccctcatccgacaaacttgaagggctcattctggtggagagatatttgcaaactgatggatgtctttagaggtattgcaaagtgtaatctgaaaagtggaaatacctgcttcttttggtatgatgtatgggatgatcaaccccctctttttcacactatgccaaggctttgttctcttgctcaaaaccagaatgcatctgtctctaattttctgtccattgaggctgaagaaaattttacactacctttatctgctcaagcttttcaagagtttcaagagctcacttcttcccttctagatattgagctggttaatggaaatgatgtttggtcttacatttggggaaatatgaaatattcttcacaaaaattctatgcactgaatttcagagttattaagccaccagttcattttctatggttatggaagtgcaaagcagtttcaaaagtaaaggtttttgggtggctactcatgatgaatagattaaacaccaagttcatgctagatcataagaattgtgctcctccagattgtgatctttcttgtgttctttgtcaatcggcagctattgaagacctcatgcatctgttctttttatgcccatttgcccaaaattgttggagtcttctaggcattacatgggatactactctatctttggaagcaatgtttataagggccaaattggattatcaggggagctgtttcatggagaaattcctttatgctgcttggcatatgtggaagcaaagaaatgggttcatttttgagcaaaagatcccttctttcatcacttggaggcaactcttaaagggtgacctcttccttctgttgtttagaatttctgcgagatatcatgatgtaatcataagttggattaatggtttgtaa

SEQ ID NO: 1784 - DNA, 2977 bp, Oryza sativa
  Clone ID: PAT_MRT4530_101617C.1
atgaatgatattttcctgtttaatgcaatgatcagtgatctgggtctagttgagctgcccctcaagggaagggctttcacttggagtaacatgcagcatagtcctctactagagcaattggattggttttttacctctactgtttggaccttaaccttcccccataccttagtaaagccacttgctcggtctacttcagatcacacaccttgtgttgtgcaaattggaactgacatccccaaggctgacatcttcagatttgaaaatttttgggtagagcataatggtttctttgatttagttcaatccatttggcaaaatcatgggtatgaagcttttttggactccattgaaaacttgagagatctcactgttcttgaatggaactttaaaattcttatcagaaacaagctactgttatacctgaagtataaacaaacttattggcaaaagaggtgtactatcagatgggccaagtttgggggtgagaatacaaaatttttccatgctatggctactgagtcttttagaagaaatgcaataccctctttggtagattcttctggtttagtttgtacaagacatgaggaaaaggctcacatagtgtggagtcctttctcttcaagaatgggttgttctcagtttgagttcatgccttttcagctgcaagaacttttccatgcaaatcaatctctagcttctttggatcaaccctttggtatttctgagttagacaaaattatacataatctgcctatagacagagccccttggcctgatgggtttaatgggatgtttgtgaagaaatgttggccaatcatttgtcaggattattatagacttgcagctgagttctactctagtacactggaccttgatcctttaaaccattcttttatcatcttggttccaaagaaatctgtgccagaaggtataaatgactataggccaatatcactcatgggaatctctcttaagattttaacaaaagtcctggttgatagactgcaaaaggtgatattggagataatcagtcagaatcaatatggattcataaaagggagaactatacaagactgtctagcatggaactttgaattccttcatcagtgccatcactccagaagggaaatagtccttctaaaattggactttgagaaggcttttgacactattgaacatgaagctattttgcttataatggaagccatgggttttagtgctacatggcttggatggataaggaagatcttttcttttgcttcttcttcagttctggtcaatgggatacctggaaaaaatttccactgcaagagaggagtaaggcaaggtgatcctttgtcacctttactctttgttttaggagctgaacttctccaggtcattctatcaaagccttttccatcagactttgacccaaattttcctattgtccaatatgctgatgacaccctgttttatttgaaagctagtagtaaagagctctttactctaaaggctttatggcaaaccttccagctgggaactggtttgaaggtaaattttaataaaacttgtctcatcccaataaatgttgatgaagggaaagctcagaatttagctgcagtttttggctgtcaattgggatctttgccatttacatatttgggtttaccacttggtactattaagccaaagtctgcctattatggttactctgtccctcatctgacaaacttgaaggactcattctggtggaaagatatttgcaaactgatggatgtctttagaggcactttggatgagttgtttttaactaaaaagttgttgcaaaaatatcaaattgcttttcatgctagtttgatgtttaacatgatttgtgctaaaaagttaaaacaaccacatgatgttttggattgctcaacatgtactttgagtaagatgaaactaaaagatgctttaggtcgtgttgagtacatggaagatgttgtgaaaaacaatgaagtgctttcttgccccaagtgtcgtaaaagcaaaggtgtcatggtagattgtgaaaattgtgctaatttggaaaaagaggtttcttatttaaaaaattccttgcaaagattttctgatgctaaaaagaacctcaacatgattttggatcaatctaaggttagcacacataaccgtggtttaggttttaatccttatgctcatcatactagacatcctcctgttgtgttaggtgttggtgctagaagtgatatatgcctattggatcttctggtcgtgtgtctcagtactggattcctaaatttttattatcatctaacccccagtactaaggctttggtggcaaggaaggagaacgtgtggatcgtggatcccggttgttcgcggcacatgaccggtgataaaaattggttctcctccctcaaaaagacatccaaaactgaatcgattatctttggtgatgcgtctacaagtgccgttctggctacaggtttggttaaggtaaatgaaaaatttgaattgaagaatgtagctttggttgaggacttaaagtacaatttgctttcagtttcacaaattgttgatgaagattttgaggttcattttaagaaaactggaagtaaagtttttgattcttgtggtgattctgtgctgaatatttctcgatatggaagagtgtttaaagctgattttgataatcctgtttcacctgtgataacttgtttggttgctaagtttgataaagatgtaatgttttggcatcgtagacttagacatgttggttttggtcatgtcactaggttaagtggtttggatcttgttcatggtttgcctaaacttaagaaagatcttgatttggtttgtacactgtgtcgtcatgctaagatggttgcttcctcacatgctcctattatttctgtgatgacggatacaccaggacagctattacatatggacactgttggtccagctagagtgcaatctgttggggaaagtg

SEQ ID NO: 1785 - DNA, 478 bp, Oryza sativa
  Clone ID: PAT_MRT4530_101618C.1
caaaacaaacccaatagggcacgaggaaactatatgtgactgctggtggcctgcttccctttacaggagccaggcatttttcacataggtgtcaactggccttacaaagggaaattggccctcgtacacagaaaccggtgtctaccatggctcagagccattagccatacaacgtattacatacacctgacagtacaacggtaagctgccactaatccaccgttcacaagaccttagttgcttgctcgctaaggagcaaaagaaaaacaaaaactcaattgctgtggctccccattcctttccttcctccaagcgatgaaagctcatcatgtgaatcaaccacaacttgctgaaggtgactaatcagagatccatgtagcaactttttgatcctgtgaaactgatccacgctggggccagcattgggcatctcttctacctgacaccacaacctttcgagggcggtgtttgggaacca

SEQ ID NO: 1786 - DNA, 800 bp, Oryza sativa
  Clone ID: PAT_MRT4530_101619C.1
ccggccggaaaagctctcaactttctccgttcctcttcccggcggcggcgatggataccaccagcttcccggcggtgtgggcggtggtggggccgggcgtcgccggcgccgtattcggggtcggctggtggttctgggtcgacgccgtcgtctgcagcgccgccgccgtcccgttccttcactacctccccgggttatttgcttcgttcgccgcgctcatgttcaactgcgtgaagagggaagacgccaactacaattactactcgccctacgacgactccgagtggaggagtgttggaaacttcagtcatgatttactgattcatgggtatcagtgctatcgctgcttatggttgaaactctggctttttgtttcatacgtggtgtcttttgtttccttggctggggctgttggttttttggtccaagacgcacttacagatacaggtccatctgcatggactggtgttgctggcgtcctacagtctgtgtttgtgcttataagtgggttgatgtactggacttgtcattctgaagattgatttaacaagtatgccaagatagacgaggaatgtaaaggcgattcggaaataaccttgttacgggatatgtgaaattttgtgtcgcactatacagttctgctcatagtttagtaactctgtaaatataattgcataacaagcagctcaagttagtttcactgtgttactttggagtaaacagacctttatgaatataaatagcatatatggatctaaaaaaaaaaaaaaaaaaactcgagactagttctctctctccct

SEQ ID NO: 1787 - DNA, 394 bp, Oryza sativa
  Clone ID: PAT_MRT4530_10161C.1
actagctcctctctcccaattccactcctcgcttctcgcgcaattcttgcgggtttgtgttttttttttcttcttcttcttttggtttcttgatcgatggacagcgactacgttgccggccttctcatgagcgccgccgccgcggggctcgacctcggtgtgctcgacggcggcggtggcgctttcttggagacgctgtgcggcgggcccggcttcgcggagcgggcggcgaggttgtgcggcggcggagctgggctcttcgggctgcctgcggtggggaacgccgagcgcggcggctgctcgagggaaggctcgtcggtgtccgaccctgcgtgggcgcacgccaccggcggcggcggcgacaatgccaggacgaggaaagctccggcgagcg

SEQ ID NO: 1788 - DNA, 6588 bp, Oryza sativa
  Clone ID: PAT_MRT4530_101620C.1
atggcgaccgaagcggagagaggcggcggcgcggctcgggtcgacgaggacggcggcgttccggcggtcggcgggcgaaacgaaggggtagacgagatcggcgaggacgcggcgatgccgaagcaggcgatgccgaagcgggaggagatggctgaccgcgatgaggaacagatattgtacgatacaatcgcggagggaagtagccagtactggaatgaagaagaggggaacgaggatccaaaccagtacttgaacgaggaagggaacgtggagagggatgcggaggggaaccagcaggggcacgtggaaagggatgtggaggggaaccaggaggaggaggctagtggtagtcaaccctccgttggacagaagagggcacgcgggcaacgaggtgcagcgaagaagcttgagggtcggcacatcataacggaagtggaagaagatggacgtcctagtgccccggccgaagccgccaagaactatgtacgtcacagcggttgggttgtgcgggataacgtgcctgtcagtacggtgtactggcgaagaacaagggcacgcggagatcatgagagctttgtcccagattcggagaaagagatgctgtggaccacaatgctcgagacattcacccttcctgcgggtatagaggacaaagtgaaaaggtggactctgaagaaaatggcagaacagtttcagagcttcaagggagagttgtacaagaaatatatcctgaaggggcagacaccgaacttcgacacattcccaaagctaagggatcactgggacgagtttgttgcatataagacaggtgaacaagggcaggcgatgatggaaagaaacaaagaaaatgccgccaagaagatgtaccatcaccacttggggtcaggaggctatagcgtcgcgatgctgaagtgggaggagatggaggctagcttgattgagaggggtatcgaaccggcaaccgccaattggccggaacgatcgaagttctggtactatgctcacggtggaacgctcaacccagctgatggctcactgggcacgttccgaccggacagagatagggacgagctgacactcgccctgcagactccagagcatccaggacgaacacgagggaaaggggtgattccttggaagattggtttcaaggaagacatccacacgcacaggagtcggatgaggagcaagagagataccgaggcgaagattgcagatctagagttccgggtatcgagctacgacctcagcatgcaagaggaggtggcaaggaaggttgatgaacgcatggccgcacatcggtcccatgatccccagccgaccattcctcctgcaatggtgagcccgtcaggaaaccgtagcagctgcgcctcaacggggcaggtggtgtcaggcatggccatcccaacggacccttcaggtacttaccacagcaggccgattccagcaggatactcgaaggtcgaagttgagttggtcgaaggcgcgtacgaggacctcgagctggattaccctggaggagacggatcctgcaccgtctcctcctcatgctccgccagcaccgtctccacctcaggctccagcaccgactcctcctcaggatcctgcaccgactcctcctcgggctcctacacctactcctccgcaagctcctcttccggcaccttcaaagtcaagggccccccagctccaccgcctgcccacacaagggcaacgaagaaggcaaaagttgacgccgccaagaacaaggacccggggtacgattgcacgcaagaggagcttgacgcttacgttgcatcagaagtcaagagacaattcaagcctcgaagtccagaaaagaagattcctgtagaccccagtgtcaggaacttcttcaggggtatgtctgcacctgtcaaggaggccatcaagctatcagactatgagcgaacgctgaagaaagcatcttctggaaagtccaaaccagtccctcagcttggagagcaaccaaaccaggagatcaagccgttggtgaccggggaagacatgacgatagaagaatttattattgacaccagtctaactacggatcaattgctaggagttgaaccattagaaaaggcggaattgaaagacatgtacaaactcggtaaaccgcttgtcaagcccgagctggtgcagtccctacccacacaaatgtacaagttccatcagttgtacatggagatgagcgccaccggtagagagatgatcggagcgaggatcagggacccggacttcttgcaaggagatgatattctctggatcaatttcaagggaatctatcaagtataccagctggacgccctcgacgtctctattatgagttgctggattttaatggagattcaaagggcccgacggcggagggttttcgatactgaattcatcgaccctcggagagtaaacgtcgcaatgctcgaccaatatccacaagaaacagaggacaatctcgtccatctcctgaaggcacagcattacaagacgttcatactgttgccgtacaacacagaattccactgggtgcttttactcttcgacctgtcggcttgcaccgtcaacgtatatgactcaatggataaaaaagagtctacgtttgacaaggttttcgaacttatagacagggcttggtatcggttccgtcatttggtccgcggcaactggagagaaagacttaggcggaggttcaaatttcctaaagttggactctggatctactctctcagatccttttcctgtaaggatttctcggttcggttttttctctggaagaatggaggtcctgattggagacggaaatgggatctctggcaagctgagcaagataatgaatggaccattgtaaagcggcgatcttcttcgggtaatcgttctcagcatttgataaaggcttcttctgtttttgatcgtcttaagttagatattccatcatctctgaagaagattgttcagaagtctgattctattgcctccaaggaaattgttcttgctaattctgatccaaaaggccaagtggtacatcaaggtggtgatcgtgtgccaagaatcgacctctctgctgctaccaagccgccaaggtctcacgaagagtatgccattgctttggttgagccgatcttgccggaggaactttgggatgatcatcggattctaatttctgaatacattgagcaggtccaatttgtcagacatgatcagggtcctaactggcgtgctgctccatttactagaactggctggtttttattgcttgatttccccctagattacatcaacatgcagtacatttgtctggttgtctcttcttttgggcagttggagaaatgggtgattttgctgatatttttccccctgatgaagatcttcccccatgctggtccaaataatgatgaaaaccctgatggtaatgatgatggtgatggtaatcaggataacatttggcaatttggctcacatcctgtggttcttgcagaagaagaccaagcttggaatcaggctgttgtgggccatcaggccatggaccttgaacaagctgctcccgagaacatgggccagactgataacaaccatggctggaatctggttgctaacagaggtttaattttcacccttgctgatgctttcaaagatgccttcaattcctggtctgccaactctctggcaaattcagcccttcatcctacaaggcttaattttaatttggaaaatgaaattgtgccctatgattctatttcttttgaatcttctgctataatcctgagcccagaacctctagctgtcatccctccgcaggctgtgatgcctgttttgcctgaggatccttttggctcaatggaggaacattcttgtccttctactccaacaggcatggaaatagagattagtcttccaccttcccctaggaaaagagggaagaagagaacaccttttgttgactctcaagttagaaggagtggtagactgctggctcttagggatggtttcaagaagactctgcaagaggatccaaacatgggtgttggaaacccaagagggaaggcagttaaaaagctgaaacagttggctgaggcaagtggaattgttttcccatctgattctttatcttctactgatttaaatcctgatatatcttatgaatttgaaagtgatcttacatctgttatacctgctgattgtgatatatctttgctccagaagattggatctgagatgtgtgggactttctttgaggaggtttcaagcttggtggacttgggagaagctcaggaaacaaaaagatcttcttttgatcattcttacataaagaagtttgctcccaaacgttttgataagtttgctttctctccatctgttggagcttctggtggtattttagttggctggaacagttttgggggatcagatattgtaattgaaaggtttgctgttaagattactttcacctcaaatcattctagtgtggtttggactttagtttcagtttacggtccctgcactggtcctgaaagaaataacttcctgtcctggctccaccagttgaatattcctgatgatgacctctggctcattcttggtgactttaacttctatagatcagttacaaatagaaataggccgggtgcagacatgaatgacattttcctatttaatgcaatgatcagtgatctgggtctagttgagctgcccctgaagggaagggctttcacttggagacatgaggaaaaggctcacatagcatggagtgctttctcttcaagaatgggttgttctcagtttgagttcatgccttttcagctgcaagaacttttccatgcaaatcaatctcttgcttctttggatcaaccctttggtatttttgagttagacaaaattatacagaatctgcctatagatagagcccctgggcctgatgggtttaatgggatgtttgtgaagaaatgttggccaatcatttgtcaggattattacagacttgcagttgagttctactctggtacactggatctggatcctctaaaccattcttttatcatcttggttccaaagaaatctgtgccagaaggtataaatggctataggccaatatcactcatgggaatctctcttaagattttaacaaaagccctggctgatagactgcaaaaggtgatattggagataattagtcagaatcaatatggtttcataaaagggagaactatacaggactgtctagcatggaactttgaattccttcatcagtgccatcactccagaagggaaatagtccttctaaaattggactttgagaaggcttttgacactattgagcatgaagctattttgcttgtaacgaaagccatgggttttagtgctacatggcttggatggataaggaagatcttttcttctgcttcttcttcagttcttatcaatgggatacctggaaagaatttccactgcaagaggggagtaaggcaaggtgatcctctgtcacctttactctttgttttaggagctgaacttccccaggtcattgttaacagagcttatgcaatgggtcttctatcaaagccttttccatcagactttgacccaaatttccctattgtccaatatgttgatgacaccctactttatttgaaagctagtggtaaagagctctttactctaaaggttttattgcaaactttccagctgggaactggtttgaagttttacaataagaaggatttgccttgggtcaatcttgtttggtctgcctattatggtaactctgtccctcatctaacaaacttgaagggctcattctggaggagagatatttgcaaactgattgatgtctttagaggtattgcaaagtgtaatctgaaaagtggaaatacctgctccttttggtacgatgtatgggatgatcaaccccctctttttcacactatgcctaggctttgttcttttgctcaaaaccagaatgcatctgtctctgattttctgtccattgaggctgaaggaaattttacactacctttatctgctcaagcttttcaagagtttcaagagctcacttctttccttctagatattgagctggttaatgaaaatgatgtttggtcttacatttggggaaatatgaaatattcttcacagaaattctatgcactgaatttcagagttattaagccaccagttcattttctatggttatggaagtgcaaagtagtttcaaaactaaaggtttttgggtggctactcatgatgaatagattaaacaccaatttcatgctagatcataagaattgtgctcctccagattgtgatctttcttgtgttctctgtcaatcggcaactgttgaagacctcatgcatctgttctttttatgcctgtttgcccaaaattgttggagtcttctaggcattacatgggatactactttatctttggaagcaatgtttataagggccaaattggattatcagggagctgtttcatggagaaattcctttatgctgcttggcatatatggaagcaaagaaatgggttcattttttagcaaaagatcccttctttcatcacttggaggcaactcttaa

SEQ ID NO: 1789 - DNA, 198 bp, Oryza sativa
  Clone ID: PAT_MRT4530_101621C.1
agcttattagcggccatgttgcggcggatcaattatatacagggtcaaacatgcctctatttttgtaggaggtagctttataaattttaacaatgatggaagtttttaatacgaaatttttttgaagggtattgagggcagaatttgggaaaggccttgatgtgtttattaaatcttaaggacttattcaaagaattc

SEQ ID NO: 1790 - DNA, 2178 bp, Oryza sativa
  Clone ID: PAT_MRT4530_101622C.1
atgtcgtcctccgacaacctgcctactgtgccgtcaaccgagtacgatgagccaacccagatctacatcactggaagaacacctttaaatcttggccatcacttgagaaaacccacccgagaagagctggattacatggtacaagcgcgtatggccaacaaaaaagttcattgggataagatcggaatcggccaagcgcttgcccttaccatagccaactcagctaaggacggacctctgatggctgccgctacctatttctggtccagcaccatcaatgcctttctgttcaaccatggaccgatgactccaactttgatcaacaccaccatgatcactggattagatgtaacttcatcggctaaccctatgagtatgaataccaagaaccaatttgacttcaagaccaaaagcataggaggttggtctggctatgtagcggcatatatgggcaaagggcctatcactcctcgggagcatgtagctttcttactaatgtggctagaaaagttcctcttctgtggatccagctatggtcctacaaccaattggcaatttgtagccgaagccctggaatcaaagaagcaatttcccttaggcaaaatcctcctcggcaatctataccaaatgctgaataatgcatcagccaagatagctgtcggctcagtagtgggagtaggtggaccatggtggctgctgcagacttggctaaatctgatggtcatgaaagttgtcaatcggccatctgtgacaaaagctgaatttccaaggttggagccgattgtggaagatgcccggaagatggtcacgccggcgccgcctactggatgggatttctccacgggggattccatccgtgatgaagtttggagccgttttggttcaccggttcacttttcctctcattttagccgttctacgtttcgattagtggttgatgttcctcgttcttcgtttcgattgacctcgtcctcggtggcgcttgctcttagagcggcgattggtggttctccgtctgatcttcatgttgatcctttgattgatcgaagttttacttttctggtgtgttctaagaaagttggactctggatctactctctcagatccttttcttgtaaggatttctcggttcggtattttctctggaagaatggaggtcctgattggagacgggaatgggatctctggcaagctgagcaatataatgaatggaccattgtaaagcggcgatattcttcgggtaatcgttctcagcatttgataaaggcttcttctgtttttgatcgtcttaagtttgatattccatcatctccgaagaggattactcagaagtctgattctattgtctccaaggaaatttttcttgctaattctgatccgaaagctgtgggtctattcaagtttggttctgccatggttagggacctgctagtttatgctcccccttttatgtatgatggtatacatcaggtcaactttgtcagacatgatcagagtcctaactggcgtgctgctccatttactagaactgtctggtttttattgctcgatttccccctagattacatcaacatgcagtacatttgtctggttgtctcttctttcgggcagttggaggaatggtatcaaaatgacccaatagagggcaaagttttggtcagagctatgttcaaggactttgattcagtcccaaggaaaattgttcttcaagatcccacaagtggtgctggtgaatcctggaccatctctgtttttaccttggagggtgattttgctgatatttttccccctgatgaagaccttccccctactggtccaaataatgatgaaaatcctgatggtaatgatgatgacgatggcatggaaatagagattagtcttccaccttcccctaggaaaagagggaagaagagaacaccttttgttgactctcaagttagaaggagtggtagacttctggctcttagggatggtttcaagaatattctgcaagaggatccaaacatgggtgttggaaagccaagagggaaggcagttaaaaagctgaaacagttggctgagaagattggatctgagatgtgtgggacttcccttgaggaggtttcaagcttggtggacttgggagaagctcaggtcatcaagctgaaaaccattggaccatccaatgatgaagcctag

SEQ ID NO: 1791 - DNA, 795 bp, Oryza sativa
  Clone ID: PAT_MRT4530_101623C.1
atggaccttgaacaagctgctcctgagaacatgggccagattgataacaaccatggctggaatctggttactaacagaagtttaattttcacccttgctgatgcttacaaagatgccttcaattcctggtctgccaactctctcgcaaattcagcccttaatcctacaaagcttaattttaatttgggaaatgaaattgtgccatatgattctatttcttttgaatcttctgctataatcctgagcccagaacctctagctgtcatccctccgcagtctgtgatgcctgttttgcctgaggatccttttggctcaatggaggaacattcttgtccttctactccaacaggcatggaaatagagattagtcttccaccttcccctaggaaaagagggaagaagagaacaccttttgttgactctcaagttagaaggagtggtagacttctggctcttagggatagtttcaagaatactctgcaagaggatccaaacatgggtgttggaaagccaagagggaaggcagttaaaaagctgaaacagttggctgaggcaagtggaattgttttcccatctgattctttatcttctactgatttaaatcctgatatatcttgtgagtctgaaagtgatcttacatctgttatacctgctgattgtgatatatcttttctccagaagattggatctaagatgtgtgggacttcccttgaggaggtttcaagcttggtggacttgggagaagctcaggtcatcaagccgaaagcaattggaccatccaatgatgaagcctag

SEQ ID NO: 1792 - DNA, 1287 bp, Oryza sativa
  Clone ID: PAT_MRT4530_101624C.1
atgctccgccggagcaagaagcagaaactggccaaagaagatgaagaagatgctcgtatcagagatacggagtctccgtcgtcggtgtacctggtggtcggccatggagtcactcgcccttcctactccttgttcaaggtgaacccacaccttccagctaacgctgacgacggcggcgacaccccgctacccctcctgccctacctcgctcacctgaccggcaagcactacatgtctttcgtttccgtgcggtcgaggaggcacgcgccgtggatcgttggcgtcggcggcagctcagcccggaattacggccctgatgagaccatcgtcttcgacaccgtgatgcgcaaggagatctcgggacccaagcttttgtcgaccaagctctgcccgatcttgctaccattcggcgacaagatctacgccctggcgcgcaggccagccgtgacgggggacgtcaatttcgtcccctggttcgaggtgctcgatctctccgtggctcgggtggacgacgatgcctcggaccgtctggtgggctgcgagtggagaccactgcctcgcccgccattcttcccctgggacctcaccccaactgactacatcttcccgccggtggtcaccgtcaagtcccatgtagcagttgcctcctacattctgctgtccataaccgggcagacgggcacccacatgttcgacgtcgagacggaggaatggcgcaaactcgacgacaatgacctgccgtttcatggacgtgccgtccctcttcagggaacaggaacgctctatcttggcttatcgaacactaccaatgcaatcactgcttacaggatcaaagtcgtctctgcagtccagcctccgccgttgcaagcccaagcatcacacctacagggtgcctgtccagcctccgccgttgcaagcccaagcatcacacctacagggtgcctgtccttgtcaattgttgagatccgaatggtgaccaactttgaggatgaggaggagattgttagcactggcagatttattttcctcgatcacctccctgacagacctggcttctgttcatttacatggtccaacgatgaccctctccaattctcatctttacctgagcacaccaaggagcttctcaccattagagcatacacaacagagggacccctgtcacaagattacctcgagtctactcgtacccttgtgatctccaaccaatggaaacaggtttacagcatatgcgatactgtccggggactttctttcccatgcctggcaggcgcaatatccttatga

SEQ ID NO: 1793 - DNA, 378 bp, Oryza sativa
  Clone ID: PAT_MRT4530_101625C.1
atgagctctgaatttgcagccaatggcgggatccatggcagcctcaccggcatcagcatcggcgtcggtgtcagctcaacgcagaaggtgtggcgcagcttgcaggcattcggtgacatcgccttcgcctactccttctccaacatcctcatcgagatccaagacacgaatcaaggcgccgccaccgtcggaggcaaaggtgatgaagagcgcgacgaggctgagcgtggtgacgacgacggtgttctacatgattcctcgaagccattagttggcatcgatcaccgcataggcagagaggacgctggcaccaaggtggtagtaggtatacacaaggatcgctacgccagtttggatcctcaacaccccggcgtctag

SEQ ID NO: 1794 - DNA, 2575 bp, Oryza sativa
  Clone ID: PAT_MRT4530_101626C.1
atgaatgacattttcctgtttaatgcaatgatcagtgatctgggtctagttgagttgcccctcaagggaagggctttcacttggagtaacatgcagcatagtcctctactagagcaattggattggttttttacctctactgcttggaccttaaccttcccccataccttagtaaagccacttgctcggtctacttcagatcacacaccttgtgttgtgcaaattggaactaacatccccaaggctgacatcttcaaatttgaaaatttttgggtagagcatgatggtttctttgatttagttcaatccatttggcaaaatcatgggtatgaaggtaatgcagccaagaatatttctgttaaattgaaggctttgaggaaaggtttgaagaagtggagtaaatctctctctaaacttcaattgttgattaaaaattgtaatgctgtcatagcttttttggactccattgaaaacttgagagatctcactgttcttgaatggaactttagaattcttatcagaaacaagctactactatacctgaagtataaacaaatttattggcaaaagaggtgtactatcatatgggccaagtttgggggtgagaatacaaaatttttccatgctatggctactgagtcttttagaagaaatgcaataccctctttagtagattcttttggtttagtttgtacaagacatgaggaaaaggctcacatagcgtggagtgctttctcttcaacaatgggttgttctcagtttgagtttatgccttttcagctgcaagaacttttccatgcaaatcaatctcttgcttctttggatcaaccctttggtatttctgagttagacaaaattatacagaatctgcctatagacagagcccctgggcctgatgggtttaatgggatgtttgtttagaaatgttggccaatcatttgtcaggattattatagacttgcagctgagttctactatggtacactggacctggatcctttaaaccattcttttatcatcttggttccaaagaaatctgtgccaaaaggtataaatgactataggacaatatcactcatgggaatctctcttaagatttaaacaaaagtcctagctgatagactgcaaaaggtgatattggagataatcagtcaaaatcaatatggattcataaaagggagaactatacaagactgtctagcatggaactttgaattccttcatcagtgccatcactccagaagggaaatagtccttctaaaattggactttgagaaggcttttggcactattgaacatgaagctattttgcatgtaatggaagccatgggttttagtgctacatggtttggatggataagaaagatcttttcttctgcttcttcttcagttctggtcaatgggatacctagaaaaaatttccactgcaagagaggagtaaggcaaggtgatcctctgccacctttactctttgttttaggagctgaacttctccaggtcattgttaacagagcttatgcaatgggtcatctatcaaagccttttccatcagactttgacccaaattttcctattgtccaatatgctgatgacaccctgctttatttgaaagctagtggttaagagctctttactctaaaggctttattgcaaactttccagctgggaactggtttgaaggtaaattttaataaatcttgtctcatcccaataaatgttgatgaatggaaagctcagaacttagctgcagttttgggctgtcaattgggatctttgccttttacatatttgggtttaccatttggtaccactaagccaaaggtaatagattttgcacctttagttgacagaattgaaagaaggcttacatcaaatgcttcattcttgtcttacggagaaagacttacactggttaattcagttttctcttcactacctacttattacatgtgtactttaatgttgccaaagacagtgattgataacattgacagagcaagaagacattgtctttggagaggctctgaggtcaactccaataaaacatctttggcagcctaggataaagtgtgtaagcctaagagaaaaggtggtttaggagtgctaaactttactatccaaaatcatgctctgctcatcaaatttttggacaagttttacaataagaaggatttgccctgggtcaatctggtttggtttgcctattatggtaactctgtccttcatttgacaaacttgaagggctcattctggtggagagatatttgcaaactaatggatgtctttagaggtattgcaaagtgtaatatgaaaagtggaaatacctgctccatttggtatgatgtatggatgatcaaccccctctttttcacactatgccaaagctttgttcttttgctcaaaaaccaaaatgcatctgtctctgtgtcgcgaccgggaaaattgcattttcccgaacgctagtgtattaatccccgtcccaggaaaagccggggtacaccatacaaacatgatataaaagacacatctttattatatcgataatatttacattattacaaaggcacttaaggcc

SEQ ID NO: 1795 - DNA, 447 bp, Oryza sativa
  Clone ID: PAT_MRT4530_101627C.1
agatgtgaggtttttgggtagctactcatgatgaatagattaaacaccaagttcatgctagatcataagaattgtgctcctccggattgtgatctttcttgtgttctttgtcaatcggcagctgttgaagacctcatgcgtctgttctttttatgcccgtttgcccaaaattgttggagtcttctaggcattacttgggatactactctctttttggaagcaatgatgtttataagggccaaattggattatcaggggagctgttttatggagaaattcctttatgctgcttggcatatatggaagcaaagaaatgggttcattttcgagcaaaagaccccttctttcatcacttggaggcaactcttaaagggtgacctcttccttctgttgtttagaatttctgcgagatatcacgatgtaatcataagttggattaataggttg

SEQ ID NO: 1796 - DNA, 367 bp, Oryza sativa
  Clone ID: PAT_MRT4530_101628C.1
ggcggcactccgactgagcgagccgacgaggcgcgccacctcctcgcggccgacatggcggagccggtctagcgttcgtccggcgaggagctcgtgcaccgcccgccgccgcctgccgcctgccgcccgcgcgcggctcctccccacgccgcctgcgcccgccggccgccgcccgtgcagctactccccgcgcgccgcccgtggagattggaaaagagaggagagaggaagagaggtggagaggggagggaagaagaggctgacgcatggggcccacgtgggttccacgctgagtcagctgccacatgggataaaaccggactcaaaaccgtcttgggacctagtttacactggttttgtaagttga

SEQ ID NO: 1797 - DNA, 624 bp, Oryza sativa
  Clone ID: PAT_MRT4530_101629C.1
atgaatgctatcttccacatatcagaggacaaacttcacttctggacctcacccaccgccatcgccgtcgccgtcgacggcgacggggacgaggacgaggacgacagacacggtggccaaaggcgagcgagagaggggcaatggtggtgcatggatgatgatatttgtgaaagggacacaaagatattgagtatgtgctgttcttcaggtgcagacatgtacagtagtgctagtatgctgtatgtagcacaagcattcattgtaggggtgaaaacggagcggatattatccgatccgatccgctccgaatccgtccgaagtgaggatatggagcaacaacagcaaatgaccgcagcgactgcaagcaggcatatgtatgagctggtacgagccatctcatctcatcagaaaatactcgtgtgtcaaatgcatcatctctctgtcacgaccgtttctactatcttagcgtgcacgcatctcgccgacagagtgggacgtatacgtactaaatttttcttactctccttcacaccaccgtgtgagggggctaggtttgaaaaagaaattgaacaacgtctttcgggaatatttggggtattaaaaatgtgggagtacgctcttaaa

SEQ ID NO: 1798 - DNA, 603 bp, Oryza sativa
  Clone ID: PAT_MRT4530_10162C.1
atgatctccgggatctcctctaccttttcttctttggaaacttcggctaaatcggtttggaatgagtttgattcgagttcgaatcggatcggctttcttctctccaagtccgagctttccttcgccgttgccgccgccgtgggttttcgtcgtcgcctccgagcccctttaaaaggacccccggtgtctcctctacccgtcgccaccctcgctttcgcctctcgtcgccggaagatccctagcgccgtgcaaccttgtgccgccgtcgccaccgtcgctccagccgtcgccgtcgctcgggaagaccgccgtcctcgtccgccccttcgctgccgtcggagaccgccggagcatcgtcgccgtcgtcaagccgaagagcgccgccgtttcaacctcgtcgccgtcgccgtccgttggtcctccgccgtcgctttggtcgccggtgagttcgccgtgccgtccgctacccgttggtgccttccgtccgcgtcgccgtgccgtcgttcgccggcgagcatgcaagcccgagccgccgagccgccgccgccggtggtgacgtcatcgctgacgtcatcggggccgttcgctgtgagccggtcgtag

SEQ ID NO: 1799 - DNA, 138 bp, Oryza sativa
  Clone ID: PAT_MRT4530_101630C.1
atgaggcacaagatgcgaatgctcccgaccgtccccgtcgcgtcgcgcgacgagagccgcccgttcggcgcggccgcaactggcgcgcggcgcatccgtgccacgtctgcgcacagccacacatcagagcaagtttaa

SEQ ID NO: 1800 - DNA, 442 bp, Oryza sativa
  Clone ID: PAT_MRT4530_101631C.1
ttttgtcgtgagttattatcatgtgagtttcagatcaaaaaagaaaaaaggataataagaaaaaaacaaaaaaaggaaatactgagctatataaggaacatgggactcagatggtgaaacagactcaatcagctattcatggtgggtgccctgttgtggacggggtgaaatggtcagcttctaactggatgaggctaaaagaatttgttttttcgatggatgacgctaataatgatgccttctaatttctggctatgcagatgtggggctatattctttctattctatgtaatgaaacgtttcaggaatcttgcattcatatgatagtccaataaccccacggtcatatttcgttttcctttcgcaattttagcaccgctcaccgctgttattatccttcccgcttcagcatggtggtaactgggacatgctctggattcca

SEQ ID NO: 1801 - DNA, 404 bp, Oryza sativa
  Clone ID: PAT_MRT4530_101632C.1
aaaaccccccccctttttttcttttatagggcagttgggaccccctcgatcgacccaataccccttgcccagggggggggaccaagcttctgcccttgccttttgttctataatcagggggcggggcttggtgcccaatccagggccggggacccccgggacattccccccggggaaacccccccggttggaaacccggggcccattccccttgggggcccccgggccccttaacccgggggttttgaatttggacggtccaagcttcccccccataacggggccgcccattttacccgggggtgtgggccggctcccccttaaaagggttggccgaaaaccctttggggaagcccccattttttttttcccttgggaccaaccccgggccccgggggtccccc

SEQ ID NO: 1802 - DNA, 622 bp, Oryza sativa
  Clone ID: PAT_MRT4530_101633C.1
ggaagaaagctttgtcaaaccactgcaacttaaggtgaaggattaccctttacttggagtccatgtctcggaatgccagatctatgacctagagaaccgcatgatctgttaccagacaagaagagatttcacaatgattagctctcagcacaagaggaggccatgtgaaaataaatactgtcatgcaaccagagtgcagaaggggtggcgcagaaggtctggaacttctccaaatgcaggggcatgtgtagttaccgtttatacagaaagaagaattgggagatgctggcagagatactggatcatgctgtcaatacgttgggttacacttccgtccataaattgttgaacaagggttcatatgtggtggctgttgcagagatgttgacatcaacccctctagagatctgggatctccgttttgcccaagcactttcttccatggaaattgtgatggctggcaaggcttgccaccagtgccgtcaaatgaaacgaaactttgcagtggcatgcacgcaggttaagaagaagggggtatgcccaataaaatactgccataggtgccttcttaagaggtatgatgagaatgacgaagaagtgggacagatggaagcctggatct

SEQ ID NO: 1803 - DNA, 2363 bp, Oryza sativa
  Clone ID: PAT_MRT4530_101634C.1
atggatctcaagaggagagatgaaggagctgaagaaagctttgtcaaaccactgcaacttaaggtgaaggattaccctttacttggagtccatatctcggaatgccagatctatgacctagagaaccacatgatctgttaccaggtgagcaatctctttagcttctatggttcactatggatctgtttggtggtttttattccattcaatattttccctactgctatacctcagaaaagaagagatttcacaatgattagctctcagcacaagaggaggccatgtgaaaataaatactgtcgtgagtacctggtgaacatatgcaaccagagtgcagaaggggtggcgcagaaggtctggaacttctccaaatgcaggggcatgtgtagttaccgtttatacagaaagaagaattgggagatgctggcagagatactggatcatgctgtcaatacgttgggttacacttccgtccataaattgttgaacaagggttcatatgtggtggctgttgcagagatgttgacatcaacccctctagagatctgggatctctgttttgcccaagcactttcttccatggaaattgtgatggctggcaaggcttgccaccagtgccgtcaaatgaaacgaaactttgcagtggcatgcacgcaggttaagaagggggtatgcccaataaaatactgccataggtgccttcttaagaggtatgatgagaatgatgaagaagtgggacagatggaagcctggatctgcccaaaatgtagaggcatctgcaactgcagctgctgcagcttactttgtttggcatggcagaaggaagaaaggacaacaacccacagggagattggtccacactgccaagaaaggagaacaaggggctgccgatgaggaaagcacaggtagatcccttcggatagagaattctgttgaagaattgctggtcgagggggatcaaataaagctgaagggcaacattgtggtgaataaaaattttgatggtgaaagctccttggctaaagacaaaaatggatctatattgggctataatagcgcagtttcttcacccaataaaaaagtgcttccaaggggtagtctggtcactaacattctaggtgcagatctggaggtgaaagatgttggaccagcaattcagttatacgagttctgcaattcatttggcgagattttccagataaggaagggccaacctgaacaaattctacaagacatagcaagagatcaagaggttgaaatagtacccgagcttattgctggctttcacaaaaacttgctatcggtcatcaaagaagacagaggggagaagaattcaatctacataacaaatggagatgcatggttaaatgatttaggtgcatatatcaatgaattggcatttatgtcaaaggaattgcatcttgaatttgtaaacaagggaacattgggatacaacaagctgagtccttgtaagctgcatgtacttaatttactttgcgatgaggccctctctaccgtaaagttaagaaaattgattgaagaacaaaatggaagggcagctgaaagaaggaacgatgccaaagcaaaactgcgggctgcaaaagcaaaggaaaaggaactaagagaagggttaaagaatgacatgaaagaaggagcaacccctattgaaggaaacagaaatcagcttatttctgatataaagaaggcaaaggaagtcaagctgacagccataaaagagaagaagctgggaactgtccttaggagcaagcctttgatgttagaggacagggaggcatactggaagctggatggctattcgaacaacaagatgctattgctgcaagaatttgataatgagaatttcactggaaatgacatctggtttgagttcactgaagatgaagaaaaaacaattgaaaatcatgcagccataaggaaagtttctcttgtccttgtcctacaaggacaagtatctccccatgggtataaatatgtacacccggagtcattgtaatttatctctcgatcaatactactctcggtgcatcgccaccctcttttctgaggttttacttatcaaccggcggaatttggcacctggcgcagggctgcatcggttcagtttgatctccgacgaaggggtaagtgctacgttccgtcggccgtggtgaatctatcggctacattggtgttgttcaaggctgcattccttcgatctcttggatcgctctggtttggttgatatatttgcctacctgatatctcagttctatctataattgcattgtgtttagatacacattggtttagttgagactgtctcggttaggtctgatcttctgtcttagctgatatatctctac

SEQ ID NO: 1804 - DNA, 187 bp, Oryza sativa
  unsure (1)..(187): unsure at all n locations
  Clone ID: PAT_MRT4530_101635C.1
gattccgccgagacagaaacatantacacttgagctcactccaaactcaaacactcacaccaatggctctccaagttcangccgcactcctgccctctgctctctctgttcccaaaaaaagggtaacttgaaccccggtgggtgaaaggaacccggggtcccttaccttaaccnaaaaggcnaaaaa

SEQ ID NO: 1805 - DNA, 766 bp, Oryza sativa
  Clone ID: PAT_MRT4530_101636C.1
cccacgcgtccgggaaaaggaactaagagaagggttaaagaatgacatgaaagaaggagcaacccctattgaaggaaacagaaatcagcttatttctgatataaagaaggcaaaggaagtcaagctgacagccataaaagagaagaagctgggaactgtccttaggagcaagcctttgatgttagaggacagggaggcatactggaagctggatggctattcgaacaacaagatgctattgctgcaagaatttgataatgagaatttcactggaaatgacatctggtttgagttcactgaagatgaagaaaaaacaattgaaaatcatgcagccataagcccccatctcctctgccgcaagtcatcatcggcctaaagtcagtatcggcttcagagtcttggaattggaatcgaccgatgggagttatcaaatcgccagcagttgtgttcatggtggagtcagatcaattaaaggaaatttatccaaaagattgagttcaaggagaagagttcgagttcaaggagtatgcggcatggcaagttatctattaattaggaatagtttgttagttctttttatctttaggaaagtgtttagtgtctgataagaacttaatgttttctttttatctttaggaaagtttctcttgtccttgtcctacaaggacaagtatctccccatgggtataaatatgtacacccggagtcattgtaaggaatatttctcgatcaatacaactactcggcgcatcgccatcctcttttt

SEQ ID NO: 1806 - DNA, 405 bp, Oryza sativa
  Clone ID: PAT_MRT4530_101637C.1
tactactcatgggtataaatatgtatacccggggtcattgtaatttatctctcgatcaatactactccggcgcatcaccaccctcctttctgaggttttacttatcaaccggcggaatttggcacctgacacggggctgcatcggttcagttcgatcttcgacaaaggggtaagtcctacgttccgtcggccctggtgaatctatcggctacattggtgttgttcaaggctgcatcgcttcgatctcttggatcgctctggtttggttgatatatttgcctacctgatatctcaattatatctcttgcattgtgtttagaggctcgattggtttctattggattatattattgttggggcatttgcaaatttgccaccgtttttttcaattttgcaaggatgcca

SEQ ID NO: 1807 - DNA, 599 bp, Oryza sativa
  Clone ID: PAT_MRT4530_101638C.1
ggagaggagcagccgtcgacagaagcgcccgccatgtcaaggttgcgggatgccatcgaccttcacccaagtcgcccaccgcgttgacatcacatatacgcaggggaggtatggcctttcatgacccgtacgtcggcttcgtacgttgtttcatcacgaacgacgtcgtatgggacgccagagggacgtcgcacggcgcgttggtccgcctcgatcgccggaagctaattaagctagcgcctagcgagcatgttggcaaatcttcagagataaacgtagcggggcgtagcgctgttgtttgtttcaggttcagagttaggaactgtagcgcgtcatttttcgctttcgttcgatcgttttgatcttggtcagagtcttttgttagtcgctcactcgctcttgagatgtgctgtgctggtccacgtcgaggagttttgttgcgtttctttagtggtgtgccgattgcgcgaccgatcgtgtgggactggcacatgaaaagggggcgcgatcgtcggccactctattgtttctgcactgtggataaaagcagtaaaacagaaaaccagcagcaagttagctgcaccaaaaaaaaaaaaaaa

SEQ ID NO: 1808 - DNA, 420 bp, Oryza sativa
  unsure (1)..(420): unsure at all n locations
  Clone ID: PAT_MRT4530_101639C.1
atggcggcgacggcagatccgcgggcgaagccgcccgcggcgacgtcgacgcaccacctcgagccgtgggggcagccgccgccgccgccgccaactcccgcgcaccgcttgccgccgacggtgctcccggtggtagcgttaccggcgggggcggcgtcccctcccggccgtttcgcttcctccgggtgctccgtcggcggcttgcggtgcgcgggtggtggcggcggcggcggcggctgccccctcggctcgtggtggtgcgtcggcgtcgccgcgggcgggctcggccgcggctctgccggtgctgcctggggccgcctgctccttccggtgggggggtggcngttggtgtggcggtggtggcggctgtcttgtccgtcgccgtttgtgttcctggcgcctcgcctccccttttattag

SEQ ID NO: 1809 - DNA, 809 bp, Oryza sativa
  Clone ID: PAT_MRT4530_10163C.1
atgacgtcaccaccggcggcggcggctcggcggctcgggcttgcatgctcgccggcgaacgacggcacggcgacgcggacggaaggcaccaacggaccaaagcgacggcggaggaccaacggacggcgacggcgacgaggttgaaacggcggcggagatcgggtcgacgacggcgacgatgctccgacggtctccgacggctgcgaagcagcggacgaggacggcgacgacttggcgagcacgacggcggtcttcccgaacgacggcgacggctgaaacgacggcaacgcacggctggagcggcggcggcgacggcggcgctagggcacacggcgctagggctcttccggcgacgagaggcgaaggcgagggtggcgacgggtagaggagacaccgggggtccttttaaaggggctaggaggcggcggcgaaggcccacggcggcggcaacggcgaaggaaagctcggacttggagagaagaaagccgatccgattcgaactcgaatcaaactcattccaaaccgatttagccgaagtttccaaagaagaaaaggtagaggagatcccggagatcatttcccctctatcaattcggccagagaaggaaaggaacggccagattggaaagcggcggcggcggcggcaaagctagggtttcggcccgaggaggacgacgatcccgacaggtgggccccacctgtcagcgggcggacgcgcgctcgcgcgcggcggactgggccggctgggccgaggagagagaagagagggttttgggccgactttcggcccaaagccaaaagaagacttt

SEQ ID NO: 1810 - DNA, 2826 bp, Oryza sativa
  Clone ID: PAT_MRT4530_101640C.1
tcataatattgctagagagcgcgggccgatggttgagccgtccaagagcggcggcggcgcggcgctccggcgagcggcggccggagtcgctctcccggttggcgttgtgtatgtgatagaaggccaggaacccgcgccattgctcttctcaacaggagcaggtgagatctctgacctgtcaacggcaaggtcgtcttcctcgtcatggaccttctctccctcccatggcgtcgcccacctccgaggtgtgtacactccataaaccaacctctcctgctcccatcatgcacctttgccggatctacgccctccagcgtctgaacccctccgaatcctctcttttgcgtgtattatatcctgttttctaatggttattccccatgatactacaacagcaatggccaacccaaggccgaatcccaatccagaaaagaggaacaacacaatatctacggatttcttcttggaagggatcacattcagaattgtcatgttgatgcaacctttagatagcggaggaccacacaaatcattattccccagaaatgagctgttggtgaatgtcaagaaatgaagtgattcaggtatttttcacttaagcttgttgtaggataggtttagcatttcgaggaagtctaaggatgctaattcttgtggaatgactcctgaaagctgatttgaagatagatccaaagcttccagctgcttcagcccaccaagttgagatggaattggcccagtgaggaagttatgtgacatatttatcccatgagttaaaacaagttccccaacaatttctgggatgctaccattgaatgcattattggagaaatcaatgaatacaagggttcttagtatttgagcaagtgtggtgtcatgacctttgtatgtgagtgaggctttatatctatatactagtcctacacttggcacagcatgatccatgaccaatgatgtatttgtgtctatatgtagcatcgactccaacttcttaaaccacttgtctttgggcaacggaccagagaagttatttgaggatatgtcaataattattgcatttggaaatgcacatgtgctttcttcatcggtgagagattgaacgacatgtccaaatagcttattggatttcagtacaagcacttggagtctacgaagtttactcatccagcatgggaaaatgtcatttatttgattgttcccagcatcaaggatctccaaattttgacaagcaagtagggatctgggtagctgtccttcaatcctattgccactaaaatatagtgcatgaaatgagcagccttcctttatagtatctgggatctccccatcgagttgatttgcatttagatttaatatttgtattccattaacgttctcgatcaaacaagatggtattgagccactaaagttgttgttagagagatcaaggtattgtaattcagttgcagtacagaaagatggtgggatttctccggagaagttgtttccaggggcattgaaaagtgtgacatgactaagatgggcagtgaaattaaaaggaatcgatgagaacatgttgtttgagtaatctagcaatcttgcagaaccttgaggtataggtatagtcccctcaaacatgttgttgctaagatcaagccaatcaatttgtaaaggaataaaagggttagatccaacactagtaaatttattatgtgctaaaatcaaactagcaacgccagaatcattccaagactcccatgcccacgatggtatagccccatggatttggttttttgaaaggtcgagccaaaggagttcatcttgactcctcaagaaatcagggaatttagtgatgttgcaacccgataaagctaatatttgtagtttagggatgtgtgttgatgaagaatcgacttttccatccaccaccacaagattattatcagatatatccaagtaacggaggtgttgtagtccccataatgatgcaagtttcattgtaccgacaagattgtttgaattaaggaagagtgtgctcagattggtgaagtttgagatattttgtggtagttttcctgaaaagttgcattcatacaacactaattttctcaatttcgttaacttacttgcaccgacgccaaggttcttcaaatatttgagatttccaatggaacttggtatttcaccgtagaaactagtctgtccttgaagaaaattgtgtcccagttgtagaacacgcaaagaggagaaggtggcgaagtttggaatgggaccagacaaatcattaaaccgtaggtcaataacagcaagcgagtgcatggcagaaaaggatccacaaataggaccagagagcccacagtttggtaagctaagaacccgaaggttaggagtggacgaggatagagcatcgcaccatgtcatcccgttgtcggacaagtccacagcgccgaggtagagctccctcaattttttatgatttgcgattaaagtttcaaagtttggctctttgagcacgctagattcaacgccgctctccaatctacgccctcccaggtccagagacgtcacacgcccatccccattcctgcagtggatgccctcccaatggcaacagtctgtgccggccttccatgacccaaaggtggaactggagtttttggtgatggagaaagaacgtttcaaccggagcagcgccgatgcctggtccggcaagcatggaacaaccgccggcggcagggctccggtgtggttggcgtacgtagctgctgatgaagaagggacaataatgagctgggtgtgtaagaggatcagcatcaacggcaacaccaatggcttgtaacgggtcat

SEQ ID NO: 1811 - DNA, 759 bp, Oryza sativa
  Clone ID: PAT_MRT4530_101641C.1
atgccaagccagttaaacaaaaactgtggagatttgcacctgattgaaaacaagccatacgagaagagcttgacaagctcctcaaagccggcttcatcagagaggttcttcatccagaatgactggccaacccagtcatgcatggcgtgccccaaggatcacttccctcttcctcgaatagaccaattggtggattcaatggccggttgcgagttgttgagttttttcaacgcttattccggctaccatcaaatcagcatggccaaagaggatgaggagaagacaacattcatcacgcactttggtgttttctgctacaccaagatgcccttagggttgattagcacaggcaacacgtatcagtgcgagatccaaggagctctcggtgatcaaatcggatggaatgtcgcggcatacgtcgacgacgctgccgtcaagacaaaaacaggcgacacattgattgatgacctcagggaaacattcaacaacctccgacgacatcggctcaagctgaattcagagaagtgcatatttggaataccgtcggggaagctactcggttttctcgtctccggacgaggcatcgaaacaaaccccgagaagattaaggccatcgagaatatgaagtcacccacaagactcaaggaagtccagaaactgaccggatgcaaggcagcactaagctgcttcgtagctaggatgggagaacgaggacaggccttcttcgccttgctcaaaaagcaagacaaattcaagtag

SEQ ID NO: 1812 - DNA, 388 bp, Oryza sativa
  Clone ID: PAT_MRT4530_101642C.1
cctttccccgccgggcgtcaaggacacgtcgtctacatcgccaagctttctgccccgtggacgtcgtcaagacccgccgagggtgcaccccgtcgacgtcgagtcccccccggcagaggcgcccccccaggaggacgacaaggccgccgccaccgccgccgccggtagtccggccccggcgagaagaaggtagcggcaatgagtgcgtgcatgcgtacctgggtccccgtaagaaggaagaaggcgtgacgtgtccagcccgtacgcgcgccaccgtggcccagctagcttcagagctagtgaagctgcagacatgctagctggctagctacccgtgagagattgcgacgactataaagaaaaaattagtgattaattaagggcttgt

SEQ ID NO: 1813 - DNA, 1624 bp, Oryza sativa
  Clone ID: PAT_MRT4530_101643C.1
actttcttatcggcacagcttctgagctccttcagttcaatccacccattcgatagtccaaaggagcaaaagccatagccatggcggcggcggcgtcgtctgttctggcctacctgctcgtcgttgctctccttgccatcgtgcctctcgtctacttcggctgggtggcgcgccggcgcggcgagggcgggcggctgccgccgtcgccgtgggggctgccggtgatcgggcacctgcaccacctggcgggcgcgctcccgcaccacgccatgcgcgacctggcgcggcgccacggcccgctcatgctgctccgcctcggcgagctccccgtcgtggtggcgtcctccgcggaggcggcgcgcgaggtgatgaggacgcgcgacatcgagttcgccacgcgacccatgagccggatgacgcggctcggcatcatcttcgcgccgtacggcgaccggtggagggagctccgcaagatctgcaccgtcgagctgctcagcgggcggcgcgtccagtccttccgaccagtccgcgaggaggaggccggccgcctactccgggcggtggcggcggcgtcgccggggcaggccgtcaacctgagcgagctgctgtcggcgcacgccgccgactcgtcggtgcgcgccatcatgggcgatcggttcagggaccgcgacgcgttcttggcgatgctggagcgcggcctcaagctgttcgccaagcctgcactgccggatctctacccgtcgtcgcgcctcgccatgctcctcagtcgaatgccgcgtcggatgaagcagcatcaccgggacatggtcgcgttcctggacgccatcatccaggagcaccaagagaacagatcagccgccgccgacgacgacaacgacttgctcgacgtgctcttgaggatccagagggaaggcgacctgcagtttcccctgtccagtgaaagcatcaaggcaacaattggagacatgttggttgggggcagcgagaccgcagcaacgacgctgcattggatcatggcggagctcgtgaggaatccgaaagtgatgcagaaggcacaagatgaagtacgacgagagctcatcgggcatcgtaaagtgacagaagataccctatgtagactgaattacatgcatatggtcatcaaggaggcactccggctacacccaccgggatcattgctgctaccacgggaatgccgacgcacgtgccaagtcctaggatacgatatacccaagggagcaacggtgtttgttaacgtatcggctattggtagggatcccaagtactgggacgaagctgaagagtttattccagagaggtttgagcatagtgatgttgactttaaaggcacacattttgagtacacaccatttggagcaggtcggaggatgtgccctggcatggcgtttggtctagccaatgtggagctcacattagcgagcctcctgtaccatttcaactgggaactgccgagcgggatacacgctgagaacctagacatgacagaggagatgcgattcaccacgcggcggctccatgaccttgtccttattcctgtagtccacgtacccttgcctacaatataagctcatcatagcacactgatttttgtacaacacttaag

SEQ ID NO: 1814 - DNA, 2172 bp, Oryza sativa
  Clone ID: PAT_MRT4530_101644C.1
atggcgcgaggcggccgccaacggcgacgcggcgaggctcaagccatcgcagcgggcgctcttctcatgcatggaccttcagcacctgcaaacccgatgctgagcccaacaacgatgcccaataacaatgtcgtagcggtggaggctgtcggtgcatcacccgccgcaggcgttggggtcggcgggaggtggtggtggggttgcgatgatgatgagcacggagccacggaggagaagtttgtggcagcgctgcgaatggtggagacggagatggaggcggcagcgagggcggtgccggtcgccgtcgtggtcggagttggcgcagctatgcgggagctcgccgcggcctggcgtgcggcgcaggatagaaacaaatctggagcagatatgaatgatatctttttcaatgacattatcagctcccttggcttgcttgagatccctcttaagggtagaaaatacacatggagtaacacgcaacaaaaccctcttcttgaaaggttagattgggtgttcacttcagctccatggaccttggctttcccaaacactacagtggtgcctttaactagaaatatctctgatcatgtgccatgtgtagtgaagattgatacaaaaattccaaaatcccctatttttagatttgagaattattgcgtgcagatggagggattttttgacattgttcagcaggaaattgacagtcttatatccattgtcccagcagataaagcgcttggaccagatgggttcaatggtttctttatgaaaaaatgttggcatataatagctcaggactactacagattggcatctcattttcatgctggatgcacaatttggaaatcttgtagttcttatataactttggtttcaaagaagaattcaccagagacggtcaatgattacggacctatatctcttatggggctcagtttaaagttcctaaccaagctaaaggcaaacagacttcaaggggtaattctcaagctaggaaagacaatacaggattgccttgcttggtcttttgagtacatccatcagtgtcagcaatcgaagagggaaattgtttttttgaaattggactttgaaaaagcttttgatactattgaacactctgctattctttctgtcctgcaacatatggattttcctgaaaaatggatgcaatgggtgcaaatggttttctcttcagcttcttctactgttctgttaaatggtgttccaggaaattcttttaaatgtaggaggggtgtaagacaaggtgatcccctatcaccacttctttttgtccgtggagctgagctgttacagagagtaatgaataaagcttttgagttggacttaatctctaagccaattaatgaaaatgatgggagtgggttccctatcatacaatatgctgatgacaccctgatcttactcaaagcttctcaaaaggaaatcttctgtttcaaaactatcctgaacatgtttgcacagtccacgggtctaaagcaaggaagagttgtctttggagaggcaacaacccatcctcaactagaaaagtttttagctttttgggacagagtatgcacacctaaagataagggaggtatgggtgtgattaacctgagagttcagaacattgctttgcttttcaagcatatggtaaaattatataatggtgttgagctgccatgggtgaaactgatctcacagacttattatgtttctagagtaccccatctggttttgaacaagggttctttctggtggagggatatcacatctctttcagatattttcaggggtatagctaagtgtacaattcagtcaggtgcaactgcccttttttggaatgatctatggaatgatgattttaagtgcacaagctaccctaatctgttcagtgtgactttgtataagaatgattcagttaggaccatgtgcctacggccaatggaggactcttttgttcttcccctctcagatgatgcatgtggagaatttttgcaactgcaagaggaattgaatcatctgcagcttcagctaggaagaagtgatgtttggagttttatttggggaacaggtcaaccttcaaacgtgtcaccgttggttccaatgacaggggcacataggtttcatgtgtttgcttacaccgtggtctcgggctcaccatctggaaaataa

SEQ ID NO: 1815 - DNA, 2688 bp, Oryza sativa
  Clone ID: PAT_MRT4530_101645C.1
ctactgttcaagcctccccggaccccgattcccttgccaatggcggacctcaaccctaacccccttcgtttcctccatcaaggtcacattgtgcatttgggaggaaatttgcgtgtccctagagttgatctcaccttccctcaaaggcctgttcgtcgccatgaggagttctgccttgctttggtggagccgccggtgccggagcaagattgggatcaccaccgcatgctgatcctgcatcacattcttgatgagcatctttttgaggtcagaaacagcttccgtcatgcttctgcggtgggtatgtatcaactccgttctgctatgcatagagatgccctggtccatagtgagccatttgtttatgatggagtgctttcggtaacttttgtgaagcatgatcaaggcccaaattggagagcatctcagtgccatagagagggttggttccttttcttggttttcccccttgactttgttgattggtaccatctaaaccttgctacggctacatttggccaactttctttttggcttgaaagggatcagatcaaggggagagttctgataagggctaagtttaaggataatgattttgtgcctcgaaaaattgttttgcatgatccggtgggtatgggcggaggaggagaatcatggacagtttccgtgtttttgttggaaggggatttcattaacatggctcctgatgaagatctgccccctgcgggccctcaaccaaatcctaatggtccagatgatgatgatgatcctaatgtgggcaacatttggcagatggggcagcctcctgctggtccaggtgacttggatgatttggtccaacagcagcaagctgcaaaggctgaggtagaggatgcttggggccaagactatccaatgggccaagtaatggaggtaaatcctaatggtctgcttgctttggtacctattgtttcagaggatgctagcgcttctgttcctgctattgctgtacgaggcagagtgcaaggttgcagtagaataaggaggaagaagaactgcaagtggatcccagaatgggtattggcaagccaagggatgggagtggacatgtgcagcttaactcctgaggaggtagttgaatccagcctgggaggttcgaggcatactactcaaacctggtccctgacttgtgtttatggcccttgtggtggcccagagaaatctgattttgttccttggtttaagaacattagcattggtgatcaaaaaaattggcttttttcgagtgacttcaatttctatagatctgtgcaggatagaaacaaatctggagcagatatgaatgatatctttattttcaatgacattatcagctcccttggcttgcttgagatccctcttaagggtagaaaatacacatggagtaacatgcaacaaaaccctctttttgaaagttcttatataactttggttccaaagaagaattcaccagagactgtcaatgattacggacctatatctcttatgggtctgagtttaaagttcctaaccaagctaatggcagacagacttcaaggggtaattctcaagctaggaaagacaatacgggattgccttgcttggtcctttgagtacatccatcactgtcaacaatcgaagagcgaaattgttcttttgaaattggactttgaaaaagcttctgatactattgaacactctgctattctttttgtcttgcaacatatggattttcctgaaaaatggatgcaatgggtgcaaatggttttctcttcagcttcttctactgttctgttaaatggtgttccaggaaattcttttaaatgcaggaggggtgtaagacaaggtgatcccctatcaccacttctttttgtccttggagctgagctgttacagagagtaatgaataaagcttttgagttggacttaatctctaagccaattaatgaaaatgatgggagtgggttccctatcatacaatatgatgatgataccctaatcttgctcaaagcttctcaaaaggaaatcttctgtttcaaagctatcctgaacatgtttgcacagtccacaggtctaaaggtgaattttaacaaatccagtttgtatcctttgaatctttctcatgacaatgcttctttgctggctggtattttgggatgctccattggttccttgtctttcacttatttggggttgcctcttggtaccactaggcctagagtggttgattttgcaccattggtgaacagagcagaaaggagattgacagcacgctctatgtttttgcctcaaggggcaaggttaacattgattaattcagttctttcttctattccaacttattatatgtgctctttgcaacttccagtcactgtcataaaggcaattgatacagcaaggaagaattgtctttggagaggcaacaacccatcctcaactagaaagtctttggcttttggggacagaatatgcacacctaaagacaagggaggtatgggtgtgattaacctgagagttcagaacactgctttgcttttaaagcatatgcttcaggcaagaagtgatgtttggagttttatttggggaacaggtcaatcttcaaacgtgtcaccgttggttccaatgacaggggcacataggtttcatgtgtttgcttacaccgtggtcccgggctcactatctggaaaataa

SEQ ID NO: 1816 - DNA, 312 bp, Oryza sativa
  Clone ID: PAT_MRT4530_101646C.1
atgtacatgtacttgtccaccttgcagcctcccatcctcaccgccacctcgtacacactccgccccgcgcgcgtcttcgccctcaccaccagcgaacgcctccacaagcgcatccacggcagcggtggtgccgtcctcggtgaccggcgaggaggacacaaacgtggcatagagggtcaggttggggcgttaccaaggctcggcgcgggcaacgtggagcgtggagagggcgaaggaccagtagccctgacattggagctcggccatggcggtgaggaggtctctcttgaggaggaggccgtgagaggttga

SEQ ID NO: 1817 - DNA, 1359 bp, Oryza sativa
  Clone ID: PAT_MRT4530_101647C.1
agtcgtgaacaagagaaagaatgggtttttgtggctcctaagaaacgtgtttctgattctttgaggcaacctggtcgttcttatgctcaagctactcagcagcgggttattcctatgaagagtgtttttgatagattaaaggagtccttgaaggtgactggcggtgatactccggcaatcactgttccggtgaccaaagttccggagactaagctggtggctaatcccaaaattcaaaatgttagagacctaaaaagcttgcgccggttatctcgtagccttctcgccttctccaatctactgttgagaatattgttcaagcctccccagcccaaagttccatgccaatggcagacctcaaccctaaccctcatcgtttccgccatcaaggtcacattgtgcatttgggaggaaatttgcgtgtccctagagttgatctcaccatccctcaaaggcctgttcgagttttgtgttgctttggtggagccgccggtgtcggagcaagattgggatcaccaccgcatgctaattcttcatcacattcttgatgagcgtctttttgaggtcagaaatagctaccgtcatgcttctgcggtgggggatttcattaacatggctcctgatgaagatctgccccctgcgggcccccaaccaaatcctaatggtctagatgatgatgatgatcctaatgtgggcaacatttggcagatggggcagcctcctgttggtccaggtgactgggatgatttggtccaacagcagcaagctgcagaggctgaggatgctagcccttctgttcctgctgttgctatgcctaatagggggaaaaaggttcaggacccagtccaagacccgaagatccaggaattcttagctaacttggataaactgactagaagtgaatatcctagacacccttatttttatccaatgtctggcctgaatgagaagattgacctcttgtgcaaagaaaagggaaccatgcaccaatttcttgcttctagttctgttcctgctgccatagatgtgcctcccttcagcccagtttgtgaagcaccagctcttcctgtgttacctaaggctccaattaagaaaagagatgtcaaaactttgctttataacccttacaggaggcagagtgcaaggttgcagcagaataaggaggaagcagaactgcaagtggatcccagaatggacattggcaagccaaggggtaaatctgcaaagaaattgaaagagcttgcaggcttgcagatgggagtggacatgtgcggcttaactcctgaggaggaagttgaatccagcatggggagtgagagaagaaagaagatgcccaggcctgacatggaggaaaaatga

SEQ ID NO: 1818 - DNA, 923 bp, Oryza sativa
  unsure (1)..(923): unsure at all n locations
  Clone ID: PAT_MRT4530_101648C.1
gagggggggggaanaaaagagaaaaannnnncttttgggggagcgcgccaacattagagaaggaaacacaaaacaggggggggnannnnnnnnnntaggncnncnnnnngggacgggggggcnaaaaaaaacganaaaaaanacacaacaacaacactcactcccaaataatactcacaccccnnnnattcntnnnaaaancctgaggggggccccgatgttnagtaccactacttcatccaaggactcccctttgtcaccaacgaccggggggggggnccaccttggggcctggggggagatcactccagtccaagatcatcaacnatnnggagacggggaggtggcgcgggttcaggttcatgacnttctcnancaaacaggccatgcgcgacnccatcnaggggatgaacggcaaggagctcgacggccgcaacatcaccggtaacgaggcccagtctcgccgctccagaggctgaggcggcggtggctacagccancgcggcggaagcggaagctacagtggcggcggctacagtgatggtggcggcggcggtggctacagcccagcccgtgaaggcggctactgcgggggcggtggctacggtgggcggcgtggtggcgggggctacggtggtggctaaccgaaccncggcggccggcactcccacggggactgaggggaaccgagcggtgggggcctcatgggcaaataatctatctatctaatcgagctaccctcgatatcatacgggacggtatcatcaggaggtttagggcgggacctaccactgtccgtgaactggcgggggcccaactgggtgtttatcccaacagaaaactcgaagcgttaggcctgaccaacgactcaccagtgctnctaaagtgcccaaccaaaccacaaaaggcaccacaagcaacag

SEQ ID NO: 1819 - DNA, 573 bp, Oryza sativa
  Clone ID: PAT_MRT4530_101649C.1
atggcctttgaattgagtactcacttctcctgaagcatacatttggaatgtttggtggacatgttttccacataagaaattgacagtcttatatccattatcccagcagataaagcgcttggaccaaatgggttcaatggtttctttatgaaaaaatgttgacatataatagctcaggactactacagattggcagctcattttcatgctggatgcacaatttggaaatcttgtagttcttatataactttggttccaaagaagaattcaccagagactgtcaatgattacggacctatatctcttatgggtctgagtttaaagttcctaaccaagctaatggcagacagacttcaaggggtaattctcaagctagtaagtgaaaattaatatagttttatcaagggaaagacaatacgggattgccttgcttggtcctttgagtacatccatcactgtcaacaatcgaagagcgaaattgttcttttgaaattggactttgaaaaagcttctgatactattgaacactctgctattctttttgtcttgcaacatatggattttcctgaaaaa

SEQ ID NO: 1820 - DNA, 207 bp, Oryza sativa
  Clone ID: PAT_MRT4530_10164C.1
aacccaagggggggaaaacattagcagaaaaaccgggtccaaaacaaggtcaaaaaactgaacccccatgtttgggggcaaaactttgggaaaaactggggatttaagaggaaacccccccagggaaaaaaccccttcaacaggggaaggggggcccccccccaagcagtttgacaaaaaaacaagcttggcaccccaaaacatgga

SEQ ID NO: 1821 - DNA, 401 bp, Oryza sativa
  unsure (1)..(401): unsure at all n locations
  Clone ID: PAT_MRT4530_101650C.1
tttccgtcccattcccttttccgccctttttacttgccctttttcctcctccccagattcgccccgcaccgcaccgcccttggctcgccccgccgctcgtccaccaccacgcagggagagaattttgacggcagaggcgtcgtcgttgattagggcgattggattagtcgcgtcgccgttgagacccacgcgggcctcttgtcccgtaaccaactacctccttccccattggctgccttggtttgggattgggaggccattcgtttcgttgcgttgcgggatacaataatagcagcagcagcagcgccacccctcggcaaagccatcgggggcgcgcgcttgtagccatcggaggaggaggaggagggagntggccctncggccccctagggcggatcggc

SEQ ID NO: 1822 - DNA, 1011 bp, Oryza sativa
  Clone ID: PAT_MRT4530_101651C.1
atggcggacctcaaccctaaccctcatcgtttcctcaatcaaggtcacattgtgcatttgggaggaaatttgcgtgtccctagagttgatctcaccatccctcaaaggcatgttcgtcattatgaagagttttgtgttgctttggtggagccgccggtgtcggagcaagattgggatcaccaccgcatgctgattcttcatcacattcttgatgagcatctttttgaggtcagaaacagctaccgtcatgcttctgcggtgggtatgtatcaactccgttctgctatgcatagagatgccctggtccatagtgagccatttgtttatgatggagtgctttcggtaacttttgtgaagcatgatcaaggcccaaattggagagcatctcagtgccatagagagggttggttccttttcttggttttcccccttgactttgttgattggtaccatctaaaccttgctacggctacatttggccaactttctttttggcttgaaagggatcagatcaaggggagagttctgataagggctaagtttaaggataatgattttgtgcctcgaaaaattgttttgcatgatccggtgggtatgggcggaggaggagaatcatggacagtttccgtgtttttgttggaaggggatttcattaacatggctcctgatgaagatctgccccctgcgggccctcaaccaaatcctaatggtccagatgatgatgatgatcctaatgtgggcaacatttggcagatggggcagcctcctgctggtccaggtgacttggatgatttggtccaacagcagcaagctgcaaaggctgaggtagaggatgcttggggccaagactatccaatgggccaagtaatggaggtaaatcctaatggtctgcttgctttggtacctattgtttcagaggatgctagcgcttctgttcctgctattgctgtacgtaatagggggaaaaaggatcaggacccagtccaagacccgaagtccagaaattcttag

SEQ ID NO: 1823 - DNA, 589 bp, Oryza sativa
  Clone ID: PAT_MRT4530_101652C.1
ctctccctctccgcccatttctcctctccacctgcgatccatccgcgcccgcgaggaggatggagccggacgccgccgcggggagagcatgggagagaaggagaggaggagatcgcctcgccgtcgccgtcgtcgatctcgagcgggagcggagatggggctcacttcacgaagctgttcagccgcctctttgcaagaaggagatgaggatcctcatggtcggtctcgatgcggccggttaaaccaccattctctacaagcttaagctcggtgagatcgttaccactatccccaccatcggttttaatgtcgaaactgttgagtacatgaacattagttttaccgcttgggatgtttgtggttaggacaagattctgctccttgtgtggctctattttcagaacacccatggtccttattttttgtttttgctcagcatttaccgttgagccttgttgttttatgtctcattgtttatcttctacccttattgcttgtttgaagatgatcttacctgttgcttgtgctttttgttgtttgtcaaaccaacaatgatttcttctattgcctttaacgccttctgattttt

SEQ ID NO: 1824 - DNA, 105 bp, Oryza sativa
  Clone ID: PAT_MRT4530_101653C.1
atggcggatttgattgtgcaagcgcttgggagtgccaaatctggtggtggtgacagctgcggagatgactacggggtcgaggttgtccacaacgccgacaagtag

SEQ ID NO: 1825 - DNA, 395 bp, Oryza sativa
  Clone ID: PAT_MRT4530_101654C.1
agaagtaaggcctgttccaggatgtaattactcacccagccacaaagggaagtagggggcagttctggtgttcgatgttcgagcaaccaaatcacgatggatgtatggttaacctgctatgacagccatgaactcgttaattggtgtatgtagctagcacttctcattatcttttttgcctactcttcttcttgggcatgcattgtccctatgattacctgtgattcgtctctgcggatggcgcattgagatttcaaatctcgggacgtacaacagatctagtaatagtttgtttgctgtgctggttcgttaaacatatactggagctcccagaatcactggacataccaggcttcatttagagtgtgtagtctccataagaaaaaaaaacataa

SEQ ID NO: 1826 - DNA, 332 bp, Oryza sativa
  unsure (1)..(332): unsure at all n locations
  Clone ID: PAT_MRT4530_101655C.1
ccatcgcattcagttgcgttgatccgatggngcagtagcaaaaccgagtctcctctcctccctccctccctcccttccctttgccntnaanggaaagccgggggangaaccaccacntggttggaccattaaaatttnttgantccnnaananttggccattnaaaaacccagttgattncaaggggnaaccagnaanaggnaagtcttccagttcgggtttggggttanccanttactccggggancccgggaaacccggccccnggggnnggtcttttggagcgngaaaganggggaaaaatttgcccnccacntnttttngngcnctcc

SEQ ID NO: 1827 - DNA, 499 bp, Oryza sativa
  Clone ID: PAT_MRT4530_101656C.1
gtcgactctagaggatcccctactagaagggtatagggactcaaactggatatctgatgctgataagataaaagccacaagtggatatgtgttcgcacttggaggtggcactggttcctggaagccttgcaagcagaccatcttaacgagggcaacaatggaaggagaacttacagcactagatactgcgacagttgaagccgagtggcttcgtgaactcctgatggatttgccggtggttggaaaaccaatgccagctatcctaatgaactgtgatagtcaaacagtgattattaaagtgaacagttcaaaggacaacatgaagtcatctaggcatatcaagagaagactgaaatctgtcagaaagcagaaaaactccggagtgatagcattggactatgtccaaacggctagaaatctggcagatcagtttaccaaggggctaccacgtaatgtgatagacagtgcatcgagggaaatgggcttgatacccacctaa

SEQ ID NO: 1828 - DNA, 267 bp, Oryza sativa
  Clone ID: PAT_MRT4530_101657C.1
ccggccgggccttcgccgccgtctctctcccgcaccaagccgtctgagccctaaccgccgccgccgtcgtgcgccaccaccgtcgcaaccatggtcgtcgcgctgacccgcccgccagcaagcacggtacactgcttccgtcgcaagaagtacggcggtggctgattcctactgcaagccggggcgcagtctgtttaaggggaacaggcgaccgatcgagctggtcaagccggagatgctgcgactcaaggtcgttcgagcccatac

SEQ ID NO: 1829 - DNA, 868 bp, Oryza sativa
  Clone ID: PAT_MRT4530_101658C.1
aaaaaaaatatttttcctgtcttatctcttcttgattccgtctaaatttaaggatctatccgtccatggtttggtagaatctgagggcggaagcaaagggggaaacagtcccactctgaagagtctgaagattccccaaggtctatttggtttccagtcttattgaagcaggagaagaattgtacgtgctggggtggtgaaacacaagatcctgattcaatcactgccatgggtgaagggttcttgcaaactggagtcgattctgttgttggggggggcaaactgttgggggttccttgtgggcttgcaggctaggtgtttgtggaattgcctccctggaagcagctgtagggaaaggctggagaggagaggaaattgagggagaagagtgcgaggatgacgatgtcgtgggggcttgcggctcacattgtggacatggtgtggatggtgctcgccggctgggtttcaacgtgcctggtgatcgccggtgagatagcccgcggcatgcggaacggggagatcagcccctttgttgttggctgaatcctcctgggccattcttccttcattcattgatgcagatagattttgtcgaatccagtccttcaatacacattgcattatactgtacagagcccataaatctcgattagcgttccactgattgccttcaggcgtaaacagaagtggtagactctaggtcattatcttttcattcttacattttttttatgtcatgtaatcctgtaaacatttgtgcaactacatatgaacaatcatgtcatccctatgttctttttcaccctctcagcaagggtactgaactgttttgatcgatactcaaatgaagttccacagattatgctgc

SEQ ID NO: 1830 - DNA, 477 bp, Oryza sativa
  Clone ID: PAT_MRT4530_101659C.1
atgggcggcggcgtgcgggcacacgcggaagacggcggcgcatggggatgggcgtgggcgatggacggcggcatgcaggcacacgcggaagacggaggcgcgtggggacgggcgtgggcgatgggtggcgacgtgcgggcacacgcggaagacggcggcgcgtggggacgggcgtgggcgatgggtggcgacgtgcgggcacacgcggaagacggcggcgcgtggggacgggcgtgggcgatgggtggcgacgtgcgggcacacgcggaagacggcggcgcgtggggacgggcgtgggcgatggcgcgcggggacaggcggcgccgacaagggcgtcgcgtgatgcggcggcggtgggtggcgccgaggagggcattagacggcgccgggggcggtcacagcttgggggggcgggatggcgacgggcgtgggcagcggcgcgcagggacgggtagcgccgacgagggcgtcgcgtga

SEQ ID NO: 1831 - DNA, 798 bp, Oryza sativa
  Clone ID: PAT_MRT4530_10165C.1
atgcacgcggaatctactgttgatgagatgatcgacaccattatattgatctggatataccagggtttcatttaccgccggggccgcggttaccgcgccccggcgctcaaggtggtcagatccggcctcaagctcgcagtgaccagcagcccatggcaaggtggaagtcgagggagcaacggaggtgcggatttggccgcccccgagctcatggaggccagatcaggctgctcccgagctcgtggcagtggatccactggcctggaggtggaggtgctggatgcgatggcggagaggaggaggggcggctgtgcgctgccagtggggggagagggacggagagaaggagagccgccgccgcgcgccttcaaacggcacggcgaactcaccgacgaccaaagcgacggcggacgaccaacggacggcgacggcgacgaggttgaaacggcggcggtcttcggcttgacgacggcgacgatgctccggcggtctccgacggtggcgaagcggcggacgaggacggcgacgacttggcgaccacgacgacggtcttcccgagcgacggcgacggctggagcgacggcggcgacggcggcgcaaggtcgcacgacgctagggcgtttccgacgacgagaggcgaaggcgagggtggcggcgggtagaggagacaccgggggtccttttaaaggggctcggaggcggcggcaaaggcccacggcggccggcgacggcgaaggaaacttcgggaagaacgaatccgaaacaaactcgaatccatcgatttccaaaccgaagtag

SEQ ID NO: 1832 - DNA, 1409 bp, Oryza sativa
  Clone ID: PAT_MRT4530_101660C.1
ggagagagagagagggctgctcgcgtgcggctcgttggtttttttttttttttttttttttttttttttgaagaggcaaaagcacagcttcacttcatgcttggaatatcgtctacaaactcttcaataaaagagctcttttgtatgatgtgagggcaaaagaatacggaactcgatttctcggcccatgcagaaaggcacaagcggaaaccaaatctgaaggggtgggtgagaaaacgcccccagaatttcgccgtcagtcagtatagtcgtacttttgatctatgaatgaggcatagcgtgcacatatataatagcatgccatgcgctaccctagctatccgaggcgtgcagcttactcttcactgcatgagccgccgcacggtaccatgctgctgcagcaactgctcctggatcaggaactgatgccaccaggtcgggtgcaatgtatgacgaccgtcctgccttcgcttgcatctgtttagtggattcagcaccagctgatgctgcttcagaagacgcgataaaggcagtcacaggatcgtccccggctttgagagactgtttcagaactgtacatgcaggaattagagcatccaacattgtgcggtaccctgcactagcaccaccatatttgctaaccgcagcaacagaggcctccaaagcatcagcccattcatttgcaccaatacttgtgttctgttttaagcttgcatatgcagctttgcaaagtatgtcatacaagattccacttgttccacccatcactctccggactgttgacccaatctcattaattgttccagctgcatcattcattgggtagcgcttcttcagatcttcaagaatagttgttgcacctctatacatcgtggttccacagtcaccatcacccactttactatcccattcatttaagttatccttgatattgataatttctttagcccctgcttcaatagcagcctccagaatacacccttgcttgcttaactcctgaggttcagtgagaatctcatcatccttccctgatggtgatgatggtactggaacaggaatttttgctggtggacgatttccttcagatccaacaggccaagccggagctttagttggagcatcaagtcgctgcaaaatgttttcatctgatctcataatagtgatagagaacccagccatatcaagtgaagtcataagtgtgccagtgtagactctgtcaacagcaatcccatactccaattgtaattcaggaactgcttttcttgctgcaatcataagttccatgataggagttgcacccaatccattgattaggaggacaacattgctccctcttgtgataggaagatactgagtttcctgtgacaatatctgcttaagaacatgttctactactacatcaatgggct

SEQ ID NO: 1833 - DNA, 542 bp, Oryza sativa
  unsure (1)..(542): unsure at all n locations
  Clone ID: PAT_MRT4530_101661C.1
aaaaaaaaaaaaaacaactttttttttttttatatcccccaagggttcacagggcaaaaagggggaaataggggctttttttaaactcccgacccccttttcgggaaaaacttattacaaaacccccccaggggggggaaggggccggggggccccaaaacccctgggggggaccccatttttaggggggccgtaaaaagccaaaagagttggggctggggcccaattccgaccaaaggggagacccccaaaccgggggggttggagctgggggcctttggcccgaacaatgtaaaggccccgaaagggaaaagggggcccccccagggggggggggggccaaacttgggtgtttttcaattgaaacccacctttttgcaaaaaggggcttgccgttttgccaaacgggggccttacaaactaattataggggctaaacccctgttggtgtaccaggacaggccacggcacctgaaatggcctaaaacttggaccaaaaaaaaaaactggccaaaggccctgcttgccncatttgcaggggg

SEQ ID NO: 1834 - DNA, 2052 bp, Oryza sativa
  Clone ID: PAT_MRT4530_101662C.1
atgtcgacttccgccagcccgtctaccacgccatcggctgagtacgcagaacacttgtccgatctggttgcgactccgagtttgtcacatgagcgtcactattttcttggtccgatcggcaatcttgatcccactgagttcatctccgccgaaaccaataggatcccttttagattagccaatcagaatctaggtcactggaaaaacaccttcaagtcttggccttctcttgagaaaactgcccctgagaaaagctgggctgtgtggtataagcgtatatcggctagcaagcaggcactcgccctcactatagcaaattcagctaaggatgaacccctgatggctgccgcgacctacttttggtccaacaccatcaacgctttcttattcaaccaagggccgatgacccccactttgcttgacattactatgatcaccgatttggatgtgacctcatcggctaaccccatgagtttgaacaccaagaaccagtttgacttcagaactaagagcaagaggctgttcttagccgaagcccttgatacaaagaagcaattccctttgggcaaaatccttcttggctatttgtatcaaatgttgaacaacgcatcggctaagattgctgtcggctcagtcgttaacgcaggcgggccatggtggttgctgcaaacttggctaaacttggtagccatgaaagctgtcaatcggccagccgtaacagaagctgaatttccaagattagagccgatcacagatgatgatggagaagagcgcacccaccgcaggtgtatgtcctatggggaatatgcatccacaccagccgatgctggagcaaagttatcggctgaattactcaaggattggttctgtagcttttatgaaggcttccagaaagatgctcgggtttggttcccatatgaagattcagtcaatttggatctcccagcagacttcagatttgaagatatcaaccatgagagatatcaaaagtccagagaagtctttgctgctgctattagcccatgcatcctccctgtcagcatacatcaaggaagaaatattcaagtctcctatgagttttatcatccgatgagctcagctaggcaatttggaatgggacagctaccaatcggcttgttctttgccgataaaatccaatgccgaggagacatttcatcaaccctgatgatggatcggctactcaacatcccaggacctcctttggccagcattgataacatagagttggccaggttttggagcaaaaactttgacagatggtggggagaatggaagcaacacatattccatcagtcagcctccatgtgcatgatagacttgttcccagatgtcattcctcagacaacagaatcttctcctccccgcaagagcaacagtggcagggatatagagtatgctccaggccatttgccaaacggtggtggattgacccctccagtcattggctatcatgcccccaagacttcaagtctgcttcaagggcagatgagagaaccagccgatgtcggcaggaagagaaagaccaaggcatcggttatagatccatcggctctggctcccaaaaagaagatcaagaagaataagcctaagccagccgatgacttgcctgccttagatccatccatcgggcaagccttggatgaggaagagattgaagaggatgttgatcaagctgcagccgaaaaaaagaagactgctgtgaggaagaaatcggcagcaacaacacttaaaccagctacaccagccttagccgatctgttttcttttgatatcaaggattattttgatgaagaagcagaagaagaatccacaagcaaggctctagcccctttggatgaaaccatcaagagaacacttgaggatatatccctttggctagggtcatcattagacagcttggtggctgattgtggttcaatccgggcacgatttgctgaaatccaagccttcatcctagatgatctggcgaacatcattactccagctgtatacctcgagcaacatcaattcaagctggagaaggctaagtaa

SEQ ID NO: 1835 - DNA, 560 bp, Oryza sativa
  Clone ID: PAT_MRT4530_101663C.1
atgttaattaaggaccggttcacaggaaaccctgaaagacttaccgtgcttaccacaagcgggagcaccagtggcgagggtgggcgtgatggagttgggtcagccggggtgtccagttgtccagctgccggattcaccgcggcgcacgaggggactacccactccgggttaggagtgggggtgaaaccttagcgtggtgtgaatggttaggggagggttatgcgaagggtattttcatgatttccccattagcagtaccatgttcaagtggttggttgggtttgttgcaccatggtgtagcattggacagtgatgattaatattgcttaatttactacaacatttttactgctttcaacttctgcttttaaatgcctgctttatgcaaatgaacctttagcctccctgggatatatcctgcatcataccttctcttccggtatgacttgttgagtacagtgggtagtactcagtcttgctctctcttccccacaccagagctgaagtccttcctagttggagctttctcggagaagttggtttcgtcgctgccgtcaagg

SEQ ID NO: 1836 - DNA, 585 bp, Oryza sativa
  Clone ID: PAT_MRT4530_101664C.1
ctactttcttggcctctctcctgtctctacctctccctttctctctcgatctctccagtctctactctgccactgaagcgcagcagccagcggggcgtgggagtagagcagctggctgggcacgggatccgccgtcgccgcgaaggagttgggggtggcgcggtggagggcaaccacgatgacggacgaccaaatccagcaaagacaggaggtggtggatccggccgtggcggatccagtggtggctgtggcatccgtgatgacgatgatgaccttgacggcgatggcatccatgaccacaacctgcttgctgcgacgatggctggcggcggtgggcgaccttggcccgggtggatccagcaggctttggacggttgtgatcaagttgtggcggatctggctaggccactgcccactgatccactcgagcggatcatatcgtccggagctctagctagcctcattattgccgccgtcgaagtggctgaggcaaagagccaccgccgccggctgccggagcggctcgccggagaggaggaaggcgatcgagcgaggagagactgcagcagcagcgtcgacgactaa

SEQ ID NO: 1837 - DNA, 326 bp, Oryza sativa
  unsure (1)..(326): unsure at all n locations
  Clone ID: PAT_MRT4530_101665C.1
cgtacgcnagttttgacgccttatcgccctcgaaacacagctggttaccatatggcacaaacatgttgctttggaaatggggcccgttcaactgcgaacacaaccccctagcattctgagaatcaatttactcaacatggatattagcagcgggaaaatgatttctttttgtctgcacccaactttgttcgctggcataagccgccattctctgctggtggaactttgtcttcaccttccccaacgcagcagccctcagattttggtactctgccttcgccacgcccatatcaggagatttctgcatgtggggccatggttttcgc

SEQ ID NO: 1838 - DNA, 2616 bp, Oryza sativa
  Clone ID: PAT_MRT4530_101666C.1
atgagcttcggtggcatgttcgatggcgccggctccggcgtcttctcctacgacgccggcggcggcggcggcggcggcggagtacacaactcccgcctcctccctacgccgcccgtccccaagcccggcggcgggttcgccgctcccggcctctctctcggcctgcaaactatggacggtagccagctcggcgacgtgaaccggtcgcttgccatgatgggcaacggcgggagcggcagcggcggcgacggcgactcgctgggacgcggccgggaggaagagaacgacagccgctccggcagcgacaacctggacggcgcctccggcgacgaactcgacccggacaacagcaacccgcgcaagaagaagaagcgttatcaccgccacaccccgcagcaaatccaagaactcgaagccgtgttcaaggagtgtccacatcctgacgagaagcaacggatggagctcagccggcggctcaacctcgagagccgccaggtcaagttctggttccagaatcgccgcacccagatgaagacgcagatcgagcggcatgagaacgcgctgctgcggcaggagaacgacaagctgagggcggagaacatgacgatccgggaggcgatgaggaacccgatgtgcgcgagctgcggcggcgcggcggtgctcggcgaggtgtcgctggaggagcagcacctgcgcatcgagaacgcgcggctcaaggacgagctcgaccgcgtctgcgcgctcgccggcaagttcctcggccggccaatctcgagcatctcctccccgggcccgccgtcgctgcaggcgtgctccggcctcgagctcggcgtcggcagcaacggcgggttcgggctcggcgcgctcggggcctcggcggcgatgcagtccatccccgacctgatgggcggctcctccggcctgacgggggggcccgtgggctccgccgccatgcgcctacccgcgggcattggcggcctcgacggcgccatgcacgccgcggcggccgacggcggcgccatcgaccgcgccgtgctcctggagctcgccctcgcggccatggacgagctcgtcaaggtggcgcagatggacgagccgctctggctccccagcctcgacggcgggttcgagacgctcaactacgacgagtaccaccgcgcgttcgccagggtggtcggccagtgccccgccggctacgtctccgaggcgacgcgcgagtccggcatcgccatcatcagcagcgtcgacctcgtcgacagcctcatggacgcgccacggtggtcggagatgttcccgtgcgtggtggcgagagcgagcaccacggacatcatctccagcggcatgggcggcacgcgcagcgggtcaattcaactgatgcacgcggagctgcaggtgctgtcgccgctggtgccgatacgggaggtggtgttcctgcgtttctgcaagcagcacgccgagggcctctgggcggtggtcgacgtctcggtcgacgccgtcctccgccccgaccagaacggcggcggcgggtcgtcgtcgtcgtcgtacatgggctgccgcctcctccccaccggctgcatcgtgcaggacatgaacaatggctactccaaggtcacgtgggtggttcacgcggagtacgacgagacggcggcgcaccagctctaccggccgctgctccgctccggccaggccctcggcgcccgccgctggctcgcctcgctccagcgacagtgccagtatctcgccatcctctgctccaactccctccccgcccgcgaccacgctgcgataacgccggtggggaggaggagcatgctgaagctggcgcagcggatgacggacaacttctgcgcgggggtgtgcgcgtcggcggcgcagaagtggcggcgcctggacgagtggcgcggcgagggtgggggcggcggcggtggcggcggcggggacggggaggacaaggtgcggatgatggcgcggcacagcgtgggcgcgccgggggagccgccgggcgtcgtgctgagcgccaccacgtcggtgcggctccccggcacgctgccgcagcgcgtgttcgactacctccgcgacgagcagcggcgcggcgactgggacatccttgccaacggcgaggccatgcaggagatggaccacatcgccaagggccagcaccacggcaatgccgtctccctcctccgtccaaatgccacaagcgggaaccagaacaacatgctgatcctccaggagacgtgcaccgactcatcgggctccctcgtcgtctacgctccggtggacgtgcagtcgatgcacgtcgtcatgaacggcggcgactccgcctacgtctccctcctcccctccggcttcgccatcctccccgacggccacaacaatggcgcctcgccgtctccggcagaggtcggcagcggcgcctcgccgaactccgccgccggtggcggtggcggtagcaacaacaccgggtcgctggtgacggtggcgttccagatactcgtcaacaacctgccgacggcgaagctcaccgtggagtccgtcgacaccgtcagcaacctcctctcctgcaccatccagaagatcaagtcggcactgcaggccagcatcatctcaccatag

SEQ ID NO: 1839 - DNA, 339 bp, Oryza sativa
  Clone ID: PAT_MRT4530_101667C.1
ctaccaatcccgttccctgccctgcgctctccccagcgccgtctcggcgacggcggctcggcggcggtccccggcggtagccctggcaccgctatgccggcggtccacgggggcggcgcggcagggcgcggcgaggaggtccacggcagcggcagtgcggcagggcgcggcgaggaggtccacgatggcgtggcagtcacaggatgcggcgcgggggccgtagacgccggcgaggagagacttgcaggtgtcggcgaggaggtcgaggagaggcccgcagctgctgaggttgtcgtggaggaagataccccactcctagcaggtggcgcaactctctga

SEQ ID NO: 1840 - DNA, 774 bp, Oryza sativa
  Clone ID: PAT_MRT4530_101668C.1
ccggccggcagattgccatcttccgcgattcccttctcttgcagtagcatcgactcaaatcagaaaaaccctcgggcaaagaactggaattcgaaataccgctcgaaattcgggagcacgcgcgactcgatcgacatccatggagaagaaggagcttctcggcgtccgcaagagtccgccgctcaccaagaggcggcgcaaggtgacggctggtggcgccggaggcgggagcatggcgaaggccatcgccgcctacctcgcctccgactccttcatgtacgcgccgctggtatccaactcgccgccgccgccgccgccgccttcctcgccgcctgcgagagcaggttcttccgataaaatggtagctttggtgcaaaagtacagaggctcttggcgaggtacatttactgcatgctagaagaatttgcagacaagttggagttcttcctggagttgtagccttttatcacaagtgttagttaatttttgttttctgctgtaatgcatagatgttgtaccttaacagttaactgtctgctagagttcctataccctgtaaaaggctaactgtgttaatgtggggaactcatttaactatcagtaccttgtcttgtgtgctctctaatgcagccacacttttcacatgtcaagtacatttttcttctgtttgaatggcattctgtactagtgtgctatcactttcttaactacgtttcgcagtacactaatacattgcctgatacattataaaaaaaaaaaaaaaaatttgcggcc

SEQ ID NO: 1841 - DNA, 534 bp, Oryza sativa
  Clone ID: PAT_MRT4530_10166C.1
atggggggaaaggagagggaatcggggggaatatttcccccattcaatttcacacgggggcggctaggcactgcggatttggcggcggcggcggcgctaggcgcgggcaggggcgaagggaacggcggaagaagggggttcatgggtgggtcccgcccgtcagcgagggtggcggacgggcccacacatcagcggcgctcgcgcgggaaggaagggggaggccgagtgggccccggggagagaaaagatgggggagggatggtttcactcactctcagtgtttcggtcggaggtccccacggatggctccagctgttgtcgaatggacaactatgtcacgccgaaaggcgtgcagatctacggacagcaaggtttgatggagaggagagggagaagaaagtacgcacaggaaaggagtggagggggaagaggcgccgcgagggggaagaggggaaatccggcccctcctcctctagggttttagatgggagaggagtgattgggttcatgggctttggcccaggtgttgcttaa

SEQ ID NO: 1842 - DNA, 235 bp, Oryza sativa
  Clone ID: PAT_MRT4530_101670C.1
gcgaccaacattacatctattttgacatgcggcattgcatgccaaagtgactgggacaatgacaacttcagattagttcttattgtgactggtgaacattaattacataccttctgtaaagcccacgggagcagaccttattagtatggtgaccatgactaagcactagaatacatatgtgactagctagatacactgcctcattgcatgctttcttcacagattatcgacacac

SEQ ID NO: 1843 - DNA, 468 bp, Oryza sativa
  Clone ID: PAT_MRT4530_101671C.1
atgaatattccaaatattgtaccaccagccaagctgattcttgagccccggtcaaccagatccatcaaccaggaagatgaaatcgactgttggtcgctggcggtgtggaggcagctctgcaagctagaggcggcgacggctgctaccataaagctggagactcgtggcgccggcaacgggatttgcctcctatccctccattctagccagatccaccagcagcggcaccgagctctacgtgcacccatcaccggcgagtcgccggcaatgcgttcgccttcgtcgtcgcagagtcgccggtgggggagctgcggcggcgcccgttcgcacatgcgctccgtcctcgtgcgccgtgttggaggggcacctctagctggcagtggccgcggctgggtggctccagtcggcggtgggcgtggatgggagcgtgaactggtcggcggcgggaatggcggggagtgcctctag

SEQ ID NO: 1844 - DNA, 946 bp, Oryza sativa
  Clone ID: PAT_MRT4530_101672C.1
ccatctcgaactctccagtctccaccacccccgtccccgtctctcgatcgccatggcctccgccctcgccgcctccaccgccgtctgctcctctcccctcgcatccgcctccgcctccgcttcgtccgcgcgccgcctgcgcgcggtcccgccctcccgcggcatccgctaccaggccctccgcgcggactccggtttcgccgggaaccgccggggtggcggccgtggagcgtcggtagtgtgcgcggtccagggccaggacacatccatccaagttccagaagtgacgaagtcaacatggcaatcacttgttatggagagcgagcttcctgtccttgttggatactgggctacatggtgtgggccttgcaaaatgattgatcccgttgttggcaagctctccaaggagtatgaagggaaactgaaatgctacaagctcaatactgacgagaatccagatatagcaagtcagtatgccgtccggagtatcccaaccatgatacgactgaggcaatcactcgacactcctcgcgggtacaggagacagcatcggcaacaacacaagcagctaaggcacatcacttcaaatggtggcgtcggtgtgcctccaacaacgacgtggattgggatgacctgattacacgtccaactttcagaacttcagatcatttcaagagtcgaagccatgctcaatgtttatatgcctacgtgtatagatagtattgggaatcgctttcggtagcatccaataaatgtaattcgaggatgcaggttgaatgatgaaatcatgaaagtcgcaaggaagcctggtttcatgtgtccattcttttggctgtagatatgtatggtattgactgttaagatacatattacccgtttacactatattattgcttatgatatgttccttccaaataggtgcttgaggtaaaaaaaaaaaaaaaaa

SEQ ID NO: 1845 - DNA, 2742 bp, Oryza sativa
  Clone ID: PAT_MRT4530_101673C.1
atggcggagcaccacccgcctcgcctcccgccgtccgccgccggcgccgcggcgacgtcgtggccggagctcctcacgccgttcgacctctcccgcctccgcgccacgctcgcctcccgcccgctcaccccgcgccgcctcggccgcctcctcgcgctcccgctctccccggccacctccctcctcctcctcacctggtacgcctcctcccacccggcactctcctccctcccgctccgccctctcctcgccggcggcgaccccgaccgcgccctctccctcctcgactccctcccgcccggcttcctcccactccgcgagtccctcctcctcccgctgctccgatctttgcctcccggtcgcgccctccacctgctcgaccaattgccccgccgcttcggtgttcagccgtcgttccgctcctacaacgtcgtcctgtcagtgctcgccagggcggactgccacgccgacgcgctcgcgctctaccgccggatggtccacagggaccgcgtcccgcccaccaccttcacgttcggcgtcgccgcgcgggcgctctgccgcctcggccgcgccgacgaggcgctcgcgctgctccgcgggatggcgcggcacgggtgcgtccccgacgccgtgctctaccagacggtgatccacgcgctgtgcgatcagggaggggtcaccgaggccgccacgctgctcaacgagatgctcctcatgggttgcgccgcggacgtgaacacgttcgacgatgtcgtgcgtgggatgtgcggcctcgggcgggtacgcgaggcggcgaggctggttgacaggatgatgacgaaaggctgcatgcccggcgtgatgacgtatggtttcctcctgcagggactgtgcagggtgaggcaggctgatgaggcacgggcaatgctcgggagggtgccggagctgaatgtcgtgttgtttaacacggtgattggcggctgtctcgcagaggggaagctagcagaggctacagagctgtatgagacaatgggtttgaagggctgccaaccagacgcgcacacctacagtatattgatgcatggtctttgcaagcttggaaggatcggttccgctgtgcgattgcttagagaaatggagaagaagggatttgctccgaacgtagtcacctacacgatcgtgctacattccttttgcaagaatggcatgtgggatgacacaagagcattgctggaggagatgtcagcaaagggcttgactttgaattcacaagggtacaatggaatgatatatgcactatgcaaggatggcaggatggacgaggcgatggggctcattcaagagatgagaagtcaagggtgtaaccctgatatttgctcatataatacaataatttatcacttgtgcaacaatgaacagatggaggaagcagaacatatgtttgaaaacttacttgaggagggtgttgttgcaaatggtataacttacaatacaatcattcatgcactgctgcgtgatggaaggtggcaggatgctgtgagacttgcgaaggaaatgatacttcatggttgctcacttgatgttgttagctacaacgggctgataaaagccatgtgcaaagatgggaatgttgatcggagccttgtgcttcttgaagaaatggcagaaaagggtattaagccaaataatgtttcatacaacattctgatcagtgagctttgtaaggagagaagggtacgtgatgctctagagctctcaaagcagatgttgaatcaagggcttgctcctgacattgtcacttacaatacactcataaatggattatgcaaaatgggatggatgcacgccgctctcaatctcctagagaagctacacaatgaaaatgtgcatcctgatattattacatacaatattctcattagttggcactgcaaagtcagattgcttgatgatgctgctatgcttctaaacagggcaatggcagctgtatgtccagtgggtgatcgtagaataatgcagattcttcctgacaagaatttcaagttgtacttacatacaaaaggagatgatttccaacactcactcggctgtgtgaagccatcatgtcctgctgggaaggatcgatgtgaaagaaagactgggcggtgctggcgtgctgctcgccgccggccaggacaggggggcgaacagcttgagaggatcatccgggctctagtgcgccgtactcgacacagcaggggccgtggtgcgggcattgccggccgtgccctcggtctcctccccctagcttcgctggacatggaggacaacaccacgatgatggcgccactgcccaaaggaacaccagagccggcaacaccgactccaacaccctcgcgactcgccgagggcctccgatggtgcccgtcatgtgcgctgcaccagaatgaattctggtggagtcaccgcatcactgcgagtcccatgggtggacacattttcgccgcgccatcaccatcgccggactactcaccagagacgccgctgcacatacctacaccggttattccgctggagttcctcctcattggaaccctcgctgcacgtcgtggagccccgcccttctacatggcagcatggggctccggcgagagctccgcccctccaccgacccctctattccccgacccccgccgcatcatcaagaacgggcatgtcccggccaagacaagcggcagtggcaagcctagtcgtcctccatcctcgagtgagtgggaggtctga

SEQ ID NO: 1846 - DNA, 195 bp, Oryza sativa
  Clone ID: PAT_MRT4530_101674C.1
atggcggcgtcggcggcggagggttccatccggatacgagaggccgagtcgcgacctttgtctgggcttggctcgtttaaagcccggcccgctaacagttacgtgggctatggtccagtaatattggcagcactttttaaaaagattgaaactttttcgatctacttggtgaaacattttcggtctacttggtga

SEQ ID NO: 1847 - DNA, 1514 bp, Oryza sativa
  Clone ID: PAT_MRT4530_101675C.1
ctaccttccgcggttcacagttcacactgcctctgcctcctcttcttcgcctacaaaaggattttggaccgcacacggttcgcgtgcgtgcgtgcgtgcttgcttgctgcaagaaatgagctgcttgggttggttcaagaagcggaggtcgtccaagagcaaggaatcgtcggggaggcggggctcgacgacgacgacggtgtcggcggtgagcacgagcaggtcggacgactccggggcggtgaggccggcgagcaagtcgacggggtcgacgtcgtcgcaccggagcatctcgtcgctgtacgaggagcgcggccacggccagctccgggacttcgactacgacgagctccaggccgccaccaacggcttcagccgcgcccagaagctcggcgagggcggcttcggcagcgtctacaagggcttcgtccgctcctcccccgccgacggcaaggccgccgatcgcctcgccgtcgccgtcaagtgcctgaaccagcggggtctccagggacataagcagtggttggcggaagtacagttccttggggttcttgagcacccaaaccttgtaaagcttcttggatattgtgccgttgatggtgaaagggggccacaaagattattggtgtatgagtatatgcctaataagagcctggaagatcacttattcgtccgagcttatcctcctctctcatggaatagaaggcttcaaataatcttgggtgctgcagaaggattagcttacctgcatgaagggcaagttcaggtaatctaccgggacttcaaagcatctaacattttgttggacaaagacttcagagcaaagctgtcggacttcgggctagcaagggagggaccaacaggagcaaacactcacgtctcaacagcggtggttgggacgcacgggtacgcggcgccggactacatagagacggggcacctgacggtgaagagcgacgtgtggagcttcggggtggtgctgtacgagatcctgacggggcggcggacgctggaccgccaccggccgcagggggagcagaagctgctggagtgggtcgcccagttcgcccccgacagccgcaacttccgcatgatcatggatcccaggctccgcggcgagtactccgtcaaggccgcccgcgacatcgccaagctcgccgagtcctgcctcctcaagaacgccaaggagcgccccaccatgtccgaggtcgtcgacgtcctccgccgcgccgtccagtcgcagcccgaccctcctcctccccccgccgccgccgccgccgcctccggcaaggggaagagggtcgacgtcgcgccgcagccggcgaggaggaggtgaggttgcactctgctgctatcatcgatcacggcatgaatgaagaaagaaaagtacagaaagagagacacagagacgagttggtggattcttggcgtttttgttttttgttttcctttctattttttaggcttatttaggatgaggatagtagtatgagaatacatttgatttgattggt

SEQ ID NO: 1848 - DNA, 175 bp, Oryza sativa
  unsure (1)..(175): unsure at all n locations
  Clone ID: PAT_MRT4530_101676C.1
ttccttcaccagattattcagtcgttcatatttcatttttggacgttctcagcagatacctcgantccagtcacgaataggagcccatcatcgccataaagcaagcgtcgatggtactctgtgcgctggacagaaggaaagccaacaaagactggcgtaaataaccgtgacagga

SEQ ID NO: 1849 - DNA, 301 bp, Oryza sativa
  Clone ID: PAT_MRT4530_101677C.1
cggcgtcgtcctcaaggctgagctgcggcagcgtcctcgaagaagcggcggagcgacctggccaaggcggtggagctcggcatcaacgggctcgactcgcgtggcagcggagctcggcgtcgacctgtccaaggcgacggccgggagaaggaggaggtgggggagtagatctggccggcggctcgttctcggcgttctctccttggcggccgcggagcccgctctctcctcggcgcgctcgtcctcggcgttcttggcggcggctcaagaacgggcggcgcggttgtcctcggcgttctag

SEQ ID NO: 1850 - DNA, 153 bp, Oryza sativa
  Clone ID: PAT_MRT4530_101678C.1
atgtcggtgggaattgtgcttgaagggtcaactgtgaggaaaagagagagggggattatacaggttcgggccgctatggagcgtaaaggggataccacatgcagcgtccctgccctccctgttcgggagaaggacccacatggcctacattaa

SEQ ID NO: 1851 - DNA, 285 bp, Oryza sativa
  Clone ID: PAT_MRT4530_101679C.1
atggttcatagcagatacatgtacctgaatgggatgatgaagactatgtggcatggaacttcacaaagtctggagttttttcggttatcgggtcaggagaatcatataattgcaggcttatttgttaccctttataatctgtggtctgttcgtaatattgatagtcgttatgcagtggcaccagagaatccaactaatgttgcaaaaagaattgcctatcagctggaggaatgggccaatttacatgaacggaagacaaatgctgttagggatctaagagcctga

SEQ ID NO: 1852 - DNA, 168 bp, Oryza sativa
  Clone ID: PAT_MRT4530_10167C.1
ggatcataggtgagttagagatataactatcgctcgcgtcggactacatgctacgaaaatcttcttcttcttcgtggggtttacgatggctccccgcgtggcggtgctgctgatggccgtggcctcatcgctcctcgtgatggcgttggccgcaagaattcaacgcgc

SEQ ID NO: 1853 - DNA, 1269 bp, Oryza sativa
  Clone ID: PAT_MRT4530_101680C.1
gataatgtgacgtgtacatatctgctcatgaacatgatagcttgccgcaaacataattgttcatggagcgcatgcttgagaacgaccccattcttcaattatttcaacaacacgccaataattattcgcacaatcttgaaaaatggtatactacaaccacacgatcatcctgactgatcagctagagagctagaaggagaacttgaaggccatgtcgtgcctgtacacctggccgggcctgaccgtcatggaggggaactccgggtggttcacggcgtccacgtacccctgcgtctccaggcagaacccgccgtactgctggtacaccttgccgcccttgcccttgatgttgttcagccagttgccggtgtacagctgcatggccggctggttcgcccacagctccagcgcgcggcccgacgcgccgtcccgcgccgcggccaccttccgcatgccctcgccgtcgatcacgtagttgatgtcgtacccggcgatgcgcccgcccatcacctgccggatgcgcgcgccgatcggggtggggtgccggaagtcgtagggcgtgccggcgacgggcgcgacgacgcccgacgacgggaggagctcctcgtccagcggggtgtaccgcgacgccgacagctgcagcgtgtgccccagcacgtcgccgcggccctgcccgccgaggttccagtacgtgtgctgcaggaagttcaccggcgtcgccttgttcagcgccgtcgcgttcatgcgcagcgccagcacgtacgggctcgacagctggtacgtcacgtacgcgtccaggtccccggggaaaccttgctctccgtcgaagctgcggtagtacaaggtgatgtacggcgagtcgccgccgccgacgtactccttcaccgtccatatgactttgctgaaccctctgtgtccaccgtgaagtgtgtttttgccatcatttggatacagatgataagcttttccatcgagcacgaaccgcgccttggcaattctgttggctacccgtccgacgagcgctccaaagtaagtagaagaattaacatattcagcaatggtgtcatatccaagaacaacatcgtccaatttccctctggagtcaggaagcacgacggacatgatgaccgctccccaattggtgaccctgatggagaaatctcccttcctgagctcatagacgccgaccgtcgtcgccttcctctccgccgcatcggcaccgccggcggaggcggcggccactaggcacaccgccgcgagaagaagcag

SEQ ID NO: 1854 - DNA, 333 bp, Oryza sativa
  Clone ID: PAT_MRT4530_101681C.1
acgaaataccgttgtagcactttatctttggtgaccgcaaaaggatagcaaacttagggaacgtgtgtaatctacctcaggctaagacgattgaagaagtaatttcctatttcgtggtttcggtgatagctctatgatgtatctgaacgtggaggattactgggacgggatttaggactgtcaccacctgccgtctacctctgataaatccgtgggatatacaacaaacaaagcaaaaccctggctagtttcgttggccccgtttttcctcatggacactgattttgaggccttagtccattggcatggtggttgggcccatttggaggtatt

SEQ ID NO: 1855 - DNA, 1060 bp, Oryza sativa
  Clone ID: PAT_MRT4530_101682C.1
atggagcattacgaccggactcaaatgatggtatcagcgccggcgaaggcaatgggccaaactagcctctcttcaggcgacggagaggcagcggcacgcggcggcagtgcggccggacaacggtgcctatgcggaggagctcggccgagcgacggctcggcgcgagcgtggccgtgtggcggcgccggccccggcacgggtcgcggcctcggcggtgcggacgggcagcggtgccgatgcggaggagctcggccgagggacggcggcaccatttctggcttccctgcctcctccctccccgcccacctcgccggccgccgcgcgccgcccgtctcccgtctccgccgcgcgctgctttgctgctggtgagaagtgtcgttgcagccgcaggcgcaggggcaaggggcacaaggtagtgagcctcgcgcagctgcacaagcggccggcggtgacggtgctcagtctcgagttagacgatggcgggtcggagcacgatcatgtgaggacggagaggctccatcgcgtgctcggcaaggcgaggcggcggcaataccagtcgctgctcggcgcggcggaggcgcgcaggatgagggataaggaggcagaggcctcgaatgcggcgcgacacatcggcgagctagaggagcgtgtcgcgcggctgagggcggaggcggcggcgcggcaggcgaaggcgcttgccgaccagttcaccgcgcgccgctccgcccaccacacgccgccactccgcttcgccccgccgcccgccatcgctccgcccaccgcccccctctgcgccgccgctcgccgttctcccaagtcgcagtcgcagccgcagcaggccatcgaccaccactacgccggtggcccaagtgatagaaaaagaaacagtgagagagatgaccaggtcgctcgcgctgcccgcaactctttcctacctgcggccgtccaacatctcttccctctcacagcctcacacaactggcgcgccccttgatcatttcttcgccccccttctttttcttcccccttggctgatgatggcaacaactagaggcggcgg

SEQ ID NO: 1856 - DNA, 523 bp, Oryza sativa
  Clone ID: PAT_MRT4530_101683C.1
tttatgttctcacttctcacacaactcgcaaccctaataaagcgcaaaaaaggaaaaagaaaaatcgccacggaaaaatcctcgctgccccccatcgggcaggagcaaccgccgcatcggcccccgatccggtcgccgccgcctctcgcccggttcatccgccgcttgccaacccctccgctcccagcaaccctagtcccccaccccaacgccgccgccagctcagctcgcctcgcgcggggcgcagccgactctctacttgtggcctcggcggctcgggccctctccggattccacgatgtctgaagatgcgtctgtcggggccagcagttcaacagtaaaagctggcgatgatccagaggctaccattgagatcaacatcaaaaccctggattcacaagttcataagctccgtgttaagaagaatgtacctgttctggtccttaaagagaagatagtagaggcaaccggggttcctgtggaccaacagcggttgatttttagaggaagagtcttaaaggac

SEQ ID NO: 1857 - DNA, 307 bp, Oryza sativa
  Clone ID: PAT_MRT4530_101684C.1
aactatacgggtagttagagatgtacttaggatagaattacattgtgtatcgtaggcttccttatatctaccgggtcccctaagactcaatacaagtggtgtccatttacagtatatctctccctctaccatttgatagaaacgaggcaacaaattaaccaagtggtcagtaaagcatgtaatatcacgtaaccggaatcgaataggtatgccacgacacatgcaagtgcagcacctctgtggtccaaatatgctgaattctcatcgtcaccattctcgtcaatggtgatccttagctagctgaaat

SEQ ID NO: 1858 - DNA, 1575 bp, Oryza sativa
  Clone ID: PAT_MRT4530_101685C.1
atggagaagagcagcgagctatggttgctatgggcggttttctccgcctctctcgtcttcctctacctcaccatccgacgacgctccggtgccggcgccggcggcaaaccacccttgccgccggggccaacgcctctcccgctcatcggcaacctgctcgacctccgcggcggcgtcatccacgacaagctcgccgccctcgcgcgcgtctacgggccggtcatgatgatcaagctgggcctcaacgacgccgtgatcatctcctccagggacgccgcgagggaggcgttcacgcggtacgaccgccacctcgcggcgcgcgccatcccggacacgttccgcgccaacggcttccacgagcggtccgcggtgttcctcccgagctccgacgagcggtggaaggcgctgcgcggcatccagggcacgcacatcttcaccccgcgcggcctcgccgcggtgcgccccgtccgcgagcggaaggtgcgcgacatcatcgcctacttccgcgaccacgccggcgaggagctcgtcatccgccaggccatccacaccggcgtgctcaacctcgtgtccagctccttcttctccatggacatcgccggcatgggctccgagaccgcgcgcgagctccgggagcacgtcgacgagatcatgacggtgttcgcgcagcccaacgtctccgactacttcccgttcctccgccgcctcgacctccagggcctgcgccgctcgaccaagcggcgcttcgatcggatcttctccatcctggacgacatcgtcgagcgccgcctggtggatcgcggcgaacgaggaggagaaggcggagccagctcgaacagcagcaagagcaagcaccagtacgacggcggcgacttcctcgacgcgctcctcgagctcatggtcaccggcaagatggagcgggacgacgtgacggcgatgctgttcgaggcgttcgtggccggcggcgacacggtggccttcaccctggagtgggtgatggccgacctgctccgcaacccgcccgtgatggccaagctccgcgcggagctcgacgacgtcctcggcggcaaggaccaatccgccatcgaggagcacgacgcggggaggctcccctacctgcaggcggtgctcaaggagtcgatgcggctgcactcggtggggcccctgctgcaccacttcgcggcggaggacggcgtggtggtgggcgggtacgcggtgccccggggcgccaccgtgctgttcaacacgcgcgccatcatgcgcgacccggcggcgtgggagaggcccgaggagttcgcgccggagaggttcctggcgagggaggggaaggcgccggtggacttccgcgggaaggaggccgacttcatcccgttcgggtccgggcggaggctgtgccccgggattccgctggcggagcgcgtcatgccctacatactggcgctgatgctgcgcgagttcgagtggcggctccccgacggcgtgtcgccggaggagctggacgtcagcgagaagttcatgtccgtcaacgtgctcgccgtccctctcaaggccgtgcctgtcaaggtgatcaactga

SEQ ID NO: 1859 - DNA, 179 bp, Oryza sativa
  Clone ID: PAT_MRT4530_101686C.1
aagtagcatagcgacactgagaattgtagattactgaaccggtccacataagtacggggggatacagacgtggagatacgccgcatgccaaagcgttgaccaagtgatcctctgcgttagtttactcggagagtcagtatcccactatcagccgtgccagtgattaacaattttttgtt

SEQ ID NO: 1860 - DNA, 198 bp, Oryza sativa
  Clone ID: PAT_MRT4530_101687C.1
gcggaacgaggactaccggtcggccgggtgcccggccttaacaagaaccttcttgagggacctaaacaaatcttcaagaacaacaacgggaccccctttctttttcccaacaacgggaccggggccttggaaaacccccctaccaacacccttgcccccggggaccagaaccggtcggtcctggtccggccagtcaac

SEQ ID NO: 1861 - DNA, 2086 bp, Oryza sativa
  Clone ID: PAT_MRT4530_101688C.1
ccccttgtcatgcaccagatttttttccctgacagggggttcctctttcaaaagcagaataactgaatgatgcctacattgacatactgccagaatcctctctgatggtactaaccctgtccaacaggaccaacccatactcccatttttacagaataaccctttctgcatctctatcaggtgtaccacatttacactaacaacatgagcctaaaacgaacgcccaacatcaattttggcaattggcatgaccctatggggacgaacggcccacataggcggagcaacattctaaagacgaagtataattatggtacactaaagacaattctatcaatcagatatatgtcatctcctcttctggcagtttattaatctctcctgtgcatgccacttccaaacaatcacctcggatgggtgagtagtaagagaattcaatagtaggtgcgaactcattcgcgcgccttttcttgagattcttaactgcagcattttgctaatctgaaccaatgccaaaaggaaaagaacatctccacctttcttcagttaccggtcatgtcttttcttgagcttcttaactgcagcattttgctaatcaaattttggtgaggatgcaagctacgatagatatacaaaacgcaaaaattaccggaatcgccgaagtttttcttgacttgaaacctatcattaaagatgatcggtggaagcaataggttgagaagatgtcctcagtgaacagaagcgtgtgaattcttccctcaactgacaagcagaatcacacctccagtgatcagccccaacgctaggaagatgttgattgtgacaacaaactcatggtctgactcacggcaattgagaacaacagctcccaaatccagcaccatttcgatcaacatctgagtagatcctccgcacagcttccacgattccagcagcctcatgttcttcttccctgcagaggcgatggacaagacaaaatacatggggataaacgaagacgacgacctccgcctcccttccttatccgtcccgtctcctcgcgctgctagcagagcagaggtagcggcggcgttctcctgctcccgccgcattcgctcaccgacaccggtgagggtgaatccatcccatccggcctccagtttcgtctcctcgatcgccccgccgcttgcttgcgccgatccccatcctgcgcccggcgtcctcctgcttcccaccgcatcgtcgctcgccgctccccatcccaccactaatggtctctctccggctcatcgccgcattcgcgcccgctccgccaccgccaccgccaccgcggccccgacgagcgccgccgtccgcggcgcgcctggcgagcaacggcatagcctttgtcactgtggcagccgtagccgctgcctcgccgccagcgatcgccgcgctggccgccgagccggccaacgcgctctcgctgcccacttgggccgtccacgtctccagcgtcgccgagtgggtgacggctatggcgctggtttgggactacggtgagaggacggggctcaagggttggaaaggcctctcttggggaatggttccacttcttggtggagcgatgtgcgcttgcacgtggcatttcttctataattcggagtctcttgaagtgcttgtagcgctccaaggtgctctaacagtgattggtaacattacaatgtgcatagctgcatttcgcatcttcaaagcatcccaggaaagctcaaaaagttcatagagggacctgtagcatgcatacactaatgtactagtaacttattgtggtaaaatataccatacttctgaaaacggattacttagagttgcaacatctatctattaggtggaagcttcttgagaatggcaggtacacctgacatgaaatggcaaacggtagatgctatgaaggcagaagataaaagctgctgacggcttgcagctacttcagaaagatgattttttatcagaccgaaagagccattttttttgtatgtatcaattctacaaatgccagctaaaaccaccctgaaatttgtgtattgactcagatttttttctagacaatgagtgtatttactcagat

SEQ ID NO: 1862 - DNA, 448 bp, Oryza sativa
  Clone ID: PAT_MRT4530_101689C.1
attaaatatttattgtgttttattttcgtgttaaagccggcggcaccaattcttcaacgcaaaaactgccttacttggtgcacaaccagcagctaatctcttgcaaagaacaagagaacgaggctggttcataagcttttttttacatcacaacgttccacgctttactaaaaaccctgctcgtaaccttaccgttcggcaaggacagcttacagttacaggaagaacagccggtcctacatcatgatcatgattattaccttgggttccactttgatcgaactaactaactggaaaaactaaacaggggggacgaaaaaacagggtacagatctgtatagtctctcccggcggacatcatgcctgtataagcaagcaaatcactctttcccatggctgcccactttccttgccttttcctttttttgctgatattggggggctaggt

SEQ ID NO: 1863 - DNA, 2526 bp, Oryza sativa
  Clone ID: PAT_MRT4530_10168C.1
gaggacgaggcggagatggcgagcacgaggctgagcctcgagctggggaaggtcggaatccagtcgtcgccgccatgctccagcagctcaagcgccggccaccccgcgatgcagcccgccgccgcggccacggcggcgccgggctacggccccaggccacgccacatgctcaccgaggccgagaaggaggcgaagcgtctccggcgagtgctcgccaaccgggaatccgcccggcaaaccatcctccgccgccaggcgatccgagatgaattggcaagaaaagttgcagatttgtcgtcgcagaacgagaccatgaaaaaggagaaggacgtggtggcgatcaggacgatcaagaaggcggccgtggcggagccgatggacacggcgccgccggcgcagcagcaagcggagacggcggcggccgtggcgccgccgacgacggccaccccgccgtcgacggcgccgcagccgagcttcctgtacaccgcggcgccggcgggcgtggcgccggtgccgtacgtgtggggctcgtggccgccgtgcgggccgacggggtacgagccgccgccgccgctctgcctcccgccctgcgcgtggtactaccccgtcgtcgccgatccgcgcgtgtcctcgccgccgacgtcgacgtacccgcagtcgtaccaagaacagccgacgagcagccctggcggcgggacggccgaggaggacaccgacgacgacccgtgctcgctgacactcgccatcgacgtcgacaagaggagcgcgcctggcgccggcggcagcgcggccggagctggacagcacgcctccataagcgacagggagaaggcgacggcggcggcggaggcgaggaagcggaggaaggagctgaccaagctgaagcagatgcacggcggcggcggcggctcccgtcccggcggcggaggcgagcactgcgcctgcccaagcctccgcgccgcgggatgccgccgcgctctgtgctcccttctccggcctcggtttgctcagatccaccgcgtcgcgccgtcgatccgacgccgatgcggccgccggcgccggcgacgacggcaggcgcgggggggaaggtgacgccgaacctggcgatggacgcggaggggacgcggctgctcaacctcaccgtgctgcagcgcctcgaccccgccgtcgaggacatcctcatcaccgccgcccacgtcacgctctacgacttcaacatcgagctcaaccagtggagccggaaggacgtcgagggatcgctgttcgtggtgaagaggaacaagcagccgaggttccagttcatcgtcatgaacaggcgtaacaccgataatctcgtggaggatctattgagtgactttgaatttgaacttcagcctccgtatttgttataccgaaatgctgcacaagaagtaaacggtatttggttttataaccaacaagactgtgatgctgttgcaggtgtttttggaaggatattgaatgcttacgccaaagtgcctccaaaagcccaaagtacctttccacaaaaagtgagtttgaggaattggaagctgttcctacatccgctgctatagatggcccccttgaaccttcttcgtcgtccactgttctagtttctaatgcccctgatgaatcattgactgattatttcagtggcgctgttaatgttgggaatgtatcaattacaccaatggttggaagaactcatcagcctatcgagtctgttgcatcctcacacgtaccattgatcatcccatctgctgctcctacacatcaaatgggtgttccttcaggggctgcgtcagctccaccactgcccgtcattgacactaacgttcattctagccactcaacaaatcttgtaactccagccttttttgcacctccctcatcgtcttctgcatcattggtggcaccagcttcatcctttatgcccacagcatcaccttttcatccaacttctgccgatgctcaccgtccagcatatggacatggtacaccccttcttcaaccccttccgccgccaacaccacctgcatcacttacccctgtacacaacgatgagcctgttatttcgagggataaagttaaagatgctctcctgaggcttgttcagctttggcttctttttatatcggatgtccgcgaagagattgtgcagctttgtcttgatgcattattgatgtaggagttacagaatgcacatgcgtagactgcttactcagcctttatggagtgtctggccttgacgagagttcacctgttctttcgtagttttgtgtgctttagttctcaaaactttatgtacagctttggcttctttttatatcggatgtccgcgaagagattgtgcagctttgtcttgatgcattattgatgtagagtttttatagcaatggctggtagtatttcttccaaatggttgtacttgtatagtatttttgtttcctgttggaaactcgaaatcggaagctggactatgtgtggcaacgttaaaatactgtccattttgtgtgataaacaaaa

SEQ ID NO: 1864 - DNA, 2124 bp, Oryza sativa
  Clone ID: PAT_MRT4530_101690C.1
atggccaattacctacccgtggccttagcggactctgcccgatcctggcttcacgtgttaccccgtggtacgattggatcttgggcggagcttcacgaacacttaatcgccaacttccagggcacttttgaatggcctggtactcagtttgacctctacaacatcatccagaagcccggagaatcccttcaagactacatccgacgcttttctaaacagcgcaacaagatctccgacattaccgatgacgtcatcatcgccgctttcactgagggtgttcgtcatgaactcttagtcggcaagtttggacgtaagcctcccaggacagttaagcagatgatcgaaaaagccaagaaatacgccaaagcagaggacgcagtcactgcgtccaagcaatcgggcggtacttggaagcccaagaaagatgcaccggcaacaggcgggagtggaagcaccaaccataaggatcgcaagcgtaagcccgaggaccttgtggcgaccacgacgccatcttctcaactactatcgcggatcaataccttcgacaagatcatgaacatcatcctgaccgagtgcggcctcaacattcttttcgccaagactctggacgacacgcagatccctcggactgaactgaagccaagtagtgcgccctttcacggagtcatcctcaggctatcttctccactcggccagatcactctaccggtcaccttcggcactcgggagaactttcgcacagagaatatttgcttcgaagttgccgattttgagacagcatatcacgccatactcggacgcccagcgttagccaagttcatggtagtcccacactacacctacatgatgatgaagatgccaggacctcgaggagtcatatctttgcggagcgacatcaagcaagctgttacctgtgacaaggaaagctgcgagatggcccagacacgtgagatcacacttgctcgggaggagatccgactggctgcatcagcggcaaccgaaggagaagtgcctgcacccaagatatcaaagagcggagaaagcgacgccaaaaccaagaaaattccccttgatccctctgatcctaccaagactgctatcggtcgcaatgttgaagcctatgttgacgacgtcgttgtcaagaccaagcagaaggatgatttgattgcagatctagaagagacctttgccagcatccgtgcattcaggatgaagttgaatcctaaaaaatgcaccttcggagtaccgtcaaggaagctgcttggctttatggtgtcccgtaggggtatacaagccaacccgaagaaaatcaacgtcatcctcaacatgaaaccgccaagttcccagaaagatgtccagaagctgactgggtgcatggcggcgctcagctggtttgtttcacgactcggtgagcggggaatggcctttttcaagctgctgaagaaaaccgacaatttccattgggggcccgaagcccaaaaagcctttgaagacttcaagaagcttctcacaactccaccggtcctagcctcaccacatccgcaagagccgctgttgttatatgtgtcggcaacatctcaagttgtgagcacggtcctggttgtcgagcgggaggaagatggccatgttcaaaaagtccagcgaccaatttacttcgttagcgaggttttggccgactccaagacaagatatccccaggccttggcggatttcgttgccgagtggaccgagtgccaagaggacacgcctgcggagaagatggagcactggaccatgcactttgacgggtcaaagaggctttcaggcactggagcaggggttgtcctgatttccccgactggagaaagggccaccggtggtttcactcatctttttgtagctgtggataagttttccaagtggattgaagccaaaccagtcatcacgatcactgctgataaggctcgagatttcttcatcaatattgtgcaccggtttggggtacccaatcgtattatcactgatgaaggaccgtttataatctctgaggttactcggccaggatcttatcgactcaagcgtgaagatggtacagacatcgacaactcttggaatattgagcatcttcatcgtttttatgcttag

SEQ ID NO: 1865 - DNA, 532 bp, Oryza sativa
  Clone ID: PAT_MRT4530_101691C.1
gtgacactatagaatactcaagcttgcatgcctgcaggtcgactctagaggatcccctagtgttgattttactggagattgtaggatgtccttcggactatgcaacactcttgcatcttttcaaaggtgtatgatgtctattttctcggacatgatcgaggacattatggaggtcttcatggatgacttctctgtctatggaaagaccttcggtcattgtctgcagaatttagacaaagtcttacaacgatgccaagagaaggacctgcttcctcctcctgtgaacatcaaggggatccgcagtttcttgggacatgccggcttttatagaaagttagtggaaatggaagatagaatgccgattccttatccagactcgtatgaaaatgttgcaaaagcacatactcaggaaaggaaaagactttatgcagatgttggcgatatagaatcagcatttaataaccgccaacatggacgtccaggattgctccataatgacagttggagggcgtttaggacatttcccatacaa

SEQ ID NO: 1866 - DNA, 1187 bp, Oryza sativa
  Clone ID: PAT_MRT4530_101692C.1
aaatttggtcttttaaaagggttttcttttttttttttttttttttttttttcacatgcaacctgaattactttttctttctttccttgaagcaatcaatcaaacatgccatcacattgcacagcatcttttttttttttttttttttctgaagctacaaccttgtttattccctggaacgagcacaaatctacaagcttgacactttgacagattgggaaaacatgagagctgctgcgaattcaattggtcaattgaaggaaacaacattggacaagatacaagtacacttatttacatgagagattcaaagagccttttttttcccagatattttttcatgttttgtttgcttgcaatttctgcaaaccaaacattgtatatgatgagcttttggaaactggttccagacttgactaaggatctgggttgccgagtatagcatcatccccggagtcatcttcatcttcactaagttcttcatcactcgacttatcttcgggggttacgccagcatcctcgggctttgcatatttttcgcaatattctttcactttttgttcataagcaggacgatcacgcatcatcagtgcagcagcctctccatttaatgggtcagaaggatttgggtacaatagaagttgtggaaggaagacttcgaacacattaactagatcaaacattgggctccacgtctggttaatgacatccaaacacacagaaccagacatttcatccacattaggatgataaatcttgttaacgaaaccaatcgacggagatttgtaaggatatgcatcaggcaattctactctaaccttccagacaccaccttgataaatactttcagtaggcccccggaattccacgaagaactcctgcatcccatcgttcaccatctccaccttgtagtcgctcatcatcagcttcatcaagtccatctcgcggcgcttgctcggggaagacatcttgacacaagaagaaaaaagaaaaagattggatttctttttctcctcctcctcctcctctccccacctcttgagagacgcggttcttggggataaggggaagaaagaaagaaagaaagaagaagaaaaagggagaaagagattgcggtgcttgtgacggtggtggtggtgtggtgcgtgcgccctcctctcctctcctcctccttcccttccccgcgt

SEQ ID NO: 1867 - DNA, 399 bp, Oryza sativa
  Clone ID: PAT_MRT4530_101693C.1
aactggtcgatcgcccataactgcgggcacggctattcgaatagttttactctggccagaggtgcacaacagtacccataagacacaagccaccggcatgttacagtacccggccggacacgtcaccatgttgagtgattgtgacaagacccttcgtataactccccctaaccaaagcactacacctcgggtttcgcccccacccctaaaccgatagtagggagcctcccctcgtgcctaggtaaatccgatagcctaatagaccgtcgtagggctcctccgaactccatcacgctcacccttgcctgggaacatcagaaaggggaaagctatattacaagtccagcaattgcccatacttgcttgtggtaagcacattaagtcttccagggatttccc

SEQ ID NO: 1868 - DNA, 588 bp, Oryza sativa
  Clone ID: PAT_MRT4530_101694C.1
atgtcttccccgagcaagcgccgcgagatggacttgatgaagctgatgatgagcgactacaaggtggagatggtgaacgatgggatgcaggagttcttcgtggaattccgggggcctactgaaagtatttatcaaggtggtgtctggaaggttagagtagaattgcctgatgcatatccttacaaatctccgtcgattggtttcgttaacaagatttatcatcctaatgtggatgaaatgtctggttctgtgtgtttggatgtcattaaccagacgtggagcccaatgtttggtgagataactctcgtccttgtcattattagtacggatctagttaatgtgttcgaagtcttccttccacaacttctattgtacccaaatccttctgacccattaaatggagaggctgctgcactgatgatgcgtgatcgtcctgcttatgaacaaaaagtgaaagaatattgcgaaaaatatgcaaagcccgaggatgctggcgtaacccccgaagataagtcgagtgatgaagaacttagtgaagatgaagatgactccggggatgatgctatactcggcaacccagatccttag

SEQ ID NO: 1869 - DNA, 208 bp, Oryza sativa
  Clone ID: PAT_MRT4530_101695C.1
gttcgagcagttcgtcaccgagaggctcgtgacgaaggtgctcgagatcggagagcgcttatggccggagggcgccggagtacgaaataccaaggatgaggagaaggaggtcgtccccgcgaaggcggtggcggaggccgtgacgaagttcatggagccaggaggggcagggaggcggcgagatgcgccatcaaggagctcgccgtga

SEQ ID NO: 1870 - DNA, 363 bp, Oryza sativa
  unsure (1)..(363): unsure at all n locations
  Clone ID: PAT_MRT4530_101696C.1
gggcccgacgtccttaagccgtgctctttaagagaccgactaggatggaagacaattaaaargcactgtgtngacgcaccgtcccgtgatcgatcaatacagggtaatggaaggaaaggagagagtaccttaccaaccagcagcaggccaagacgtcggccaagtcgcaacgttaggctgaccacgggttcgagcgccgaagaaggctgttgtctcgcgctcgcgacacgacgatgtacgtatatgcgtgttcttcagaccactacggcgggaagataccyccgtagatcgaaagtcgggtcacacacccctctaaagaaatagttgatgcttggcttcgttgatgtccgttctcgtgctata

SEQ ID NO: 1871 - DNA, 3147 bp, Oryza sativa
  Clone ID: PAT_MRT4530_101697C.1
atggggagcttgctcccgaagctaggtgagctgctcaaggacgagtatgacctgcagacaggcatgaaggagaaggtcaagtctctctcacgggaactcgagagcgtgcacgccgtcctccgcaaagtcggtgaggtaacaccagagcagcttgatgagctggtgaagctctgggcacgcgatgtccgggagctgtcctatgacatggaggacatcgtcgacaccttcttggtgcgtatcgacagctccgagaccgatgaccggtctgtgcttaggcacctccggaagaagatgagcagactgttcaagaggaccaaggatcgtcgcaagatcgctggcgcgatcaaagaaattgacaagaaactccaggaggtggaagcccggcgtgctagatacacagttgatagcatcatcaccaagcctgcaggaccagcgagcattgatcctcgcctacaggctctgtacaaaagatcaacagagcttgttggtattgatgggccagtggacaaggttataaagatgctgtcccttggggatgataggaacatgaagatcgtctccgttgtgggattcggaggattgggcaagaccactctcgccaaagcagtctatgacaagcttaaaccggacttcgattgtggggtttttgttccagtcggtcgagtacctgacatacagaaagtcttaagggacattctcattgattttggcttcaaagtttctgatgtgatgatattggacgaaaggcaacttatcgacaagctccagaattttgttcagaaaatgagatgtttcattgttattgatgacatatgggataagaaatcatgggagttaatcagatgcgctctgcaagactgtaagtgtggaagtagagtagtcgcaaccactcgcatttctgaagttgccacacatgttggtgatgtttacaaaatgcagccactttctcgtgatgactgtgaaaaattattgtatgccaggatagttgacagtgaaggcaaatgtcttgatagcccatcagttgaggcatgtgacaaaattttgaaaaaatgtcgtggtgtgccattagctatcattacaattgctagtttgttggccagtaaaccaatggaggactggcctgtggtgtacaactctattggttttgggcatgaaggcaatgatgatgtagcaaatactagaaggatattgtcttttagctactatgatctgccttcacatctgaaaccttgcatattgtatataagcatatttccagaagattatgagatcaacaaaaaccttttgatatggaagtggatagctgaaggttttgtccatgtggaacatgtagggattggattatttgaggtcggggaggggtacttcaatgaattgataaacagaaacatgatccagctggtgaaggcagaaaacgaagggtacataagtagttgccgtgttcatgatatggtgctcgatatggtccgttcattgtcgagtgaagaaaactttgttactttatgggacagcagtgaaaaacaaaaacttccgaggaggaatgctcgcaggttagcgctgcagagtaggagtattaaagagcagaatggtaatcagctagctagtacaagcatggagcaagtgaggtcctttattgccaatgattgcgacgatattagcatgttattcccaaggtttcgagttttacgtgtattaattctagaagattgtgatgatgtggaagatgtggaaggttgtggtggaaatagtgtggatcatcttggcagtttacttcacttgaggtaccttgggttaccagatactgacattagcaagctcccaaaggaagtaggaggtctcaagtttctccagactttggatttatggaatactggcataaaggagctgccacaggcagtgggcctgttgacacaactgttgtgcttacacactgatcggagtacgacagtgccagccggtttgatcggcaagctgacgtctttgcaagagctgtggacatggcctggttccgcatactaccgcgacatggacccagtggctggtgccgcttcgacacgccgttttgcgaaggagctgggtaacctgagggaactgagggtgctccgtgctagtatttatgcagttgatgagagcacggagagagatttgatggagtccctgcttggcaatcttcagaaaattcagagtgtggatatttttggatcaccactagagaggggagtcacatgggatgcaggatttgcctctcgttggcgcctccggcacctgaatttggaatgcttcgagctctctagactgccagcgtcggttaactcctcgcttcttccgaacctctcccatctagacatgaaagtgcaggttatgcaagagcaggacatggaaactcttgggaggctgcccgagctgcgttgccttgtactggattcgcgttacaccaaagtggtaagaattaagaatactggcagtgattgctacttcaagaagttgagattcttcacgatgggcagttcatccatcttgtttgatgtgcaaggcagtgaatgcgctatcatgccaagccttgaatcccttgcatttagtgtccatgtgcggttcctcaaagacgcggacctgctttgtttcaaaaaacttggcttggtgaacctccctagctcgcttcagcgagtcaccgttgaaatcaactcttgggatgcccatgatacagaggtggaagaagcggaggccatgttggagcatgcagccatcgtccatcctaatcatcccatcttccaaaccacacggccatttggaaaatatatcatgctcttacctgaccaagagccaagcagcaccaatcctaaagttgatagatgtgatgtcaatctgcgaaagaacgacggagaccatttggacttccgatggctgttgatgaatccacgcgtcgagaaattctgtgtctccataaactgcgagaatgctagtcttgaggaggttgaggaagcagaggcggctgcaagatatgcagtcgatgtccatcccaattgtcccactcttgaactggtgagatatggtgaagataagatggtgctacccaacccccagcaacagtttgcagctgaaaatttatttcttcaacttgttagctgtgccaagtgtgatgtgaagtga

SEQ ID NO: 1872 - DNA, 2754 bp, Oryza sativa
  Clone ID: PAT_MRT4530_101698C.1
gttgaatcttattttcatttggggagatttgcggcggcgaccccatcgtcggcggcgcagcccacgaccacgcggctcctccgcgagctcggcgtccgggtctcccgctacacgcacgaggagcgccgcgacatcgtcctccgctacatgcagaagcggagcggccgccagggcgtcaagcgcgccaccgccaagggccccatcgaggcaggctctcgcggagcggcggcggcggggtgcgagagggcagttcctcggcaaggagggcgccaaggtatatagaccggggatccatggtttctgattgatttctcagagaattgtttgagagatttcgttcccagactgtagataaaccagaagaagatccagaggtgccgccagaagttattgctaacgctggaggagtgcccatagttggaatggttttcgagaatgaagagaaagcatatgagtattatgctagttatgctggaaatgtaggattcagtgttcgaaaaggattgtgggataaaacggtgaaaaatgttgctaggtcaagggtctttgtatgctctagggagggatttcgctcaaagaatgaggccaaaagacctcgcccagagactaggacaggttgtcctgcacggatagctataaaattggtatccaatggcaagtaccgggtagcagaatttgtggaagatcacaatcaccagcttgctgcaccatttgatatagatatgctgaagtcagagagagtgttgaccaaggttcaaccaggaaaccgaaatgctagtaacattcctccaggatgcaagaattacattcgggccaagtcttcaacacacatgaattcagaggaccttggagctctaatggattattttcgaagaatgaagagtgataatccctctttttactatgccattcaggtggatgaaaatgataaagcaacaaatgtcttctgggctgatgcaagatcaatagtagactatcattatttctgtgatgtgatctgctttgacacaacacacagatcaaatgactgcagaaaacccttagctttgtttttgggtatgaaccatcataggcaaacaatcatatttggctctgcttttctgtatgatgaaactgttgaatctttcaagtggcttctcgagacctttaagagtgccatgtgtgggaaacagccaaagacgatattgacagatcgatctgctgctttgaaggaagccctgagtctcacctggcctggtacaattcaccgttcttgtgtgtggcaaatataccagaatgcttttaagtccttagaacatgtttttaatactcttgaggaattcacacatgattttcaccactgcatgtttgatatcgaggatgaccaggagtttgatgagatatggaatgtgataatcaagaagtacagcctcaaaggagaggaatggttaactaagttgtatgaagatcgggaaaattgggccttgccatataaccggcaaatattctttggggacattaaagggatgttacaagtagaaacttcttgcgttgggctgagagagttcttggattgtgagaaagatctctctaaattttttatgttctttgaaagctcaatggagaagaggaggcaagaagagatacaagctgattaccaagccagcgaaggggcaccaagaatatctctgccactgctatggcaagctgcaaaagtgtatacaccaatcatctttgagttatttagaaaggaatatgaactgtgtatggactgtatggcttatagttgtggggagtttggctctctttctgagtacatgatcactgttaagaataaaactaaagaccagcttgtgcggtttgactcatcagatggcacagttgcatgtacttgtaaaaaatttgaaaatgctggaatattatgttgccatatattaaaggtatatgagctgaggaatgttaaagagatcaggccgcagtattttcttaagagatggagaaaagatgcaaaggtggggtccaccgatgaaactaatagatttaattttgatagtggcacaaaatcttctgttccagaacgctatgcagctctgtgccgctcgttctacaagatagctgctaaggctgcagagaatgcagagacatttgcactgatggcaagccaatcagatcgacttgttgaagaagtagaacggattttgcaatctacactggcgaataagtcatccgtaggcccttccattaagaaccagttaactagtatggttcagaatgaatatctccttaatagtagcaatgaagttgagaaatctactggaaagaagaagactgaagtttatcgccataaaagtgctgtggtaactaataaaatgcagaaaacaagaaaaggtgggacgcaccctgatgaagcagccactggaacaagagatggagaactgaatatgacaccagacaacaggcagtcagaagcaaggaattctccaaatcagttcctcccagatcaattaatgcaggttgatttttcttcaagacagtattttttttagatgttcctttcatcactgtggaacagttatttattacaggtgttgatttccttgttcaggggcattatatactccaaccatgcaacagcaggcatttcccggaaacaatcaattaacccaaggctatcctagtgatatgcatgcactacagtttgtaggggcaaatccccagatggagcatcagaatggtgatcaggggcagtcatcaataccagtgtgggattttctc

SEQ ID NO: 1873 - DNA, 411 bp, Oryza sativa
  Clone ID: PAT_MRT4530_101699C.1
gccggggcggcgacgacgacggtctcctcgatggcctccaccgtcttgctggtgccttcatcctcggtgaccacgacggtcttctcctccgtttccggctcggccggcttggcctcctccgccgacgcctccgccttgggctcctcctccttggcggtctcctcggtcttgggctcctcggcacttgggctcctccggggcgggggcctcagcctcagcctcgggctcggccttgggctcctcggcggcgggggcctcggcggccttgggttcctcctccttgcccggctcctccgccttggccggtgagggcagccgccgctgtggaaggtcaaactcatcagcgggaagcgcggcggcgactagctccatgagctggtcgagcgcgactcgctccggctcagggagctc

SEQ ID NO: 1874 - DNA, 280 bp, Oryza sativa
  Clone ID: PAT_MRT4530_10169C.1
cggctatccagcagtacttgtctcaataacttttgtgtaataggacttggaaattcttgtaatcggttaagataccttaataccctattgttttaacaaaaaaaaaaaaaaaaaaaaaaaaaaaaaaaaaaaaaataatataaagaaaactaaaaaaaaataaactggtggacgttgtacaacggtctagactgagaacacgctgacgatacccaacaaaatcatcttgcagtacatcaccctctagcaaagtgtcctaatagacaagagccccgccccg

SEQ ID NO: 1875 - DNA, 323 bp, Oryza sativa
  Clone ID: PAT_MRT4530_1016C.1
aaacttctctaaacacggaggaaactgatgaggtgcaaattggtgaggacactagcatcgagccacaactggaaagtgtctctcttgaaaatggccctgttgaggaggccggggacttagcagatgcagaagatgcagctgaaggatcatgcggggatatgggtacagggatagcagtggatgaacctgtcagcccatcatctgagcccaacaatgcttcggctggagcttcaccagacacaggtgatatccatactgctggctcaactggatccaacgattcagaccaaaagcagctactgctcggcagatccttccagaag

SEQ ID NO: 1876 - DNA, 491 bp, Oryza sativa
  Clone ID: PAT_MRT4530_101700C.1
ccggggttctaggctacatcattctccgtgcccagaagcctagctagctctaagttacctaatcactttccatctttacttgaaggccactatgaaaaccccaatcctttcgtttcaagcaacttttacccgcctacaggagcacatggaataccctcaagcaggagtgttgagcaaaactttattgcaggacaagacctgccaatacaccctcttttgtttggcggcgaacaccgaaatttcagagcatacttccacccgcaatgccgtggtgcaaggaatagaaggcactggcattttgaccctagaaggtaaggatatttccctagacccaggggtgtttattgttatgccggcccatgctccccacgccctaaaagctatctgtaatctgtcctttttgcttactttgtcacaacctaattaggcattcagtcccaggatttttggagttgttttactgggtcaatacatccccgttgggcttggga

SEQ ID NO: 1877 - DNA, 2699 bp, Oryza sativa
  Clone ID: PAT_MRT4530_101701C.1
atgaaaataagctgaaatttctcaagcttgctgaggtataaaattgaagcagaataccccaatccatacgaaatgttacgcctaaaccagaccaaacgcaacagataacttcggaccaatcaccaaagctactgttttctccattggattcagagaagagaatcctcgtcagcgttaggaccaccaccaccatcgccatccatggcgactaggacgaggccgaggaggacgtacagggggaggcgtggtcgccccctgttttttttttttttggtgagaggagacgaagtactacaaaaaacaagacgacgagggagcagcgatggattgtatgtacagagaagcaaagcagctgcagtccttttttaattttttgttttttattttttttttttttttttctaaaaattaacatgttgctgaaagagaatccatggatgcaatgtacagacagatatacagatcagcaacagctagtcttcagttcttccttccacagttccctccctcctgtcctgacctcaagaagacaagaaacatcaccatctcatactcctccccccaccttctcccacctatctctcatagaacaagctcactttggttttaagtaaacacatacaaatgtgaaccccccagaagaacagcaagccaacaaattaaagaacaaaaccacaaaagaccacctaaaaatcttattgttctcttctatgatgcaacatgttcaaatggtggtggtatggacctgtggaccttggttggtgatcatatctatagagccaaatatctcgaaccttaggcagattcagaggagctcttgaccttgaatcggtaaagaagctgcttcttcttcttggatgctgcgttgtcgactgtgaggacgatcttgccaggctcgccaaccttgaagctgcccttcatgatcggctcttcattggcgggcaccttccaagtcttctgcacaatgacagtgtagccaccctctgcatcaggggtgaacagagaaccttagaccacctaccaaagaaactgttttcgcccccggattaccataaaattctcagtatcagggatctcaacagtatcaccatcgccagccatgaccactaggacggggccgagaagtaagtagaaggggtaggcgtcatcgcctgcggccgccgttggccgccgccttggtgtactcctccggtgtccgtcttgtacgccgccatgggcctccgcggccttgccgttccaagatctgcttctccgcgctccccgagctccttccacttcaccgacacgagcgcggtcagcgtggagctcgccacgccggggcgctcactccgtcagctgtcagctccgggtagttgtcctggagcagggcgagcgcctggcgggtgacggtgcggtgcttgccgagcatgggcggcgagttcttgaggtcggtgacctgcaccatggagcagatgccgctgggggagaagtcgagctggtcgaggatgccgcgctcgaggagctggatgcgccacttgaggaatcgctcccgcttctcctcgtcgccgaaggccttctcgtagaggtccttgtcctggaactcgccgtagacgttgtagcagacggggtggccctcgcggtcggcgccgcggtagaacaccacgttctcgagctccggcaggccgaggtcggcggccaggacggcgtcgatgccgaagcgcttgcgccacagcaccgccgccttgagcatcgccatggcctccttcaccttgaactccctggcgcggaggaacttgagcagcacggtgtccgtgcgctcgtcgtcgccggtcagcggcacgccccatatcagctcctccttcggcgccgcagcctcggcttccgcggccgcggccggggcggcgacgacgacggtctcctcgatggcctccaccgtcttgctggtgccttcatcctcggtgaccacgacggtcttctcctccgtttccggctcggccggcttggcctcctccgccgccgcctccgccttgggctcctcggccgcagccgccgccgccgccttgggctcctcctccttggcgggctcctcggtcttgggctcctcggtcttgggctcctccgtggcggcggcctcagcctcagcctcggcctcggccttgggctcctcggcggcgggggcctcggcggccttgggttcctcctccttggccggctcctccgccttggccggtggaggcggcggcggcgggggaaggtcaaactcgccggcggcgagcgcggcggcgacgagctccttgagctgggcgagcgccgtgcgctccgggtcggggagctcggagacgaggttgctctcctccttgaacgaccccgtcccctcgatcaccgccgcctcatcgcccccagcggcctcctccgcctcctccgccttcttctcctcctcctcctcctgctccgccaccttcttctcctccgcctccacctccacggccttctccaccgccaccacctcgtcggccttctccaccaccaccacctcggcggcggcgggggtctcttgcttcgcctcctcagccatcgctgacagctacacggatcgagcggcgcgcgtgggaaggcgacaggagagaggagagaggagccgagagagagagagatggacgtggaggtggagaggcagagagaaacggggagagattgtccgtgcccgggggcgggggccg

SEQ ID NO: 1878 - DNA, 1050 bp, Oryza sativa
  Clone ID: PAT_MRT4530_101702C.1
atgaagaagttcgccgacgtcatggcagcctcgctgctgctcgtcgtcgccggcggcctgtcgacaatggcgaaggtgactatggccagccgcgccggcacgatggaggcgaggcacgacaagtggatggcggagcacgggcgcacgtacaaggacgccgccgagaaggctcgccggttccgggtgttcaaggccaacgtggacctcatcgaccgctccaacgccgccggcaacaagcgctaccgcctcgccaccaaccgcttcaccgacctcaccgacgccgagttcgccgccatgtacaccggctacaacccggccaataccatgtacgccgcagctaacgccaccacccgcctctcgtcggaggatgaccagcagccggccgaggttgactggcggcagcaaggcgccgtcaccggcgtcaagaaccaacgatcctgcggttgctgctgggccttctcgacggtggccgccgtggagggcatccaccagatcaccaccggcgagctggtgtccctgtcggagcagcagctgctcgactgcgccgacaacggcggctgcaccggcggtagcctcgacaatgcgttccagtacatggccaacagcggcggcgtcaccaccgaggcggcctacgcctaccagggcgcgcagggggcgtgccagttcgacgcctcgtcgtcggcgtcgggcgtcgccgccaccatcagcggctaccagcgcgtgaaccccaacgacgaggggtcgctggccgccgccgtggcgagccagccggtgtcggtggccatcgaggggagcggcgccatgttccggcactacggcagcggggtgttcacggcggacagctgcgggacgaagctggaccacgcggtggcggtggtggggtacggcgcggaggcggacgggagcggcggcggcggctactggatcatcaagaactcgtggggaacaacctggggggacggcggatacatgaagctggagaaggacgtcggcagccagggcgcgtgcggtgtcgccatggcgccgtcctaccctgtcgtctctgcctag

SEQ ID NO: 1879 - DNA, 252 bp, Oryza sativa
  Clone ID: PAT_MRT4530_101703C.1
atggggagcgaggtcgacgccggcgccataggatggagggagcagagcgcgttgccggccggccgctgcaacgcgagactctatggcgccacggccgacgggagagtggagaaaccgatgactggtcatgtgtttctaattgtctttgggcttgccacgggcgagatggaccatggggctgccaccaagttggcctcctatctgctgaagtttgattttgctccctatgcgcccagctcgttgagctcgtga

SEQ ID NO: 1880 - DNA, 876 bp, Oryza sativa
  Clone ID: PAT_MRT4530_101704C.1
atgggattctcggagcttgtgcagggaggcggtggggcggcctgtgagaagacgacgccggtaacaacaggagaagaggaggaagattattgcggcaacggcggcgtctcgagctttcggatttgccgacctcgagctcttgtggccggatctggcagctggagctcgttggtgccggttggagttctgaataagaggcgcgtttgtggagactggagaagatcggatcggacgggggcgacgtggatcaagcccggattgggtgctgatggcacggatcgagcgagggcactcccttccatggagaaaaaagccatcgacgacgatgacgacgccccaaaccggccttcgtatgggacgtacggcaacgatccggtggcgagacgcgcgtcccaaaagacgaccgatcgcgatggcgtacgtgacggcaatggcagcggcaccatgcatggcgctggtctctccgacggggagaaagtgaccacgatcaccatggatctcgcctccttcgacgccgcagacgggctggatacatggacgcgaaaacggttgtcgggcacacggtttcgcccgcgtttaacctcgcggtgcgcgtcgagaacccacgcgctacttccggcggtggtgcgccaacagcggggaggtggcggtctactactccggcagtccggcgtggcgctcgcgtgggggaaaagtgccggggttctgcgcgcggaggaggtcggcagcggagttcacggtagtgccgtggtgcagggccgcaggggagtcggcttaccggaggatctacgcgcgccggcgcctcacgtgaagaacggaacggctcaggtgctggcggagatgaagttgtaccgctacgtacgtacacgaagcttt

SEQ ID NO: 1881 - DNA, 578 bp, Oryza sativa
  Clone ID: PAT_MRT4530_101705C.1
cggacgcgtgggtccctctcctcctgcgcaccgatggccgacgacggcgaggcctcgccgccgcaacctcctcctcctcctcctatcaattctccattcctcgccgcagccacaacgtaagctcgctcgctcgctcgctcgcgcgcgcgccttgggaaagaagaagagagcagagcaggccgggaacctgtggctgggccatgtccggcgtgcgggtggcggcgaaggcgcctgcggcggcggcggcgtggccgtacgtggagtacatggcgcggtgggagcggcaggtggagcggaggcagctgttcctgcggagctaccacttctcgcgcgacgtcgagctctcgccgcgggcgcgggcgcggcgcgtcgtctgggtcgggctccgcaggctccgccgcgccgcggccacggggctccggcggctgcgcgcgcgcctccgcctctgcttcgcctgggtctcccgccgccggaacatccaccgccgcggcgcccgcttcggccgctacggccgcctctccggcggcgccgcccacgccccggcgcccgccgcgtcgtcgtccgtgtgcttctggtag

SEQ ID NO: 1882 - DNA, 434 bp, Oryza sativa
  Clone ID: PAT_MRT4530_101706C.1
ccgggctgcaggaattcggcacgaggcttacatgcgtgtattccttcgacaactattgccttgccagtgctccatgtttttgaggacaaagagcccacatgagacgctggaagaattgaattatattagagaagtgataacatacatttaggtagtgaaaaaaactattattgtagtggctgcataacatacagatctccttgtaatggcaaattctgtatgaccgtgactgcgcaggaagtaatatgatggtcaggccattgtgttgctatgtgcttttcttctggttccaacagctgaaaatattgttgtaatccttctagctgttttgtgagaaaacgtcattactgcggtatgttcatgtcctttttggtttatttctaagtagaatacttacaacttttcttagttccttgcgttgtgtggatgaattc

SEQ ID NO: 1883 - DNA, 1413 bp, Oryza sativa
  Clone ID: PAT_MRT4530_101707C.1
ttttttttttttttttttttttttatccaaattatagaagtttatttctttttaaggacgttgagagtaggtccaacctggtggccccccgcgccgcgggttttctttttttgtttggttttttgtgtgcagccaaaaactatgaatcattaccaccgactaagaatttgcaatctctgcatgcaactagcatatgtaactgattaaaaagtaggaacgtacacgcactatatgcaggcaaaggtgttagatcctaacaagtcaattgacagtatttcccacctaacgctgttaaaccgcgcaacagcaccagactttctctatccagtttcatcatacaaagaacctttttcaacgggccccgtcctcatgatcattgtcgttgtcaccttcatagtactcgtcatcgcgatgaatctgcttgtcttgggtatgctgatctacacgttcatcaggatccagctcatcttcatcaatatctgggatataaaaatctggtggaacctcttgcatctgaacaccaggcgcatgttgtatggcccgcaaactctccatgacttgcactttgattgaacttagatatgacttgctattcaagttgtccatgttcacattcgatactttcaatgtataatctggagcaaagtatttgatgtattcattgtctggaatttcatttgggagctccgtatctagaagaacaccagtttcaacagcccaacagcgtgctacattctcttttgtgtatccaccacccccagtcaccagtagagggatattgaatttcttgacaaacttcacacattcagcatggccttcaatggacagattgaagcaccccagacggtcccgtgccaaggaatcagccccgcattgaagaacaatagcacctggcagatatgtctcaacaactttggcaataactgttttaaaaaggcgagtaaagccggagtcatctatcccatctttaagtggaatgttaatggcataatattttccttctctttctcctatatccttaatatcacctgtgccagggaagaaaaaatcaccatacttgtggaaacttacagtcattaccctgtcagtgaaataaaaggcttcttcaactccatccccgtgatgaacatcgatatcaatatagagaaccctggcatggtacttgagaagctccagaattcccaaaaccagatcattaatgtagcagaaccctgatgcctcgcacttctttgcatgatgcaatccaccagcccaattgatagcaatatcacatgttttatgattcaatctgcgagccgcatctagagttcctccagcatatatttggcaaaactcaaacagattatcaaagactgggcagtcttctccaagattgtcatcgtagaagtaggctatcctgtctttctccagcat

SEQ ID NO: 1884 - DNA, 2463 bp, Oryza sativa
  unsure (1)..(2463): unsure at all n locations
  Clone ID: PAT_MRT4530_101708C.1
atggcgcggagttcaactgagagcaggaccaggaccactgtatctgtagttgttttatttggcctttgttccttcttctatctcttgggtgtgtggcagagaagtggtttcggaagaggagacagcatagcagctgtggtgaacgaacagactaaatgcgtggttcttccaaacctgaattttgaaacccatcatagtgcttcagaccttcctaatgatactgggagtactgaggttaaaactttcgagccatgtgatgcacagtacacagattacactccctgtgaggagcaaaagcgtgcaatgaccttccctagggataatatgatatatcgggagaggcattgcccacctgaaaaggataagctctattgtctggttccagcaccaaagggttatgctgctccttttcattggccaaagagccgtgattatgttcattatgcaaatatccctcacaagagcctcacggttgagaaggctatccagaattgggttcactacgagggtaaagtgttcaggtttcctggtggtggaacacagtttcctcagggtgcagacaagtatatagaccatcttgcttctgttatcccaatagccaatgggaaagtgagaacagcactcgacactggttgtggggttgctagtctaggtgcttacctgttgaagaaaaatgttttgaccatgtcatttgcaccaagggataatcatgaggctcaagtacagtttgcactggagagaggtgttcccgcatatataggtgttctcggatcaatgaaactgtcattcccatcacgtgtctttgacatggcccactgctcaaggtgtttaattccatggagtggaaatgatggaatgtacatgatggaagttgatagggtactaaggcctggagggtattgggtactctcaggcccaccaattggctggaagattcactataagggatggcaacgaacaaaggatgatcttcaaagtgagcagagaagaatagaacaatttgcagaacttctttgttggaataagatttctgagaaggatggtattgctatatggagaaagagaataaacgacaaatcctgccccatgaaacaagaaaatccaaaagttgacaagtgtgagttggcatatgacaatgatgtatggtataagaaaatggaggtctgtgtaactccccttcccgaggttaaaaccatgacagaggttgctggtggtcaattagagccatttccccagagactcaatgcagtacctcccaggattacccatggttttgtacctgggttctcagtccagtcatatcaagatgacaataaactttggcagaaacatattaacgcttacaaaaagatcaataacttgcttgatactggaagataccgtaacataatggacatgaatgctggccttggtagttttgctgctgcattggagtccacgaagctgtgggtcatgaatgttgttccaaccattgcagatacttctacattaggtgtaatctacgagcggggattaataggaatgtatcatgattggtgtgaaggattttctacatatccaaggacatatgatctcatacatgctaacgctgtgttcagcttatatgagaataagtgtaaatttgaagatatactattggaaatggaccggatcttacgaccagagggcgcagttataatccgtgacaaggttgatgttcttgtaaaggtggagaaaatagctaacgccatgaggtggcagacaagattgactgatcatgagggtggccctcatgtgcctgagaagatactctttgcggttaaacaatactgggttgttgaaagcaagagcagctaattatatgctggggttgtttttttccactgagctcccaacaagacctaagacatgacttaattacatantgaagggtatgcatcatctacctcctctgtaaacttatagccactgtagtcaggaatgaactcttggcagcttgagttttccgaaaagttagcacccttgcaatgtggccttgccagttcttttcaaggtaaattgcactgcaggtataaatctttttcaaaaccggctgcctcagtcttgacaatctcaaccacaggtttcatcttttgatgtaaatggcttggatttgaaagttcatgtatgcaaggcttgtcatgaccgtatttcttttagccagttttgtctagccttagctggtgcgacaatttgagaatgctcaaactggcctctaatcttgcttgtttggtgcatttgtgctctaaggaggtgtcgcactgtaatgaaactgagatccataagattctagtattctgatcgtctgaaccgaggtgaccaataatcaaatttagctacgtatgtaatagttttttttctgttggtaacagacgaacgatttatttttagtgctatttgaggctgtccttttgagattcagttatacaaatgttgttcgatttt

SEQ ID NO: 1885 - DNA, 261 bp, Oryza sativa
  Clone ID: PAT_MRT4530_101709C.1
gggaaatgaaggaagactatcttgagttatatggaagaagataagagctaggggaactgatggagatagctgtaaactgtgatagaatgttaaacggacacaatataagaaaacataggagcgggaggaataaagggggaagctagggggggataatgagcgagttaactgacattaattgagtggggattactgaccggtttaaagtggaaaaacatgtggattaaggtgaatgaaagaataggccaagaggaggagaga

SEQ ID NO: 1886 - DNA, 933 bp, Oryza sativa
  Clone ID: PAT_MRT4530_10170C.1
gaccttactggctcctggaaagtatatgaagttagtgcaactccaattttcagtgaggaaaggcaagaaattgaggctggtgccctctttgtatacttgtgcatggagacagtgaagaagagaagcctgccagagagctcggttttttttggggaggaagagatgcttgacatgcaagatgtcaccatgctttggttacctggtggtgtcactgcctatgttgatgtggacaaagacggtatactctgtataggagttggttggtactcggacgaagggattaatatggtgatggagagagactatggaactgatggaaagctcagagatgttcgatggaaaactgaagtcaagcgcaggtggaatcaaccagttctaccataaatcctggaactaaccctcgcataatttctctgtttctattaaccttttgtcctggtcagaaataggatcattgatatctatgtgcatcatatatcacctgtaaatttcatcgcctctgtggaatgtgcatgtttatgttgtcagtaagaaatcaaactcatgggcatcagctttccatgtgcattgctatattttatgccatgggctgactcagtttaaaatggcttgtttatgccacttggtatataatttggtcataatctttgggagcccacacttcacgtgccgtagattttcaccacctgggagccaagattgatgactgggccatatgtatattgttagctgtagtacattgtgtattagtgtgattgctggttactggctagcagtgatggagtcatggagaggataatatcatttgcattcgtttatggcaagtggccctcaataggccatcccatatccccattaggtgaaatgctcaattaaagggtgtttaatataatatagcaatataaaagttaaatattaaaaaaaaaaaaaaaa

SEQ ID NO: 1887 - DNA, 195 bp, Oryza sativa
  Clone ID: PAT_MRT4530_101710C.1
atgtccatcaacgatgtaagcgggcccggcctgggagaggcgggcaggacgttacaaagtggtatcagaggcgggcaggacgttacaaaatggtatcagagccgactacatgtgctggcactggacacacggacgtggccaagaggggacattcctggcctggggttgatcgacgggggcgtcaatctctattaa

SEQ ID NO: 1888 - DNA, 358 bp, Oryza sativa
  Clone ID: PAT_MRT4530_101711C.1
gcacgaggtccaactccaacgccacccttcctaaaccctatctataccctcctcctccgtccccttcaaataaaataaaggttttatccccccattcctagggtttttcgggacagtaataatttacttcgcattcgattgttgtgatttagtatctatttacatccatcttcacattaacctatctgcattcctctccttccgctgcaccatgcacttgttgttaggaagtatcctgattttacattttcgacttgcacaccgtgataccaaaatctaatgaaaaaaaaaataaaaaccagaaatcaaacccatgatactgatcccccccccgtccctgtgattctgcgtgtttgac

SEQ ID NO: 1889 - DNA, 774 bp, Oryza sativa
  Clone ID: PAT_MRT4530_101712C.1
tcgccgagaagcagcgcgcgcggcgccgccccggcgagaaccacggctacgcgagcagcttcacggggcgggtcgactgcaagctgccgtggaaggagaccatgtcgttcaactgctccgccgcgccggggaacgcgcgcatggtcgccgactatttcgtcgacgccctcggcgaggaataccgccacatgggggaggtgtaccaggagtactgcgacgtgatgacgcggctggcgctggacgtgacggaggtgctcgcggtggcgctcgggctcggccgcggcgagctccgcggcttcttcgccgacggcgacccggtgatgcggctgaaccactacccgccgtgccggcagccgcacctgacgctgggcacgggcccgcaccgcgacccgacgtcgctgacgctgctccaccaggacgacgtcggcggcctgcaggtgctccccgacgacgccgcggcggcggcgggcgggtggcgcgccgtgcgcccgcgcgccgacgcgttcgtcgtcaacatcggcgacacgttcgcggcgctcaccaacgggcgccacgccagctgcctccaccgcgccgtggtgaacggtcgtgctgcgcgcaggtcgctcaccttcttcctcaacccgcgcctcgaccgcgtcgtgtcgccgccgccggcgctcgagtatgccggggatgagcgcgcgttcccgaccttcacgtggcgcgagttcctcgtcttataagagctccccgaccggtcgcaacccaaccccatggacgccttcgttgcct

SEQ ID NO: 1890 - DNA, 543 bp, Oryza sativa
  Clone ID: PAT_MRT4530_101713C.1
atgagcaccaccaacagctcatcctctgtctctgtcccagccatggacgcccatggacaggaggaggaggaggagccgatgcaggtgcagcaacagcaggcgttccgcggggtgcgcaagcggccatggggcaagtttgcggcggagatccgcgactcgacgcgcaacggcgtgcgcgtgtggctgggcacgttcgacagcgcggaggaggcggcgctggcctacgaccaggcggcgttcgccatgcgcgggtcggcggcggtgctcaacttccccatggagcaggtgaggcgttccatggacatgtccctcctgcaggaaggggcgtcgccggtggtggcgctgaagcggcggcactccatgcgagcggcagcagcggggcggcggcgcaagagcgctgcacctgcaccggcggatcaggaaggcggaggaggggtgatggagctggaggacctgggacctgactacctggaggagctgctagccgcctctcagcccatcgatatcacctgctgcacaagcccaagccaccactccatctga

SEQ ID NO: 1891 - DNA, 321 bp, Oryza sativa
  Clone ID: PAT_MRT4530_101714C.1
atggagttcggatgggccctgcgacggcctatgcggctttcggattcacctaggcacgagaggggattgcccgctgccttgcgaggagtggggttgaaacctgaggtgtggtgtgcttggttagagggggttatgcgaagggtcctatcacggcctctttccggtatgtctctgtatgtcaattttgtcgtttgtgtaccctggccggtcctggacaggggatttattgcacattctgcttgaaattctattcgagaatttctaggcgtgacaagaaacaacttggctgcttcttctattctgccacggcttaatcccaaa

SEQ ID NO: 1892 - DNA, 331 bp, Oryza sativa
  Clone ID: PAT_MRT4530_101715C.1
ttttcccgcagtcttataagggtctagacgctgactcgaatctttgtgcgctcaaatcaaccgcatctgtgggaagaaagaaggccgcaagactatcaccctgctgctgaccgagcctgcgagacacaccgagtttgcataggctgcgaccaaggatacggaggccatgtcatcgggccactagtgactactaataactggaaagcgatggtagaatagaacaaccctagctaactatatcatgcagaaggagtggaggaaaaagattgcaataatgcattagttcgtggatgcagatgtaattcaagactgataccggaatgactatgag

SEQ ID NO: 1893 - DNA, 1500 bp, Oryza sativa
  Clone ID: PAT_MRT4530_101716C.1
atgtccgccgccgccgccgccgagctgccggacgacatcgtcgagaagatcatctctcgcttgccgccgcgcagcatcgtcaccggctgccgcgccgcgtgcaaggcctggcgccgcctcacctcccggccggaattctaccgcgcctacgtcccacggccacggcctgtcgccgcaaaggtcaccgtgaagatcaacactacccgcgccgccgacaccatcgtccggttcgagttgttccgcagccactggaacgtcgacggcgcggccgtgccgccgtaccggcgcgtcctctcgctcggcgccgcggcgacgacggacaagtacagcatctcgtcgctggtgctcggctcatgggacggcgtgctgtgcatggccatgacgacgggtggccagggcgccgacttcgtcggcgcctacgcgcacccggcgacggggcgcttccacatcctgcacgcctccggcaagaccgtcggccactactactaccggaagcagctggcgccggccgtcttccgggtccagacgatcggcgacgccgcctggcgcgtgggccccgcgccgccacccaagatcaccatggcgacgacgggacacgccgccgctcgctccgccgccctgcacggcaagctccactggctggtgcagtcgggcggccgctggccggccgtccggaagctgaagctcctggcgttcgacatgtcccgggagaagctccggctgaaggagacgccggagcgcatggcggcgatggacctagagacggcgcggatcagcgtgctgcccgccgccgccgggaagctgtgcgtcttcgccgtggaggatcgcggcacgacggtgagcatgtgggtgctcgacgactaccacggcgaccaccgccggagctggcagctcaagaggaggatcgacctgctcagggacgagcgcgggtggcgctggcggcgcaacctgtggccggcgttgaagcaggtggaggcggtgcagggcgcggaggaggagggtgacaaggtgttcgtccacacccgcggccaggtgaacgcgtacagcctccggcgagggaggtggcggggcgccaacgacgtcgcccggtcggtcgccggcaaggtgcacgtgtcgatggtgaggcacgagcacggcgtcctgccattgccgcacgaggtttttagccaaaagacttccttccttttcagccctaggctagcccgctacctccctccatttggtctgcttctctttgaccctaccatctttaactttccgaatatgactaccatcttcaacctcccgaagactcccgaagataatcccgtgcccgaagataatctcgtgcccgtttttgatccactcgatctactctttccgttttccccaaaatcagagcgtaaaattcgggataaaaatgaccggggaagatcgccgtcaaaatcggcaactttagaacagagattaaatccagcaattaaagctaaatcgaaggggaaatcattgagaaaatggtga

SEQ ID NO: 1894 - DNA, 327 bp, Oryza sativa
  Clone ID: PAT_MRT4530_101717C.1
atggaggagaagagaagttggcgatctcgagccctccggcaaagaggcggtggtggcggcggcgatcacggagagcctataaatgaatgcggcggtgagggtcttgagcccaccagcggggctagcgcaacggtgccgagccgaccgaagaggagcacggacgtgccgctggtggctggggcaagccgccgccgccgctgccgccacggccatccgggggtgggggtgggtgggcatgagttgcgcaggcagccgccctcctattcaaccggcggtgatttggagaactggtccgccatcaagagagaagctcatgcgatgaactag

SEQ ID NO: 1895 - DNA, 292 bp, Oryza sativa
  Clone ID: PAT_MRT4530_101718C.1
atgtgggccgcccggcacagcccggcccaggcccggccgtgcctaggccgaggcttgtcaggccggcacggcccgaccgactcaccgggccagcccactccctatactttatgtgccgggcctagcctgccggcccatcgtgccgggccggccggtcgggccagcgtgccggtggggaggcccagacacggcccggcagtcgggccatgccgtgccgtgcttgggccgggccaaaaagccgtgccatgggccgggccttcgggcctcgggccttatggccatctataattga

SEQ ID NO: 1896 - DNA, 712 bp, Oryza sativa
  unsure (1)..(712): unsure at all n locations
  Clone ID: PAT_MRT4530_101719C.1
tcgcgcctcgcaatatctccccagacgagagagatcccctgtacaacatgttcaccgatcggattcgggcatctctcagagctcgcctcaggccgatcgccaagaacatggcagcctcttcatcatcttcttcttcagcttgtgatcctgccatggctgcagagtggtctggcacggtgcagcgcatcctcggatggttactccgctggctcacaacatgctgcgatggcaatcggagaggaatttcgagcagaaaaatgttgcgtcgagcggtacaggtgtgctgctcctgcagacgttgcattttgctgaccagaaaaagagcgaggctgccatagttgagctgcttgttgggttgaactacctgtggaaagctggaagagagctttatgcaaaagctaaaaaattggtgtcaggtggtggaaaacgcgatgaattcacagattattatagtagtaataggatggaatgtcgataagatgcaactgaattggatgagcctgggatatgtaagcagaggtagcatcagattccctttgctgatttgctccttcaatccctacaattggcattatgacacgcatctattctgtaattgatgctcctgcattttagtgtataagtgtagggcagctgatcattttaatgtaaatttaccatgtaattcattagtgaagacgtatcaggtttaataaaaaaaaaaanaaaaaaa

SEQ ID NO: 1897 - DNA, 1432 bp, Oryza sativa
  Clone ID: PAT_MRT4530_10171C.1
tttttttgcgttaagaacaggctcagacaataattaaacttcactggttcgatcacacttacaccacgtacgctaaattactgtaactttctttctgccaagatactcccggacaggaggaatcctgccatggcgaaatctgcaaggggcaagctgcgcttgggccgccgatcgcgaggagaagaggcgttcgacgatgtcggtgggtgccagtgatggtggacatgctgatgctgctcgtcggggaggcaatggcgcctctcctcacccgcctctactacaactccggcggcaacagcctatggatggtcacgctcgcgcagtccgccggagcgccgctgctggtcatccccttcctcctcacgccgcgggccgccgccgtcggggagcctcggccggcgccggcggcatccaagatggtcgccatctgcgtggccctcgggctcgtcgtcggctgcgacaacctcatgtactcgtacgccatgctgtacctgccggtgtccacgttctcgctcctcgccgcgacgcagctggcgttcaacgcggtcacgtcgcgcctcatcaacgcgcagcggttcacgccgctcgtcgtcaactccgtcgtcgtgctcaccttctccgccgcgctgctcggcgtcgacgacccctcctcctccgtcggcggcggcgccggcggcgacgccgttcagcgtggcaagcacgccgccggcgtcgtcctcaccctgtccgcgtccgccgtctacgcgctcatcctgtccctgttcgaggccaccttcgacaaggtgatcggagcagcgacgccgcggtgggtgctcaagatgcagatctccacgaacgcggtggccgcgacggtgtcggcgacggcgctgttcgcgtcgggggagtggaggacgatcggcggcgagatggcggcgttcaagggcgggaaggcggcgtacgcggcgaccgtggtgggggtcgccgtggggtggcaggcggcgacgctgggcgccgtgaggctgatcgcgagggtgtcgtcgctgttcgcgaacgtgacgggcaccctggcgctgccgatggtgccggtgctggcggtggcgctgttcggggacaagatgacgggcaccaaggtggtagccatgctcatggccgtgtgggggtttctctcgtacgtgtaccagcactacctcgacggccggcgagcggcggcgcgagaggggagggtgcatgcggcggctggctgtggcatcggtgccctcaagattcagattccatcaccatttcagctgttcaagttgatatcagcgtaatcggctggtccgtagggtaccaaccaatctgccagcaaccacttcttcctccgtcgttgaacccccatgtcttggcacagccgatcactgcacagcacgctcaccggcccaatgcaagatcgacggaaacggccgggggaata

SEQ ID NO: 1898 - DNA, 408 bp, Oryza sativa
  Clone ID: PAT_MRT4530_101720C.1
tgtatgctgtgatcggaaccaaacgggtgggagcaatgtactgtcactagagagcagagaacgagcattgaggaaccgattgattatcgagctgaaacaactggatggccaggtactcgtagcacacaatatactgggatatgactagcacgggctttggcaccgggcacagactagcactggaccaaggaatatgtggtggatgattgcacggcttacgctctcattgatgcccagactcacgaaagggaacacactgtatggacttggagcgagaacaggattgatgacctgcattgctggacgaatactgtgtgatacctacttatgctctagcgatctgctgaaggatgcgaggcattcttagacacaacttgcagaaacacaattgaaaaaagagaggaaaga

SEQ ID NO: 1899 - DNA, 514 bp, Oryza sativa
  Clone ID: PAT_MRT4530_101721C.1
ccatcgtcgcatcagtcctctcgccgccaccgatccccgccccgacgctccgcggacgtcgcatcagtccaatcagatagtgatgagcacatcagtcaagacatgaagaagatcatgagataaatttgcctgttaagagagcctaagtggtgaagctcattcaaccacagatgcggcaaacatggatgatgtttttttaggttgatttcaataactacatgctgaagtgcaaatccgtatatctgtcctataatcatattcttaaatgaggagatggtcagggtacattttaaagcaaagagacatgctcaagcaaagaaaatatcaggataagggaggcttaagctgattctgaatatatggtgtgttggaggaagagcaagatacgcgctgaacgacatgatcgaactgtagctcttgctcagcgagtacaaaagccaaagaaggattcgagcaggcagcgccaaacttctgagatcaaacatgctgagaaatgcgaaaaaacaacacccac

SEQ ID NO: 1900 - DNA, 259 bp, Oryza sativa
  Clone ID: PAT_MRT4530_101722C.1
ggttgatgttgcttcgggcgagcctactgtgcctaatgcacggatggtcgtccagttcttgagtgaagaatccatgaatgtcaataacgtgggtggtccaagaagccagggctagcaataacttgtggagatcaggctaagtggtatggctgctacctattgacacgaggcattatggcgtgcacgctgagactgggatccaagcattagctcgaggactttgatactgatctgttacacctgccttaacgtacatgat

SEQ ID NO: 1901 - DNA, 339 bp, Oryza sativa
  unsure (1)..(339): unsure at all n locations
  Clone ID: PAT_MRT4530_101723C.1
gttggaggtgccgtaccaccggtgcgtcgccaagggtgtcgaggaggtggccgccgcggcggcgggcatcccgtttttcatgaggacgaccaggttgccgtccatgtttctaacattgggtttgatagtgctattcttgcaccgagcatatcannnaatgcactacantttgntcccagtattctatctggtagctttgctgatattggacctaggaggtacatgtaagatgatcacatccggatagatgatctctcttctcatctttgatcgctcttggtgtgtccgttgcctagtgccttctatgtagttgnatatggccattgaggcctggatgct

SEQ ID NO: 1902 - DNA, 1050 bp, Oryza sativa
  Clone ID: PAT_MRT4530_101724C.1
atggcgaactcatcgacagcggcggccgcagcttacccgttgctggtgcagagatatggcgttgctggtgtcactccgtcgtcttcgtcttcgtcaatggcgacgagagtcttcagtctgcctgccatgaagctgctcgacgtcaacctttcggtggagatgtgcggcaacacgttcctcgagacgccgcagggtttggtcctcgtgctgatgacgacgagctcgccgccggcgtcggcgttcctcctcgacccacgcgacgggtcgagggtcgccgagctgccgccgctcggcgagggcgagctcccggcgcatcgccggtgcgtgctgtcgggccggccaccggagcccggctgcggcgtcctcgtgttcgacctggagagcccggcgctgctgttctgccgcgtcggcggcgagcgctggtcgaggcacggctacgacatcgggtgctacgacctgccggaggagtactgcccggtgcccaagaggaggcaactcttcgacgtcgccggcgtcggcgggaggttctacttcgccgagaacaagggcgagctcggcacgctggacttcaccggcggcggcggcggcggcggcggcggcgaggcggtggtgggggccatcgccatccccgtcctggactacttccccgccggccaggtgatgtccagctcgctgacgttcctcgtcgagtcgcgcggcgacctgttcctcgtcgccatcgccttcgaggggtacagcatcggcgggccgtacgacgtccacgtgttccggatggacttctcggcggcggcgccggggccggcgtggcgcagggcgacggacatcggcgaccgggcgttcctcgtcggcggcgacaactccagcggcgcgtcgtgctcggcgagcgggtgcggggtgaaggccaaccgcatctactggatcaacggcttcagcgaggacgagaagaggaacctgtacgtgttcagcgtcgaggacggcagcgtcgagaccttcgacacgtttgagtctctcccgggtgcacctcgtcagacgccgttctggcttgtctag

SEQ ID NO: 1903 - DNA, 1051 bp, Oryza sativa
  Clone ID: PAT_MRT4530_101725C.1
tgttttcggactccccgctggctccccagtggtaccggctcgagaacaagcgtggcgagaagacccgtggcgagatcatgctctccgtgtggctggatggaggggaaagatgggcgcaccaccgatgcttactgtgttgccaagtatggaccgaagtgggtgcgcacgagaaccattctcaacactctgaatcctcagtggaatgagcagtatacttgggaggtgtttgatccttgcacggtgattacagtggtggtgtttgacaataaccagattggcaagaatggcgatgcccgggatgagagtatcggcaaggtgagaatccggctctctaccctggagactgacagggtgtacacccatttctaccctttgttggctctcaagcccagtggccttaagaagactggagagttgcatttggctgtgcgatttacatgtacggcatgggtgaacatgattgcgctgtatggccgtccattgctgccaaagatgcactacacacagccaatctcagtgatgcagttggattacctgaggcaccaggcaatgcagattgtcgcggcgaggcttagccgtgccgagcctccacttcgcagggaggttgtggagtacatgctcgatgtgggatcgcacatgttcagtctccgccgcagcaaggccaacttctaccgtatcacctcgctgttctgtggttttgcagcgacggccaagtggtatgatggcatcagaagctggcgaaacccaattacaaccgtgttggtgcatatgttgtttctaatactgatctgctacccagagctcatcctgcctaccatcttcctctacatgttcatgattggattatggaactaccgttacaagccaaggcatccaccttacatggacactaagctatgccatgctgagtttacaaacccagatgagcttgatgaggagtttgattcattccctagcagcaggccagcggacattgtaagaatgcgctacgatagactaaggagtgttggaggtcgtgtgcagacagtcgttggtgacctggcgacacaag

SEQ ID NO: 1904 - DNA, 273 bp, Oryza sativa
  Clone ID: PAT_MRT4530_101726C.1
atggaggaggacgacggcaccgttgtggttgatggcggtggccggtggctattgaggcgaagtcattgcttcgggcctcgctcccgaacgccgggcaacaccttaactagcaaggaggtgttcacctgggccaagagcaacaactggcgattgctccacgtcggcgacattgacataacaaggaagaaaggaaatgacactccaatttgcatctgcatactctccttcaccttcacacatgaagccccaatttctttttgcaaatcaaattaa

SEQ ID NO: 1905 - DNA, 2693 bp, Oryza sativa
  Clone ID: PAT_MRT4530_101727C.1
atgaagggagcaatgccgccgcggccgttcatgatgccggggcctgggggcccgatgcccccgccgcagcagttcggcctggtggagacgcgcccgccgctggccgccgtgctgcggccgcggttcaacatcccgggcctccacccctccgccgccgcggcctccgcggcgggcaagatcgcgtccacctacgaccttgtcgagtcgatgcggttcctctacgtgcacgtggtgaaggccaaggacctccccgctgtctccgccgccggcaccatcgaccccttcgtggaggtgaagctcggcaacttcaagggcaccacgccggtcctcggcggcaaccacaacccgtcgtggaagcaggtcttcgccttctccgcgacgcacctccaggcgcacgtgctcgaggtggccgtcaaggccaaagatctcgccggcggcgacgacctcatcggccgcgtggggttcgacctctccgaggtgccgatccgtgtgccgccggactccccgctggctccccagtggtaccggctcgagaacaagcgtggcgagaagacccgcggcgagatcatgctctccgtgtggctggggacccaggccgacgaggccttccccgacgcctggcattccgacgcccatgcggcggccggcccgggggccgtcgcctccacgcgcgccaaggtatacttctcccccaagctcgtttacctccgcgtcgccgccatcggagcgcaggacctcgtgccgctggacgcgtcgcgccccgcgaacttctgcgtcaagctgcagctcgccgggcaggtgcggcgcacgcgccccggcgcgccgcccggcacgttgaacccgatttggaacgaggagttcatgttcgtcgtgtccgagcccttcgacgagccgctgttcgtcaccgtcgaggaccgcgtcgggcctggccgcgacgagcctctcggccgcatcatgctgcccctcaacgccgcaatgccgcgccatgaccacttcggcaagccggtggagccgcggtggtacagcctcgcgcgccccagcgacgatcctgacaagaaggaaggcaagttcgcgagcaagatacagcttcggatgtcgctggactttgggtaccatgttcttgatgagtccacctactacagtagtgatctccagccatcatcgaagcacacacggaagccaagcattgggatccttgagctggggattcttggagcacgaaacttgataccaatgaaggggaaagatgggcgcaccaccgatgcttactgtgttgccaagtatggaccgaagtgggtgcgcacgagaaccattctcaacactctgaatcctcagtggaatgagcagtatacttgggaggtgtttgatccttgcacggtgattacagtggtggtgtttgacaataaccagattggcaagaaggaataatgtgttcattcgaatgttatttgctcaaataggcggctctctaccctggagactgacagggtgtacacccatttctaccctttgttggctctcaagcccagtggccttaagaagactggagagttgcatttggctgtgcgatttacatgtacggcatgggtgaacatgattgcgctgtatggccgtccattgctgccaaagatgcactacacacagccaatctcagtgatgcagttggattacctgaggcaccaggcaatgcagattgtcgcggcgaggcttagccgtgccgagcctccacttcgcagggaggttgtggagtacatgctcgatgtgggatcgcacatgttcagtctccgccgcagcaaggccaacttctaccgtatcacctcgctgttctgtggttttgcagcgacggccaagtggtatgatggcatcagaagctggcgaaacccaattacaaccgtgttggtgcatatgttgtttctaatactgatctgctacccagagctcatcctgcctaccatcttcctctacatgttcatgattggattatggaactaccgttacaagccaaggcatccaccttacatggacactaagctatgccatgctgagtttacaaacccagatgagcttgatgaggagtttgattcattccctagcagcaggccagcggacattgtaagaatgcgctacgatagactaaggagtgttggaggtcgtgtgcagacagtcgttggtgacctggcgacacaaggttctgctggttattgcaatgctatacctgttgcgccacccccggttccgcagcaggatgccctctgtgcctttcaacttctacaggagattgcctgccaagtctgatatgctcctttaagcccaatgcattgagaacaagataaaatgaaggaacccctgtaactttgtttctctcttccattcagttccctactgattagcatcagatcagatgtgaatatacttaaggagttggtaaattagaggcaagttagcggccagggaataatgtgttcattcgaatgttatttgctcagataggcagaaagaagggattgactggaccccttcgagtttgggggggcagagtttgttaatgtcgtgtttcttggggtaagaacaataggcaggcgcaagctaatcttcagtgtattttgtttatggatttgtgccaattttgttattttcttcatgtaatcatgtactacctgttgggggatgatgttttgcatttctatgtccct

SEQ ID NO: 1906 - DNA, 474 bp, Oryza sativa
  Clone ID: PAT_MRT4530_101728C.1
ctttgttttttttttttttttttttttttttttttttttttttttttttttttttttttttttttttttttttttttttttttttggccccacttgataaacccccacttttccttggattccactaaccaaacgggggggcaggaccccctacaaggggggggaacaaaggcccaggaaaaaaagggggaccccaaaccctgaaagttttttgcaaaaaaaaccccggggatgggaacgttttgaccaaccggttggaaaaaaagcccaaagaagtaaccgggcccaaaaatttgcccccccccaggggttaccccccctaactggtgggaaaaaaaccccggccggcagggggccgaaagctttttacctttatcccggaggtatcagttttccccccaatcaaaagcctgggctaatgacccccaaaagcggggatttccccgggcttaaaaaggaacccccccgggggtt

SEQ ID NO: 1907 - DNA, 1446 bp, Oryza sativa
  Clone ID: PAT_MRT4530_101729C.1
atgccggcggtggaggggatgcgggacgtggtcgccaccgtgagcggctaccacggcgacgagcggcacaggctggtcaggctcatcgcggagaccggcgcgagctacgtcggcgccatgagcagatccatcacccacctggtgtgctggaggcttgaggggaagaagtatgacatcgcgaggaggcttcggacgcgcgtcgtcagccaccggtggttcgaggactgcctcaaggaggggaggcgcctccccgagaaaccctacatgctggaaagtggtgaagaagcagggccagtccctgagctgcccactttcccgcgttcacgatccaagagaaatgcaagcatggaggatagatgcttgaaagaattacctgatgatttctgcaatacttcatatgcgaccgatgtgcttgtggttgctgattcaggttctgattgcaatcatcagcgatggtctgattcctccctactgaaagaaaattttgttggtgatcgcgataattctaagattggtgcaacacacgtgaaggaaagaagaaaacgtttaaagcatgcacaaaattcaaccaatgaagatgcactagatgcagaagacaatatttctaggctcatggcaagacaagggcgttatgagtcaagttatacttcatctcggagcgcatcaaatcagaagggagatttgttaaagcttctgcataatgatgatgctagcatgatgagaaaaagaaatagtctcatgaaaaaggaaacaagaaccaagcttgcaggctatcttatagaaagctgtgaaaatggaagtttgacagacagcttcgatgaacctcaaatgtcggatactccgcccactgaagatcgaagaaaaataaggaagacaagactgcgacaaagtacgttggacagtatatatgattatggtgaagccagtgagcatgatcctgaaaaaagtgaggatcaagaaaattttgaattgggtgaaagttcaagaagctttcagtcaagtgattcatccagacaagaaccagctttctgtactgagaaaacaaatcaaggaagcattgacattgcagctgatgatgacaagggagatgatgagaaagccactttggaagaaccaaccagttgtcaagggcaagctgaactttcctgtgtcatttgctggactgatttttcatccacaaggggcatcttaccatgtggacaccgattttgttattcatgcattcaagaatgggcggattctctgtcttctaggggaaaagtttcgacatgtcctctgtgcaaaacaagttttgcctggatcagtaaaatagatgaggctggtacatctgatcaaaagatatactctcaaactataccttgctcaacttctaccgacactttcatatttgatgatagagtctacggcctcccagaatcaccggttgatgtgatgaaaaaggactga

SEQ ID NO: 1908 - DNA, 307 bp, Oryza sativa
  Clone ID: PAT_MRT4530_10172C.1
attgacactctgcagaggttgtacaactttacccacaagatacagttcggtgccgctaaacaccaaagtgtaacaaagcgtttcccctacctcgccctaacaccggcttcccccatgggcggtcctccctacaccacacaggtgaaagttcccatgatcaaggttccttttgcatacaccaccatcacgaaggcaagaaatgctagtactcccttcatcttcacatttgaggtgctccacctgagtgtatggggctcgcatctgatgctggctgcaactgaagcagcatatgggcagcatatccaac

SEQ ID NO: 1909 - DNA, 547 bp, Oryza sativa
  Clone ID: PAT_MRT4530_101730C.1
cgtagtgaggattagatgcctccaagagtgggccagagtagtattctgagtcgtcctgtccagctccaccgcccatgcagcttgcgttcaaaactgggtcacccataatggagagaagttaaggctaagtattggtggagaaggaaccatcagctcacacccagttcaaagtacaaccttctctcgtttagaacataaatgtttgtggtcattgtcaaactgtttcttctctatgtccgtaagcatgtaggaggcatggctactagtttgattcaaacacttggagaaatcattagttgttagatcttactcgcttattctttttctctattttgggatggccataaatttacttgataaaattagttctaggggtaagattttcacttttagccctccataagaagagaaggatgaatatgtttttctcctatctttttcgcattctaaagacttacttgaggaataatgagtgactatcttatttgcccacacaagtaagaagaagggattttttgcgtactcacaaaaaaaaaaaaaaaaaaaa

SEQ ID NO: 1910 - DNA, 347 bp, Oryza sativa
  Clone ID: PAT_MRT4530_101731C.1
gaaaggataaggactattctatattgtgcagggttcgttgtctccgagttctacttagagactaaggcaactcatagtataaaaggcacacccccggaagggttcggatcatcaaatcatagcgccgacacacccagcatagtttacgaagccgaaggactcaaaccaaagccaccgggagatctcgtcgaacaatctcgacaaggatctcgccgatatcggctgttaacttacgaggggcttgaaccagtataatctttgtctcttggctgcttcgatgtcgtattatgtagatcctcataccaacgtaccccagtaccctatttatccggtctacgaatattccc

SEQ ID NO: 1911 - DNA, 391 bp, Oryza sativa
  Clone ID: PAT_MRT4530_101733C.1
tttttttttttttttttttttgctttttttttttgcagttgcaatttccattaaatagtatactcagtgcttacatgtcgcaacttgcaaccgagtgcaaatttcaggttacaaggctaataaatataatcccaactcacacatactatcaccctacgcaagcctctgcactcttctccaatgttctcttggcaaacgagcgtcttcagaaactggctgtctgcagcctaaggtaacgtgaatatgtctatatgtgaaacaccagctatgccttccaaaatgttctacgtcttcttgatctattctgatggtttgcctctttgtactgagcagaagttgcggttcttctgctgcccactgaagtgccccctttgtgtgtccaagaaaactc

SEQ ID NO: 1912 - DNA, 178 bp, Oryza sativa
  Clone ID: PAT_MRT4530_101734C.1
atcagaagaaaacaatggcactttctttacatatctgcaaactttattggaagggacataaaggaggagcagcactcgctttaagtttagttatttgagagcaaattacaaggggcatacgaaaggaaaaggagaatttacatttggcctgccggtccaaaaaatggaaaagaaaatg

SEQ ID NO: 1913 - DNA, 444 bp, Oryza sativa
  Clone ID: PAT_MRT4530_101735C.1
aaacaggattcttaatatcttcagggtgctatagctagatagcaaattagcagacaccggattagttctacaaggggggaaggtggaaagaaaaaaagaggtatagatttcagtcacaagtacttgaatcgggacacaaagcagacctaacccaaggtagggggggaggacagggcacgacgaacaacacaggtacgggccagtacggactacgctaaacggggacagacaacctgaacccagtgggggggggggagagccagaggaggtgcggcccaaggccaacccaaaagcaaaggtggagggacagccaaagggaacaaacagagcagctacaacaaggaggctctgatgcgaccacaaacaagaaggaaaaaaaatcttcgctggactgcacatcggattaaaagcaatcgaggcagcatacaaaaactcgcttctctg

SEQ ID NO: 1914 - DNA, 166 bp, Oryza sativa
  unsure (1)..(166): unsure at all n locations
  Clone ID: PAT_MRT4530_101736C.1
cattgtgcgganaaagttcaatctccatctctccttatcccgttcccttcaccaaaacccccccgacaccgagcccctcctcctcganctngccgcaaatcctccngcgntnctncgtcgctagggcataancgnccggcttntcggccggcatcccgcatctccc

SEQ ID NO: 1915 - DNA, 451 bp, Oryza sativa
  Clone ID: PAT_MRT4530_101737C.1
cgcagcgaatccccccacctgaagaaaaacgagacgagattctctcgctctcttccggcgagattttcgtctttcccccctctcctctccgctcctcgtctcgtctctccgcttcccctcctctctcgattccccaccatggccggagccgccgcgacgccgccggcgatgatgcgcgccgtgcagtacgacgccagcggcgggggagccgccgggctcaaggtgagcaacgccctccgccacactgctctctctctctctgcgcttccttttctttttctgctctgctgctagtggtagtaccgtagtagtagtaattaatttcgttgaggcggagtgttcgaggcggtacactctggtcgggcgatgagttcatgccctacaacttatatccaatgctaaaatttgaatctcaaagcttaattttcgggttgattttcaggtttttatt

SEQ ID NO: 1916 - DNA, 545 bp, Oryza sativa
  Clone ID: PAT_MRT4530_101738C.1
ggccgcttttttttttttttttttcttttttttttttttttttttttttttttttttatgaactaaatataaactgtcttaatgtcttaccaccgtgccacggttgacaagtacgtacatgtctaagggcatcaagcatgacgagtagaatttacattttccagacttcactacagtttatgaacaaagttcaagcccaaaatctgtataatacagcatggatgcctctacctacatctctggtttattataaatagctgaattctttggtcttcgcaccgttccttccaacatctctggtttttgcaatttgcattgcccagattgcctactccagtttgtgaagatgtcagaagaggatatccggaaattatgcacacatcgcctttccaaaattttgtacatgacacagttttcatttgtccaacgatgggatgccatatatcagatagagataggcctgcaactctcatgcaaatgaatgctagcaaatcgtggcatgcaggtctgctagtctgctactgtttcgaagttggaacttggaa

SEQ ID NO: 1917 - DNA, 1500 bp, Oryza sativa
  Clone ID: PAT_MRT4530_101739C.1
gtggatcggcaatgtgtgtacactgtggaccgatggtcgaaagagtttatagaaggcgtgtattattttttgagtgtggccaatattaacaagcataagggttttatgtgttgtccacgcaaaaagtgaaaaaaccagaaggagtattctacatcaagaacatttcatgcccacttgtttcagtcggggttcatgcctagctataattgttggacctcacatggaaagctaggggttgcaatggaataaggtgaactagaagaagagaacatttcggactgtgcgcctcaataaggtggatttcaaaaaaatacaaagggcgaggcgaacggggcttttgaagataacgatagtgtggatgatcttggtcatatgttgcacaatgtaaaggaggactgtgaaagtgaaaaggtggtccagaaattggagcgtatgttagcagaccacaaaacgtcattatgtcctggttatgaacaggggcacaaaacgttgggcaccacgctagaattcttgcaatgaaaagtcaaaaatggtgtgagttacaaggcatttggcgagttattgaaactcgtaaagaacattattccggagggaaacagattgccctaaataacattcgaagctaagaggtagtctgccctctaggactggaagtacagaagatacacgcatgtccaaatgattgtatcctctatctccgtgaggaatacgagaacctagaagaatgcctggtttgtaaagcactacgatacaagattagaggagatgatccagccttcgaagaagagagttcctcctaaggtgatgtggtatttccctataataccacggctcaggcgcttgttcaagaacaaagcgcatgccagaatgatgcgcgggcacgcagaagaacgtcaacaagacgggatgctgagagacaccccgttgatgggttgcagtgatgaaacatcgaatgaacatttcaatacttcggagaggatgaacgaaacgtaaggttaggtttaagtaccaatggcatgtatctatttggagagatgagcagcggccatagcgcttggcctgttaccatgtgtatctacaacctcccccttggctatgcatgaagcagaagtacatcatgatgccgattattatttaatgccaagagcaacctggtaacgacattgatgtgtacctaagaccattggatgaacatctgaaactgccggggaagaaagaaggtgtttgttagcattaacgattggcctgcacctagcaacttatccgaacagtcaaacaaggggtataaggcttgcacccactgtatggataaaactgaaaatacgtatatgaaacattgtaggcaggttgtgtacatgggccatcatcgattccttatttcaagccacccattccggaagaaaggcaagcatttcgaacagaatgaagaccgccgtactaagcctaaacatcgcaacggaaaagtcttgtttactctggtgaaagatctagaagccatgt

SEQ ID NO: 1918 - DNA, 353 bp, Oryza sativa
  Clone ID: PAT_MRT4530_10173C.1
aggacgagccgtagatcccaagccttagcaatattttcaaaaataaaaatcctttgttatttgtgaaaactgtctagtctctctctgtcttgctgcttcatttatcgccaaaatctgacctttgaaaatgttgcttttctttttgtttttgtttgtagatggccggcagcgtcacccgtcgtggtttggacatgactggcttcgtcttggagttgcggggcatgtgcgtggccctagggtatccacacggagtggactactgtcacgtcctgataaattcatcccgaaataaaaatcattttctaaaaggaataatagaattaattaaaatccgaaaagaaattggcaaacac

SEQ ID NO: 1919 - DNA, 249 bp, Oryza sativa
  Clone ID: PAT_MRT4530_101740C.1
ggccgaaatgaccgaaggaggtattttaatgtaattaagataggaagaaaatgttccaagaaaaattttacttcgaacagttggttgtaagaaaagttttacatcaacagttggttggcgaggaaggatgggccccaaaacacaccccccgaaccatgtgccccccccccaaacacaccctataaagagggaagccaaaccccgaatcacccatcgttatggaagacccacctgctttattttttttgg

SEQ ID NO: 1920 - DNA, 183 bp, Oryza sativa
  Clone ID: PAT_MRT4530_101741C.1
cgcagcagccgcctccactcccccacccccagagaaccctaatccacaccctctcaagccagccatgagcggagcgcggcggcctagcgtggcatcttagcgcggcgggttcggccgcggctttaggcgctgtgtacattcttaacccgaagaggacattgttcaggatctttgttttaggat

SEQ ID NO: 1921 - DNA, 525 bp, Oryza sativa
  unsure (1)..(525): unsure at all n locations
  Clone ID: PAT_MRT4530_101742C.1
atgggccgatttcctcccggcccatctgccccctgggggggggcntccgccccccgcggcggctcctgcctttggtggctcggcggcctcgccggcgcctcccgtcgtgtcgtcgtgccctcgcgccgtcgcggcgccgccgcgctgccgcgccgtccgctcgcgcccgccgctcgccccgccctcgtggtcgcgcctcccggggctctgttccgcggcggcgcccgcgtgccccgccggtcggcgttctctccgccgtcctctgccccgcccgtgtcggtccggtcccccttctcccctcccgccctgcgcctttgcgcgcgccctccggctcttcgcgtggtggttcgcctcgcccgggcgtcctgcgcccgggcgcccggcgccgccgcttccgcccgtctcgcccccgctgccctcgtcgcgtcccgccacctcgcgccgtccctttaccctgcgccatcccgtctccccgtgacgccatgccttgtcgtccttacgtcgcgtccatatcgtcatgagtag

SEQ ID NO: 1922 - DNA, 1044 bp, Oryza sativa
  Clone ID: PAT_MRT4530_101743C.1
atggcgcgctgcgggagcgccatcgccgccgtcgcggcgctgctcgtcctgctcggcgggcacgcggccgcgcgcatccgggtggagcactccgggatggtgatccggcggccgtcgtcgtccatcccgagcttccgggaggcccccgcgttccgcaacggcgaggagtgcggcggcggggggagggtggacgtggccatgacgctggacgccaactacctccggggcaccatggccggcgtgctgtccatcctgcagcacacggcgtgcccggagagcgtgtcgttccacttcctcgcggccgggatggacgccgacctcgcggcggcggtgcgcgccacgttcccgtacctggacctccgcgtgtaccgcttcgacccgtcccgcgtccgcggccgcatctcccgctccatccgccacgcgctcgaccagccgctcaactacgcgcgcatctacctcgccgacacgctcccgcccgacgtgcgccgcgtcatctacctcgactccgacgtggtggtcgtcgacgacatccgcgcgctggcgtccgtcgacctcggcggccacgtcgtcggcgcgcccgagtactgccacgccaacttcaccaactacttcaccgacgcgttctggtcggacccggcgctcaacggcacgttcgccggccgccgcccgtgctacttcaacaccggcgtcatggtcatggacgtcggcaagtggcgcgccggcggctacacccgccgcgtcgagcggtggatggaggtgcagaagcagacgcggatctaccacctcggctcgctgccgccgttcctcctcgttctcgccggtgacatccaggccgtcgaccaccgctggaaccagcacggcctcggcggcgacaacgtcaaggggcggtgccgtggcctccacccggggcccatcagcctcctccattggagcggcaaggggaagccatggatccggctcgacgcgcggcgcccgtgcgccgtcgactacctctgggcgccgtacgacctcttccggccatcgtcgccggtgctcgaggagtga

SEQ ID NO: 1923 - DNA, 726 bp, Oryza sativa
  Clone ID: PAT_MRT4530_101744C.1
atgggtgtcacagcgtcattggcactagtaaaaaaacatgtgcggctttcagccagttccccctctttttcaactacactaaagccgccacaagtccataacggtgccgagacaaagcagaaaagggttatcattgctgattttgccacttccgacaagcagcttcgacttcgtcccaacacgccaccacacaacctcgccgtggaagccctctgcaaaacaccttttaaccataccatcgtcgtcacgtttttcgtcatcgttgttagatctgcatcctctcctgtagcccgcgctgcatcaacctccctggcttctctgactccgatgccgacgttgaaagctcttcaactcattgaactatttttgggagttatttttgaaaatagcccctcccaggacagagagtcccacccggaagttttggcactcttgtccggaacttctgggccactagctgtttctagcctctcccaagatccttttgcttcctccacccaaatcttgagccattatagtgagattgagagcgttgatgagggtgttggagtgatttggagaaggattgaaggaaagcataccccccctctaggttacatctatgctctttcaggcgccgaccacctgcagccatcgcccatcccctccacccccttctttatcattggatatgctcacgccgcccatcacctctactggcgacctcctgacagtaaggatgagtag

SEQ ID NO: 1924 - DNA, 753 bp, Oryza sativa
  Clone ID: PAT_MRT4530_101745C.1
atgagcgctgcaatccgcgccgaccgcccccgcctaccgcctgtccctgcgccgctggggctcaccatcgacgcgccgagggggttgctgctcgtcgtgtccgccgtggacgtggccgcccacaactccagctccctcccggagttcgctgccaccgcctctgcgtcctgcgccgctgcctctgcgtcccgccgtgctacccaccgcgcgccgaacgcctaccgccgctcgacctgggcgtacctccagtggttaagccgcagaaaagaatttggcaaaattttgtgccaaaatgaggatcattatgttagattgttttcctctcaaaagccatgtgcacaatcagcgaaggacacaattctaaggatctatgttgcccaccggaaaacattaaggggcgcaccctggggcgatggagggaggtgccacgtcggcgatttgctacagtcctacagtgctcggggtggtcgttttgcaaaaataaccctccggtttgctggtaattcgaagatgcaactaggaacaattttcatcagtatgctcaagatccaaatgaccgaaatactggacagatgtaccatggatccaattatcatcagtgctacgatgtatgactacgtggttactgctgatgatgttgacactcttttggctgtagactgcacgcctatggatgataatacctgtcagggtgaattggttacagagtatactaacaatgggagcaagataacttgcggtttcactgattaa

SEQ ID NO: 1925 - DNA, 474 bp, Oryza sativa
  Clone ID: PAT_MRT4530_101746C.1
atgggcgccgacccccccgtgctcccggaggggctggaggagaggacgcccgcgcgtgcccgcgtcgtgcgcggctgggcgccgcaggtggagatcctccggcacgccgccgtgggcgcgttcctgacgcactgcggctggaactcgacgctcgagggcgtcgccgccggggtgccgctcctcgcctggccgatgaaggccgaccagttcatcgacgcgcggctcgtggtcgacctgcgcggcgccgcggtgcgcgtcgcggagggcgcggccgccgtgcccgacgcggcgacgctggcgcgcgcgctcgcggacgccgtggacggggcgaagtgcggcgacgtgagggccaaggccgccgcgctcgccgcggccgccgcggcggcggtggaggaaggtggcagctcgcgcgtcgccttcgagagcatggcgaaggagctggaaactgcgtgcatgtctccttcgttcggttga

SEQ ID NO: 1926 - DNA, 207 bp, Oryza sativa
  Clone ID: PAT_MRT4530_101747C.1
agaggcacacccgtaatgcctattttaatatacaatcgacacgcggcactatcaccataactgcataatattgggccaaggaatacagaggacctagactgccgcatgaaactaccactaagactgtcgcatcaccctggtgagtagccggtcaagataataggctattgtgcacaaaccaatcacgttaattgtgccaaactatgc

SEQ ID NO: 1927 - DNA, 246 bp, Oryza sativa
  Clone ID: PAT_MRT4530_101748C.1
atggcaagatggtggccggcatgggggagagagaagagagagagatggagcttctgtttgacgaagaaggatggggctcttgccggctatttaaagggagagaaggcggttcgcggaggaggaggaaaaggaggacacggtgacggcagtggcgtgcaaggaagggcgacggcggccggctttagtctcttagggccacaagagaaaggagggccgaaagagagaaaagaagatctcggcccataa

SEQ ID NO: 1928 - DNA, 510 bp, Oryza sativa
  unsure (1)..(510): unsure at all n locations
  Clone ID: PAT_MRT4530_101749C.1
tcgcgatctagaacccagcgtccgttttttttttttttttttttttttttttttttttttttttttttttttttttttttttttttttttttttttttttttttttttttttttttttttttttttttttttttttttttttttttttttttttttttttggggggngggggggggggtggggggtttggtgggtattggtgttttcggggtggggtgggtatccgttttccttttttttttttttattatcctttggcctaagggtaaaacatggggttccttttggggaagggaaattggtttaaaggtcaaaagccaaaagacccctgtccggttagaaaaaatgtaggggggggtgggttaatgaataagccaaacttcatgggggggggggtggcgtcttttttcctttggggaaagttaattttccctttcattatgaaaaaagaaaaacgcccttgggggggggggggtttttttgttccacagggcggtttttttttttttt

SEQ ID NO: 1929 - DNA, 620 bp, Oryza sativa
  Clone ID: PAT_MRT4530_10174C.1
atcctggtgcgactgcatggcaggaggcttggcatcatcagcaagccattagccatggataaggcaggcggcagcggcgaggcgccgccggagccggagccggcggcggcggcgacggtgaagtcaatcgtcgtgtaccccatcaaatcatgcaggggcatctccgtgccccaggccgccatcacctccaccgggttgaggtgggatcgaccgtggctggtgatgaactccgcagggagagccttcacccagcgagtggagcccaagctcgcgctgattgaggtggagatgccgcaagaggcgttcactgagtggcagccaacgcctgattctcacatggttatcagagcacccggattggatccactgaagatccctcttggcgcgaaacgtgccacagttgatgatgtctctatctgggagtggtctggttctgcgtatgatgaaggagatgaggcggccgaatggttttccagttactttgggaagccgactcgactcgtacggtttaatgaagcatcagaaattagagagaccaatcctgactatgctcaaaggtacaaagttctggttgctgacgacttcccattcctgctggcctcccagggctcagtggatgc

SEQ ID NO: 1930 - DNA, 922 bp, Oryza sativa
  Clone ID: PAT_MRT4530_101750C.1
tttttttttttttttttttactgggtgttacaaatattaaacaaacaaggctataaaactcgacattcttgcccaggctggacggcaatccctttgcccaagcttgtttatacacccatcagtttgaacattagtcaagttgtacagtatatatcagaaacagtaatacagcatgtcactccactacctttgcatgattacatcactacccatcaaatcagtggggggcttttttaaaatctacttaaaaagttgttcacatgctaaatattaggcttgatttataagcttctaattacggaaaccatgcaagaacagataaaactttgaccgggcaaccatacggagtcagtcccctccagcctaccgccggccgccgccgccgcccatcatcttcttgaactcgtcgaagttgacgcagccatcgccgtcggcgtcgacggaccggatcatccgggagcagtcggcgacggagcacttgtcgccgagctggcggagcacgcggtggagctcccgcgccgagatcttcccgttgctgtcggcgtcgtacatccggaacgcctccctcagctccgcctccgacgcggcctcctggtccttggcgtcgccgcccttgccgccgtgcgccggcgtggggccgcagtggaaggcggcgaactcggagaggtcgacgaagccgtcgcggtcggagtccatctcgtccatcatgcgccgcacctcgccgggaccgaggggcgcccccagtgcccgcagcacggacgccagctcctccgccgagatcttcccgtcgccgttcgcgtcgtaccgccggaacacctgctccagctccgccatcggcatccccggcccccctcctcctcctcctccgccgccctccaccatcgccggccccggcgacgccaccccaccccctcctcctcgc

SEQ ID NO: 1931 - DNA, 2106 bp, Oryza sativa
  Clone ID: PAT_MRT4530_101751C.1
atggcgatgatggccatggatacgccaccgaccaagggcatggcggtggggatggaggtggagctcccgttcccggacgacgaggaggacgagagcatggtcggcggcggcgtgagggtgggcaaagagaaggtgaaggagatggtgatgagcggcggcggcggcgggtgggaggccgtcggaatctgcggcatgggcggcagcggcaagaccacgctcgccatggaatctttcaaggatcacaaaatccgaggctacttcagcgatagagtcttctttgagacgatctcgcagtccgcaaatctggacactatcaagatgaagctatgggagcagatcagtggaaaccttgtgctcggtgcgtacaaccagatcccagaatggcaactcaagttggggccaagggacaaaggacctgttcttgttatccttgatgatgtctggtctctctcacagctagaggagctcatcttcaagttccctgggtgcaagacacttgtagtatcaaggttcaagttcccctcgttggtcacccggacttacgaaatggagttgctcgatgaggaggcggctctttctgtcttctgtcgtgctgcctttgatcaggagtccgttcctcggaccgctgacaagaaactggttcggcaggttgctgcagagtgcagaggacttcctctagcactgaaggttatcggtgcgtcgttgcgggatcagcctcctaagatatggttgagtgcgaagaaccggttgtcgcgaggagagactatatctgactctcatgagaccaaactcctggagaggatggccgcaagcatcgagtgcttgtcagggaaggttagagaatgtttccttgatctgggttgctttccggaggataagaagatcccactggatgtgttgatcaatatatggatggagattcatgatcttgatgagccggatgccttcgccatcttggttgagctatcaaacaagaatcttctcaccctagttaatgatgcacagaacaaagccggcgatttgtacagcagctaccatgacttctcggttacacaacatgatgtattgagggatctagcgcttcacatgagtggtcgtgatgctctgaacaaccggagacggctggtgatgccaagaagagaagaatcactaccgaaggattggcagaggaataaggacactccgttcgaagctcagatagtttccattcatacaggtgagatgaaagaatctgactggttccagatgagcttccccaaggccgaagtgcttatcctcaacttcgcgtcaagtgtatactatctcccaccattcattgcaaccatgcagaacttgaaagccctggtgctgatcaactatggcaccatcagtgcaacccttgataacctatccgccttcaccacgctcagtgacctgaggagcctttggcttgagaagatcacacttccaccgctaccaaaaaccacaatcccactgaagaacctgcgcaagatatcccttgtcctctgtgagctgaccaacagtctgagaggatcaaaggtggatctctcgatgacattcccgcgcctatccaacctcaccattgaccactgcatagacctgaaggagctaccatctagcatatgtgaaatcagttccctggagagcatctccatctcaaactgccatgacctcacagagcttccatatgagctgggcaagctgcattgcctgagcatcctaagggtatacgcctgcccggctctgtggcggctcccgccttcggtatgcagcctgaagaggctgaaatacctcgacatttcgcagtgtgtcaacctgacggacctccctgaggagctcggtcacctgacaagcctggagaagatcgacatgcgagaatgctcgcgactgaggagcctcccgaggtcgtcctcatcgctcaagtccctcgggcacgtcgtgtgcgacgaggagacggcgttgctgtggagggaagctgagcaggtcatcccagacctccgggttcaggatggaggaacaatccactctgcaattttgacatgttcagtgttcatgcaactgactctccagcagcagccaaagcttgctgagaaaatagaaccatag

SEQ ID NO: 1932 - DNA, 3972 bp, Oryza sativa
  Clone ID: PAT_MRT4530_101752C.1
atggagagggcggcggcggggccgctggggatggagatgccgataatgcacgacggtgacaggtacgagctggtgaaggagatcgggtcggggaacttcggcgtcgcccgcctcatgcgcaaccgcgcctccggcgacctcgtcgccgtcaagtacatcgaccgcggcgagaagattgacgagaacgtgcagagggagatcatcaaccacaggtcgctgcgccaccccaacatcatccgattcaaggaggttattctgacgccgacgcatctcgcgatcgtcatggagtacgcctccggcggcgagctcttcgagcgcatctgcagcgccggccgcttcagcgaggacgaggctcgtttcttcttccagcagctgatatctggagttagctactgccattccatgcaagtatgccatcgtgacttaaagctggagaacactctgctagatggaagtactgctcctcgcttgaagatatgtgactttggttactcgaagtcatcggttcttcattcacaaccaaaatcaacagttggaactccagcttatattgctccagaagttttgctcaagaaagaatacgatggaaagattgccgatgtttggtcatgcggtgtgacgctctacgtgatgttggttggcgcataccctttcgaggatcctgaagatcccaagaacttcagaaagacaattcagaaaatattgggtgttcagtactcaattccagactatgtccacatatctccggagtgccgcgatctcattacgaggatttttgttggcaacccagctagtaggatcaccatgcctgagataaagaaccacccatggttcatgaagaacatcccggctgacctcatggatgatggcatggttagcaatcagtacgaggagcctgaccagccgatgcagaatatgaacgagatcatgcagatactggcagaagcaacaattccagcagcaggcaccagtggaatcaaccagttcttgactgacagccttgacctcgacgacgacatggaggatatggactcggaccttgaccttgacattgagagcagcggagagatcgtatatgccatgtaatcatctcaacatttgcaatgaaactgcactgaaaatcagcttgtttcagagcaggtagagctccagaagagatctgtgttcaggctactaggaagcaggctctgctgcctattagttcttgagtctgaatttctgatgaaccatactgcagctgagttgcagcagattgtgtagtatgtaattatgtatgttgtgccaaaaatttagcaccggatgatatcatgcaagactgtttcttgggaacactgagaaatgagaagcattgtatggaacctagttctgtattgtattaaacagagagacagaagagatgtattggttaatgtatttgctatgtgtatgtaaatctgctttgtgccaagaagaaaaaatctctattaattctaaaaaaaaaaaaccccagcctgcttcccccgcgcctggagagtcagttgcttgttctctgttcttgtcaaaattgcagagtggattgttcctccatcctgtattagacagggactatggttctattttctcagcaagctttggctgctgctggagagtcagttgcatgaacactgaacatgtcaaaattgcagagtggattgttcctccatcctgaacccggaggtctgggatgacctgctcagcttccctccacagcaacgccgtctcctcgtcgcacacgacgtgcccgagggacttgagcgatgaggacgacctcgggaggctcctcagtcgcgagcattctcgcatgtcgatcttctccaggcttgtcaggtgaccgagctcctcagggaggtccgtcaggttgacacactgcgaaatgtcgaggtatttcagcctcttcaggctgcataccgaaggcgggagccgccacagagccgggcaggcgtatacccttaggatgctcaggcaatgcagcttgcccagctcatatggaagctctgtgaggtcatggcagtttgagatggagatgctctccagggaactgatttcacatatgctagatggtagctccttcaggtctatgcagtggtcaatggtgaggttggataggcgcgggaatgtcatcgagagatccacctttgatcctctcagactgttggtcagctcacagaggacaagggatatcttgcgcaggttcttcagtgggattgtggtttttggtagcggtggaagtgtgatcttctcaagccaaaggctcctcaggtcactgagcgtggtgaaggcggataggttatcaagggttgcactgatggtgccatagttgatcagcaccagggctttcaagttctgcatggttgcaatgaatggtgggagatagtatacacttgacgcgaagttgaggataagcacttcggccttggggaagctcatctggaaccagtcagattctttcatctcacctgtatgaatggaaactatctgagcttcgaacggagtgtccttattcctctgccaatccttcggtagtgattcttctcttcttggcatcaccagccgtctccggttgttcagagcatcacgaccactcatgtgaagcgctagatccctcaatacatcatgttgtgtaaccgagaagtcatggtagctgctgtacaaatcgccggctttgttctgtgcatcattaactagggtgagaagattcttgtttgatagctcaaccaagatggcgaaggcatccggctcatcaagatcatgaatctccatccatatattgatcaacacatccagtgggatcttcttatcctccggaaagcaacccagatcaaggaaacattctctaaccttccctgacaagcactcgatgcttgcggccatcctctccaggagtttggtctcatgagagtcagatatagtctctcctcgcgacaaccggttcttcgcactcaaccatatcttaggaggctgatcccgcaacgacgcaccgataaccttcagtgctagaggaagtcctctgcactctgcagcaacctgccgaaccagtttcttgtcagcggtccgaggaacggactcctgatcaaaggcagcacgacagaagacagaaagagccgcctcctcatcgagcaactccatttcgtaagtccgggtgaccaacgaggggaacttgaaccttgatactacaagtgtcttgcacccagggaacttgaagatgagctcctctagctgtgagagagaccagacatcatcaaggataacaagaacaggtcctttgtcccttggccccaacttgagttgccattctgggatctggttgtacgcaccgagcacaaggtttccactgatctgctcccatagcttcatcttgatagtgtccagatttgcggactgcgagatcgtctcaaagaagactctatcgctgaagtagcagatgatcataccggggtttgtattaaaccatgtcaatgaacactcggattttgtgatccttgaagatttccatggcgagcgtgggtcttgccgctgccgcccatgccgcagattccgacgcgcctcccacccgccgccgccgccgctcatcaccatctccttcaccttctctttgcccaccctcacgccgccgccgaccatgctctcgtcctcctcgtcgtccgggaacgggagctccacctccatccccaccgccatgcccttggtcggtggcgtatccatggccatcatcgccatggccttgggcggcggaggtggtggggggagagcgaaggggagggagatggcggggggtggaagggcggtggccgcggcctgctgctgctgctgcgcggcggcgacctcctcgacgcggcgctcgaggcggccgatgcgggcgtcggcctcgtcgcggaggcggcggacgcgttcgagcacgtgggcgggggcgtggcgggagagccagcgcgcgatggcggtgtcggcggcctccat

SEQ ID NO: 1933 - DNA, 266 bp, Oryza sativa
  Clone ID: PAT_MRT4530_101753C.1
caaactcgatctatcggtttatgcttaactccaaaagcgtggcttggattacagaacatatcccaccaacgcgaacgatcagagattcaaagacatgacggggacgcagcaactgtaagcggcaccattttttttgttaccttttcgagggacatcggctacaccttgatgaccccaaaccgagacctctggggacctgtagagatcctatttgcccagatttggggctaaacctatgacaacgccctgccaaccttgctacacac

SEQ ID NO: 1934 - DNA, 388 bp, Oryza sativa
  unsure (1)..(388): unsure at all n locations
  Clone ID: PAT_MRT4530_101754C.1
ccgaaaaggccatgaggtgttccagatgtgccatatacaaagctggttgttttaaattttgtnccttctgtcttcttagcatgttcatgagcctatgtctgtattgtatgggcattgagctgggtttacatgagctgtacaggaaaaggtactgtgtaacgtcaagaggaaagcaacaatattgatgtacagtttggtttgtggtcatgatttttagcctatagttttgttgctctaccatcatttatagccagggtgtaatctcaagttaatttttttttgaaagttttgtacatgttacttgtatcaatttgtaaagcttttttgcacccatatcaatgtgtcaattgacaccgaagatcatttgtttacgaaaaaaaaaaaaaaa

SEQ ID NO: 1935 - DNA, 189 bp, Oryza sativa
  Clone ID: PAT_MRT4530_101755C.1
atgggggccgtcaggggtggagctagtataatcagagggtgcccaggaacccgctccgtcccagggccgtgccaggagggcagccgctattatcaacgacaggcgaatctgcgtgccacggcgtcgagcaccgaggcggtcgtggttgatctatccggccgacatcgtctggtgatcctagatgtgtag

SEQ ID NO: 1936 - DNA, 317 bp, Oryza sativa
  unsure (1)..(317): unsure at all n locations
  Clone ID: PAT_MRT4530_101756C.1
gctgcctgagcactactatagcgaggctgatctagtcgactctaactcctaccccatgaagactggatccttctacggggctgcgccatccaactgaataaacgatctcgacctattcgcatgctatagatgcatcataagccgcctgcataggacgaggagggcacggatcacaccaagcaggtaacctgcctgcgccggaaggttgcaccgactctnnnnncannanctttacacccaacggcgaggagcgacgaccgccgactgctctacaccatctaagcaggcccgcttgacgcttgctattaactattttt

SEQ ID NO: 1937 - DNA, 465 bp, Oryza sativa
  Clone ID: PAT_MRT4530_101757C.1
ggggacaaagggggtataaaggagttaccccaccctaaaaagggtattaaaccacggcccccgccccaaaaaaaaaaaaccgggctaaaaaaaaaaaaaccttttgtctatgtatctggaccccccgttgcccaaaaaaaaaacggaaaaaacttaaattttgggggggggggaaaaaaaattttacccgaggcccccaaaatgatttgggggtcaaacaagcaagcggaaatctaccagcagcagcaactttagttcccaagaaacaagtgaagcgccggcgcctttgtaatcccgggcgggacctttttgaaaaaaaagaggaaccccaccgccttgggcgcctccacgggcaaattttccgccgcctcccacgcctttttttccgggcccaatttttttggaaccaacttgttgggcttggacccccagttggagtcctttaactgcagcgcgtccatgggg

SEQ ID NO: 1938 - DNA, 1721 bp, Oryza sativa
  unsure (1)..(1721): unsure at all n locations
  Clone ID: PAT_MRT4530_101758C.1
gctcttgattggtggtaggttcttggtgactgaaggtctaggaatccatggaagacgcaatgtcactcgagaagacaaccaacaaagataagatgctccgcagaagatattctcttaacctgccagagcatttgcctgagcatcacgtgattacaagtgcagaacaaagtgagaaaaccatatcaaagtctattgcagacttagtttgggagatagcagcccttgaggaggaagttgttcgcaaggaactgcatttgctttccctctacagggcagcatttgatcaacacctaggtgtatcccctcgtgtttctacccaggtggatcaagaaatacaccatcagaaaagcagaaagaaagctgatgaaggtgccctccgattgagaaatatcaaggagtcagcatcctacaacttgccaacagtatcaacagtttcagattctaaacatgggctgtcgagatcatcttcaggacattctagccttgcaaatttcttgagtgcttcaatcgctgaatatgtgccaaagatctcttgcaaactttcggaggacatcgtaagatgcatttctgcagtatactgcaaacttgcaagccagccatcacaaaatttggcggattttgagactttatcaactccttcattctcctcttcatcaagtacattttctttaaagcaccgtgttgatagttggagtccccgatgccattacaatgtcaacacaagctctgacaaatatgattcattgaatgagaaaagtgaacaatacaatgggatgataatatgcccaaggatatatatggatgcagaaaagtttgaatatgcctctaaaatgctagagactgtcagatcgctgataaaacgacttgagaaaattgacccaacaaaaatggcacatgaagagcagctctgtttttggatcaacatccacaacgctttggtgatgcatgcttttatggcttatggacttcaggagaaacgcatgaaaaacacagacatgattctgaaggctgcatataatgtgggtgggctttcagtaaacgcccaaattatccagaactcaattattggatgccaatcccatcgcacttcagtgtgggtacggactctatttactccactgaaaaaatcggcatcagggagctccatacatccatatgctcttcatcctccagagccacttgctcattttgctctttccactggagcaatttcagatccacctgtgaggctgtacactgccaagaaagtgaatcatcaactggatcaagccaggactgagttcattcaagctagtgtcatagtcagaaagcagacaatcttcctacctaaagttctccatcattatgcgaaggatgctgctctcgagttgcctgacttggttgagatggcatgtgagatcatgcctgaagctcaacaaaaggaaatcagacaatgtcttcggagaagaatagacaagtgtgttgagtggatccccttcaaatcatctttcagatatactatacataggagtttggctgagtaggcnctgttttcccactttccccaattgtgcttgtaagtaatgaacaaataacaaatgattggtgtatatgtgtagtgtaaataggtgattgtgatagcttccaaggataggaatgctgtagtaatgtcttccccttactgcttntagtggtacaacncnttttgggcatttcanaaatanntaaaaaaaaaaaaaaaa

SEQ ID NO: 1939 - DNA, 349 bp, Oryza sativa
  unsure (1)..(349): unsure at all n locations
  Clone ID: PAT_MRT4530_101759C.1
gattcgggcccgagtcctctcctcgagctcgagatctcttcctcctcctcgatcgcgtccatccatgggcggcgggccaanaaaggaaaaggangaagaagaagaangcntctaanctccacctgaaaaccggcggggaacaaggtgttctccaactgctntccagggaaaancgccnccccggcnccnnctttcagggtttactacggnttccccnccccgggcnccgtgccctncctttggnattcccaaccgggnacccccaaaaaccccatttccaannccttgttgccgccgttcacccgccgccntcntattnaacccccgggaaggtttcccccngcggcgg

SEQ ID NO: 1940 - DNA, 525 bp, Oryza sativa
  unsure (1)..(525): unsure at all n locations
  Clone ID: PAT_MRT4530_10175C.1
cagtttcacactaaccatcctcaactacgctactggcgacccctacgcctttctctcggtaatctactctaccttttgtgttcttctcctactgccaatggctctactggcccagcctactttggtccgaaccgataaaatccactggnacacccctcggcaaggacggttttacgggacgtgtcgctttgactacgnctacaagnaatttgaacccacccttcggacgacgtgcgggtcacgaaagccgggggattacacgacgtccctttgaatgcgaangaaatgaacaaattccacgtgcaccacggtacaatttgtcaatccgacgatgtcattgagcctcaaggccttctggatacctcgatacagcaatactcctggcatggtctacatcatccaagggagaggttctatgggattaactttccccggctgcccagcaacctaccaacaacaattccaacaattcttgcctgaaggccaaagccagagccaaaaatttagggatgagcaccaaaaaaa

SEQ ID NO: 1941 - DNA, 392 bp, Oryza sativa
  Clone ID: PAT_MRT4530_101760C.1
tttatctgaggccgttggcttggaaatgagaggaatgggccaagatactgcatatcatcctggtctttatttaacagctgctcaaagagaggcagttgaggcactgattcaagaactcccgaagttcagactgaaagctgttcctacagactgcagtgagtgtccaatctgccttgaagaattccatgttggcaacgaggtccgtgggctcccgtgcgcgcacaatttccatgtggagtgcatcgaccagtggctccggctgaacgtcaagtgcccccgttgccggtgctccgtcttccccaacctcgacctgagcgcgctcaacaacctccggccatcctccgagccggaccggtcgtcggccagcgaggtgacagcggcgacgatggcgc

SEQ ID NO: 1942 - DNA, 1792 bp, Oryza sativa
  unsure (1)..(1792): unsure at all n locations
  Clone ID: PAT_MRT4530_101761C.1
ttttgaccttttttttttttttttttttttgaaaagggaaacaaaagcttgcaataatgatctcctttacataatatttatacactctgcacacaggagataagatcaaagaaaaaaaaaacatgctgctgcatagcttcgatcctccccttccccacacatataactatcagtctacatcacgccgtccaccgggcgcttcagcgatccggcagctgatgcccaccgtcaaccactatgctaggcagctcgctctccacgccgccggtggtcgccggcgcggtcaccgcggcggccacatgagaagcgccgttctcggcgctcgccatgtcgtcgccgccgccgtgccgaaccaccacctgccgcagcagcagcccctgcagccgcagcaggtagctctgcccagccggctgcgacgacctcacgtaccgcgccatcgtcgccgctgtcacctcgctggccgacggccggtccggctcggaggatggccggaggttgttgagcgcgctcaggtcgaggttggggaagacggagcaccggcaacgggggcacttgacattcagccggagccactggtcgatgcactccacatggaaattgtgcgcgcacgggagcccacggacctcgttgccaacatggaattcctccaggcagattggacactcactgcagtctgtaggaacagctttcagtctgaacttcgggagttcttgaatcagtgcctcaactgcctctctctgcagaaggaggaccaatttaaaatcattctgctcaatgacactggatttcagtgttactttgctccttaatacaaatccagaagtcttcagagacttctttgcatctctgagatcgctagcaaataaatacatggaaattttgtctagttgggcagctgttaaataaagaccaggatgatatgcagtatcttggcccattcctctcatttccaagccaacggcctcaaatgcccaatcaggcacacggatcatgtcaaccaaaaccccatattcagagactggtattccctgttgtgccctctgctggagagcatgccttcggcttagccactttccaacagccacacacgcaatacaggcgagaccacagtagctgaaaagcagccatataaggaagccccatttttgtccttcctcgggtaaatggaaatgtcgaagatgaccaaattttacaaatagacatgtgtagacattgtcaagtgctaatcccatgccggcggcaaggccattatcgacgaacatgagaaggcggaagatgaagacggtggtgtagtcaaccacgatccatatgtgcaacgggtgggcgcagagacgatacctcttccagttgatggagaccatgattctgaaaccaatcaagcaaagcaacagatgaatagattcttcaaagcatattacagccatagcggggaaggggggagtagagaataaacttagtaccacttgaaatcgaccccccgcatcgccatggcctgctagctagatctggccggaggagcgcggcagcatccacgcccccgcactccgctcacttcagtgagcccctcacttcaactccagctagggtttctcgcgaggagagagagagagagagcggcgtcgcactcggcggcggggcggggcgacgcgaggaggagggagtacggcgtccccctcccggcgtcgacgcgagtagggcccccgcgcggcggcggcggcggcgccgggaaggtcgcgagcggcgaacgcgccggagagaggnggaggaggcggcgaacgaagaagctttcagc

SEQ ID NO: 1943 - DNA, 434 bp, Oryza sativa
  Clone ID: PAT_MRT4530_101762C.1
gtgggatccacgtgggcctcacatgtcatcctcaatcccgagtgggcggcgagctccacgctgacggcgtccggagcgaggccgccaccaccgtcgaggcggagagggcgtcagcgagaggagatcacggcggcgtcggagcagctagcaaggaggtcggtgtagacgtggtcgaaccgtcgaacccgaggagcgcctggagcatgcatcgcctgccgaggcgagcagccgcgccgcctcggcgtccgacagcgagcggatacaggttggcggcgcgcgacatagcgttggccacctcgaacgacaggatgtcgaccttcccgtcatccaccccctctgccgccgccgccgccgcgccgcccttgccgctactcgtcaccggcttcaccttcctagatgacgacgtcgccatggacaacaccttgtgcaccagc

SEQ ID NO: 1944 - DNA, 271 bp, Oryza sativa
  unsure (1)..(271): unsure at all n locations
  Clone ID: PAT_MRT4530_101763C.1
gaaagtacttagaaatgcattttatttttactanttgatccataacaaattaggtgaaacagctgaacatacattgatgataaatcacacgacggatgactagccataggatgagaggatacaaagaccaagaaattaacaccacatgctgattttgtgggtgacaacaacatgaagataccggactttgagccatggagtgatcaagtgcaacactagctctctagatcttcatctagcgcacgcactggtcgaaagatgggcagatctt

SEQ ID NO: 1945 - DNA, 2189 bp, Oryza sativa
  Clone ID: PAT_MRT4530_101764C.1
atggcgaggctgctcggagtctccctcctcgtcgcggggctcggctgcgcgctgctcgtcgcgccctcggaatcagctgcagatgacggtatcaattgcccttcccatgtgtatttatctgcgcttcttgctttcaagaaggccattttcgaggaccctctcgccaagctgtcggactggaactccaaggatgagaatccttgcggctggacaggggtggggtgctcgccgttcgacagccgcgtggtgactctggaattggcaaattcatcgctcaaaggattcctggcactagagattgaatccctgagttctttacaaaaactcatattggatcacaatacactcatgggtccaataccaaaaggaattggcaagctaagaaatctaattatgttgaacctcagcaccaatcaactcgatgggcccattcccattgagattggtgacatgccaaaaatctcaaaaatagaccttcgtgcgaatcggttggatggtgctatcccccctgagattggtaatttgacgagcctcactgagctacaattgagcaataatagccttacagggactattcctggaagtaatgattcaagcatggtatccaccaacagagacggtcaaataggattgtgccgattaactcagctaactgatatggacctctcttataactatttggctggagatgttcctacatgcttcatgcaaatccgaagattaagcttggtaggaaattgtttcgagaacaatgacacaacgaatcgtcctgacaatcaatgtgaaaacagccagaaaggaaatgaaagcagccgtgttgatggaaaccagcagaaaagctttcaacaaccactttggcttcttattctagaagtcattacagcaatttcattgcttactgtgttaacactatgtactatagctggtctcagaagatgcaaagctagatcctccagaaacagtggtacatggacaagggctataagctggaaggaaaatactgtaatttcgattgatgatgacttgctggcgaatgtgccaaaaataagtcggcaagagcttgcagaagcctgtgaagacttcagcaatatcattggatctactcatgacacggtggtgtacaaaggaactatgaaggatggcagtgaaattgctgttgtgtcactatcagcttcagtacattactggacgagttacgttgagctgtacttccagaaggaggcaagaagaactctgcatcttgtggtagaaatggccagattgagtcatgaaaatgttgcgaagatggtgggatacagcaaggagtccgatccattttcgagaatgctagtctttcagtacccaccaaatgggacactctatgagcatcttcatgatggagaaggatatcagctatcttggcccaggcggatgaaaatagcactcagcattgctcgcgccctcagatacctgcacactgagatgcagcctccatttgcagttgctgcactgacatcaagttcagtttatctaactgaagatttctccccaaagataattgattttgagagatggagagctctcctgacaaaaccagggctcagctctggcagcatagtgaacgggtcattcaacaacatcatagactcgcggcacaggcgtttcatggacatccaggccaacacgtttgctttcggggtgattctgctggagctgataagtggaagagccccagtttccaaagatacaggagatcttgtggactgggcaaggaagcacttggaccagaccgaagaattcatcaagctggtcgacccgaagctgatgaacgccaaccatgagaacctgggcatcgtctgcaacgtggtgaacctctgcatcgacgccgagccgtgccggagaccgtcgatgaacatgatcaccgccattctggaggaaggcatcgacacgtcgccggcgaccgtccttcgggactcctccctggcatgggcggaggcagagattgccatctcgtagtcgtagacggacatgcaatttgctgctactcggacagtaactacggagacgcacacagtggttttgccacaaagggctttttaacctttttttttctttttgattcgtggctactgctttacgtttcctcggtgcctttttgcctctccctctcccagatcacatgaaaaatgtgtggatattttgtgagcggg

SEQ ID NO: 1946 - DNA, 411 bp, Oryza sativa
  Clone ID: PAT_MRT4530_101765C.1
atggcgacgtcgtcatctaggaaggtgaagccggtgacgagtagcggcaagggcggcgcggcggcggcggcggcagagggggtggatgacgggaaggtcgacatcctgtcgttcgaggtggccaacgctatgtcgcgcgccgccaacctgtatccgctcgctgtcggacgccgaggcggcgcggctgctcgcccgcgctgcctcggctcccaggccgtgcgtgcgctcgtgccaggcgacgactcgtggctcctggcgctcacgctcgccgagaagctcgacacgctcaaccgcgtcgcagcagtggcgacacgcctcggcaggcgatgcatgctccaggcgctcctcgggttcgacggttcgaccacgtctacaccgacctccttgctagctgctccgacgccgccgtga

SEQ ID NO: 1947 - DNA, 1566 bp, Oryza sativa
  Clone ID: PAT_MRT4530_101766C.1
atgggtaaggtaagcgcccgcggcggcggacttgtcatcgacgctccggcggtgcaaacgcacgcgcccaactccacccaagtcgtcggcttcctcacgctcgccgtctccggcgccgtcctcctcctcccgaccgggctctgcccatcgtgctgctcacagccccatctagatgcatatctacagcgggtgccaggggcagtacaggcttgtccggagggcgcgctaggtgtgcggtgtgccatcggagattcggaggcggcggaggcgttctgcggcgggccgtgccaggcggagatgaacttggtgctctacatcgacgggcgacgggcgacgggcgacgggcgtgcgcggctggtgggggaggagcttggcgccgacgaggtcgacggggatgtcgcgggtggggatgccagcctctcctcctccgccgccgaggacgtcgccctccgctcttgcttccctaagttccgtcgccacaagctctaccccttcaccttcaccctcctctcccccgctgtcggtcgccacgcaccccgtcgcagccggcgccaccttgcacttgtgcctcctcccatcctgctgccgctggccgtcgtggcgacgaggcggccccccggcggcggcgaagaggatgtcccggcggcttgcttgtcccgcctcgtcccctccttcctcgcgacgcacccgactgcgttgcccgtcgccgccatcaccggcgctgcgtcgcagccgtcaccgccgccgcgtcgcccgtcttcggccgccgacgccctcctcctctcccgccccgctgaccgccggctgcgctcagctcctcccccaccggccgcgccaacctcaccatgcccaacctctccgtccccgccgcccgcgcacgcccgtcgcccgtggaaagggaaagggaaggagagaggaaggaagaagaggcttacatgtgggacctatactgagtcagctgacaaaaccgggtgcgcggaggcgaggcgcaccgaggcggttgggcccgggtggacagtgagcgctgcagtgacggcgcccggagcgaggctgccgccgccgtcgaggcagagagggcgccagcgggaggagatcgcggcggcggcaggagaggccatgattcgtcttcgtgctggatttggtgcaaaagcggagatatttttcttactactttttagcctccttttgcggcaagggcggcgcggcgcggcggcggcggcggcggagggggtggatgacgggaaggtcgacatcctgtcattcgatgtggccaacgccatgtcgcgcgccgccaacctgtatccgctcgctgtcggacaccgaggcggcgcggctgctcacctgctctgcctcggctcccaggccgtgcgtgcgctcgtgccaggcgacgactcgtggctcctggcgctcacgctcgccgagaagctcgacgcgctcaaccgcgtcgcagaagtggcgacacgcctcggcaggcggtgcatgctccaggcgctcctcgggttcgaccacgtctacgccgacctcctcgccggctgctccgacgccgttgcgatctcctcccgctga

SEQ ID NO: 1948 - DNA, 414 bp, Oryza sativa
  Clone ID: PAT_MRT4530_101767C.1
tacttcgttctttggaaaacatgcgttcccaaaacctatttattcaccccccttttccgggccccccttataaggatattatatatttggggggggaacacacctaaaaatatatttaatagggggacacataaaaaataattacctatttttaaccaccaccccataccaaaaacacactatcacaccaaccccacccatactacattcaaactctaagaatagtattttttttataataaaaaagcgatcaccatacccaccgatactcggatcacccttgcgggctctacagactaacgctaaacaaagatcgctcacaacttataaaaatccagccgctctctaaaaccacctgatcacaccatcataaattaccacttggaagacaccactaaccaagcatcatagaga

SEQ ID NO: 1949 - DNA, 542 bp, Oryza sativa
  unsure (1)..(542): unsure at all n locations
  Clone ID: PAT_MRT4530_101768C.1
tcggggcgcggcgcgggcttcaccaagcagcagtgtgtaaactaagggaataactattgtctacacgtctaccattctgtcattgactcctggaactgcttgtatttttgcaagggtccatgggataatgttcatttagtgggagcccacgtaagagcccacgaggattaaggggagaccaagatagccggatgaatggcgagtggagtacctcacggtgccttgaggcaacacaccagcagagatttgcagctgcattccctgagtactacaacattgaggcaagaaatgaggtcacgttgcgcccggagtgagcccgaggcgcttagtcgtctagagcaagtgcttagttttaccagcgaatgctaatgctcacacgcttggctacatcgtccaaggcanggcagtgcatggtatggcactgcgatggtcttcagagacgtttcactcagtccgtgctcgctttgagctataggtgtcaccagntgtttaggttcaatcatcaatccaaaaaatgagagacgagcaccagctagcttcac

SEQ ID NO: 1950 - DNA, 474 bp, Oryza sativa
  Clone ID: PAT_MRT4530_101769C.1
atggcggagtggagtggcaatgctaatgctagcgagaggagtgtggtttgggcctttgggcgtttggagttggactgcgcggccgtgttgtgcagtgtggtggagtcgtcgacgaactcgggtgccaacaaggggaggaaggccgccgttgtggggaggaggagcttggctagcgttggggagaaagagctcgccattccggtgcggggagaaagagctcgccagcatgtgcggaggagaagcttgtcgacgtggggaagaggacctccgccagtgcaggaagaagaactcgttggtagatgtggggaggaggagcttcgccagcgcgggaaggaagagctcgccggcatgtgcggggaagaagtttgccggcatggggaggaggagctccgccggcgttggggaggagctggcgtggggagaaagaagaactcgccggcgtgggagatgaactcgtcagtggcgcccagatga

SEQ ID NO: 1951 - DNA, 336 bp, Oryza sativa
  Clone ID: PAT_MRT4530_10176C.1
atttttaactattttttttagaaaaataatcatatgcacgcgttgagttcatgtctagaaaaagatcaaaggcaagtgtacaataagctgtcattatcagctgaacattatgtgtatctggcttaatatatcaagcaaagtggaatcattaatttcgctgcggggcacaacctggcgtacagtactattacgcaatgtctttttacattacggtgcgcagatcgtgggtcacgacaaccactcagtcattactcagaaaaaggcttccagctggagctcatgaacgacatttggcatacctataactgcaactacactcataactaatacaaggca

SEQ ID NO: 1952 - DNA, 271 bp, Oryza sativa
  unsure (1)..(271): unsure at all n locations
  Clone ID: PAT_MRT4530_101770C.1
gnaanaagagcatgttcangtcagctcaaggagnatacatagctcccnagaagnttgagantntctatgcnaagtgcaagttggantgngcantcctttatacatgntgatagtttaaantcttcttgggttgncgtagtagcagntnnaccagatntgttgaaggcttgggctgcatctgagggaatccagcacgnggnttttaagncagctttcangctgatccgaaangaacgatctgntgtcctggctgngatggactctcttggtc

SEQ ID NO: 1953 - DNA, 162 bp, Oryza sativa
  Clone ID: PAT_MRT4530_101771C.1
ctatttatgagctactacgacgcatgctcccctccgtcagcttgttggctcctttgttgccgccctcctttttttttttttttttggcagcaagatgcttaagatgcattcttcattacaaatgattcagctatacatacgttgttgacgctttcacctaac

SEQ ID NO: 1954 - DNA, 297 bp, Oryza sativa
  Clone ID: PAT_MRT4530_101772C.1
atccatcataccagccgccaccgtccccttcggagagataatatcaccgtgtgccgcggctgccgctcgcctccgcctgcgccgctggagcgtggctggggtgctgcgtcagcggcggcggcagggccgggtcggcggcgtggtgccacgcgacggcggtcggcagcatgtcaacgtcgttggagctggaggctatccattgatggaccagcaagctgcaaggtgcatactagctgcacataatcattattgtgatgcgcccatgtagcgcggaagcaagatgctgtccaggcacct

SEQ ID NO: 1955 - DNA, 1213 bp, Oryza sativa
  Clone ID: PAT_MRT4530_101773C.1
ggagctccgcctcggggagggagggaaacccgaatcaaactcgcgcgccgcgaagcagcagccgcagcaatggcgggcgtcgccgccctcttcgcctccccggccttccccttcccatccacctcctccgtctcctcctgctcctgccgcttccgccccgccgtcgcccgcgccccgcgccaccagcctcccggccgccgcgtgacccggcgcttcgacgaggtggagggggtgtcgaagaggcggcggggcattggcggcggcggcggagggggctcgcaggcgtcgtcgtcgtcgtcgcgtaaggacagagggctcgccgttgacttcaaggagtcgcaggtctcagatttcgaggaccttgaagaggacaaattccttaatgctgtagttaaggtctattgcactcatattgcacctgattatgggcttccttggcagaagcaaaggcaacatgcaagcacagggagtgcctttatgattggtgatggcaaactattgacaaatgcacattgtgttgagcatgacacccaggtcaaagtaaagagaaggggagatgacaaaaaatatattgccaaggttctagcaaggggtattgagtgtgaccttgcattgctgtctgttgagaatgaggaattctggcgaggaacagagccacttcaactgggtcgcttgccgtgccttcaggattcagtaactgttgtgggatatcctcttggtggagacacgatatctgtaacaaaaggcgttgtttcacgcatcgaggtcactccatatgcacatggaacttcagatcttcttggcattcaaatcgatgcagcaataaatcctgcaaacagtggtggaccagcctttaacgaccatggggaatgcatcggtgtggcatttcaggtgttcaggtcagatgaagctgaaaatattggatatgtaattccaactacagttgtatcccatttcttgaacgactatcagaagaatggaaaatatacaggatttccttgcctgggtgttctccttcaaaaattggaaaaccctgcgttgcgtgaaagcttaaaagtaccttcaagtgagggtgttcttgtccgccgggttgagcctactgctcctgcaagcaaagttttgcggaagggagatgtgataacaagttttgatggcgtcgcggttggatgtgagggaactgtaccattccgctccacagagcgaattgctttcc

SEQ ID NO: 1956 - DNA, 1604 bp, Oryza sativa
  Clone ID: PAT_MRT4530_101774C.1
atggaggcgctgctgaagctggagaaggtgcagagggtgctctccctgatgggttcgcgtggcctctccggctccggctccgactccggcgccagcgacggcggcggcggcgaccgattcctcgcccacttcctcctcttcctgatcctacataaaaatgactatgacatattacattactccaaggaagcttgtctgaatcagtacttcagtagattgggatccagggaaggggagcggacggttcgagtcctcaacactgtcctcaccgcacgcacagagattgcaaaggaaggaaaaccagaagagtgggggccttcttgtcaggtgcaaccgtttgattcacttagcatggagaaaaaagctctattggtctctgacctgttaagaaaggtcaatgttgatactcttgaagaagtgtgccaccttggcagcatagaatgtactagtggtgaaggaaggatcattcctgcttcaacttatgtcaacaaagcacaatctattttcaagtttcttcctgttctttgtttcaccgaaagctacatataccagttagatgatttaaatgaatataacttgcagatggtcccaggtaacgatgcttccttaacagtgttggaaagggaaaacagaacttccaatgaagcgtccttgactggcatgctcaatgtccttgacgatcttcttcaacgccaggggctaatgacagatcagttggagagaaagctttgccaagcattgtcgagaaatgacaagatatcaattgaagatgtgatggaagcaatccatctgaaatcgtttgattaccgagttcttaatctgctgatgtatcgtctaactggtcagcaggttaatgaagtgcatatggagttcttgtcaatttcagagtttttagtggagatatctgatgatctgtatgattatgaggatgatgtgatgaacaatacttttaacatcctccgtatgtttgctgcaatttatggaccttcagaggcaccaaagatgttggccaagtgcataggtgaagctgaggagaaatatgagagattctctaagaaattggatcctaccctctcaggaagttattggagaagatgcgaggaagctacaaaggaaggtggaaaaatgtcaggccatgcatatggcacatggaatatccctcctttgataagagatgaagaatttttccgccttgaaagatcaaacaaacgcgacgcctctgctataaccatcacatgacatttaatcccctgagcatgttcataccaaagcgcacagatattgctagatttatcgaaccttcgtgtgttactaaagccagcgagttggataagaaaagaggagtcagcgaaccttggtagcatagctctatctgggtgtagtccaatactaatcgttgctcaatgcattctaaaatttcctgtcattttcacgagatttttctgttggtttcccttttagtacttatgtcatcggcttgaatgattaattgctgtggtaaccgcaccggagccttgccaaaaatcaagaaaataatgtatctccccaaagtttaaaaaattccccaccataaaaatcttgatgaaaaaaaaaaaaaaaaaaaa

SEQ ID NO: 1957 - DNA, 555 bp, Oryza sativa
  unsure (1)..(555): unsure at all n locations
  Clone ID: PAT_MRT4530_101775C.1
ctgcngccactgactcctcngnncgggcactcgtgtctacggtggatcacaactagngnttnctcatcgtctgcancctcctcggcgnntnagccnnctgctgccgcagtnnanagnangggcgctgcggggatgactcatgccaacgaaaggtcctcgtcttcacgccgccaaggacgtgtccattgttccnnaanccnttgaactngcctatacgntccttcnaactnctcccggntgtgncngaantcctcncnccccttngattcnnngttctgtncgtccataccncctgactntgaatgnnctggactctacnacttccganccggggaaaaaggcccatctccngggggggccggttacccaattcncccctnggttgaatctctattacaactccactgggcccgtcgtttttacancatcctgactggggaaaaaccctaggngttaccccnctnnatccgccttgnaaatacatccccctttcccccaactggccttnatnaccnaagaagcccgcatctnatttgcccttcccnacnntttctc

SEQ ID NO: 1958 - DNA, 1218 bp, Oryza sativa
  Clone ID: PAT_MRT4530_101776C.1
atgtgctgtggcgtacacctccgccaggatgctcctcttgaggccgtgaacggcggcgggaggaggaccatgaccatcgccacggatgcacaaatccggcagctcagccgcgggaggccgtggcctgcggcgggaggaggaccaccgccgcggctgaacaaatccggcagctcagccgcgggaggccgtggccacgcacaccgtcgtcgtcgccggccgtcacgccactcgtcggcgggcagaagtccacgcgctagctaccgtgtctgccaacgccaacagggcagacgtgctcgaagcctcgaactggccccggcagcagttggtgtcgccgcgccgaacttgccgcacgcactagcgcagccgcctgccgcctgggacacggagctcggggaggcacgagccgagcgtgtagccgtgtactcgggcagcgtggtgggcggctcaccggaggcggagcaggacagcacgctggcgcagtcgcccgtgacgcagcggccgcggccgctgccgtcgaaggagccgccccataagctggggagaggaagccgcgacaaggtgcagcagttcatgaccataactggtgcgagtgagaaggtcgcccttcaggccctgaaagctagtgattggcacttggaaggagcttttgattttttctacagccaaccacaaatttctctgacgaactctcggcatcttgaagatctgtacaacagatacaaagaacctgatgttgatatgatcatggtggaaggtgtatctcagttttgcactgatcttcaggtggatccccaggatattgttatgcttgtcatatcatggcacatgaaagctgccacaatgtgtgaatttactcgccaggaattcattggtggactgcagtcaattggggtggattcaattgaaaagctccgtgagaaattgccatctttacgggctgagataaaagatgaccataaattccgtgagatatacaactttgcttttgcttgggctagggaaaagggtcaaaaatctctcgcactggagactgctcttggaatgtggcagttgctctttgctgaaaggcactggccccttatcgaccattggtgccagtttttacagacgatcgatccacagttatccaactacgacgaagaaggtgcttggccctacctaatagatgaatttgtggagtacctaaccgagaatggattcgttcagcttaggaagtga

SEQ ID NO: 1959 - DNA, 1310 bp, Oryza sativa
  Clone ID: PAT_MRT4530_101777C.1
tttttttttttttttttttttgctcaaaacgacttcctttacgagttcctttacgagttattccacaaccacaagactccagttctaatgttctgccgggagatgcaaaggacagcataactatttttcttctgcgccgaccacaatatatattaaataaaccgtaagtgataattccacaatggcagtcaccacttcccaaatcaaatcgtccccttgcgcgagcaaatgtcatcacgtaaggatacatgtccactgtttgcgatcagttgcgcaagaacgccaaggccaagccctgaacactgtatagaccgagatgaatctcacacgtttgtacagcccaatcatgattgtatttgaagtagtgagaatgtgggcctcccattgttcacttcctaagctgaacgaatccattctcggttaggtactccacaaattcatctattaggtagggccaagcaccttcttcgtcgtagttggataactgtggatcgatcgtcttgacaaattccaacagttgagaccatgtgtccctagaaatggctttattatgcctcacctgtaaaaactggcaccaatggtcgataaggggccagtgcctttcagcaaagagcaactgccacattccaagagcagtctccagtgcgagagatttttgacccttttccctagcccaagcaaaagcaaagttgtatatctcacggaatttatggtcatcttttatctcagcccgtaaagatggcaatttctcacggagcttttcaattgaatccaccccaattgactgcagtccaccaatgaattcctggcgagtaaattcacacattgtggcagctttcatgtgccatgatatgacaagcataacaatatcctggggatccacctgaagatcagtgcaaaactgagatacaccttccaccatgatcatatcaacatcaggttctttgtatctgttgtacagatcttcaagatgccgagagttcgtcagagaaatttgtggttggctgtagaaaaaatcaaaagctccttccaagtgccaatcactagctttcagggcctgaagggcgaccttctcactcgcaccagttatggtcatgaactgctgcaccttgtcgcggcttcctctccccagcttatgcatcttcgatcggatcgggtggcgagctcggggtagggtagggggggagaggaaggcggtgggcgagcgcgagggctagggtttcgcgggcgttgggctcctcctgctcttcttccttccttcctccctcgcctggctggctttgctacccccctcgtgccgaattcctgca

SEQ ID NO: 1960 - DNA, 491 bp, Oryza sativa
  Clone ID: PAT_MRT4530_101778C.1
cgcacgggcggctccttcgacggcagcggccgcggccgctgcgtcacgggcgactgcgccagcgtgctgtcctgctccgcctccggtgagccgcccaccacgctgcccgagtacacggctacacgctcggctcctgacccggcgccggcgacgacttcctcgacctgtcgctcgtcgacgggttcaacgtgccgccgtgccggtgagcttccagacgaccaacggcggcggtgccgtggacatcacggcgaggtacgtgcctccccgagctccgtgtcccaggcggcaggcggctgcgctagtgcgtgcggcaagttcggcgcggcgacaccaactgctgccggggccagttcgaggcttcgtgcccgccgacgagctactccatgttcttcagggggctatgccctgacgcctacagctacgccaaggacgactagaccagcaccttcacctgccccgccggcaccaactaccgcgtggacttctgcccg

SEQ ID NO: 1961 - DNA, 195 bp, Oryza sativa
  Clone ID: PAT_MRT4530_101779C.1
ggcacgtgaccagcgtgaaccgctagctgacaagatttgtagtcttgacatggtattcccggagctgactactctcaggagctatgatttatcgccaaccaggttggatgtccgtcgcatggtatccaagataccgaattcctacgggaccagcacctatgcgatctcgactgcagattcctaaaactatagtcc

SEQ ID NO: 1962 - DNA, 273 bp, Oryza sativa
  Clone ID: PAT_MRT4530_10177C.1
aagctttagagcggagaacaggaaagtctactaaatacaatgttgaggaaaaactctaataagaaaagtttaaataagaggatgttctaaatattaaggaagttctggtgtaaaaagtaaggatgtgaaaacattgtggaactgacttaaatatgaagaaaaaattagaaatcaaaaatgggaaaagtaattatgtttgtggaagaggtgggatatagagtaaagtgaagaattgggggttcgaaacttgacaaatggaaaaaaaaaaagctt

SEQ ID NO: 1963 - DNA, 561 bp, Oryza sativa
  Clone ID: PAT_MRT4530_101780C.1
atgaccacggcggcgaggactagcgctaccgtgctctcccgccgcctcccttccaacccgactcctggtcggcggcggaggcggcacctaccgcttcgacacggcgcgccgccgacgactggacgctgccgttcgatcggcggcctcgccgagtacgtcccggagcacggcctctcaccggctagtgatggcagtggcatggtcctctctctgccacggaccttgacgccggcaagccgccggttcttggagaccgacgacgaacaccgtgatggcccggagctgttcgtggtgttcaccgccgtcgaggtggagctctgcgacgacggcgatgcacagggcatcgagtacctggggtatcagatacctggcgtcgacgaaggtgcgcagcacgcgagcgaagaggaaggcgagccatcgcggacgaacagggagcagtcgcgcgaagcgcttcccaaaaaccttatttccgccttctcccggtgcatgacgtcgaaggcagaggttccggagatctgctctcccgatcgccggtgcacaccggcgagcgggatggagtag

SEQ ID NO: 1964 - DNA, 633 bp, Oryza sativa
  Clone ID: PAT_MRT4530_101781C.1
atggtgcacggcgcagtagcggcgggtgagatgaggagcgaacgacggtggtcttctccagcgagttcgtccgtctcacctagctgcgcggcccccaacgccttcagtctccgcgacgcgtcgcctccgtcgccggcgagttcgacgaatcatccccattgccggcgagttcatctgttgcctcgacacaccgcccccatcctcgttcttccgtcacacctcaacgcgtcaccctcatcgctgcgcggcgggcataatgaaaaggtggggacgacgaggagggcagcgcccccatcgtcgctgacaaggtggcaccggtggctgccgacgagctcctccgacattggtattggaggaagggagaagaaccagggtcatttttgtccaaaatggcattttggtgaagccgttctagttgggagtggtattctattgccggggacccccaacgtcatcttcgtcggcacggaagaagacggcatcttcgccgtcgagctcgattcgctgagcgtcaggaaagtgtgcgaattggacaaatcacaagaccttttcttccccttcgtcagctactacgccgagtcattcctgctgagcctatcaagcagcaaattgccagcaccagcggcaaattaa

SEQ ID NO: 1965 - DNA, 361 bp, Oryza sativa
  unsure (1)..(361): unsure at all n locations
  Clone ID: PAT_MRT4530_101782C.1
ccgacgacgacaagtaaatgtagatatctntcggctactcgctagatcaggtggtgctcgcttntgcgcccctcaanagtaaatattaattcgtatagtttaagttaatttntactacttaggaacatgcaagcttgatcatgttatatgttagatctagcaactgcattccattgtanatgttgggggaggagactaagtttatgttnttctccattcgagtttgaggacattttgcgtagtgtccggccggtgcttcattcatgatgtaatttaanactttggaaacaaacatccaaaggaaactttgtgtatccattttgttaagaacgaaaaaaaaaaaaaaaaaaaaaaaaaaaaa

SEQ ID NO: 1966 - DNA, 452 bp, Oryza sativa
  Clone ID: PAT_MRT4530_101783C.1
ctcaaataaaaatatgctgatgatactcttattttcatggaagcttcagcaccatagctctttgctctgaaggccttacttaattcttttgcattgccttctggactcaaggagaactttgccaaatcttgtatgattccattaaatatctcagaggagaagtcgtgcatgttagcctcaacttttggttgctcaattgggaccttaccatttacttatcttggcttacccctaggaacgtctagacccaaagtggtcgatttctccccactcactgatagaattgagagaagattaacagctagctcagccttcctatcctatggagacagactcactttggtcaattctattatgtcatcccttccaacttattacatgtgctctttgtctttgcctgatggggacatcactacctcggatcggggctcaagagcgtgcgcgttcaagaa

SEQ ID NO: 1967 - DNA, 1437 bp, Oryza sativa
  Clone ID: PAT_MRT4530_101784C.1
atgcacacgcttcctatcaagatgaaaagaggcctactgatactttggtccttgttctgcctcagtgtggcaaacacagctgcaagaaacaaggccaacaaacctcttgagtttgatcagctgaaaataccaagtaaatatggttcagaaaaacaagatgatctgcgagagaaggatagagtaagagcaatgccagggcagatggaggaagccgagttcaaccaatatgcaggatatgtcacagtggatgcaaaggctggaagggctctgttctactattttgttgaggctcctcatgatcctttgaagaaaccactggtcctatggctgaatggaggccctggttgttcgtcttttggagctggagccatgctagaacttggacctttctctgtccgtagtgacaacaagacattgtacaataaacagcatgcatggaacacagtggccaatatgctgttcgttgacgtcccagccggcgttgggtactcatactccaacactacatcagattattacaacattggtgacaaaaagactacagatgatgcatacatattcctcatcaattggatgaagaagtttcctgagtatcagggccatgatttctttataactggtgagagctatgcgggtcactatataccagagctagctaatctgattgtatctaacaatagagccatcaattcaacaaacatcaagctcaaaggtgttgcaataggcaacgcagatttgcatgacaacgtgaccctaagagcatcatttgactactattggaggcatgctatgatttctgacagagtctacagagccatccagactagctgtggtttcaatgagacatacactaacgactgccagaatgccatgaacttagctaacaaggaaaagggaaatgttgatgactacaacatctatgcaccacaatgccatgatgcttccaatccctctccttctggttccagtgactcggtggcatttggtgatccttgcacaaaccactatgtctcttcttatctaaataatcctgaggtccagagagcactccatgcaaacaccacagggctgaactacccatggatggattgcagtggacttatatttgataactggaaagactcaccagagacaatgctgccatcaatcaagacactaatttcaagtggcacaaggatatggctgtacagtggtgatatggatgcagtttgttcggtcacgtcaacacaatatgcactagatattcttgggctacctgtagaaacatcctggcgtccatggcgcatcgacaatgaggttgctggctatgtggttgggtacagaggcctggtctttgcaacagtcagaggagcagggcacatggtcccttactaccagcctcgcagggcgctagcgctgctctcctcattccttgaaggaaagcttcccccagaatga

SEQ ID NO: 1968 - DNA, 243 bp, Oryza sativa
  Clone ID: PAT_MRT4530_101785C.1
tggtttttttaccaaaccgggctatttacattggtcaaaccagcaggactacgcgctggagaatattggttgcatgggatacatacaaacccatgtgaggctcagaggcatacactatggatatcccaaagcgaccgaacacctaagacacaccagaatctggtccaatagatcacgatcaacaatgcctatagggccagaggaaaatcaacgaagacgcttcatgcccgtttatgtgcgctg

SEQ ID NO: 1969 - DNA, 247 bp, Oryza sativa
  unsure (1)..(247): unsure at all n locations
  Clone ID: PAT_MRT4530_101786C.1
cgagaatcccacaagaaacacttggggcagtttgncagggtttgtcttggggaacttttgaagtnacccatgcaanttccatggatgccctttgggattaccgaaatgnctttggtgccaccaacccaatggacaaatgggcttggttggangnttnctngggaactggagaaggttgnntgggaaagaattgnaatatttgggggccatgaactaaggaaaaagcaattgagggaaaaggtgcctt

SEQ ID NO: 1970 - DNA, 235 bp, Oryza sativa
  Clone ID: PAT_MRT4530_101787C.1
tttggaaagactgtgtttgatggtgtccttcgcccaggacaattattgatcattccgtcaacattatgctgtcttgaagaaagtcagtagcgtgaaggatgccaatatatcagcaatcaagacaaacgctaacgccttcgtcagtctcactcatctgacagggaaaaactcagtattcagttgcttgcagttgatgtagtcgctaatgcgtatcgcatctcaagggagcaaagcc

SEQ ID NO: 1971 - DNA, 440 bp, Oryza sativa
  unsure (1)..(440): unsure at all n locations
  Clone ID: PAT_MRT4530_101788C.1
tgcagctttgaccatntcaggagcttggaggtaaacaggaatggtgccaatgatttcaacatcaaaaacgactcgttntaccgaaagggggtggctggagactgggccaattatttgtcacctgagatggcggcacagctggatntggtcattgacgacgagttgcggtcctntgggtttagctttgccnccggtggacggtaactcagcatganccgccncaggtatagcccatcgaccggccttgtggtcggaccncggtgatcgatgcatgctgcgcaanaagatccatcgcagttacctgctactactgctagtagtacatacacccaaagcattgtttggtcaaggatataataanagcgtaggttgtattgaaatntcaaactggggataaataaagtcattgcctagaaaaaaaaaaaaaaaaaaaaaaaaaa

SEQ ID NO: 1972 - DNA, 207 bp, Oryza sativa
  Clone ID: PAT_MRT4530_101789C.1
gctgaatgagatttgtgccgttttatgagtgcatgtgcctgatgatgtgacttacgctgactggttgccagcgtgcgcaatgccccctggcagattaaaagggtcattgtgtttcttattttactctgatttatatatgtgcatgtggcgtgggttagactgaatattttgtttcattcacttagaatgatttaagttagattaacc

SEQ ID NO: 1973 - DNA, 454 bp, Oryza sativa
  Clone ID: PAT_MRT4530_10178C.1
gacattcataacaataattagaggatgcagaggcgatcgagatggtgcctcaaccaagaagcggacgaccaagcacccgtaggtgcagtcgcctaagaacttctgcgtggaatgtatgctcgttactacgatggccgagcgtgagaccgctcacctatccgtttacacagtgtacaatagagtcgtacatggtgtggatgacgttcaacatgtagtcgcagtcctggacgaacactgccaacaaaatcgcagacgcaacaacaacacgcacaacaattcgcgcagacgttgatattaaggtttagatcaataaccaacttgatgacaagatgaatggatggatgatgctatgcagaatgctgcagctaatatacacgttgatattgatctgttatatagtaggttatcacgattatgctacctattacttaaacttaagtactaacttaattat

SEQ ID NO: 1974 - DNA, 1542 bp, Oryza sativa
  Clone ID: PAT_MRT4530_101790C.1
atggcgacgcctcgctccccgagcacccgcggcgacgcgctccttgactcggcgcccctgctcggcgggggcggcggcggcggcggcggccggcgccgagggggcgcgctccgccggccgtcgctccgcggcgcggcgcggctgctgcggcgcggggggcggcgggcgatgcgggagccgtcggtgctggtgcgggaggcggccgcggagcacctcgaggagcggcaggcggactgggcctactcccgccccgtcgtggcgctcgacctgctctggaacctcgctttcatcaccgtcgccgccgtcgtgctcgtgctcagccgtggcgaggactcgcccatgccgctccggacctgggtcgccggctacgccctgcagtgcgtcgtccacatggtctgcgtcgccatcgagtaccggatgcgccgggggcagcgtgacagggccccggcgtccgccgacgaggaaaggggaagtgacgggtcgtcttcatctagcgatgatgatgtcacggaggacgatcgccgtggtagctgcaccgattgcgtcagtattgcaaagcacctggagtcagctaatacaatgttctccttcatatggtggataattggattttattggatatctgctgggggtgaggatgttatccgtgatgcacctcagctttactggctttgcatagtctttctggcatttgacgtgttctttgttgtattctgtgttgctctggcttgcatcattggtattgctgtatgttgctgcctaccttgcattatagctattctctatgcggtttctgatcaggaaggagcgtcagaagatgatattcgccaaattccaagatacaaatttcggagaacagatgaacctgaaaaacaaactgctgatgagacaggaccttttggtggaataatgacagagtgtggcaccaatcaacctattgagaaagtactcgcacctgaagatgcggagtgttgcatttgcctttcggcatatgatgatggtgcagagctgcgtgaacttccttgtgggcaccatttccactgtgcctgcattgataaatggctgcatatcaacgcaacatgccccctgtgcaagttcaatatccggaaaagtggcagtagcagtggaagtgaagaagtatgattgtgtgaatatcctccggtcgagaacaccgatccatttcaacttcacacctgtctctgctaatgcaaccacaggacctgaccagtgtaaattttgtatccaaaatgtgtgattagcgtcatatatgtacttgaagtgactcaagactgctgttcatatccacatacatggttgtccaatgtgtcttttactgtccggaatatatgcttagttgccccgtgagttgtaattcttcgagtgatcctcacatttcctgcttgtgttagcatggtttgtgcttatgctcctgccttggtcattggttcagcacaaaaactgttgtaaatgggctatcggtcctgttgaattgtcaggtacaaacgaaatgcgtcctgcttatgattcaaaaaaaaaaaaaaa

SEQ ID NO: 1975 - DNA, 212 bp, Oryza sativa
  Clone ID: PAT_MRT4530_101791C.1
ggggaattcgagttcggtaccccacaaccgagaagcccatgggaaggaagagcttccagccgctttggcagaagtacaaggtcgacatcgcaatgtacggccatgtccatggctacgagagaacttgcccagtctacgagggggaactctatacccatggatacctcccggagcactccttcgattttttcaccataaatgataaactaaag

SEQ ID NO: 1976 - DNA, 159 bp, Oryza sativa
  Clone ID: PAT_MRT4530_101792C.1
atgtcagctatctcagacgcggccgatatcttccattccccttctttcctcgcctcccctgagtcatcacaggcacaaacgtcatgcgcggatcgggcagtgagcgatgggagcccacgagcgaccgtcaaattagccatccgcaaccgcaagagataa

SEQ ID NO: 1977 - DNA, 762 bp, Oryza sativa
  Clone ID: PAT_MRT4530_101793C.1
atgaaactagcagagaaagaaggattcggctttggaaacggacggccaggatccgcctccgccttgataaaccacacccttcgtcttccccccacacatcctcgaatcgttagggtttcgaattccccaatttttagctgcaaaatcatcgagatttcccgcgaaatcatccatccaccgatggccgacaggcgggcttacctcaagcgttgcgtcgtcgcgctggcggcggcggcggcggaggatgccggcgagaagatcgcgttgatgccctgcaccgccgcccattgcgtggagcagttcgccgccgacaaagctatggcggcgagaggctcaaagcgaagcggcggtacgctggtgccggtcgacggcgaggaggcgatcctggtcccgcgcgggaagctcgcgctgtcgaagaagctggtcgacaagatcctctccctggagcggagggagctgccccacgtcgccgacctcctcaaggacggcggcggcggcggcgacccgaacccgtcggaggcggagaagttgctcaggaagagcgtgcgggagatggacaggtacaacaagaagcgcgaggacaagctcgcggagtgccaggcgatcatacggcgcgtccgccatggcaagggcggctacgccgtcgtcgacaacaacctggagatgagagtcgccgtctccaaagctgagggtatctttctggatgacgccgagatgaccgatctaattattgatgagggatttaaccttgcctccaactga

SEQ ID NO: 1978 - DNA, 1797 bp, Oryza sativa
  Clone ID: PAT_MRT4530_101794C.1
atggacaggaggacatttcacattctatgtgacatgcttagagacgtcggaggtattgaggatacaagaaatatgccgttggaggaatcagtagcttcattcttatatatactatctcaccatttaaagaatagaacaataggaaagtttttttaccgaagtggagagactgtgagtaggcatttcaatttatgcctacttgctgttctgaggcttcatcaacttctacttaagaagccagaacctatacctgaggacaccaccgacgatagatggaaatatttcaagaattgcctaggtgcattggatggtacacacataaaagtaactgtcccaactaggataaaaggaagatataggtcaagaaaaggagacattgttacaaatgtattaggttgctattaccttgtggatgctggttatacaaacgcagatggttttttagccccttaccgaggccaaagatatcatttaggccgtttcacagcacgtaacccaccacgtagtgcagaggagtactttaacatgaggcatgcaagtgctagaaatattgtagagaggtcttttggaagactaaagggtcgttgggcgattttgaggtccccatcatattttcctatcaaaactcagtgtcgaattataatggcatgtgctttattgcacaacttaattttgcaaaagatgtctagtgatccatttgaggatgaggacgaggatgaggatgaggacgagataccattggatatacttgagggagaactcgccgaacctgagtttatctcagctatttcgacatctgatgattggacaaattttcgcaacactcttgctcatgggatttatggagcatcttggaagctcaagcattttctagagaacgtgcttgctaagaagttgccaagttctggccttactgctgttccgcacatagagtcgagagtaagacactttaggaccaagtttggcgcaattgaagtgatgctaaccaaaagtggcttttcttgggatgacaatagaaagatgatacaatgtgagaaacaacaaaacgatgatcattgcaggaaaaacaatgaggcaaagggtctatatggtgtagcattccctcactatgatacactagctgcaatttatggtaaacacattgctactggagaaggtgcagagggtcttggtgaggctgttgctaatatggagaaagaaattgttcaagatattcaagatgaagaagatgaggaggatgaagagagagtgtctagagaaatgcctcggcggagcatcgattcagctgcagctcgacggagcatcgattcagccacacctcgacagagcatcgattcaactgcttcaagctctaagaagaggaagaaagacagcaacaaactgaaaaataccttgtcaagtgacccttttatggatgtctttgccaatgttcaaggtgatctgagggatgttacaaagcatgtgggagcaatggtggcatctatgcaacgtgaagctgagatccaagagaaggcaatggctgaggaggacccactacaaaaaattcagaacgaagctattcttgagtgtcaaaagcttggattgactggtactgaagttgtcaatgctgcagctgcttttgtaaaagtgccggctcaaatgagtatgcttctcgctcttccggagtctctcaggagggagtacgtactgaaaatacttgctggtaattcacttgatcaatcttgtagtgttgcaaatgcaactggaaacatatcactttattttgtgatcattaattatgaggcaaagaaaaattga

SEQ ID NO: 1979 - DNA, 1107 bp, Oryza sativa
  Clone ID: PAT_MRT4530_101795C.1
atggcgatggcgaaggccaaattgatttccctatctttcgccgacaagtgccgggtaccgctcgccgtcaacctgaactcaccctcctcctccttcctcttcctagtgttacctcgcccaatcccaggccgccttactaccttgctcagatcactcgggaagttgcctcctcgaatcgctatgactggtgatgtgctgttcatgaaaaggtctaaggttccagttatcgccgatagcctgaagaaagctattctgaaggaacacaaagctgctagtgaagctagccatagtgtgtcagcaatattatcttctgcaagtgctgcatgcagatcacggagcgaaggactcctcagtttacttgaccaagggagctcctacaatatcttaaagtttgaaattggttcatgtgtctacatagattcgcttgggagcagccataaagttgatttggataactttgaaccaccaaaagcagatctgttattgccattctctgcgaggattattgatggcatcaaccggagtgacccaagacggagagcacttatctttttctgcttcgagtattttaatgtcactgcaacggacgcactcttgctctctattgatcaccatggatttgatgtgctcgccaaggtccctgaaaaagcagtgctccttgatgtcccacgacagtacgtctggagagagttcaggttttcattcaaagaagctgccaaggatattgaggacttctgccgcatgttggttgagttagaagaagaagctctccagagtatgaagagctatagcgggttataggtctaaaggggggaagttaacttgtttttactacgttatgtaacccgagaatttatgatctctctccctcatcttttctgattggaggtacatgcagatcgttcaatagattttatcttatgtctctgcatcatctttactgattggaggtcagatcgttcacaagattttgccttgttctttgttgtgcacgggtcaccaggttgataccgtccaattaaactagtagataaaactgtgagcagttaataatagtcgtggatactgttgaactaaaaaaaacctgcagcccggggatccactagt

SEQ ID NO: 1980 - DNA, 170 bp, Oryza sativa
  Clone ID: PAT_MRT4530_101796C.1
gcgccgtctagagggcgcggtgtcggtggtggaggtgggggagggaaggaacttgctcacggagcgggcggaggcctgatgacgatcctcactactaatgtcagaatgctcatgaatcatgtatgcaagagctacactgactacaactgcatggaacatgtacaccaacc

SEQ ID NO: 1981 - DNA, 360 bp, Oryza sativa
  unsure (1)..(360): unsure at all n locations
  Clone ID: PAT_MRT4530_101797C.1
gtgtgganaattganggcatcnagaattcgagacctatcgtacctgccncactcaccgtggaggatcttttgaagcagatcnaatacctgcttcgatccaagtgggtgccttgtctcgagttcagcaaggttgggttcgtctaccgtgaagaaccacaggtctcccgggatactacnnatggcaggtattgngaccatgtggaagctgcccatgttcggctgcaccgaatgccaccccaagtngctcaaagaagctccgangaaagccaaagaaagcctaccccgatgccnttgtccntaatccntcggcttccancaacgtcagggcagggttgcagtttganttagcttcatccncct

SEQ ID NO: 1982 - DNA, 213 bp, Oryza sativa
  Clone ID: PAT_MRT4530_101798C.1
atggcggcctcgtcagggccagatccgggggcgggaggcggccaccatggatgggatctcgcggggaggaggaggggaaagcagtggggagcagtgggggaaaaatttttggcgttttggagaggacggggggtggtggtcactggcaacgcgcatgcgcgttgcgcgccggatcatctcggccgtccgatcatggggaccggggaatcgtag

SEQ ID NO: 1983 - DNA, 171 bp, Oryza sativa
  Clone ID: PAT_MRT4530_101799C.1
atgtcgcacttgacccagctgaaagtagctagctggtccccgacacacgccgctccaaaaataaaagtggctgatggcactgtgctgcagcctccgtcggagaccaagcacatagcagggaggagaggagaggagaggagaggagaggagaggagggcccgtgaggcatga

SEQ ID NO: 1984 - DNA, 203 bp, Oryza sativa
  Clone ID: PAT_MRT4530_10179C.1
gtgaccgtcagccctctattgacaacttactaactagaccgcgcgtaatgctgagtgccttgctgatcctggacactgttgtggaagacctatggcaggcctggctattatgcaacgtttcagggcatcgggggcgctcatgcactatatgtgcttgacaaggagatttgcctggagcccgaggaagagaacgtgtcgaactg

SEQ ID NO: 1985 - DNA, 481 bp, Oryza sativa
  Clone ID: PAT_MRT4530_1017C.1
ttgttttgtcacttaataataatagcattatggtttccaagtccaacaagattgtatatgcgtagttttcatagagaaggaatttgagagtaaactgctctaaaactcagctttggaaagaaagaaaaaggtaatgtacaacaatcccccgtcccattccatgtgctaaacacgcactttacccatttgagagtatgactgatctatctttactgtatctgcatcaatcatggttgctgcaggcatacattgctgctgacacaaagtagaatgcctgagccaaaatcgtcagaatgaatcaagaattagagaatgtgattctgtccaaatgaagatgcatctgaatctgtacaaattgaatcaaaacagcttgctgaattcggtttcctgggcccgttcaccaagcccagggaagaacggttccctttcgagcatagtctgcaacgagtccattaacctcaccagagacgcccacaagaac

SEQ ID NO: 1986 - DNA, 252 bp, Oryza sativa
  Clone ID: PAT_MRT4530_101800C.1
atgggctattacgaccttctcccacaagaagtgggtgaggctggtatggcggacggctatcggcgacgggcgctcacggcggcttcgaccctcgtcccggccgcgtgcggtagtgcgggaggcatgccgtgcatactggcggcgaggggaggcgggcgtaagctcctcggcgtcgctacgggcgaaggccgtcaattgcgttgcagatggtctcgaaaggccgtcgagtcggcgtttcagatggcggattga

SEQ ID NO: 1987 - DNA, 298 bp, Oryza sativa
  unsure (1)..(298): unsure at all n locations
  Clone ID: PAT_MRT4530_101801C.1
tttttccttttgggggccggggttttttaanacccttagccccaaaagttnttaatggggcagggggcccaaaatttggaacggcagccggattccnggcncananaattgcgggccngttaatatcccacccngaattncgggggccggttatggtatcntctagcccattaaaagctgangcttttgataattaaattagggagaaaaaaaagagaggaactgatgttttttatcctaatctgaggagaaaaataaataacagttgcttttaagtcactaaaaaaaaaaaaaaaaa

SEQ ID NO: 1988 - DNA, 340 bp, Oryza sativa
  unsure (1)..(340): unsure at all n locations
  Clone ID: PAT_MRT4530_101802C.1
gttctagatcgcgagcggccgctgacctcttagccaagatgacgctggcggtgtccatggcggtagcgctcctcgtctccgcgtccctgctcgtcctgccgctgttccagtccgggaacgtcgtcgtcggtcttctcgcgctcgccgttcccgccttcgtcgtaggcgccagcgccgcgcgcgtccgcggcgtcgcgcatctccgcagggcgcgcaatgcctccggcgcggtgacggacgcggggcgcgccgccgtgacgaccctgacggtgtccctcgccgccgtatgcatcctcctcggctcttgcgtcgcggtcggnggcctcgacgcgcaccacct

SEQ ID NO: 1989 - DNA, 386 bp, Oryza sativa
  Clone ID: PAT_MRT4530_101803C.1
ccggccggcacactagtgcaagcagctcgagcttgagctcacctcgccatcgccggcgacttctcctgtcctgaccggccggagctccgatcttggcggtgaccaagagacctgacgagacgatgtccgccgccgccgccgccgccgcatcctcccccgctccccggttggaaagcaaggttgcgctggttaccggtggtgcttcaggtattggtgaagcaattgttcgcctctttagagagcatggtgcaaaggtatgtattgcagatatccaagatgaagcaggtcagaagctccgggactcccttggaggtgaccaagatgtcttatttgtccactgcgatgtttcggtggaacatgatgtgagcctagcggattatgcagca

SEQ ID NO: 1990 - DNA, 350 bp, Oryza sativa
  Clone ID: PAT_MRT4530_101804C.1
tcgaatcccggtcgaccacgcgtccgaaagtggctaatctttcaatcacgctccaatggatatcagtcctgtgcccaatcctgttgaagctccggtcaaaagaaaaaaaaccattggccatcaaactcattctaattcacacaaaggtatcaggacgttaagaaagttcttgcagatacggggttggctccttctgaggttcgagtgtatagtccatgagtgcagaatacactatacctgatgggtaaagcagaattcaacttgttcgccgctatatcatatgttcagctaaggatgcccaacctccaatttataacttttaacttagggaacaaagtttcttccaggat

SEQ ID NO: 1991 - DNA, 205 bp, Oryza sativa
  Clone ID: PAT_MRT4530_101805C.1
atgagctcagtctcggacccccaggcgaacggcgaccaccggccgccggcggcggagatggaggacactggggtgaaagtcgaggaggcggatgcgggtgagacgatggaaggcgtcgcgtccatcgcgctactgccgtccggcgccatctccggccacttcatccgcctcccggactccgtctgctacggtctccacggcacac

SEQ ID NO: 1992 - DNA, 174 bp, Oryza sativa
  Clone ID: PAT_MRT4530_101806C.1
atcgaaatctgattatttatatgatttttttctctgaaggtttctgattgcttgttttgggtgctagcttacactgctaaattagcatattacatgtgtttggcatttcttattttcttagtatctgtataaaaagacaatgtaaagcggttcattggatgcgagctttatgga

SEQ ID NO: 1993 - DNA, 324 bp, Oryza sativa
  Clone ID: PAT_MRT4530_101807C.1
atgcgcccgctggtcctgcgtgactacttcggcaacctcgtgctctggctattcccgcgctgcgatgttggcgagctcgtcacccgctcgacgcacgacaccgcagagcccatccaccgcgccgtcgccgggattgacgacgcctacttccgctcgttcgtcgacttcacctcctccagagccgtcgaggcggacggcctcatccccatcgccgacaccgctgaggtggtggtgcgaccaattacggttcacatgcaaggttgtcgtggtgaaatctccggcagctacgcgggcattccaatgtacgaagtagttgttaagtga

SEQ ID NO: 1994 - DNA, 213 bp, Oryza sativa
  unsure (1)..(213): unsure at all n locations
  Clone ID: PAT_MRT4530_101808C.1
gcgaatcagccactgcacttcttgttcttgttctcttcctcctcccgaatccgatccatncattggccgtcgcggtcgncgtcggcttgtgcgtcgggtgttcgtgtccagagacgatnggcaagnctngncgccgagaagaccgtnaccgggtngggccgccaaggacgnctncgggcaactnancccctacaactananccttnaggaaga

SEQ ID NO: 1995 - DNA, 1815 bp, Oryza sativa
  Clone ID: PAT_MRT4530_101809C.1
atgtcagcagcgcggcggctcgcacccgcgctccgccgccgccgccgccgcagcctctgttcctcctcctccgccggctcgccggccgccgcggccccgaccgccgcgtcgctcctcgccgagctcctctccgacccgggcccctccgcgtccgccctcgccctcctccgagacacgccctcactctccgcgccgctctactccctcctcgccgcgccatcccacgagctcacccgcgcctcgctcgcgctcctcctcgccctccccgcccgccaccgcgtcccgccgccctccgcgccgctcctgtccgcgatcctgtccaagctcctcgcgcgcttctcgtcgcccgagcccgccgcgcggttcctcgccgcctccctcgccgctggcgcccccgcgccggatgtcttcgccttcaactccatcctcgcggcgctcgctcgcgtccgcgacgtccccggcatggcgcggatctacgccttgatgcagggttgtgcctccgtccggcccgacgtcgtcacctacggcattctcgtcaacggcctctgcaaggccggccgtgttggggacgcgctcagggtgctcgatggaatgtctcgccaggatttagatatccggccagatgtcgtgacgttgaacaccgttgtagatggtctgtgcaagagcggccgggtccaggaggctctcgcgttcgtggagcagcggatgagtagcgtgcatgggtgtcctcctaatactgtcacttacaactgcttgattgatgcattctgccgcgtggggaatatttcaatggcctatgagttggtagagaagatggagaatgagggtgtgccacaaaacattgtcaccctcaacacgattgttggtggcttgtgccgggctgggagaaccggagctgcactggagttcttcagggagaaaagaactgtgtggccagaaggcaagggcaatgcagtgacctacagcactttggttggggctctcctccacaccaacaatgttggtatggccatggaattgttccatgagaagatgagtgaagggcattcaccagatgcgatcatgtatttcactatgatatcaggattgacacaagcaggccgactggaggatgcttgctctatggcttcatcgatgaaggaggcaggctttaagctggacacaaaggcatacaacattttgattgctggattttgcaggaagaagaggttgcatgaggcttatgaacttcttcaggaaatgaaggaggttggtattcggccagatgtgtgcacctataatactttgttgtctggttcatgcaaggcaggggatttcgcggctgtggatgaattattggggaagatgatcgatgatggttgccagccttctgttataacttttggtacacttgtacatgggtattgcaaagttggcaaaattgatgaggcattgagaattttaagatctatggatgaatctggtattcatcccaacaatgtgatatataatactctcattgacttcctctgcaagagaggagatgttgatttagccattgagctgttcgatgagatgaaggagaagagtgtgccagcaaatgtaacgacctttaatgctctattgaaggggcttcgtgataagaacatgccagaaaaggctttcgaacttatggaccaaatgagggaagagaggtgctttcctgattatgtgaccgtggatgttctcatggaatggttacctgtcattggtgaaacagaccgattaaagcgtttcatgcagcaaggggagcatactgcatccaaaaggatagtttctgacagaacctcagcttag

SEQ ID NO: 1996 - DNA, 3876 bp, Oryza sativa
  Clone ID: PAT_MRT4530_10180C.1
atggatgttgcggccgccgcgggcgtcgttggtgggttcttgcaggtcgtcttcgacaagtactacggctccaagctcgagcagtgggctgctcgctcgggcctgcacggcgacttcctcagcctcaagaaccagctccacatggtccgtgccatgctcgaggcaggcggcggcggcaacgccccccacaacgactccctgcgcagcctcatcgtggagctcaaatccgctgcctacgccgccgacaacgtgctcgacgagatggagtactaccgcctcaaggagctcgtcgaggacaccagtggccgcgacggcggcgcaccgtcgtcgtcggctcgccaggtggtcggccgcatactggtgcctgcgcctctcctgtccaatccattcaagcgagccaggacgggcgccgacgaagccttgcaagggcagggcgctgacacggacacccccaacttcgatcaggatgcaatgtcctccaagatcaaatcgatatcctgctgcctcgagcagattgctggcatggtgcggaggatcatcgagctcgacaagttggtgtcgatggcgagcttagggcatgtacaaccagaggtggtggtaagtctgcggcagacaagctcctttcccactgaaactaagttgtttgggagagatgagtctaccaacaacatcataaaccttatgcttagaacagatatggagtctaggtacaataacttcaatgttcttcccattgttggcattggtggagttggtaagactgctcttgcccagtctgtctacaatcatcaaagagtagttgattcatttcaagtgagagcctgggcatgcgtttctgatactcttgatgtgcgcagagttatagcagatttgatagattcgatcgatggtggccaagaaactcccaagtttcatagagtgcctagtcttgatgcaactcagagaactctactgaggaaaattgaagggaagaggttcttgattgtccttgatgatgtgtgggtcagcagccactgggagaagctttgtggtcccttctccgcggggatgtctggaagcatggttttagttacaacgcgacagagaaaaatcgccaaggccatgggcacatttgacagtttgacactgcacggtttacatgataatgaattttgggctttcttcctacagtgcacaaacatcacagaggaccacagcttggctcgaataggcaggaaaatagctctcaagttgtatggcaaccccttggctgccaagaccatggggagattcctttcggaaaaccacgaggaggagcattggtgcaagtttctgaatagaaacatatgggaactaaaacaagagcctgacgacgttatgccggttttgttgttgagttatcagcatctccctctaagcttgcagcgatgtttcacctattgtgccatatttccaagaggctataagttcactgagcaagagcttatatttgcttggatggcacaaggccttgttccaacacctggagaggatcagacattggaagatgtaggaaaggagtaccttaacgagttactcagttgctcattcttccatataatcgagagtggccactacatgatacctgggttgttacatgatcttgctcaacttgttgcagaaggggaattccaggcaactaatggtaaattccctatctcagttgaggcttgtcacttgtatatctctcattctgatcatgctcgtgatatgggcttatgtcatccactcgattgttctggtattcagatgaaacgccgcatccaaaagaactcatgggctggcttgctgcatctaaaaaatttgcggactataatgttctctgcctcttcatcaatttggtctccaggttctgaggtagtctttgtccagagcaattggcctagtactatcagactgttgtctctgccctgcactttccgaaaagagcaacttgcagcagttagtaacttcatacatttgcgttacctagacctcagatggtcacgccttgaagaattacctgaagccgtatgcaagctttacctactacaagttttgaacataaagcactgtccgtgccttcttcatttacctccaaggatagccaacttattaaactttgagcatctgattgctgatgaaggaaaacatttactcacaggagttccatgtgttggcaatatgacttccttgcttctgttggataagttctgtgttaggaaaaccaggggctttgacattggacaactgaaaaggttgaggaacctaagaggtttgttgaaagttcagaatctcgagaatgttgatggcaatgaagaagcagcaaaggctagattgagtgacaaaaggcacctaactgagctgtggctgtcatggagtgccggttcttgtgtacaagagccttcagaacaataccacgtcctggaaggtcttgcaccacattcaaatgtaagttgtctccatattacaggctataggggcagtactaccccatcatggcttgctagtaatctcagccttagctcactagaatatctttatctagattattgttctgaattggaaattcttcctccactgggactcctccctcaccttaggaagctgcatatagtcaatatgcacgcgctaagaagaattggctctgagttctatagcagtggtcaggtggtggggtttccatgtttggaagggctatttatcaaaacaatgccagaattggaagactggaatgtagatgactccaatgttttccctagcctgaccagtttgactgtagaagattgtcccaagctgagtagaattcctagttttctatggagtagagaaaacaagtgttggttcccaaagcttggtaaaatcaacatcaaatactgtcctgaattggtgctgtcagaagccctccttattccacgcttgccttggctccttgatatagacattcaaatttggggacaaacagtgataaatttgcgtggtggctgtcttgaggtttctgaaatcaatgctaatactagctcaggcccaataaatgctgttctacaattgcattggctaaaacatgtgtctagttttcatatttgggcacaggacagtctttctgtacacccctgcaagcaaaagacagaaccatcagcatgtaattctgaacacatggtaaattctctacaaacatcagcagagaaagttgaagtcacagggtatggtattactgatgaattattgtcagcaattttggagaatgaaatctgtccttcaagtttatctatatcagattgtccacaaataacatctcttgatcttagtcccctaagatcattaaaatctctggtaatacacaattgtgtatcactaagaaaactctttgaccgacaatatttcactgctcttagggatttggaagtgaccaatgcatcaagttttgctgaagcatggagtgaactgttaggatccagatatgcagagtggggtcaagttactacctcactggaatctcttacagttgacagcaccttattcctcaactcccctttgtgtgcagtgctcacttctctgaagaagctaacaattcattcggatttcagggtcacttccctctcaagacaacaggtgcaggcacttctactcttaacctctctgcaagatcttgggtttatacaatgctgcaatctacattctcttcccagtgaactgcacaaaatatacactctcaagcagctcgagattgattcatgcccatgtgttgagtcattgccaaataatgggctgccggaaaagcttgaaaaattgatcatcagaggctgcaacagaagattgtatacaggtgcatcaatgatgggttcaactagcaccaaagtgcacctagtagatagatga

SEQ ID NO: 1997 - DNA, 1131 bp, Oryza sativa
  Clone ID: PAT_MRT4530_101810C.1
atggaacctgacactgacaagcttcagagccttcagatcaaccccaataaggaaacaaaccttgtcgctgtattcaagaatgactacgtagatgacgaggatgatgaggacatggatcctcaagtaaccttagggttcatagaggagccagagggaccagaggactggcatcttcttctccctcaacacttccccaataaagctggcggtgttccggcctggcttgatcctgttaatttgccatctggcaagtccaggtgctgtgacttctgtggcgaaccactacgttttgttctccaggttgtctttcatttatatgacaaactgcaggtttatgcaccaattcagtgcaaggagacagcctatcaccgcacattatttgtgttcatgtgcccatccatggcatgcttactactagatcagcatgagcaggggaaggatagggcaggggaaaaagtttgtagtcgttgtaggaaatccagttactgttcaaagaagcatcaggaattgcattggcgtgcaaagcacaagaatgagtgccatcaaatatctggctcacataatgcttctgctattatgccagatgcaggaaaagtatttgctggcaatatatggcctgaatacatggtggttgatgaaaccgaaaaggtttcttgttttgctagttgtgagaatagatcagaattgttgatggaacaaggccaaagtgaagaggatgacatgacggcatcattgatggatcagtttgaggttgatgatgacaatagatgctgggcatcttttctagaacgcatctcaagagaacaggatcaagttttgagatactgcagggaatcaactgcaaaaccactttgggtagtatattctgggtctctaaccaatgcagctaagccatcttgtatatactgtaatggtccactttgctatgaatttcagataatgccacaactgctccattacttccatgttgaaaatgaaccagactcacttgattgggcaacaataattgtttacacatgtaaagggtcctgtgatcaaaatgtcagctacatggaagaatttgtttgggttcagttatctccagcaacaactagaaccaaccaaagtacttgcccccctgctggcttgtaa

SEQ ID NO: 1998 - DNA, 172 bp, Oryza sativa
  Clone ID: PAT_MRT4530_101811C.1
gcacgaggacaggtgttacaatcgacccaaatagcctttttgatataccaattaaaccccttcatgaataccagaaaccggtgcttaaccttttgggagccggttaccgattccagaagtttaagggaatgagatgccgaggagagacacaaaagtgtcaccgccagcggca

SEQ ID NO: 1999 - DNA, 258 bp, Oryza sativa
  unsure (1)..(258): unsure at all n locations
  Clone ID: PAT_MRT4530_101812C.1
agagagaaaggaggcgatatatttaggaagagagaatttctaaacgggggaaaggaaaggggaaaaggaaacgggcgccccggggaatttatggaaggggaaaagggggttagtgngggttgggtgcgcgtagcagatttccggggattttgggcgctgcaatttttggggggaaatccgcgagaggccgcgggcgttctcgcgcgcgccaggagcgggcggagaagacgaattgggtatggccgcatgcccgtatga

SEQ ID NO: 2000 - DNA, 330 bp, Oryza sativa
  Clone ID: PAT_MRT4530_101813C.1
acggaataccgctgtagcacttcaccttcgggtgacccctaaagtatatcgaactcagggaacgtgtgtaatctacctaaggctaagacgatccaaggacaacaactaatgcgtggttctggctatagctctatgatgtatctgaacatggaggattactaggacgggactcagggctaacaccatctgccacctacctctaactccgtgggatacacaacaaacaaagcgcaccccacatgggccccacttgggccggggttccaaacaaacaccttgtttatgtgattgcggccaaacgacacagaatttggtgatgaggctggatcc

SEQ ID NO: 2001 - DNA, 2033 bp, Oryza sativa
  Clone ID: PAT_MRT4530_101814C.1
ccggccgggacaatcagagcgaaatcgagagagagggcggcggcggcgacttcgtgcgcaagagggaggcggcggcgacttcgtgcgcaagagggcgtgccacgggccagcgacgccagtgtcctcccttctccatcctccttcctctcatccctcctcccgccgatccctttcccttctccatcctccttcctctcatccgccgccgcgccggctcgtggctgagctgctcctgcacctcctcctcccagtcccgcgcccgcagctcccgcctctccccccgcttcttccgcctctcccgccctgtcagctccccctcacctccatagccaagtgctagccaataagaaaattttctgccgcatccatgatacttagagactccactgcttcattgaccaagaaaatatagaagatcaaaggtgtcttgtagaacttaggtgttaaaaggaatagagtaatctagggaggaataaagcatgggaaaaggagaggtagccactaggtccaaatctcaaaaatcatcggcgacacagaatgaacagagtacacccactaatcctcctactgcatatccggactggtctcaatttcaggcatactataatcctgctgggacagctccaatgaccccaccgggctttttccatccaaatgtggctccaagtcctcaggggcacccatatatgtggggtccacagatgatgcctccctatggaacaccgccgccatatgcggcgatgtatgcgcaagggacaccatatcagcaggcacctatgctaccgggttcacacccatacaatccttatcccgggcaatcaccaaatgggacagttcaaactcctacatctgctggcggaacagagacagataagtcaggcaaaagtaagcggaagactcccctgaagagatcgaaaggaagcttaggtaatcttgatgtagttgcaacaaaaaataaaaaggcgcccgcaaaaccttcagcatcctcatccaatgaaggttcttcacacagtgagagcggaagtggaagttcttctgaaggaagcagtacaaattcaaaaagtggttcaaggacaaaggatggttctgagcatggccagggtaatgatgctagcaacaaaggagctactgctcagagttctgcggttgagcccgtacaagcatctactgggccagttgtgcttaaccctatgatgccatactggcctgtccctcctcccatggctggcccagcaactggtgtaaacatgggaatggattactggggtactcctacttcagtacccatgcataataaagttattgcagcaccagcatcagctccttcatcaaactctcgtgatgttgttctcagtgatccagccatacaggatgagcgagcgctcgcgtggcaaaagcggaagcaatcaaatagggaatcagctcgacgttcaagattacgcaagcaggctgaatgggaggaagtagccaatcgagctgatttgctaaagcaggaaaacagctcacttaaggaagaattgaaacaacttcaggagaagtgcaatagcttgacctcagaaaatacaactttacatgaaaagcttaaagagcttgaaggcgagaaatcaaatggaaactggtataaagagtgaaaagctgtaacttatcactttctgacttctgatataaattggaggcgacatggtaggtccgataattaggaggtattcatgtatgctattagatttttggccgagaggtagaattgtatcataggatttgacatgatggctacagattcttcttccagttgccgcggctgctgtactctatgctttttttttttttctgcacttgtgtaagattctacgaagtaccatgtaaaagtccccaagtgatgtttgaaactctgggggttagcttctgagatagttgatgtagagctgctcattgagcgtctttacctgaattgatgtgtgtcacagttatagtttgtgacttatcattcagataattagaggcacaaatttgtataacaaaaaaaaaaaaaaaaa

SEQ ID NO: 2002 - DNA, 948 bp, Oryza sativa
  Clone ID: PAT_MRT4530_101815C.1
atgaaagtgaagttttgggggaagacatcccataatcgtggatatttgccgatagacaccgcgtcatctaaaggatacttgcgccactccccaccgccgcagcagcaggcggccgtcgaggccctcgtcgtggacatcgccgcccgggttggcggtggcagcggcagcgacggcgaggtgctcatccgtgacgtcgtgcacgacaccctgttcccggtggccgcgtggttctgcttcggcgagcgcgatgtgcgcgacctgcaacgcgtgttgcgggagttcgagctcgatgtcgtggtcgaggggttcggtggctcgatgctggcaaacctcgtgcattggtggcggctgcgccgcttcgtcgcatccggccgccggcaggccgaggttttcctccctctcatctcccaacagcggcgaacacagcatcgcggtgaacacaagttctgtccttacgtcgactcgctcctcgacctacgcgtccctgtgggagacaacgccgccgccggcgagggcaaggaagagcaccgcctctcccattgcgcgctcaccgacgacgagatggtgggcctcgtgtcggagttcctcggcagcggcacggagtccaccgtgtcgaacacctttccctgccgagcggcggcgtgcgggttcatggccagtggcgaggcggagggggtgagcccgctgccgaggccgaaggaggtgagaatgatgccgtttggcgcagggcggaggtattgccccagcatggggctcggggtggcgcacgcctgcctcttggtggcggcgctcgtgcgcgagttcgagggtatttacgtccgaccacgtcaaaaaaggcctcccgtccgccacgtcagcacagtagacggtgtggtgtccatcggcaaatatccacgattatgggatgtcttcccccaaaacttcactttcgtggtgtccctgagctaa

SEQ ID NO: 2003 - DNA, 336 bp, Oryza sativa
  Clone ID: PAT_MRT4530_101816C.1
gaggcggtccgtccaggcgtccgtttctagttcgggaggggttgaccttttttttttttttttaaaaataaaaatggctgaacacttttgggataaagaaattatcattgactaatcattacagaattgttccgaaatgtaaaacactcccatcggggagatgggcagggtttgagctacagatcattcgatttcaaacgaattgcctaggatggaaaaaaacatcgactgacaaatattgataaatcactcacactggaaaaaaaaatggggtttttttaactcatcagcaggtagaatatataaatattcatatatatatgtaggagaccaagg

SEQ ID NO: 2004 - DNA, 917 bp, Oryza sativa
  Clone ID: PAT_MRT4530_101817C.1
ctacgcggggaaggttagggccggccgggctcgggaatttcttcttctccgctgctgctcctcccgtgccgccgccgtctcgcgccagtgcgtctcttcctcgcgcggcgatcatggcggagcagactgagagggcattcttgaagcagcctaaggtttttctctgtcctaagaaaaccaccaaggggaagaagcctggcaagggcgggaataggttctggaagaacattggccttgggttcaagacacccagggaagccatcgaaggaacctacattgacaagaaatgcccattcactggtactgtatcaattaggggtcgtatcatagctggaacatgtcatagtgctaagatgaacaggaccattattgttcggaggaattatctgcactttgtcaagaagtaccagaggcaagttaacctggttgctgggtacgagaagaggcactccaatattcctgctcacatttcaccgtgcttccgtgttaaggaaggagatcacgtgatcattggccagtgcaggccactgtcaaagaccgtgaggttcaatgtgctgaaggtcattccggcagggtcaaagagtggtgcagggaagaaggttttcacagccgcttaagatgtatatgaggagatattcagggttctgaaagctttgatcatgagattttgatgccacctagatgtctttctcgtgtctaccatcttgactagacaagagtttacctttctgtactaggaatttgacttgactttacttgtcaagcttaaaatcttaagaagtttctgcgcccatgtctgtctgtgtactgatcgttttcccattcaatcaacatatagtttgtagaatgcttgacgatgtgaagatctatcaaaaaaaaaaaaagctcgtctccccaatttggttgagataatttcc

SEQ ID NO: 2005 - DNA, 432 bp, Oryza sativa
  Clone ID: PAT_MRT4530_101818C.1
atgggcggtcctcccttcaccacacaggtgaaaggtcccatggagaccggcttgtctaggacacgtgtgatgtggtgccgtgcagcaagcacatcatgggagcgacacgacgaaccattgaatcgaagtaaggaagacgacaccgggctcatgaaaaggagtggtgatgcagctaaaggattgggtctactgattgataggagtgagacagtgaaaatgcacgcgcatggcaccggaattcagtccacggatgcggaaagcgtggatgttggatttgttagcttggttcataagacgacaaggaagaaagggttttcttcatgtcggatcaagtcaaatttaagacaaaaggtgaaggtgaacatggtcttcgaggagtcttgtgatgtgatagctaaggaggaatctgattttgcttggcaagatgactaa

SEQ ID NO: 2006 - DNA, 175 bp, Oryza sativa
  Clone ID: PAT_MRT4530_101819C.1
ttttttttggggggggaccaaaattaaccggccttaattttgacctaagttttaaaaaattccttccttcaccaaaacccccttttaatggacctttccttttccccttgaaaaaaggaccttccttcaaaccctttcctttttaaaccaccttaccccaaagcttgattaaaaa

SEQ ID NO: 2007 - DNA, 1113 bp, Oryza sativa
  Clone ID: PAT_MRT4530_10181C.1
atggatactgataagaagctggatctcctgctgcaactcgtagaggggaatgagaagaagcgcgtggaggcggatgagcgcactcgggcggagtatctggatctcaagcggactgtggaagcgcgcattccagttgtggagaagaaggtggatgaattgggagctgcatttcaggaactgagcacgaaggtggacgtcttggagacagttatcctctccgcacttggctacccagcgtttaccgtaggcacgataactggtacaccagagagacgaaagtcggccatagtgatccgggagtcccgtgtggaagggctctcgctcaacggatcaaagcttttagcggggcgcagatgtaggaaggcgtttcttgcctgctttctgaactgcgtccctttcactccatgtgaagccactgagtatctagggtcattccctttaccaaacattggagtcgctgctcgctcgaaagcttttgctttcttcggtactgagcttggcagtgaagacagtgcagcagattttcgcactaccggaatgggtccttatgattctcaaagaatgatgaggggcaaggctgatacctcgcaggtgatgctatcaactgtgaagaggcttcgaggcaagatctacaaacgtctgcctcggctcgctaccaaactccaagcggttgagactttcgttattccaaatttacgaagggaaggttccgaggtatcggaatgtgctccagaatgtttcagtttatgttcctacctattgtctggatataccaagagagatctacggtctaatgaggctactatgaaatatttactcatgggtggggcaagctcttctattctggttcatggtttctcttggctatatggttcatctgggggggagatcgagcttcaagaaattgtgaacggtcttatcaatacacaaatgtataactccctaggaatttcaattgcgcttatatccatcactgtaggacttgggttcaagctttccccagccccttttcatcaatggactcctgacgtctacgaaggagtgtggttcgttcgacaaattcctacctctatatctatctctgaggtgtttgggttttgcaaaactccatag

SEQ ID NO: 2008 - DNA, 327 bp, Oryza sativa
  Clone ID: PAT_MRT4530_101820C.1
atggggggaaagagggaggggatcacggggaataattccccccacttaattgcacgcgggggcggcgggatgcggcggattcggcggcggcggcggcgcttggcgcgggcggggcggcgggagcggcgggaggacggggatgacggagcactcttgtcactgaggacttacaaggatagaggtgagcctgggacccaggatagggccggggccgggtccgaggctagcctccgtttacattctttagatgtagatattgtaggtctctacgctcctctcaatgagaaccgtatgacttacaaggacataggtaagctcgagacctag

SEQ ID NO: 2009 - DNA, 552 bp, Oryza sativa
  Clone ID: PAT_MRT4530_101821C.1
atggaaagggaagagatagccctacccttcagtgaaccactcaaggcccacgactcagaccccgcgcgccacgcgtgtgagcacgcgttgagcgcggaagagggcgagctcctcctccccatctccgccggcgaccaagaaccgaggtaccccgcctcggattcgccgggaacgggggtgccatctccggcgccggcgagagaagtcctcgacgccgtcgcaatccggtgagccccattttcgttcaatgcgcgttctgtaatcccctctcaatgccgtctctaataccgccaagaacacctcatttggtgcagccaatttccgggaacgcgaccgcgtcaactcggaacaccgacgcgctctggacgccgctgcttcgcctttgctcgtcgcccggcttccacagttcgtgacaagctgagcctcttcaccacgagcttcatcaaccccttttgttttgggagcttgagctgaatcgccgccaatcgccgccggtgatgctgtgaagctctcggctgtgctgctgctctgctctatccagagcaagggcat

SEQ ID NO: 2010 - DNA, 910 bp, Oryza sativa
  unsure (1)..(910): unsure at all n locations
  Clone ID: PAT_MRT4530_101822C.1
taacaatacaagcaataatactaagcaaacaaaaaaaaatagngctatccaacaagagatacgntagatctcgaagcagataagctcgatacagatcagatcagatcatccgaatagccaacaccacgacaaaacagaacagaacaaaatagagcagagaaccaaacnacacaaagaaacaaggtaggtctacaacacccggccaagacatatgtcaagccaaggaaatcaagcatacacacagaacgatacacacagcatagcacagcagaactagnacaagagaggcagatatacagataaganangacaagcacaaagatagccagatacancacacacacagaaggcaacagagatagagaacagacgacaagagtaacagagcaganggcatagcaaagcacgagcaagcatcgacacagcacatcagaacaagcaagcaagagaagcaaagtagcagangacagcaacaacacaacaatagcatagacgagacttcaatacctaacaaagaggaacagaacaccagaggcagacacagacaccagaaacaagacataagagagcccancacacaccactaagagacaccagacncatggatatcccagcagagcatagcgcagagacgacgagaggaacactcagacacagcaacagagcagagcanacacccatcccccgagcagaaatcatagcaaaaacagatagagagcacattctcacccacacataggggcagatataaagccacagatagatacataggcgtaaacaatagnggcatcaacaccgcaggaanaacatagggcataacatacnacccctaacataataatagtacacctacgatnnatanaggcctgtatcactgatgttgttgactcctgggttcacctcaacctac

SEQ ID NO: 2011 - DNA, 681 bp, Oryza sativa
  unsure (1)..(681): unsure at all n locations
  Clone ID: PAT_MRT4530_101823C.1
gcgcagcagcagcagcagagagcagagcagagagcagcagagcagcagagcagagagagacgagagacgagacgagacgacgacgacgcacgcagacgacgcacgactacgtccaccagtcgctagccccgtcgggttccgactcctatgncgactacttctcctactcggccttacgctaggccttctccnatttccgcncgactcgcgagagtcgtcgctccgactaccccataggctagcctaccagaccacacgacgagacgtagctaccgggccgggccgggccgggctaccagggtcgaccaccgtggggtggggcccagagacgaccagaccggaggcgaacaaccagacccttncgtagactagccaggctctagccagaccaggtngaccacgcggcgagcaggccgggggctacgactagctnggtgctgtccgggctagctacctggccggcccacgttctacgcgctacacaggtggcccccccggtgcttggtcctacttccgaccccgtgcttggtgccaggcggccatcgcgctggcgctcttggcggccgggttcgtcccctcgggcgggctcggcgtggccgcgctctccgtgttctcgtgggtgtcaaatcctccacgggcaccccgccggcgcgccnctgcaccnacgaccctcacccgata

SEQ ID NO: 2012 - DNA, 345 bp, Oryza sativa
  Clone ID: PAT_MRT4530_101824C.1
gggaagcggaggagaggggaaggaagggagagaggcattcgacccggccgcgcagcttccccccctccctctctctctctctctccgccgcccccccctcccccctaccaccaccaccacccgccgccgccgcacgatgagctcctgcgccttctctcccccgccgccttcgtccgccgccgcgttggacgggagggtcacctctcacttggatcccttcctcctataggcgctcgacaacctttgccacccacttatggttctgcgtatggcaatggatatacataaatttatgccgaatcctcaactgcacgaatcttaattccctcattttccaacttctta

SEQ ID NO: 2013 - DNA, 1377 bp, Oryza sativa
  Clone ID: PAT_MRT4530_101825C.1
atggcgccggcgccggcgaaggctcagccgcacgtgctactcgtctccagccctttccagagccacgtcaaccccctcctgcgcctcggccgccgcctcgccggcaagggcctcagcgtcaccttcactacggctctccgcgacggcatccgcgtcttcgacgacggcgacggcggcggcggcggcgtccgcgtcgagcgcctccgcggtggagggatgtgggagcccgacgacccacggctccgcatccctggggacatggcgcgccacgtcgaggccgccgggccggcggcgctcgaggagctcatccgccgggaggccgaggccgggcggccggtggcgtgcgtcgtggccaacgcctttgtctcctgggcggtccgcgtcgccggcgacgtcggtctcccgtgcgccatactgtggatccagtcgtgcgccgtcctgtccgtgtactaccactatgtctactcgctcgcggccttcccgtccggcgacgaggctgactcctccggcgccgtgaccatcccgggtctcccggagctggacatggacgagctacggccactccggatttacacttccgaccaggaaatgtggcgccagatgctcgtcggggatctcggcagcatgacggagaaggcgccatgggttttcgtgaacacgttcgacgagctcgagcacgaggccgtggcggggcttcgcaagcatataccgcttataccggtcggtccactcgtcgagccagacgacggcggcgtcgacgacgacgacgtccacggttgcaccgcgtggctcgacgcgcagccacggaggtcagtggtgttcgtggctttcgggagcctcgtggacatcggccacgacgaggtggtggagatagcggaggggcttgccagcacgggccgcccgttcctgtgggtgctgcgcgacggcaaccgcgcgctcctccccaaggacgccctcatcgacgcctgcggcggcgaccggggaaaggtggtgccgtggtgcgagcagcggcgcgtgctcgcgcacgccgccgtgggctgcttcgtgacgcactgcgggtggaactccaccgccgaggcgctcgccgcgggcgtaccgatggtggcctccccgaggtggtccgaccagcgcatcaacacgcggttcgtcgtcgacgtctaccgtgtgggcgtccgagccccggcgacgccgctgacgagggaagcgctccgcctgtccgtcgaggaggtcacggccgggccggaggcggaggcgatggcggcgcgcgcggcgatcctgggggagaatgcgcgcgccgccgtgggcggcggcggctcgtcggaccgcggcgtccaggcgttcgttgaccggataacgtccggaggcgcggagccgtga

SEQ ID NO: 2014 - DNA, 387 bp, Oryza sativa
  Clone ID: PAT_MRT4530_101826C.1
tcgagtaccgactttccgatatattattcaagatataattgtctaggtagcttactcgggagatgcaatggtgtgggtataatgttcatttatatgaatgctctaagtcacgacggtgattgtagagtagtatttggtagcatgagcgaggtgcttaggctattgaatatcattatttggggttatatgttgtggatacgtcgaggtgggccgctgatggtgacagctcagtacgggtattcttccgcgcgtgtatataatcctaagttacttttcctgggagggtacttctccgtatttagccccggttggatggccatgacatgttaaggaactcggcaactaggggtggtctctcaaaacaccaggagggcatcgtaaggggga

SEQ ID NO: 2015 - DNA, 2408 bp, Oryza sativa
  Clone ID: PAT_MRT4530_101827C.1
caggaggtggtccaggaggtgtggcaacagaaggttgacagtcagggtccctcttcgatactctatgtcaagatggccagagcggcgaagaagttgcgccattggggacagaggaagataagcaacctgaggccgcgtctccagatcgcaaacaagattatcttccaactggatgtagcacaaggaaacaggtccctgttgtcgcaagagctgcgattcagggctggactcaaaggcggctctacctgacgcttgcctccctagaaaggataagcgtatggcaaagggcaagaataaagtttttaaagagggggatgcaaacacatatttcttccacatgaaagctaaggcgtgagtgtgtgacggcacaagttgattatcggcccttagcatgaatcatgatggtcacatggcaaggggatatattgattcggtgatgggggttgccgacaaggaaaacagagtgatggatcttcaagcactaggtttggtaacagcagatctgtctgacctagaaccgcaattcacagaagagggagtgtggagtgtaatcaaggaattatccagtaaaaaggcaccaaggccagacggtttcacaggtcttttctatatatcatgctgggccatgatcaaacgagaagtcaagctatacaatggcaacaaacacagggtcattctgctgccagtggaaggcccaatgatgctgaaggactactggcccataagtttgattcacagttttgccaaactggccactaagttgatggctacaagactccgcgagcaggattgggaattggcgtcatacacacacaatcagctttcatcagaggaagagccattcacgataatttcatgtttgtggaagggacggcacaacaattccaatggtgtcacaaaacaatgattatccttaaactagatgttacaattatttggtcttttggggttttctctttcaaatgctacagcaccagggttttggcctgaggtggaggaactagattgttgaactacttctcactgcagatacttcagtgggaatcaatgggggtagagggcgaaccttttaagccatcaagggatctgcgttagggggaccctcggtcacccctcctctttccaccaacagaagaagatgcctggccaattaaaaatatcatgaatatgtttggggcagcaactggactacgaacaaacttgatgaaaagtgtgatcacccacatacgatgtgatgaaacattggtgaaaatggttcaatcaattctgatctgcagatttgaggatttccaaataagctatttgggccgccactttccctcctaaggctaacaaaagaggaggcacaaccaccgatgttggctgaatggaagccataactgctgcattcaggaggtcaactcagactaatcaaaacggtgtcatggcactacattttatggcaggacaagaggaggtcagtgggggacattgtctggtagcatggtgcatggtttgcatgccaattgaaaagggtgaccagcataaagatctctatttgtttggacagacgctttgtctccaatggtcagtgtagcgacaactgacaagcacatctgattggccatggccggtaccgagtatgaagccagagaatggagttaacaaagctgcttctttgcggcaatgaaatatgtggtgggagagggcaagagcatcgatttctgcagggcaaattggctcccaggtggaagtattgagagcacaaggcccactctcttcagctatgtcaaaataacaggcctgacactgcacaaggaactacagaatcacacctgggttcaagatattgatggcacgccttcaaacagagtgatctgagagtatgtgaatttatgggacgccattgaataattgatggcacttttctgtttcctctgcatacaacatgttctgcacggccagaagaaatcaagctatggtaaactgatctggaagacgagggcaccttcaaatgtcagattcttcatgtggttggcgatcaacggaagatgtaaaaggactgttgtacccgaagttacaaagcattgagttattccgctgaatatctcagccaagttaatcttaatcatatgttttcaccaacagagtatgacgattcttgagttgggtgaatatttctttccagctgccaggggacatttttactgaaatcactaccaggcttgctcagcagttaacttttacaaatatgaaacaatgactgtacaataggagttacaaaaaggggaaagaaagagaaccaaaaaagagttatatgtcataaactttgtaaccagtcaagcactgtctgacatagaggtagaactcttttgtcctacaactatgtaggagaacttctttcttgaacaaggcaaatctatattgat

SEQ ID NO: 2016 - DNA, 634 bp, Oryza sativa
  Clone ID: PAT_MRT4530_101828C.1
tttttttttttttttttttttttttttttttttttttttctcgtcctcttgtttttgatccccacaataaacctaatacccatgtatttcctccctcccaatctgatccggcaatacagaaagtcaaacaaaggcaatcatatatgaatttgctggcaaacaaaaggcagcaggaggcatgtcgggttacaggcgacgtgtggcggcagaagtgcttggcgtggttgtcgggcttgtggacgagctcgacgcgggccggcggcagggacagcatcaaggcaaccggcgcatttggtggcggcgcggctctgaagcccttcctcccgtcggatctggcgaagggatggcgcctccgggcggctgccactcctcccgccacacgctgccgaagccgccgcacgctgctgccgtggaggggagggcgccaccatcgccgctgatgccgcctcccgccgctgggccgcaccgtctccacctgccgccgccacccgtcgccagccgcctcccctcttgcgccgctgcctgccgcctcggctccgccgctccgatagagagaggggagtgagcgaaacagaagaccgagagagaggcctcgtgcacgagagaggaccgagagagaggagaggaatacgag

SEQ ID NO: 2017 - DNA, 420 bp, Oryza sativa
  Clone ID: PAT_MRT4530_101829C.1
atgaaaaagaaaagcaaagcaaattcatcacagcaaattcatcacggcaaaatcatcccagcaaaatcacgacgacgacgacgagccggcaaccacgactccacctccccggccgcgcgcgcaccgacgaggagaggagtcctcccacgcgcgtcggtcgccgcggcgtcggcgcctcacctccccggtgtcccgcttgccgcccaggcgtccgccgcgagggaggagagcacaacgaagaggaggaagaaggtgaaggggaggagaaacgagcggcgcggccgcgcgggcgacgacgaggcgcacggcgacgaggaccacgccgttggccgccacctccaagccagagggctcgagcggactgggccacgcgctgtgttgagttgtgatccaaattcatttgcacttaataaaggctag

SEQ ID NO: 2018 - DNA, 1873 bp, Oryza sativa
  Clone ID: PAT_MRT4530_10182C.1
gggaacgttccataagtctatggaactggctctctatccatggatgatctggcatgtacagaatgaaaacttcattctcgattctacgagaatttttatgaaagcgtttcatttgcttctcttccagggaagtttcattttcccagaatgtatcctaatttttggcctaattcttcttctgatgatcgatttaacctctgatcaaaaagatagaccttggttctatttcatctcttcaacaagtttagtaataagcataacggccctattgttccgatggagagaagaacctataattagcttttcgggaaatttccaaacgaacaatttcaacgaaatctttcaatttcttattttattatgttcaactttatgtattcctctatccgtagagtacattgaatgtacagaaatggctataacagagtttctgttattcgtattaacagctactctagggggaatgtttttatgtggtgctaacgatttaataactatctttgtagctccagaatgtttcagtttatgttcctacctattgtctggatataccaagagagatctacggtctaatgaggctactatgaaatatttactcatgggtggggcaagctcttctattctggttcatggtttctcttggctatatggttcatctgggggggagatcgagcttcaagaaattgtgaacggtcttatcaatacacaaatgtataactccccaggaatttcaattgcgcttatatccatcactgtaggacttgggttcaagctttccccagccccttttcatcaatggactcctgacgtctacgaaggatcccccactccagtcgttgcttttctttctgttacttcgaaagttgctgcttcagcttcagccacgcgaattctcgatattcctttttatttctcatcaaacgaatggcatcttcttctggaaatcctagctattcttagcatgatattggggaatctccttgctattactcaaacaagcatgaaacgtatgcttgcatattcgtccatagggcaaatcggatatgtaattattggaataattgttggagactcaaatgatggatatgcaagcatgataacttatatgcttttctatatctccatgaatctaggaacttttgcttgcattgtattatttggtctacgtaccggaactgataacattcgagattatgcaggattatacacgaaagatccttttttggctctctctttagccctatgtctcttatccctaggaggccttcctccactagcaggtttcttcggaaaactctatctattctggtgtggatggcaagcaggcctatatttcttggtttcaataggactccttacgagcgttctttctatctactattatctaaaaatagtcaagttattaatgactggacgaaaccaagaaataaccccttatgtgcgaaattatagaagatcccctttaagatcaaacaattccatcgaattgagtatgactgtatgtgtgatagcatctactataccaggaatatcaatgaaccccattcttgcaattgctcaggataccctctttaggtcgtgtggtgatgtcggattgatgggccgtgattggttgcctacagttagaagaacctgaggaatggaggtgcttgaaggaaattggggaggtgcaaaatataaaaggaggcggggtaagcgatgggtactcggaggggtggtggggaggcgggagcggtgcaatggtgggggcggtggaggggaagcgtacattgggagaaccgcaaaggggacgaccgagtgaccggcatgcggaatcccagcgccggcagggggcaagctggtgaggggtgccaagaacgaagccagagaaaag

SEQ ID NO: 2019 - DNA, 258 bp, Oryza sativa
  Clone ID: PAT_MRT4530_101830C.1
atggtgggttgtgagcatatggttttgagagtcgtgctcatgacaattaaggatcggttcacgagtttcggttgtgaaacattagccgtgccaccctcaagccagcgtgggcaacggctttatcttttgtatagcatggttcattgcggggcaccagactgagaattgggggaagataagcccacgggggtcgctgggagtccatgccttgtttttaagggggtgattatgatccaggaaggtgcgctgcggtggagt

SEQ ID NO: 2020 - DNA, 588 bp, Oryza sativa
  Clone ID: PAT_MRT4530_101831C.1
tttatttttatttttctcttgcctcacctccatttctccttgtcattagatacaccacaagacaacaagcctcctcgtctccgccccgcgcatctcatcatcccccccccccccccaggctcatagctctcctcctcctactcctctcacaatctctttgttttcttgtaattccaaccactttgcagggcttgtgcttgtgcccttgctagttgcttctcattgctgcaatggtggaaggagagaacatttgagctttctcactcactcatcaccatggccttgctccctctttgccctcctgattagcttagttcttgagagacacacacacacaaacactgcaagcaagctcgggtagcttctggaagcttctgctgtgtgtccaccattgcaaatggatctttctggggcgcagggcgagctgccgttgccaatgcacgccgcggcgtcgccgtacctcggcttgcaccatgaccaccaccaccatcatggcggcggcggcggcggtggagggatgaatgggcggcacatgtcgccgccgacgccaccggcggcggcggaggagtcgaaggcggtggtggtggt

SEQ ID NO: 2021 - DNA, 386 bp, Oryza sativa
  Clone ID: PAT_MRT4530_101832C.1
tatttgcagttgtgaatcggtgcagcccgcatcatgttctccgccgcgacaacggcggtgggtcgccacaaaaaagcgaaaagaggagtaaacgtagtgttcttgggttcccacggggacaaggcgtagagaaaccgcgcccgggcggagaaaaaggggggccggttgaggatgaaaatccacgggtctcccggcggtggggggaaaaaagaaaggcggaaggggttggcaacccctggggaaaacgaaagaagtgggccccaatcggggaggaggcccggaaccaccgcggggggcaaaacgaagctcggccgcccacggcgaaaaaaaaggagcacggcgcgggcacgaaaccgacggcaagagcgagcggcgagcggcggtaa

SEQ ID NO: 2022 - DNA, 693 bp, Oryza sativa
  Clone ID: PAT_MRT4530_101833C.1
gccgcaattgttgctatgggtggggcatactggattttcccgcttcaatagaagcttgccttgctctggctgtgatatttgtcattgtttttgctatacttggagttgcatatggcttcttcgctgcaaccgtagccgtccagaggatcttgcagagacactatcacatacttaccaaaagggagctcacaaaggaatatgtggtggaggaccttcgcgggtgttatacaccaccaaagatggatccagagcaagagcagcgtctgaggactttgcagctcatgtagcttccactttctgcgaataggatgcaacaaacctcttgatgcgtgccgaggattgccatgctacataggatctgttgatacaaacattttccagtaatcatagtcgagactcgagaaccccagattagtatatacaattgctgcatggtcgaagatatgtttaggcacatcaatcctcgaaggaggcgaccctcgctgcagtatcaataggcatacaagcaaaccatacgttaccatgggatatgtttatagatgcgagcaagccatgcttggcaaaagtttatgcgtgtacttgtgcggttgcagcaatctacagctggactgtacttattagttgcatcgtacatgtatgctgagtgatatttttgcttgtgttgatgtgttaaagtattaagtgattttgccc

SEQ ID NO: 2023 - DNA, 316 bp, Oryza sativa
  Clone ID: PAT_MRT4530_101834C.1
ctgcctggattttattttggggtgaacttcataggtggtgagttcttactttttactttggggaacaattatcaggggctcccctgggttttttttttattaccaaaaaactagggccccgtccaggctgggacaattcacaaacaaggttttggtttccggccgggctgtcccaaacagaagcccaatttttatgtcaaacatttatggccttcaaaaggggcaaaaccttcccataaaggccaccccgcgggtgaaaatggaaattccacccctcaatgggcttatctctttccctcccttctaattccattta

SEQ ID NO: 2024 - DNA, 738 bp, Oryza sativa
  Clone ID: PAT_MRT4530_101835C.1
atggcggcacctggtcccaacgacttcctcgtcacctccatggtggacgtcctggcgctggaggacgtcttcggccaccacccgccgcccttggcccgcgtcgtcgtccaggagctcgaccgcctcgtcgacgcctcggatgtcttcccttggctcggcaaggcgtcggacatgtccaaggacctcaacaagcggaagctccagttcaagcggatcctcgaccgcgtcactgccgccgccgccgtgctcccctccgacctcgtcagccacgcgcgcgggctggagctgctcgaggcgcgcttcggcgaacctctcccagccgcggggcgcgccgtcaccgccgaggagttccgcgatctggtctccttggcgaatcgcgtgtcctgggacgcgcgcaacgcccacctccgcgccactgctgtacgttggtacctggaggcgctcatccatgatgtcgaggccactctccacgacaaggtggtcttgtcagacttgaagaatgctgacagcatcaaaccctgcaaagaagtccgcaatcctggttcagaagcagaaggaaaggtaccagggaaaaaaacagcatggtctgagccactagcaagagttatactgagaataaggcagacgatacataatacaatagaaaagttacgaatcgcaggcattcaagctacctctgctcatgacctcttgtttttggtggaaaagccaagctgtgaccaggtgcaccatgcataa

SEQ ID NO: 2025 - DNA, 908 bp, Oryza sativa
  Clone ID: PAT_MRT4530_101836C.1
cagctttcccacttcccagcttctctttcttgctccgtcaatacaccagcacacaaatcaatcctagcatctaccaagttcctcggactcttcgtcgttccaagttctcaagttcatcgcagcagcagcaatggtgcaaaagatcgtgatcaaggtgcacatgtcgagcgacaagtgccggaggaaggcgatggcgctggcggcgtcgacgggcggcgtggtgtcggtggagctcgccggcgacgacaggagcaaggtggtggtggtgggcgacgtggactccatcgggctgacgaacgcgctgcggcggaaggtggacgggtcggcggagctggtggaggtgagcgacgccagcaagaagaaggaggaggaggcgaagaagaaggaggagaaggaggagctggtgtactaccaccatggctacggctactaccaccccggcggcgtgtatcaccaccacccgggctacgggcctcacggctgcccctgcggctgcaacccgagcccggacagcacctgctccatcatgtagaggagaggaaatgcaatcagggcggaatccagaatgagtttggagggaggctcgtctttacgacctcccttcttcttcttctccatccccctatcttctcttcacggagatttagggggacaggggaattgaagaagggaatggatgtcgagccttccagcatctattctggatccgtacgtcctgttcatacttcacagtagctgtacagtactagcatgagttttgtgtataaagattacggtttgttttgctgatccctctactatgaagtggtgttttgtgtctcatggtatgaagtggggtcgaggatgtgagatgatttgaggttttgaacaaggcgatcttggtattttcaaaaaaaaaaaaaaaaaaa

SEQ ID NO: 2026 - DNA, 204 bp, Oryza sativa
  Clone ID: PAT_MRT4530_101837C.1
atgggagcattaagtatattaaaggataacaagcttggattggaagttgtagagtatggaacattgcaagtgttgtatgtgacaacaaatgttattttaggtcagctatatggtacctcaaatcttaattttcataagatttgggatgtgaagattctagaaaagtactggcttctaccagaacgcgctctactccctacctag

SEQ ID NO: 2027 - DNA, 234 bp, Oryza sativa
  Clone ID: PAT_MRT4530_101838C.1
atggcaacgaggagctctggtggtgatcgcagccgggtgagtgcatcaaaactcattcctagacgagtgggttccggtctcgttgaacgagggagggaacacaagggagaagaggggcgctgggaggaaggagcgacagggaggaggggcgccagagagaggagaggggctgtgagggagaggagagaggccgtggggggaagggggcgcgtgcaggtaggccggatcaaataa

SEQ ID NO: 2028 - DNA, 172 bp, Oryza sativa
  Clone ID: PAT_MRT4530_101839C.1
cttttgtcaccctggccctagcttggactgatgggggggcccttaactatcatgggggggtcataagaaagcataaggtcaaccgaatcacacctacgatcgcacatgtgataaaactacggacacatgcttaagacaagtaggacgctagactacagggcaggctaatgca

SEQ ID NO: 2029 - DNA, 2067 bp, Oryza sativa
  Clone ID: PAT_MRT4530_10183C.1
atggctgtcgctgaccttgcctttgacatccccgaccttcccaccgccgaattcacccctcccgaggctggcaccatcattgttatttctcccgaggcctctgtggtatacgtcatcgccactcctatgctcgtcattggcagatccacccctcccaaggcacacagcgacagatttggtgcccccgaaagggtgggtggatcttggtgcgccacgagagacaagacgaggagcgggaacggcgtcgcgacgaaggacgtcgtcatcgacgacgagaccggcgtgtcggtccgcgtgttcctccccgtcgacgcggccgcggcggccgcggcggccgggaggaggctcccccttgtcgtctacgtccacggcggcgccttctgcacggggagcgcctccgccaggatgttccacgactacgccgagtcgctctccgctcgcgccgcggcggtcgtcgtgtccgtggattaccgcctcgcgccggcgcaccccgtgcccgcggcttacaacgacgcgtgggcggcgctccggtgggcggcttcccgccgcctctccgacgacacctgggtcggcgactacgccgacctctcgtgcgtgttcctcgccggcgagagcgtcggcgccaacatcgtgcacaacgtggcagtacgtgccggcgccgccacccgcaacgctggcgaggtgttcgacgacgacgacgacatcgacatcgagggcatgatactgctgcagccatacttctggggcaccgagcggctgccgtgcgagacgccggacgcctgctggcgcacgcgcgagccgccgccgatgctgctgccggagaggatcgacgccctctggccgtacgtgacggcgggcaacaacaacaacggcggcgacgatccccggatcgaccctcccgccgaggcgatagcgtcgctgccgtgccgccgcgcgctggtgagcgtggccacggaggacgtccttcgcgaccgcgggcggcggtacgcggcggcgctgcgcggcggcgcgtggggcggcgaggcgacgctggtggagtccaggtgcgtggaacactgcttccacctcttgccggagttcggctcccacgcggagaccggcgtgctcatggatcgcgtcgccatgttcatcgccaagggcaagacaccaccaccgatcagcatgctgatggaggaggagcgcgccactaagaaaacgaggtcaagtgcggtggtgccagcttgttggagagttccccgcgggccgaggtgtacggcccaagctgtggttgggcttcgacgtgccgggtttggggtgggcaacatgatcaggcttcccagtaaggcccagaagtatcatcgtgttcctgcaattgctctacggaaggagctcgagcacggacgcgggaaggaccagcatcacatgaacacaaacaagatcacatcgccgtcgacctcttcccgttcctacgcgcgaacgtacaaggacggcctcgtcaggaagaggctccctttggtttgtctacgtccatggcggcgcgttctgtaccgcgagcgcctccgcgcgccccgttgttccaccgctacgcggagtcactcgccgcgcgcgccgcggcagtcgccgtctccttcgactaccgcgtcgcgccggagcacccctgtgcccgcggcttacgacgacgcgtgggcggcgctccggtacggctcggcgcctcccgcagtggcgccggcggcggcgaggacgaaggcatcgacatcgaaggtgggctggggcaccgaccggttaccgtccgagacaccggccgcctggcgcgccacggcgctgaagctgcggcgcccggagatgcgcgacggcgcgtggggcggcggggcgacgctggtggagtccgacggcgaggaccactgcttccacctctcgtcgaagtttaacaacccgaacgccgtggcgctcctggatcacgtcgtcgccgagttcatcgccatgaaggggtggatccagcctgagggcggcgaggtctcgtgcccccactactggcgtgaagactataagagcctccacgaaaatcctattaaaattttctatatgtaa

SEQ ID NO: 2030 - DNA, 1759 bp, Oryza sativa
  Clone ID: PAT_MRT4530_101840C.1
agggggagtccccatcggggtcctcgatctcctccacctcctcatactcctcctcctcgtcctccaccaccaccacctcctcctcctccaccaccacctccgcctccgcctcctcctccaccccctccccctcccgtgtcgatcccgccgcccccacacgcgcggatccaccggctgcgacaggaggggcggatccgacactccctccccctcctgcgcggatcccaccgcctctcacgtgcgcagatccactggcggcggggtgaagacgaaggctgtcatcgccatcgagtcgcggtcgtctctatcttttgcccgttccatcatctcctttcagcgaggaggcatttccccggtttcctctctgtccgggtccaggccagcacgaactacgcccacaacgaacttttagctgtgtttagcttaagccacccaccactcgcactcgcgtacgtgctcgtcgcatgtgagttagctttggtcgccggcatggcgctcacggcggcggcggcgagcggcggcgacgcgcacgacgacgagtacgcgaagctggtgcgggggatgaacccgccgagggtggtggtggacaacgaggcgtgcgacgaggcgacggtgatccgggtcgacagcgtcagcagccacggcacgctgctcgccgtcgtccaggtcatcgccgacctcggcctcgtcatccgcaaggcctacttctcctccgacggcagctggttcatggacggtcagtctctcgccgccgtttcttgatttgagtttctactaaattctaacccgcggcaggaatcggccccagggttcaacgtcaccgaccgcgacggcaacaaggtgctcgatgaccaaaccatctcctacagtccaaacggtactagtgctgttcttgatcgaaatttggggattgaattaatttgtttgttgatttgtggtttggttggttgattgatttttagacgctggaggcggatgactggtactacccggaggtgaggaacacggtggggatcgtgccggcggaggagtacacggtgatcgagctcaccggcaccgaccgaccggggctcctctccgaggtgtgcgccgcgcgcgccggcatgcgctgcgccgtgcggagcgccgagctgtggacgcacaacacccgcgtcgccgccgtcgtgcacgtcaccgacgacggcggctccggcggcgccatcgaggacgaggcccgcatcgccgacatcagcacccgcctcgggaacctcctccgcggccagagcggcgtgcgcgccgccgccgccgccgctccgggcgggctcacccacaaggagcgccgcctccaccagatgatgttcgacgaccgcgactacgacggcggcggcggcgccgcctcctcctcgccgcgggggcggtccccgaccccggcgacggaggtgtccgtgacgccgtgcgcggagcgcgggtacaccgcggtggttgtgcggtgccgggaccggcccaagctgctgttcgacacggtgtgcaccatcaccgacatggggtacgtcatccaccacggcgcggtgagcagcgagccccgcggcggcgcgtaccaggagtactacatccggcacgtcgacggcgaccccgtccgctccgaggcagagcggcagcgcgtggtgcagtgcctcgaggccgccatcgagcgccgcaccgccgacgggctggcgctggaggtccgcaccggcgaccgcgccggcctcctctccgacgtcacccgcatcttccgcgagaa

SEQ ID NO: 2031 - DNA, 561 bp, Oryza sativa
  Clone ID: PAT_MRT4530_101841C.1
ggcaaaagctgcctccgccgcgtctcctcctcctctcatctctctcaccccccgcgccgcgccgcacacgaagccaaaatttcccaccaccagcagcagcagcagcagcagcaagaggaggcagctttaggagctcgtggattttgtttttctatcccagatcggtcggtcgatcgccacgcggcggctgcatgctgatgctgcggggcggcggcggcggcggaggcggaggcggaagcggcatggagggaacgagagtgggggagccggcggattgatcgaccctatggatctgggcgcatggcgggattcccgttaggaggcggcggagggaggcacggccgcgacgaccaccaccgacctcccgttaaccccaccgactccgccgccgcgttcctgtacgcgagcaccgcgtcccgtggcgggttccagctatggcagcagcagccgccgccggccgcgcacccgttctacgcgcagaacatcatccgcttcgccgatgaccccgccgcgccgacctcctcgcgtggcgggaggggcggcggacccggtggctccggc

SEQ ID NO: 2032 - DNA, 200 bp, Oryza sativa
  Clone ID: PAT_MRT4530_101842C.1
tagaagagttttttttcacctaacaggggaaaggtgagatgaccaacacagcacagcttgaaactgcacctgtgtagccaccttgcttgagaagtaatgccatgacttgaacctttgttcgtctggaacagcaacacttcaagtatgcaaaaacctcttggaagtggccatatacattttgtaaaaaaaaaaaaaaaaaa

SEQ ID NO: 2033 - DNA, 414 bp, Oryza sativa
  unsure (1)..(414): unsure at all n locations
  Clone ID: PAT_MRT4530_101843C.1
aaaacaaggancagaaccgnagaggcaagggggggaaaaaggcacaaggccccgcacgaccaccaacacagaacccnaacgccccncnnaacaancccgccgcggggcgccaagaggaggaanncnccccggaaaggaggcagcnggagacgacgccgacaaggnaccacgacaaccggcnaagccagcagcacgacgagggagccncccacggcgaggacgacgggnnngaaggcaacgacgacggagacaagcaacccgaancggcagaacncgaagcnggcgaggaacccnnagaagagnccacaagacccccngaaccccaagaagaaaccggacccaaagnaacngcangaggcnnagagaagaacccacnnaaagaancnacccaccaacccaagagacaggacccaa

SEQ ID NO: 2034 - DNA, 1659 bp, Oryza sativa
  Clone ID: PAT_MRT4530_101844C.1
ttacatcggactagttgggaattcgatcttgcactgcctcctgctgctcccgcccttcccaccggcccaccccctcagcctgcggagcaatctgggccgtccgatgctcgtgcacccgccggcgacgaaccccatcatgcacgacggctccgccgcgccgcgcatctccgacgacgagctcgatgacgccgacgccgccttgcagagctccacctcgttgctcggcgccaccgcgaccaccaccttctcccccttgtgccgcggctgcgccggtgtctcgtcgccgatgatcgccgccggcgtgccgacctcgccgccgtcgaggacgaggaggtcgtgctgcagccacgccgtgatccagccgaggtagatcatctcctccatgtcggccgcccaccggtcccggagcgcctccagcccgtcaagaacgtccctgccgctcgaccccagctttctcatgcttctctccacaatcacctccacattctcattgtttgttcctttctccttctgcagctgcaaagtgagctgcttcatctcctccatgaactgctcaaagccctggcaccttgttgccatttctgcctccctggcatcaagagccaggactctttcatcaatggcgtccaggtcttgcttgttcttcttccagatcttcttggacttgctctgcatcgcatcgaacctagctcgcatcgtcgcgaactcttcagcagatgcgcggatctccgcagcagctgcttccagcctctggttctgagactccagctgctccagcttcatccccaggcacatgatctgcatcttctggtatgttgattcctgctccttcatgtcgcagtagtcatggaactgcgattcgatgctcgcagcctgctcttcgagggcggacaccatgcgcttcaagctgttgacgtcttccatcatcattctctgatcatcttgaactctattgactgaaacttctgatgaactatcggaggcctcaatagttgcatttggaggaatttcctgaacgcccttcttcccataagccagctcaggaggaactatgatcaacctctggcctccaaccttcattccctcaaccccaagatccaatccctttagaacattgcctctttcagaattgccaatatcaaacccatatggcgttccgccaccaacaccgagaccctgcctgcttgtcatgaatgttatgcccttccacttggccacataatgtactgcgacacgggatcccttaacagccttgagcccagatcccaccgtgatgtcgtaatacctgctcaaagcttcggaagttacacggcattcagaaaatggaaaatagcaaagaatggtctgccttccagtcacacgataacagaacttaaggccattgggcagggtggtgaactcgctctccggaatcttggcgctcctgagcgctctccggctggtagacaccgcatcggcgtctcccccagccacgccaatccccacagctgcaccggtggcggcgaggagggaggcgagccatcgccgccgggtggtcccgtcgtgggaggcgccgccggagcagcagcggcaggcgaaggcggccggccgccgcggccgcgccgtccccgccgccggcgagagcgggagggcgaggcgcgcggagagggagagctccat

SEQ ID NO: 2035 - DNA, 1272 bp, Oryza sativa
  Clone ID: PAT_MRT4530_101845C.1
atggcggaagagagagaaagctttgaaggtcagtgggcgccctccgatgtaacggaggagaacttgaaggagatggtggcgcacggcgtccttccggcaaaagagatcatcgggtggcgtccagcatatggtgaaatgttcccgacccccgacacacacgaggtggtggaattcgccctgatgaagtcagatcctccaatcgctcaacgccgctcaccccgtcggcaaactggtcaagctggcggaggaccaaaaatccggtctgatactcaacctaacacctctcaatcggctaaccagtcagacttccgcaagaggaaattggttctgagtgacgatgaaaatgacgatgctgaaaaggctggcagcaaaggggtgactggaaaacagccaaggcaagctaacccgaagaagaaaacatccagtcgtcccatgccgaaaatcaggaagtcctccagatccttctggaaaaggcctgagccgactgacacggagacgggtccttcaaaagaaaccggagcaactgccgaagatcgcctgagtgataatcaaccagcaaccgacaatgtagagaccagtaacgagcccccgactggaaatcagtcggccgaagctggagtcggtgctaatcaggagcccccgactagaaaccagtcaggtacagaacaaaataatgacatcccggaagtagaagcccaggctgatagccctcccaagacgagtgctggcgtcgactctggaactaactctcctgttagggccccgatgatcggtgacgaagaagaggtcctccggatacaatcggctgaagattctcgcccacccatattagtcaagtggtgggatgacgaaatgcaaccacaggggatcgtaataaataaacaaaaagaggacgaggaagtatgtctgctgaaaaagacactcggccaagctactcgccttgtaaatgcccaattcgacgtcttagttaataaaattaagaagcttgaaggagccagagatgaagtcgccaatgccgctacgccacttgtccaggccatgtttttcaataacaacggtccaagttcacttgatgttgtcgaaatcttcgacaagctgagagctactccggatacatactttaagaacatcaaagaagctgggagtatgggagcaggcctagcgctggcgatgaccaagtccttgtacccgaaaattgatattgatgctgttgacggctttgaagatgggacaagtgaagaagccgcccttgacctcatcagtgatgcgtaa

SEQ ID NO: 2036 - DNA, 1071 bp, Oryza sativa
  unsure (1)..(1071): unsure at all n locations
  Clone ID: PAT_MRT4530_101846C.1
ccggccgatccggcttttgcacgcgcacccgatgtcacgccccccccacccccgctgcttccccacccgcctcacccgcgctctcacgggcatggccgcgtccgcgcgcgccgtctttcccggggccgtcggaggtgcggggatccctcctgctcggacccccccccaccgcgccgggaaacgactagcactactactagtaagcaggcaccagataagcatcactccctcccactccacccaccacatcagcatcagcaagcagcagcagcagaagcagatcgatcgatcgatcgccatgagcgtggtgatcctggacgggtcgacggtgcggggcttcgtggcggacgacgacgccttcgcccgcagcgtcgacgcgcgcttcgaggcgctggacgccaacggcgacggcgtgctgtcccgcgccgagctccgccgcgcgctcgagtccttccgcctcctcgacggcgccgggttcggctccgccgagccggccccgctccccgccgaggtctccgcgctctacgactccgtcttcgagcagttcgacgccgaccacagcggcgccgtcgaccgcgccgagttccgcgaccagatgcgccgcatcatgctcgccgtcgccgacggcctcggctcccagccgctccaggtcgccgtcgacgacgaggggggcagcttcctcctcgaggccgccgagcacgaggccgcctccatcgccgccaagatcgacgcccagcgcgccgccgatgccgccgccgccgccgacgccaagtgacgccggccacgtcatcgcaaccgttgcatcggatcgggcttgttttttttttttttttactcttcacgtgtaccgtgtccgtgtgtgtcgaggtgtcggtgtacgtgtacgtatcacaggtggcaacgtacctctctgctacgcttatcaaactggagactactctgctttgaatggaaataaaataattttctatccactctaaaaaaacctcatttatttgctcgagaaaaaaaaaannnnnnnnnnnnnnnnnnnnnnnnnnnnnnnnnnnnnnnnnnnnnnnnnnnnngtac

SEQ ID NO: 2037 - DNA, 1353 bp, Oryza sativa
  Clone ID: PAT_MRT4530_101847C.1
atggatcgtatgctgaagctgaaggagcagggtctgcaaggagaacagatcacccggcatttcatcaagagccggctggccccaatcaatgaaagatctcgcgcggcctttgaattcgatggcaagcatgaccctaaccgtgaagatcctaaatctcttgaattcaaagttatgaacgagagaatgtataaaatcttctcaaatgcaatcgtagtcagctactcgcacttgctgccagtggtgccgtacaatgctttcaacccccctccaccgtcagacttccgcaagaggaatttggttctgagtgacgatgaaaatgacgatgctgaaaaggctggcagcaaaggggtgactggaaaacaatcaaggcaagctaatccgaagaagaaatcatccagtcgtcccatgccgaaaatcaaaaccgggccgactgtcgaaaatcgcccgagtgacaatcatccagcaaccgacaatgtagaaaccagcaacgagaccccgactggaaatcagtcggacgaagctggagtcggtgctaatcaggagccctcgactggaaaccagtcgggtacagaacaaaataatgacatcccggaagtagaggctcaagcaaacagccctcctaaaaaggatgccaacgtcaatccagggtccagctctcctgttagggtacaagggcctgctcgtccccgaccggaagttataacaggtgcaatgatcggtgacgaagaagaggtcctccggatacaatcggctgaagattctcgcccacccatattagtcaagtggtgggatgacgaaatgcagccgcaggggatcgtaataaataaacaaaaagaggacgaggaagtatgtctgctaaaaaagacactcggccaagctactcaccttgtaaatagaatccatctcaggaatgaggcgaagactgcaactcttgaaaaattagttccccaccttggaacccttgaagcaaccagagaccagctgcgtgaagccaaagagcttgctaggaagactgaacatgaccttagagatcggatcgccgagcttcaagactccaactttgagctgagcggttcatcaaaaggcaatacagtgaaagcttccaagatatccgagctagagaagcgaatccaagctctggagaaagacaaggccgaattggcgaaacagagggactcggctctgaaagatgtcgaagacgggacaagtgaagaggctgcccttgaccttattagtgatgcgcaaaaggccgctgacaagatagccgctgatgtggttgagagattccaggacaacgatcttaagccgactgggtctgataattctgatgatgaaagaactgaatctaattga

SEQ ID NO: 2038 - DNA, 298 bp, Oryza sativa
  Clone ID: PAT_MRT4530_101848C.1
tttgtttaacactgcaatttttgtttttggcattcctcattatcaaaaagcgctgaacatcatcatcaacaaaataaaataaaacaaataaaaaaatagaaaagtttaattgctatacatcggtgtttgatcttcactgaccagtataaacaaatttccatcctttttttttttccacctccaacaaccaaccagaatgtctgccatccgtctctctcaactcgttctcatgacaccttatttcttcctcttaattaagcttatgtaaaaccatcatcaatttgttcgtccattcatc

SEQ ID NO: 2039 - DNA, 1485 bp, Oryza sativa
  Clone ID: PAT_MRT4530_101849C.1
atgagcgccaccgctttcgtgcgcacattacgcgatatcgcactatcgctgtttcaaaccgcgacgccggaattcgccttgatgaagtcagatcctccaattgctcaacaccgctcaccccgtcggcaaactggtcaagctggcggaggaccaaaaatccggaaactggttctgagtgacgatgaaaacgacgatgctgaaaaggctggcagcaaaggggtgactggaaaaccaaggcaagctcaccttaagaagaaaacatccggtcgtcccatgccgaaaatcaggaagtcctccaggaagccatctgacatagatccttctggaaaaggccctaagccgactgacatggagacgggtccttcaaaagaaactgggccgactgccgaaaatcgcacgagtgacaatcaaccagcaaccgacaatgtagagaccagcaacgagcccctgactggaaatcagtcggccgaagctggagttggtgctaatcaggagcccccgactggaaatcagtcgggtacagaacaaaataatgacatctcggaagtagagacccaggctgatagccctcccaagacgagtgttggcgccaactctagaactaattcccctgttagggtgcaaggacctgcttgtccccgaccggaaatcataacagatacagataaatttgtggtacagagaatccatctcaggaatgaggcgaagaccgcaacccttgaaaagctagttccccaccttggaacccttgaagcaaccagaaaccagctgcgtgaagccaaagagcttgctaggaaaactgaacatgaccttagagatcggatcgtggagcttcaagactctaactttgagctgagcggttcatcaaaagtgcaagcttccaagatatccgagctagagaagcgaatccaagctctagagaaagacaaggccgaattggcaaaacagagggactcggctctgaaagatgtcgaagaccgcaagatcaaatcccaggcccaattcgacgtcttagttaataaaatcaagaagcttgaaggagctagagatgaagtcgccaatgccgctacgccactcgtccaggccatgtttttcaataacaacggtccgagttcacttgatgctgtcgaaatcttcgacaagctgagagctgctccggatacatattttaagaacatcaaagaagctgggagtatgggggcagacctagcgttggcaatgaccaagtccttgtacccgaaaattgatattgatgctgttgacggctttgcagacgggacaagtgaagaggccgcccttgaccttatcagtgatgcgcaaaaggccgctgacaagataaccgctgatgtggttgagagattccaggacaacaatcttaagccgactgggtctgataattctgatgatgaaagaactgaatctaattgtttgtgtattctgatgataatgatgatgatggtggaggcacaatttgtacaatactga

SEQ ID NO: 2040 - DNA, 141 bp, Oryza sativa
  Clone ID: PAT_MRT4530_10184C.1
aaaaataaacattttccggaaccggaaattcccggaaacgacccacgcgtccggagatgccccggcaagcatcacggggcgcgtgctcgcgtacaggagacaagaaggcgtgcgtggagttgctgaccgacatcccgcaag

SEQ ID NO: 2041 - DNA, 1473 bp, Oryza sativa
  Clone ID: PAT_MRT4530_101850C.1
atggcaacgcagagcaggaagagacaagagcagtcccgactcttcctcggttcctcctgccgccgccgagcaggaaaggacgacgagcagcaacagctcttcctccaaccgctgccggaaaggatggaggctgcaggaaggaggccgcggccgtcgcagactcacacatacgcgggaacgcctccggctcgcagatccgccaccgccgctgccactgcctgtgcggtgtcgctctgtgggaaaaacgggagggttgcgtgtgacttacatcgggaattcgccttgatgaagtcagatcctccaattgctcaacgccgctcactccgtcagcaaactggtcaagctggcggaggaccaaaaatccggtctgactctcaacccaacacctctcaatcggctaaccagtcagacttccgcaagaggaaattggttccgagtgacgatgaaaatgacgatgctaaaaaagctggcagcaaaggggtgactggaaaacaaccaaagcaagctaacccgaagaagaaaacatccagtcctcccatgccgaaaatcaggaagtcctccaggaagccatctgacatagatccttctggaaaaggccctaagccgactgacacagaaacgggagccccagaacaaaataatgacatcccggaagtagagacccaggctgatagccctcctaaaaacgatgctagcgccaacccagggtccagctctcctgttaggagaatccatctcaggaatgaggcaaagactgcgactcttgaaaaattagttccccaccttggaacccttgaagcaaccagagaccagctgcgtgaagccagagagcttgctagaaagactgaacatgaccttagagatcggatcgccgagcttcaagactccaactttgagctgagcggttcgtcaaaagtgcaagcttccaagatatccgagctggagaggcgaatccaagctctggagaaagacaaggccgaattggcaaaacagagggactcggctctgaaagatgtcgaagatcgcaaaatcaaatcccaggctcagttcgacgtcttagttaacaaaatcaagaagcttgaaggaaccagagatgaagtcgccaatgccgctacgccactcgtccaggcgatgtttttcgataacaacggtccgagttcgcttgatgctgtcgaaatctttgacaagctgagagctgctccagatacatattttaagaacatcaaagaatctgggagtatgggagcaggcctatcgttggcgatgaccaagtccttatacccgaaaattgatattgatgctgttgacggctctgcagacgggacaagtgaggaggccgcccttgacctcatcagtgatgcgcaaaaggctgctgacaagatagccgctgatgtagttgagagattccaggacaacgatcttaagccgactgggtctgataattctgatgatgaaagaactgaatctaattga

SEQ ID NO: 2042 - DNA, 2472 bp, Oryza sativa
  unsure (1)..(2472): unsure at all n locations
  Clone ID: PAT_MRT4530_101851C.1
nnnnnnnnnnnnnnnnnnnnnnnnnntttttttttttttttttttttacttgaacacaaaccctccctcctcttgttaaaagctattctacacccatgaaaataaaaccataggagagaatgcagaaacacaatacacgatttacaagggctactctgcagacgactgactgactatacaggggattggtgagacttgagaggtacaaagaattagttggcttaaccagccatcattataataagatcctacaacaacccctactaatttacacaatctacgcgaacccgccgcttgccatagacggtagcagcgctctagcactatagcaacaagactaacactaccaaatactgacgatgttgatggcatccatcctcatcttcgtcgatgttgggccatctttgcctgagcctgctttatcctatccgcatacatcgggaggcgcgtgatctcatggatctcttctagaagcttctcttcggtgatattatctgtgatgctcctcattaccttgcggtatgtgttgatatcatttggagttgatttatcagatctaatacgcatgcagacccagcagccctcttccttattccaagagcactctacaatcctccctgagatagaggatggatcttcatttggaaatgctatgcgggaaccatccataagtttctttttgcctctctcataaaggaaaacaagctgacgattgtcacccccaacctcaaacaaaaagtcaacagaattcattgaagggtatttccacttgagaagaccttcatgggtacgagttacatatggatcatcccagccctgaaaaataagaccatcagcatcatgtgaaagtgatggaataaactccttaagtagcttcgttactgtagaaagaagccaaaaatcctttctcctgaccgaaaatagttccatatcatatttgtacattgggttgctcttaacgccactctcaaactgttttttttcataataacgtggacgaattatttcatcttcaagcagcctccatctttcagaaaatggcaacttggtttttgacacggcatcaagtgccatcagatcatatgctaaatacctcctcttcaatcctgaatctggtactgtgtctataatcatttctccatcaatcaaagtcatctcatgtagtccttcattaagattcctatggggaaagcgcatttgaactcttctgaagcaaaaattccgatcaatcaagaaacagccatccctcattataagcatcatatatcgggttccatcagctttccatgtagcaaagtagtatcgctgtctgagtagttgcaaattctcactgttaagagagacaggatgtgatccaggaaactgtgcatgccctctcacagggggcatttccagcaagcgataacatacgacacgcagagcatcttgctgatcatatggtacagcatctcctagcacatcatcattagtgataactttatcttccacctcattatgtactggtgcaagatcaccattctcatcatcatcatcttgcttggcttcaccatttaaatcaagatcggatgaccttttccattctggtgttgaagggcatgttatcatatgctcaggaacctcatgataaaatgaatacagtgcttcaatgtagtccctcttatatataccaggcggtctcctttttgcaaatatgtttatcgcctcagcgacgcaggatacttgtgttcgcataaggtaatggataatcatgaaaccagtacgattatgaccatgggtacagtgaacaagaatatatttaggattctttgactgcttctgtcggtcaagaaacatcatcacctcatagacaaaccaattaacagattcattatcaggtacagcatctcttcccttgcatggaatcttgacatgcttaataccttgccttgtccattctgcaggtgagtaatatcgagtagtatttgtcaaatcaatcaccaaacctatcatgccaataatatgaacatttcgaacaagaggaggagcagtaagtgcacatgtttcacaaaagaatttcagaattgcaatttcacgaccagcttttctttgtttattaactacttgtttggaagaatatcttttcccaggaggcaccaagtcattgaatgtttcatcaagaggaaccttggaaggtatgattttgtctattggctcaccaaatgctggacaattcatccaaccatcaggtgcctcttttattcgacctctaccagctctgttataaggtgcataatcgttcctaatctgctgagaatgtaatcttgagccttcatcttgttgctctctctttaattttttgcgtctctcttcacgctcccttcgcattgtagcaacagcagactcaacatgctcctcctgtgcaaaatcaacctcgacctgttgttcataaggctgttcatcttcctcaggcaatggtgaggcatttaaatccat

SEQ ID NO: 2043 - DNA, 1968 bp, Oryza sativa
  Clone ID: PAT_MRT4530_101852C.1
atgacggaagagagagaaagctttgagagccagtgggcgccatccgacgtaacggaggaaaacctgaaggagatggtggcgcacggtgttcttccggccaaggagatcatcgggtggcgtccagcatacggcaaaatgtttccaacccccgacatacacgagccccagccaaacaagagcaaaccatgtgttgttgggggagccggttttcaactgagggggaccttgagccaaaaatacttctccatgccattcaagacctcgaacaaaggttggcatgcgaactggttctatgtacaaaaccccgagccagtgcttcccgggtactcttgtctgcctccggtatatcaagatacctggaattcgcttcccattggagatgaggcagcccaagcacttgcattgatggatcgcatgctgaggctcaaagagcaaggtctgcaaggagaacagatcacccagcattttataaaaagccgactagcgccaattaaagagagatcctgcacagcctttgaatttgacggcaagcatgaccccaaccgtgaagatccagattctcttgagtttaaagtcatgaaggagagaatgtacaaaatcttctcgaatgctatcgtggtcagttattcgcacttgctgctagtggtgccatacaacgccttcaaccctcctccaccggaattcgctttgatgaaatctgaccctccaattgctcaacgccgctcaccccgttggaagacaagccaggccagtggagggccaaaaatcaagcctgctgatcaatctgacacttcgaagttgactaatcagtctgactctcggaagaggaaattgatttcaagcgacgatgaagatccctctggaaaagaccccacgtcaactgacacagagactggtccttcagcagaaactggactgactgccgaagaccgcccgggtaataatcaaccggcaaccgacaatgtagataccaacaacgagcccccgactggaaaccagtcagccgagactgaagtcagtgctgatcaggagcccccgactggaaaccagtcgggttcagaaccaaatagagatatcccagaagtagaagctcaagctaacaaccctcccaagacggacactggtgctagccctggaactagttctcctgttagggtgcaagaacctgctcgtcctcgactggaaattatcacagggccaatgattggcaatgaagaagagagaatccatcttaggaatgaggcgaagaccgcaaccctcgaaaaattagttccccaccttggaacccttgaatccaccagagaccagctacgcgaagctaaggagcttgccaagaaaactgagcatgatctgagagaccggatcgccgagctccaagactccaactttgagctgagcggttcgtcaaaagtgcaagcttccaagatatccgagctggagaagcgaatccaagctccggagaaagacaaggccgaattggcaaaacagagggactcagctctgaaagatgtcgaagatcgcaaaatcaaatcccaggctcagttcaacgtcttggttaacaaaattaagaagcttgaaggagccagagatgaagtcgccaatgccgctacgccactcgtccaggcgatgtttttcaataacaacggtctgagttcacttgatgctgtcgaaatcttcgacaagctgagagctactccggatacatattttaagaacatcaaagaagctgggagtatgggaggaggcctagcgctggcgatgaccaagtccttatacccgaaaattgatattgatgctgttgacggctttgcagacgggacaagtgaagaggccgcccttgacctcatcagtgatgcgcaaaaggctgctgacaagatagccgctgatgtagttgagagattccaggacaacaatcttaagccgactgagtctgataattctgatgatgaaagaactgagtctaattga

SEQ ID NO: 2044 - DNA, 2268 bp, Oryza sativa
  Clone ID: PAT_MRT4530_101853C.1
atggtggcgcacggtgttcttccggccaaggagatcatcgggtggcgtccagcatacggcgaaatgtttccaacccacgacacacacgaggtggttgtattctcctatttcttttacggcgggttttctcttccaacctcaaacttcttccaaggaattctggatttctatggtattagtctgcatcacctaaaccccaattccatagtccacattgccaacttcatccacgcttgcgaagcttttctggggattaggctgcatttcgctctattccgccgcatcttctttctcaagccccagccaaacaagagcaaaccatgtgttgttgggggagccagttttcaactgagggggaccttgagccaaaaatacttctccatgccattcaagacctggaataaatgttggcatgcaaattggttctatgtacaaaaccccgagccagtgtttcctgggtactcttgtctgcctccggtatatcaagatacccggaattcgcttcccatgggggatgaggcagcccaagcacttgcactgatggattgcatgctgaggctcaaagagcagggtctgcaaggagaacagatcacccgacattttataaaaagccgactagggccaattaaagagagatcccgcacagcctttgaatttgacggcaagcatgaccccacccgtgaagatccagattcacttgagtttaaagtcatgaaggagagaatgtacaaaatcttctcgaatgctatcgtggtcagttattcgcacttgctgccagtagtgctatacaacgccttcaaccctcctccaccggaattcgctttgatgaaatctgaccctccaattgctcaacgccattcaccccattggaagacaagccaggctagtggagggccaaaaatcaagcctgctaatcaacctgacacttcgaagttgactaatcaatctgactctcggaagaggaaattgatttcaagtgacgatgaaggtgatgatgcggaaaagacgggtaacaaaagggtgactggaaaacagtcaaagcaaaccaatccgaagaagaaaacgcccagtcgtcccatgccaaaaataaggaagtcatccagaaaaccatctgacatagatccctctggaaaagaccccacgtcaactgacacggagaccggtccttcagaagaaactggaccgactgccgaagaccgcctgggtaataatcaaccggcaaccgacaatgtagataccagcaacgagcccccgactggaaaccagtcggccgagactgaagtcagtgctgatcaggagcccccgactggaaaccagtcgggtatagaaccaaataaagatatcctagaagtagaagctcaagctaacaaccctcccaagacagacactggtgctagccctagaactaattctcctgttagggtgcaaggaactgctcgtcctcgaccggaaattatcacaggtccgatgatcggtgatgaagaagaggttctccggatacaatcggctgaagattctcgcccacccattttagtcaagtggtgggatgacgacatgcaaccacagggaattgtaataaataagcaaaaggaagatgaggaagtatgcctactgaaaaagacactcggccaagccactcgtcttgtaaatagaatccatcttaggaatgaggcgaatactgcaacccttgaaaagttagttccccaccttggaacccttgaagccactagaaaccagctgcacgaagctaaagagcttgccaagaagactgagcatgatgtgagagaccggatcgccaagctccaagactccaactttgagctgagcggttcatcaaaagtgcaagcttctaagatatctgagctgaagaagcgaatccaagctctagagaaagacaaggccgaattggcaaaacagagggactcggctctgaaagatgtcgaagttaacaaaatcaagaagcttgaaggagccagagataaagtcgccaatgccgctacgccactcgtccagaatatcaaagaagctggatgcatgagagcgagcctggcgttggcaatgaccaagtccttgtacccgaagattgacatcgatgctgttgatggctttgcagacgggacaagcgaagaagccgcccttgacctcatcaatgatgcgaaaaaagctgctgacaagatagccactgatgtagttgagaggttccaggaaaacgacctcaggccaactgggtctgacaattctaatgatgaaaaaactgaaactgattaa

SEQ ID NO: 2045 - DNA, 2079 bp, Oryza sativa
  Clone ID: PAT_MRT4530_101854C.1
atggcggaagagagagaaagctttgaaagtcagtgggcgccctccgatgtaacggaggagaacctgaaagagatggtggcgcacggcattcttctggcaaaagagatcatcaggtggcgtccagcgtacgctcttcctgagtactcttgccttccgccagtgtatcaagatacttggaacttactttcaatgagagatgaagctgctcaagcgcttgccttgatggatcgtatgctgaagctgaaggagcagggtctgcaaggggaacaaatcacccgacattttatcaagagccggttggccccaatcaaggaaagatctcgcatggcctttgaattcaacggcaagcatgaccctaaccgtgaagatccagaatctctcgagttcaagatcatgaaggagagaatgtacaaaatcttctcaaatgccatcgtggtcagctattcacacttactgccagtcgtgccatataatgccttcaaccctcctccaccggaattcgctttgatgaaatctgaccctccaattgctcaacgccgctcaccccgttggaagactatccaagccagtggagggccgaaaatccggtctgttgatcaaccagacacttcgaagtcgactaaccaatctgactctcgtaagagaaaattggttgtgagtgacgatgagggcgatgatgctgaaaaggctggcagcaaaggggagactggaaaacagccaaggcaagctaacccgaagaagaaaacatccagtcgtcccataccaaaaatcaggaagtcatccaggaagccatctaacatagatccttctggaaaagaccccgagccgactgacacggtgacgggtccttcaaaagaaaccgggccgaccgccgaagattgcccgagtgataatcaaccagcaactgataatgtagagaccagcaacgagcccccgactggaaatcagtcggccgaagctggagtcggtgttaatcaggagcccccgactggaaaccagccgagtatagaacaaaataatgatatcccagaagtagaggctcaagctaacagccctcctaaaaaggatgctagcgccgacccaggatccagctctcctgttagggtacaagggcctgcttgtccccgaccagaagttataacaggtccgatgaacggtgacgaagaagagatcctccggatacaatcggctgaagattctcgcccgcccatattagtcaagtggtgggatgacgaaatgcggccgcaggggatcgtaataaataaacaaaaagaggacgaggaagtatgtctgctaaaaaagacactcgaccaagctactcgccttgtaaatagaatccatctcaggaatgaggcgaagaccacaactcttgaaaaattagttccccatcttggaagccttgaagcaaccagagaccagctgcatgaagccaaagagcttgctaggaagactaaacatgaccttagagatcggattgccgagcttcaagactccaactttgagctgagcggttcatcaaaagtgcaagcttccaagatatccgagctggagaagcgaatccaagctctggagaaagacaaggccgaattggcaaaaaagagggactcggctctaaaagatgtcgaagatcgcaaaatcaaatcccaggctcagttcgacgtcttagttaacaaaatcaagaagcttgaaggagccagagatgaagtcgccaatgttgctacgccactcgtccaggcaatgtttttcaataacaacggtctgagttcacttgatgctgtcaaaagcttcgataagctgagagctgctccggatacatattttaagaacatcaaagaagctgggagtatgggagcaggcctagcgttggcgatgaccaagtccttgtacccgagaattgatattgatgctgttgacggctttgcagacgggacaagtgaagatgccgcacttgacctcatcagtgatgcgcaaaaagccgctgacaagatagccgctgatgtagttgaaagattccaggacaacgatcttaagccgactgggtctgataactctgatgatgaaaaaactgaatctaattga

SEQ ID NO: 2046 - DNA, 452 bp, Oryza sativa
  Clone ID: PAT_MRT4530_101855C.1
cattatcagttgaccatacaagatggattatgtttgatgcagtacacatcttaattctgcatctctaggaagaggttgtgcgtatatcttgtcaacatagtatggcagtctgcaaagtctcatggcgcaaatgctattttgagtgagggcatgtatgcgacaggatcatattgtggatgctgctactacaaacgcactatctggacttgtgcatagatgtgatatcggtaactagcattctaacagaaaaaggtctgacatctaatagcttcgcaatgagctatagacgagatggtaatgcgagaattaggtttgaagatcatggcggttcaaatcaagaggagacactattagatgataaccaacgacatagtacatgtacgaccagtataagtgagattacagatggaagtatacttagggaatagtaatgcagaagtataatctatgca

SEQ ID NO: 2047 - DNA, 345 bp, Oryza sativa
  Clone ID: PAT_MRT4530_101856C.1
atgtcctccaccgccaacggcagccgacgacaccgctgcccgccaactgccattgccagtcgacgccgcagtcactgccgcatccgccagccaccgccagagccgtggctgccaccgccgccgcgccgtccacgggcgtcgcgtagccaaccgcccgtcaacgttgtcgccatagacgccgtctgccaccgcagtcaccgccgccgctgtcgccagccgccgttggcaaccgttgccaccgtcgccgccgccaccagccgcatcgcagccgccggcaccccagatctagaggacctcgccgccggcaccgccaggacgagcgccgacgcgcccgaaccgccatag

SEQ ID NO: 2048 - DNA, 990 bp, Oryza sativa
  Clone ID: PAT_MRT4530_101857C.1
atgcgcaacttgtcagctctctccacctctttttcctgggaagaaatctcaagcgccatcctgcactcgcctccaaataaaagcccgggtcctgatggctacacaaatgagttctacaaatgcttcatctctactcttaagcctgacctgatcgcgctgttcaattccttccatgccaatgcagccgatctttcaggggttaacatctcttacatcactttaattccgaaaaaagaaacccctctcggcataacagatttcaggccaatatccttgctacacagtctgccaaagcttatcagcaaagtgctagcaaaccgggttcaaggggaaattcctgagttaattgatccaatgcagtctgcattcatcaaaggaagatcaatcacggagaattttatactagcttctgacattgttcaatgtgcgatcaaaaggaaaaaaccaacgattattctaaagcttgacttccaaaaagcttttgacacagttaactgggattgcttatacttggtcctacaccgcagaggattcgacgacacatggatcaattggatcaaacagattttggaaactggacaagcacacgtcttgatcaatggatcaacaggcgagtcatttaagtataggagaggagtccgtcaggtcgctgacgtcctacagcaaatgatacagcaagccttccactccgagcagttactccacccactggattctcactctcctcctcccacgctgcaatacgctgatgacaccctactcattttaaaaggatcgcttgagcaggctgaaataattaagagcattcttgaggaatttgctgcattctcagggctacagatcaatttcagcaagagtaccttcgtacccatacacatgaatgaacccgaggcaacggccatcgctgagcttttgcaatgccccatcagcccgcttccttgtaactatctaggtctaggtcttccgctctcgacagctgtcacaccctga

SEQ ID NO: 2049 - DNA, 320 bp, Oryza sativa
  Clone ID: PAT_MRT4530_101858C.1
acagtatgtttacgaaaaagagagaaggggagactacttgggtcagactgttcaggttatcccacatattacaaatgagatacaagattggattgagcgtatcgcgatggttcccgttgatggtgaggtggatcctgccgatgtctatataatagagctcggtggcactataggcgatattgaatccacgcaatttattgaagcctttagtcaattctcctatcgtgttggtaaataaattgaattattgcataacagatattttaattttctccatggtgatatgataaccttatttgcatgttatttttggacaggtg

SEQ ID NO: 2050 - DNA, 162 bp, Oryza sativa
  Clone ID: PAT_MRT4530_101859C.1
tccccagatgcatgccaaggacgatcatgggaggtcaagggtcccctgccccggcggcccggctactggaactccaaggtcatgcttggctgccacactgctgccgatgaccgcaacggcgacgtgctccatgtcttcgggcttataatggctattaactag

SEQ ID NO: 2051 - DNA, 701 bp, Oryza sativa
  Clone ID: PAT_MRT4530_10185C.1
gaactagtggatccccgggctgcaggagagtattggtgctaaccgcaacaagaggcagtcacggaaaagtagagatgagaatggagatgatggtgatgattctggcgggaactcggctcggggtggagactcatcaacacagaagaagccaagggtcgtgtggtctgttgagctgcaccgaaagtttgtggctgctgttaaccagcttggcatcgagaaggctgttccaaagaaaatattggatctcatgaatgtagagaacatcaccagggagaatgttgctagtcatttgcagaagtatcggctgtaccttaaacggttgagcactgatgcaagcaggcaggctaaccttgcagctgcatttggaggaaggaaccctgcttacataaacatgaattcatttggaaactacaacgcatatggtagataccgtacagtcccaactgctggccatacccaggcaaacaacattcttactaggatgaactccccttctgcgtttggtgttcatggtttgctgcattcacagccaattcagttaggacatgcccaaaataatctgagcacttcactgaatgatttaggagggcttaataatggtaacatgatcagaggtgcacagatgtcaacaattctaactggtccttctggtaactcctttccaaacatatcgaatggtgcaccgctggcaactgcgaaca

SEQ ID NO: 2052 - DNA, 303 bp, Oryza sativa
  Clone ID: PAT_MRT4530_101860C.1
atggcgtggtggcgaaaaggcggtgcctcactacgcaatgtccggggtgcaccgccaatctgccatgccgctatgtacgatgtccagcggcgtatcatcgtcctaccgatcactgccgcggttgcccgcagacgacgcctagagtggatcgactcggggccggcgacgcgggtcgatctctcgggaggcgggacgggggccaatgagctcggaggcgacgtcctcaacggcggatcgagcgacgatgaaggcgatagggccattagtttctctactggaataagttcatttttggtcccttaa

SEQ ID NO: 2053 - DNA, 161 bp, Oryza sativa
  unsure (1)..(161): unsure at all n locations
  Clone ID: PAT_MRT4530_101861C.1
gttgcgcgagtcatatcgagagagctgtaaccaanagtttatttacagtcacatgtgtgtacgagcccagtctgngtttctaccgttatcctgttcttgatatggcgtttactccattactgtgcttgaggtgtgagattgctgcagcgagcagtkgataa

SEQ ID NO: 2054 - DNA, 635 bp, Oryza sativa
  Clone ID: PAT_MRT4530_101862C.1
ggtcttgagtgactgacggacctatctactccctccgctcgcggagctaatggcgacgccggcgagcttccaccaccccgcctccccgcagccggcgatacccggcgcggcggcggcggcggtggccgcgtgcgccgccatggccgtctcctacgtcgcggtgctctacgcccccacggccctcctccgcctcccgcccccgacctccctccacgtcttcctccaccgccgcttcctctgcgccgccttctcctcctcggcctccctcctcgccaccgcctccctcctccgcgtgtggagcatcggagattcgtccgtcgtgctcgccgtgtttggcattcggagagatcacctgcttcaagcggtggcgattcccctcctccttacatcgctagtgtacgctggctcgttcgtcgcgaggctctggctgctggcgaattcgtgcggcggaggctatgaagagccggagataggctgggcacagaggcttgctcaccggatccgtgcctccgtaggagatgtgatggtttggcgcaactgcgtagtggcaccaattacagaggaattggttttccgggcgtgcatgagtaaagttgtttgatgtggaggattcaaaatatataacattatatttc

SEQ ID NO: 2055 - DNA, 1648 bp, Oryza sativa
  Clone ID: PAT_MRT4530_101863C.1
ttttttttttttttttttttttttttttttttggtgccatggcagaaatcatatcgcgttcaatcactcaagttacaaaagtacaacggtatacatgaatgagaacatatgcatacaaccttcagttcactgtgctaagttatttcccatcttacagcagaacaaatgttcagaaaagccgaacgagatattctaacgttgaagggttgcctgcacatatattttgatcaagcaaggtagagcatcatgcagatcaaaccaaggggattatctcctggaaatgctagaagggtgaaaccatccatcattttacagtcttcccgaaacctcaaacaagaatatgatgaccttagcctataagaaaaaactcggtgagtatctctgcctcgtacttcatatctgctgcgctttggctttcttccgcgccagagctctttctctggcagcagcaagtgcatcagcatttctcttatagtgttcatccgtgatctgtgctggttgagtattctgtggattctgggtctgaggagctggttgggtattttctggtgtctgggtctgaggagcatccaaggaaacatctgcatttttctcggtagatctagcagcagctgaatcccttgattgagttgtagcaggttcttccacacttctactttcattggccgtctctgctccttcaccggagtcccttttgtgcttaggagagcgatcggatacttcagcaccaaccttgctagttttagcatcttgaactttctcgtctaacttttcaggtttagcatgttttgtattgtcatgtgtctgtgcaccgaaagcaacattcttactaagaccaaagtaaaaatcactcaagtctttcttcttagtaacatcttccttttcttcttgaagctgccgccgcttctcttcctccagccatttccgctcctcctcaagtttcttcctgtaggcagatgtaacaaatttgtctttgtcaccatataggtggtcttccttactcctctctttttgaagcttcctctcataaataatgtcctgctctcgtttacgttgttcggctttctccttaagtgccgcaatgtattttgactcgcgaactaccctgtcctgcatcttggggagggcggccttctgcttcatgtcgtcataaacctcgtcgtaggcgaacaccgagggatcctcttccatcgccttcttctgctgctcttccaccttctgctgggatcgcttcttgtacgactgccggaggatgtcggcctccacgtcatcgtcgccatcgtcggcgaaggccgccagggggcgggccggcggcggcggcggcgcccgcgacgacgaggacgccgccggcttcgtgcggagctgcagcccgtacctctgcatcgcggcggcggcgtccaggtggtgcgcggattcgacgcggagcaaaccctagtctcgggcaaggggaggaggcctcctgacgcggagaaatccctaggattcggcaagggggaggagacccgtggatgaggcgggcagcgagcgaaggaagcaggggcgacgagccggcgaccgacggcgacggcggtgagggtcgccggcggcgacctcgtccagcgactcgcgaggaagaggagcgaagggcccctgcagcccggggatccac

SEQ ID NO: 2056 - DNA, 633 bp, Oryza sativa
  Clone ID: PAT_MRT4530_101864C.1
atggaggatgaatcgctggacaaggcttctctcacaaagaccattggggcggtgagacatgatacgaggaggagcaaaaccatggatacgaccaccacgacagccttgcatcataatgtcggcatcgatggcgtggaggttggaaatggcacggtgttggttggggacatggagggcgtggtggaggttggggatggggacggtgtggcggaggttgttgcgtcctccgctagaagcaccactggccaccaggcagagcgaaatctgggagggaggggggaggggagccgccgccgtggccgggagccgtgcctcctcgccgatgtcgccctctgccgccaccgcccaccgccgccgccgcgctcccccaagcccctccaaatctgggagagacgggccgcgccgcgccgccctcctccgtcgcgctactcggccgcgccgcctcgcctcctcaccgctgccgccctccgccgccgggagccgccgtcggggagagtagaagtgaggggaggggagaggaggagaggtgaggagaggggagaggccgatgaggggaggggaaaggtggagagatgtggaggggaggagaggcgatcatttggttctaagggtcatgtccgtctgcgaaaataa

SEQ ID NO: 2057 - DNA, 1444 bp, Oryza sativa
  Clone ID: PAT_MRT4530_101865C.1
atggcgtccatggcggcgagaagtagcaggaagcgcaggagcccgccgccgcgtgggctcggggacctccacgacgacgttctggagcgcgtcctggcgcgcctcccgccggccaccttcttccgcctccgcgccgtctgccgccgctggagcgccgccgccgcgtcgcccacgttcctccgcgcctgcgcccgcgtcccgtcgcgggacccgtggttcctcatgctctccggcgcccgcccccgcccgccgctcgccttcgacgccgccggccgctcctggatcccttgccgcgccgcgccgggcggcagcgacggcggcgccgacgccgccgtcccggtggcgtcgtccggcggcctcgtcctctaccgcgcgccgggcacgggcgagctcctcgtcgcgaacccgctcaccggcgcgagccgtgccctcccctcgccgccgggggcccacggcggcgcgccgcggctccacgccattgccatgtacggctccccctaccgcgtggcgctcttcgcggacgagctccccgacctgtccatgtcggtgttcgactcgtccaggggctcgtgggagggccctgtcgcgctctcccggaggcccgacgccgccgcgctgctccccgacgacgcgccgtcccagggcggcgccgacgacacggtctacttcctcagcaagtccggcgacgtggtggccaccaacatgcagcgcagcgcgtcgaagcagtactcctcggtggtggtcgccgcgtcgtccgacggcggcgacgccgtggcctacttcctgagccactccggcacggtggtcgcctgcgacacggcgcgccgcacgttcgccgagctcccccgcatcctcccggtctacttcgagtactccatcgacgtcgtggcctgcgacggcgccgcctacgccgtcgtgctggcggagtacctcgacacggcgagcctgcgggtgtgggggttcgccggcggcgcgtggaggcaggtggccgccatgccgccggccatgtcgcacgcgttccacggcaagaaggccgacatcaactgcgtcggccacggcggccgcctcatggtctgcgtgagctccggcgaggccaacggctgcttcatgtgcgacgtcggcagcaaccagtgggaggagctccccaagtgcgtcaatggcgatggagaggtcaacgacttcttggccgctttctccttcgagcctaggctagagattagcgtctaattaagcgcgtgtgattagttcttgtgtgttaattaaggagctctgttttgtgttgctccttgtttgcttgcttgattacttgatgtgcattagacatctagtgatcactgtttcttttttgagtgatccaattatgtgatttcagatttgtttcatggatatcaaattgagtcctttcgcgcggccagctctcccccgcgggccggtttccattttc

SEQ ID NO: 2058 - DNA, 145 bp, Oryza sativa
  Clone ID: PAT_MRT4530_101866C.1
ctcccttgggtggtggagttcccttgctactcgcttcatcttcatttcattttccccgttctttccccctaagtccgacatcgtggatcactcaaagggcccggaacctcctggtgatgaacaccggaacttccgggcaggatga

SEQ ID NO: 2059 - DNA, 714 bp, Oryza sativa
  unsure (1)..(714): unsure at all n locations
  Clone ID: PAT_MRT4530_101867C.1
aacgcctntaccattgtacctcggatggccaaaaagggaatctctgtttgccccacaaggaggctgtgtctntcttgtgtacttgccattgctcggggtgcccaacggggttggggcccttgttggccttgtgtcgaggaccctntgacctatgatgctggagctttaggggataattctcggagccctgatgtgtgcgccggaaccctaagatgtaatgcgtgagtgccctgagaaatgaaatgcctagtggtgcggtttgaactttggatgcgcggcaaccctcatataaggtntgtgctgtgcaatgcaaaccgaaaaggtgggagtgtggctagctaggatttgtgctggtgtgtctgggattacgtgatgtgctgccctgcacaggatggaggtgatgactgacatgacccaactgaatgtggtgaatgaatgacctgtgcatgctaacgtgtgnctgtgagtggatggaaaacctgtgtgatgaaaatggtatgatgatgtgtgccctcactggcagtggtaaagcactgaagggtgcacctgcaccatgcaccatgcacaccaatgatgcaatccaatgtcttgatgaagcatgatcgctgccagtgcaacttgcaaccacgtttctgagccattccngtcacnccgtagaatgaatagaccaatcaaatctgaaatattcttctctaaaaaaaaaaaaaaaaaaaa

SEQ ID NO: 2060 - DNA, 1516 bp, Oryza sativa
  Clone ID: PAT_MRT4530_101868C.1
ggatgaatctccatccttacacgaacagttacccaaatgccaacagtggaaactaaattatgcagcaactaagctaccaacataaatatcacatttacactacccatcttagtttagtgcatgaggagtcaaacaaactaaatgaatcccccaccaacagcaaaaacatttttagaagacctagcaaggtgtcattttaaaacatgatacgctcaaagctccaaaagaccagatatcaacaattggaatatctaacaggcatcaatctgtttctccttctgttgttctgggtaagacgaacttttttttttttttcattttgaagcaacgcgacaatgttgtcaagatgcgattattggcttcaattccctcttaagttggggaagtctactgtaatccattcttctagcctctatctgtagtttttcaatgaagaagcgctataatttctggttctggctcaggacctctagatcttttcagtgcttgaataggaccatcaggctctttcatcccatctccactactagcatgaatgtttcccgatgaggttgcttctttctccttctgcttctgcttctccctgtccctctgaatcttggagaccaagccggccctcctcttcatcttggtgggatcctcaggttcagagaccccggaggccttgtccctcaccttccagacggcgcctctccggaggagcagcttcgccgccttccacccatcggtgctggtgtcgatgacggtgacctcggtcctgctacacctctcgccgtcgccatcggcggcgcggtcggagcggcggcgcttcttgaccttgaccttggaggccttgtccttgttctccttgctggggcgggaggccttgtcgggcctagggcgcgggtggttctgcttgcggaaggccttgatcggcgcgatgagcggaggagcggaggagggggtgacgaagacgtcggcgatgacggtggagagctgcagctgtggcgacggtggtgggttgccgttgccgcttccgcttccgctagggtttggtagggagagattggtgctaccttgcggtggcttctgcggcggaggtggcggtggatgctgctgctgcttgggcttgggatgcttcggcttggtaggcggcggtggctccttcgcaggctgcggcggcggcggcggcggcggaggatggggtagggcgtggtgctggccgtagaggaggtcgtcgatgtggaggttggaggggaaagacaggccccctttggcgtggaggcggtgcagccacggcggcgtgcggcttgccgcggccgccgccgccgccgcgctcagcaccgcgctgcagcacggcatctcccccggctccgacaacgatcgagatcaattccccgtcatcaaaaccccaatctcgattcgggcgcccgcgttggagacgacggcgaggggagggaggaggtcgccgcggcggcgcaggagggattgcggcgaacgccgccgacgatgtgggggattttgggggaagagagag

SEQ ID NO: 2061 - DNA, 529 bp, Oryza sativa
  unsure (1)..(529): unsure at all n locations
  Clone ID: PAT_MRT4530_101869C.1
tggtcgcaagtgaccagtccacctaggcatcgtgctctgccgcatgggaagctgatggggttcagacgcaggaagccagcttgcttgatcgcagtccaaacagccaaacagtggncaggccacagacagaccaggtcagcagaccattgncagacaggacacaaagggggtggatgcttcagcttgattcagtccagggcaattccttggtggcgcaattgtttcagggatcttccattgccaacgtttgttggcatcgggttcgccatgtttgtgctcaggaggatctgcggcgcctaaccaaatctatagtactaacaattcaattggtttatatatagctgtgatcaataaataataatggaggagtagtagcaatgaagaatcatgcatgcatttcaatgaaaagtgtaaacaattagaagaagaagaagaagaagaagaaaatactgtattatttatcaagagtaatactattattattagaannagaagaagaaaagttttccaaaaaaaaaaaaaaaaaaaa

SEQ ID NO: 2062 - DNA, 569 bp, Oryza sativa
  unsure (1)..(569): unsure at all n locations
  Clone ID: PAT_MRT4530_10186C.1
tcttaaaaaaaaaaaaaaaaaaaaaaacaaaaaaaaaaaaaaaaaaaaaaaaaaaaaaaaaaaaaaaaaaaaaaaaaaaaaaaaaaaaaaaaaaaaaaaaaaaaaaaaaaaggcgggccgttttaagaggttccaagtttacttccccgtgcttgcgacgttttattttttttttggggccccctaatttaagtgggggggccgtgtttttacaccgtcgtgcttgggaaacccctgggtttccccaatttattcgctttgcggcacttccccttttccccggttgggtttttgccgaaggggcccccccctttcgcctttcccaccttttgccccccctgtttggcttttgggccccccctttttccggccctttaggcccggggggtgtgggggttccccccggggttcctttttcctttgccggggccttggcgcccgttcttttggtttttttcctttcttttttggccctttttgccgtttttccccgttnggttttttttcggggcctcccttttgggttcccgttttttgtttttcgggccttgtccccctatttttttttt

SEQ ID NO: 2063 - DNA, 1014 bp, Oryza sativa
  Clone ID: PAT_MRT4530_101870C.1
atggcttattccaggcaaatcttcgtctgctctgccatggctgcgttgctcttctctgctgttgtttcggcgcagctctccactgatttctacgacgagacatgccccgacgcgctcgacatcatcgaatctgccgtcagagacgccgtttccaaggagtctcgcatgggagcttcgctgctgcgcctccatttccacgactgctttgtcaatgcaaatataattcagaagttcagagtggatgctgacgggtcagttaagcaagtggggtgtgacgggtcagtgctgctcgacgacacggcggccatcaccggcgagaagaacgcgaagccgaacaagaactccctccgcggcttcgaggtcgtcgacgacatcaagtcgcagctcgaggacgcctgcgagcaggtcgtctcctgcgccgacatcctcgccgtcgccgcccgcgactccgtcgtcgccctgggcgggccgacgtgggacgtcgagctgggccggcgagacgggacgacggcgagcctggacgcggcgaacaacgacctcccgccgccgacgtccgacctcgccgacctgatcaagtccttctccgacaagggcctgacggcgagcgacatgatcgcgctgtcgggcgcgcacaccatcgggcaagccaggtgcaccaactttcgcggccgcctctacaacgagaccaacctcgacgccaccctcgccacctcgctgaagccgagttgccccaaccccaccggcggcgacgacaacacggcgccgctcgacccggccacctcctacgtgttcgacaacttctactacaggaacctcctgaggaacaagggccttctgcactcggaccagcagctgttcagcggcggctccgccgacgcgcagaccaccgcctacgccaccgacatggccggcttcttcgacgacttccgtggcgccatggtgaagatgggcggcatcggcgtcgtcaccggctccggtggccaggtcagggttaactgcaggaaggtcaattaa

SEQ ID NO: 2064 - DNA, 321 bp, Oryza sativa
  Clone ID: PAT_MRT4530_101871C.1
tttttgttttttttttttttttttttttttttttttttttttttttttttgaagtttatatttctttgaaacgaacattttttaagcttagcagaaacaaatcagtctactgggaacaacattaaaacacaatcctttcacgagcaagcacaaggttaacaagaaggggatttctaacgggggtggccagatcccaacaaccaagcaacaaagaaccgggcaggttgtgggatgaaatgccattgttcagttaactaaatccgggaggggatttttgatcaagggacaggggccacttaaagccattggcttttttttgaa

SEQ ID NO: 2065 - DNA, 156 bp, Oryza sativa
  Clone ID: PAT_MRT4530_101872C.1
tgtaccatgatcaaccacgctctgataccacttgatgagcacccgacagcgagtggcattcatcagatagtggaagatgggatcgccatctccttggtctcggcagcagcagccttcgacgataacaaaatcaaccccccaatctcccttcaggct

SEQ ID NO: 2066 - DNA, 162 bp, Oryza sativa
  Clone ID: PAT_MRT4530_101873C.1
gcgcgagactccacgttacattgagatgttctatgctctgaaataccgcagcctggcacagcccgtcccattgctgtcgatggagagagcacatcacaagtaatggaggggaaaatatgcatcttcacaggagaaacccttcactgcttcgaaattgataaa

SEQ ID NO: 2067 - DNA, 204 bp, Oryza sativa
  Clone ID: PAT_MRT4530_101874C.1
atgggaggcgagaccaccggtgttagcggcggcggattccgcaggcggttggagtactacctgtacagcggcgagaagaagcacgtcgtcgccggcatcgccatcttcgccgccatcttcggcgttccctgctggacggcggcggcgaggatcgtcttcgtcaaaggcggcgaccgcttgaagtcggcgtggtccctttggtag

SEQ ID NO: 2068 - DNA, 632 bp, Oryza sativa
  unsure (1)..(632): unsure at all n locations
  Clone ID: PAT_MRT4530_101875C.1
cccacgcgtccgctcactcgcaatcgcacaaaaacgaactacggcggcggcggcgatgggaggcgagacgaccggtgttagcggcggcggattccgcaggcggttggagtactacctgtacagcggcgagaagaagcacgtcgtcgccggcatcgccatcttcgccgccatcttcggcgttccctggtacttcatgagccgagggacaaagcatcaatctcaccaagattacatggaaaaagctaacaaggcgaggtcggagagactttcttctggacagtcatcagcaccaaaagcatgaagtagtaatccgtaactcagatctgtgaaacctcagcattcaaagttttgatctataatctagctgagcactttatctattgggtaaaataagcaggccatctcttgaatattgaccctaataacatgatcttgtcagtttcaaaaaccatgtgtaaacttcacatgaaattttgtcaaatgaagcctttctgttcactttatgcgcaattctgtaggagatgatcaacaagcaccagatttttgtctatcaaatattcaaatggtggttctcgagcccaaaaaaccccaaaaaaaaaaaaaaaaaaaaaaaaaaaaaccaccnnnaaaaa

SEQ ID NO: 2069 - DNA, 360 bp, Oryza sativa
  Clone ID: PAT_MRT4530_101876C.1
tttcatctttcttccaacctgaaatgtcagtcaggtctggtgaaccattcttccttcctcatcacctcatctactaaacacaaaagaacacaagctccagataattatatgcaactatccttcactccaagtactcactcaagaacacaagctcagacagtttgtgtgtcagtgaggcaaggaggaagaagaagaggagccaagaattgcggcggtggcggcggcggcgagaggaggaaggagatgaaggggatgtccgggccgaagctgctcgtcgtgcacccggcgtcgaaggggtacaacggcgtggtgtcgctgtccggcgcggagtcgccggggccgtcggcggcgtccaatgcc

SEQ ID NO: 2070 - DNA, 213 bp, Oryza sativa
  Clone ID: PAT_MRT4530_101877C.1
atggactactcaggatttggagtgagtgagacatctgaggaggaggaagaagatacttatccagccagatgcgaagtctctcactcttccaatcatagtggaaaaaaaccgaaccgggccgacggttggaccgctcgaaccggccggttgttcggtgaaccggtcgtaaaccgtcttcgatcagaccgagactggggcatgtcgctgctttaa

SEQ ID NO: 2071 - DNA, 167 bp, Oryza sativa
  Clone ID: PAT_MRT4530_101878C.1
ttttcttttgttatagaggctgagctagcatcgtgcgacctctcggcgagcggttagtgttcgatgtcgtcgtcggcggcggctaggtggtggtggtgagtcgagctcacatcccaaacattcgcgagtttgatggcctgccgtggtgcacgtatgagactatctca

SEQ ID NO: 2072 - DNA, 1011 bp, Oryza sativa
  Clone ID: PAT_MRT4530_101879C.1
cccaccggccggggcgccgcgactcgttaggctactccacccactcttgtttagggtttccctcagccgccgccgccgcatccacgctcagcagccatggcggtggtcgagcagccgcagcagcaggtggtgaagctcttcaactgctggtccttcgaagacgttcaggtgaacgacatatccctcgccgactacctcgcggtgtcctcgacgaagcacgccacctacctgccgcacacggctggccgctactcggcgaagcgcttccgcaaggcgcagtgccccctcgtggagcgcctcaccaactccctcatgatgcacggccgcaacaacggcaagaagatcatggctgtccgcatcgtcaagcacgccatggagatcatccacctcctcaccgacgccaaccccatccaggtcatcgtagatgccatcatcaacagcggcccgcgtgaggacgcaacccgtatcggctctgctggcgctgtgaggaggcaggctgtggatatctctcccttgaggagggtcaaccaggcaatctacctcctcaccactggcgccagggagagtgcctttaggaacatcaagaccattgctgagtgccttgctgatgagctcatcaatgccgccaagggctcatccaacagctatgccatcaagaagaaggatgagattgagcgtgttgccaaggcgaaccgttgagtgctgaacccatctcagtgtgctcgagctattgccttgcactgttgccagtactttttgctagtctttttgggctttgccagagttacctgtgattttctgtttaatgataagtgctgagaaaatgtagtagtctgttcgctatcgacattgttttattacacccccaatccttgttccttacaaaaaaaaaaaaaaaaaaaaaaaaaaaaaaaaaaaaaaaaaaaaaaaaaaaaaaaaaaaaaaaaaaaaaaaaaaaaaaaaaaaaaaaaaaaaaataaaaaataaaaaaaaaaaaaaaaaaatgggggg

SEQ ID NO: 2073 - DNA, 361 bp, Oryza sativa
  Clone ID: PAT_MRT4530_10187C.1
agatatttgtacacagagagagaaagatgtagagggggaaataatatacataaaggagcgggtatgcctagatcttggacaacattctccgggaggactatgaccctagaggcggaggcctatgaccacattgagcgagcgaagggtaagaggcaaaatcaggaggggagctgccaccaccagcggcgcctgatgaggcgtgctacgcagacgcagggatggtaggacccttgctgatgacacaacgacatggagtcgaccgtgacggttgcagttcctgttaggagcatcttgtacactactgtgacgactttgaggggaacgactataaggcttgagggggggtcttcacactccatag

SEQ ID NO: 2074 - DNA, 975 bp, Oryza sativa
  Clone ID: PAT_MRT4530_101880C.1
gccctcgccgcccgggcttgcgcctgcgcccgccagccaccgtcagatatctgttcgaatgcactcaatggtgcctgccaaggtgcactggggtggttcgcggtggcgggactcgctctatacatcgccttcttctccccaggcatggggccagttccatgggcagtgaactccgtgagctaccccgagccattccgtgccttgtgtggttgtatgtcagccactgtcaactgggagatctagcctgattgtggcacaaaccttcctctcgatcgtcgggttggttgggaccgccctgaccttcctgatcatcgccggaagtaccggtgctggcctttcatcttcgtggctctctacgtgccggagactaaaggcctcagctttgagcaggttgagctcctgtggaaggagagagcatggggaaaccaggggcaatcgccagagccttttgggcgctgcaccgtagtgagccagctctcatcctgcttgcccttgctggcaagggtcggtggctggctccctttttaagatggccgtgccaccctcagtttctatcggctctctctagctgggaagttttaggaagatctggatgcagaccaaattttattacgtggtagcgactagatcattgttctgtcacctggcatgtattgtcaatttctcatggtggaaactgggataatttcagcattgggtgggtgaagaatcaggttgtgttggtgtcgaatcttgtatacatgggaaggactgtacgagctatactggttgtgcattgccgtcacaagtgtatagttccggtgctagatgtgccggggagacggttaaaaacctgttatggacagaaacaggaatgaaaattatcgctttaatattcttgctcgttattcctccaccaggtgtatctgacttggcaaaccttgagagttatatgcagatgatgtattttgtaaaaaaaaaaaaaaaaaaaaaaaa

SEQ ID NO: 2075 - DNA, 1386 bp, Oryza sativa
  Clone ID: PAT_MRT4530_101881C.1
atggcggccgcccgcgccaccctcccgctcccgcgtgtccccgccccctcgccgaggccccagctcaggcccttcccctccctccccgctcgccgcggcgcggtggcatgcggcgccggctcggcggcggcgggggtcgcggcgtcgctgcggctcggggacgtgatcgaggcgcagcagttcgaccgggacgcgctgacggagatcttcgaggtggcgcgggagatggaggccctggagcgcgggtcctcctcccgcggcgccgggaggagccgcgtcctcgaggggtacctcatggccacgctcttctatgagccgtccacgcgcacgcgcctctccttcgaggccgccatgcggcggctcggcggggaggtgctcaccaccgagaacgcccgcgagttctcctccgccgccaagggcgagaccctggaagataccataaggactgttgagggttattctgatattattgttctgagacattttgaaagtggggctgcaaggagagcagccgccactgcagacattccagttattaatgcaggcgatgggccagggcaacatccaactcaggctttattggatgtctattcaatagagagagaaattggcacactagatggaataaaacttggtttggttggagaccttgctaatggaagaactgttcgttctctagcctatttgattgccaaataccaaaacattaagatatactttgtatctccagatgttgtaaaaatgaaggatgacatcaaggaatacttaacttctcaaggtgttgagtgggaagaaagttcagatttgttggaggtggcatcaaaatgcgatgttatttatcaaacacgcattcaaaaagaaagattcggtgagaggatagatctttatgaagcagctcgtggtaagtacattgtggacaagaaggtcttagatgtgctgccaaaacatgctgttatcatgcatccccttccaaggcttgatgagatcacaatagatgttgacagtgatccgagagctgcatattttagacaggccaaaaacggcctctacatcagaatggcgttgctcaaacttctgcttgttggtcgctgacagctttcttagtgcgtggcgctgtggtgttgatgggggtcaaaaaatgtttgtcttaatcaatggctccaaatcaactgattagtattgtactaggcaccataagttagatccttgcaaggatttaaccatgtctagaactctagatgcataattttcgatgtaacaaaatattctgaaacagagatttgttgctctcatatgttcttgtgaatcattatcaccgaggactgcactaattttcctacagtgttgttgcaaggactgcagtgatttaaaaaaaaaaaaaaaaaa

SEQ ID NO: 2076 - DNA, 2137 bp, Oryza sativa
  Clone ID: PAT_MRT4530_101882C.1
ctatctatcgcattctaccgccacatcctttgattcacccccgaacattgatttctcattttgtttccctctcaaataatccttgagctccaccgcttggcacctagcgccatggcagcgagcgcccctgacgccgcgcgccagctcgccatgccccaccttgaccacgccgagccgcgccagcccgcgctcgcggttcgattcccaccgcacgatccaccgcctccaccgcccatcgcatccgcgccatccgccgtttcgtgccgcccacgaaaacgccgacgtcgcccgtgaacgccggccgagcgccagctcgcatgctcccccgaaccgaccttgacgctcccacaccccctctataaaacccacccccgtgcttcctccccccttgcttcgtttcccccaagcggcgaagctctgccgccaagggaactcctggccgccgcgtcgagctccatgtccggaggcatctcgccgtcgagtcgttccatcctcgccgcgtccttctccttccttggccgaacgacggtcgttgccacctcgccgcaaaacccgtccgtgccgccctgccctgtccccgtatttccggatgccgcgccggtcccgattcgccaccgccttcggaaatcccggccgcactcccccgtcggcctcgcgccgccaccctccttgagtccccttgagccaccccaaaaccgtcgctccgcccgctggcctcctcttttgctcctgcgccgtgctgtcctttccaccgccgtcgtgcgcacggtcgcgcaccgccccgtgacccctcggacctcccagaagcgtcgccgcagtcgctagcctcggcctctgcgcccgcgccgtgccgctcccgccgccgccgcctgacgccgtcgccgccccccctccgaccccggcgcccagcaggtggtctgggttcgagccgtttggtccctctttatatagagtgggcaaatatgcgtggtatgctggtaggtagcgcgacacaaaatccatgacctcctcatcagacattcctggtttcccatctgctctcatagctatctctgcctgcagtctccactggtacacgcaactaggttcctttatttttatgaccatccatgacccaatgaacctgtcccatgcatcgtagtatgcctcaaggttcttattaaccacctcaagctgagggtccactgcttttacaacttcatttggaagaggtttgaatccaagcatccatccttcaaaaagaacaacctctaagggcccttcaacctctggccatgttgaaggatcagcccgatcacctcttccaccaaaagcagacttgtcataccgtggaagcttcatcttcaaaccttctttagttagtttaagcagcgattcaagtgtttcaactgagaacgggagatcatggcttccagcatttccacgaagctccaaaagagcatttccaggatttctttccctcaatttaccctgttctgctgccgtcaagtagaagtcatcgatagataatgtagcggcattcctaccagcaacccgaaaaagataatcaagtgcgaaaacaagagttgtctttccactgccttggggagcgctgaccccaatcactaatggagggatctcgtcgccgtccttgtacttggccctgtgctccgtgacctggtcctcgcaccagaggaagacggggatgtagaagtggtatatcctggccttctccgcctccgagaggtggagctcgttgaggcggaacagccgggccacctgcacaccgcagcgcagccaccggtcgatggagccggcgatcttctccttggtgtacccgatcctgtccacgagcgggccgctgcagatgaagtcgtacaggtcctggacggaggagatgagcgccggcgacgacgccggggcggagcgcggcggcgccgcccccgccgccgcctggccgtgatccgggcacgacaggaaagctttcctcgacggagtggtggcggtcacggtgaaggagcaagccgccgccttggggtggtaaggcttggcgcggaggaggagcggcgcggatgagggcgaggagacgaccgcggccgcggccgcggcatggtgcggggcggcgtggagcggcgtcatcgcgctctctccctcgtgc

SEQ ID NO: 2077 - DNA, 1020 bp, Oryza sativa
  Clone ID: PAT_MRT4530_101883C.1
atgccgggagacatgtggattcgccggggtggtgtcggggaggacccctgggcttcctggcacagtatggtctgggacctaacctgttgttggtctgggacccctctcgtcggcatatgggcgccggggtcggagggggccggcgacggcgtccggcggcggcggcgggagcggcacggcgcgggcgcagaggccgaggctagcgactgcggcgacacttctgggaggtcccaggggtcacggggatggcggcggcgtcgggaatcaaagagaggagggaggccaacggcggtgcgcgaccgtgcgcacgacggcggtggaaaggacggcacggcgcaggagcaaaagaggaggccagcgggcggagcgacggttttggggtggctcaaggggactcaaggagggtggcggcgcaaggctcggggctcaccggcaagaggaaatgacgtcggcggcgattttgtggtgggagagggaaggccgacgggggagtgcggccgggatttccgaaggcggcggcgaatcgggaccaacgcggtatccggaaatatggggacagggcagggcggcacagacgggttttgcggtgaggtggcaacgaccgtcgttcggccaaggaaggagaaggacgcggcgaggatggaacgactcgacggcgagatgcctccggacatggagctcgacgcggcggccaggagttcccatggcggcagagcttcgccgcttgggggaaacgaagcaaggggaggaggaagcacgggcggatggcgcggatgcgttgggcagtggaggcggtggatcgtgcggtgggaatcgaaccgcgagcacgggctggcacggctcggcgtggtcaaggtggggcatggcgacctggcgcgcggcgtcaggggcactcgctaccatggcgctagatgccaagcggtggaggcaggacctcaaggattatttgagagggaatcaaaaggagaaatcaatgttcggggtgaaacaaaggaggtggcggtagaatacgatagataa

SEQ ID NO: 2078 - DNA, 243 bp, Oryza sativa
  Clone ID: PAT_MRT4530_101884C.1
atggctcagtggcagcggcaaatccacatcgccgttgtctctgacgtcggggctactcctccttccgcccgcgccactggtcaccgctcctccttccacccacaccgccggtcgccgtgccgctccgctccttctgccgtggtgctaactcctacacaactacaagagaacaaaacatacatgcttgagagcctaagattatggttgacatttcataaagctatgttcggcatagagggttag

SEQ ID NO: 2079 - DNA, 333 bp, Oryza sativa
  Clone ID: PAT_MRT4530_101885C.1
gcgcggtggaagaaggcactaagaaggcgaaggaaccctcgtaatgtagcgcgtgtcgacgtagaggaagtagtcgatcgcaccggctcgaccttctcctcctcttgcgttctcctcaccgtactcccatgccgatcagcaccataaaccagcggcgcctctaccggtgtccacacatacagggacggaacgccacgtgcagatgtgcttgcacccacgagaggttcgtatacactaggctgtaactcgaaaattccttttcggtccacgtgtcaacagcggcccctagcagaacgtattgacccaccgggcatacataaagatcatatcggt

SEQ ID NO: 2080 - DNA, 520 bp, Oryza sativa
  Clone ID: PAT_MRT4530_101886C.1
gaattgggattccgatttccttataagtaatagcaagatttcgtatacatcaaagttttacacgtttagtacttgttcaagccacaagaaacaagaggccagtggtgcttgcttggaatatgtggtctcagaaagatcagatatcccaaactccaccattgggtcagaagatccattttctttcagcaatgtacattcagggctcatctaccccacataggattcctcttttcgtctatgtcaacgaccagcaggtggtctgggttcgagccgtttggtccctctttatatagagtgggcaaatatgcgtggtatgctggtaggtagcgcgacacaaaatccatgacctcctcatcagacattcctggtttcccatctgctctcatagctatctctgcctgcagtctccactggtacacgcaactaggttcctttatttttatgaccatccatgacccaatgaacctgtcccatgcatcgtagtatgcctcaaggttcttattaaccacctcaagctgag

SEQ ID NO: 2081 - DNA, 592 bp, Oryza sativa
  Clone ID: PAT_MRT4530_101887C.1
attatctgctgagtgctactttgcatttcccaaatatgtacaacagcttaattattcgcactgaaggaagatgtacatatgaaaacccagagagttgaagactttcagatgttcagagtacaatattgaggaacgaatcaactctcaactattttaattttcttgggcaagatcaaaatatcatacaagggtagaatacaaatagctagcctagtagagctgttctctcctatcacgccaccatcgccacctgcaacaaaatttaagccataaagcaatgttaatcatcacagagaagacatcagagtaaaaagagttagtagtacactgcaagaactctgctagtacttcagaagcacaaccgtaaatttcatcatcagaatatatatctagtttcattgtaagaaatgtactactactggtaccgcagaagcttaatcatgcaattgaaaaaaaaagaacagttttttcccaaataaagttcttgcttttttgagagaaaaacagaactgttcctttggcaattgaatgatccatttttgtttcagattatcgtcaaccattaacccatcagttttttatacctagctta

SEQ ID NO: 2082 - DNA, 1986 bp, Oryza sativa
  Clone ID: PAT_MRT4530_101888C.1
atgccatcgcttggagcagccagggacggcggcggcggcggcgaggccggcgtgaccaccgccgccgccaaggccacgtcgacggcgacgctgctgagcctgctccgagccaagtcggagcggagcgcggaggcggaggagaaggtggagtgggtcaggtcccagctcgtcggcgccggcgccgagttcgacacgccgttcggccgccgccccctcgtctacgccgaccacaccgcctccggccgcggcctccgctacgtcgaggactacgtcctccaccatgtcctccccttctacggtcagtaccatctaccatgtcgcttctcatctcatgcgatatgcgagctcgatcacgacgttcatggcgatggcgaggtgatcgatgcgatgcttgtagggaacacgcacacggaggacagctacgtggggagcaggacgacgaggatggcgaggaaggcggcgagctacatcaagcggtgcgtgggggccggcggcgccgcgggcggcgacgtcgcgctgctgttctgcgggtcgggggcgacggcggcggtgaagcggctgcaggaggcgatgggcgtggcggcgccgccggggccgctgcgggagcgcgcggcggcgctgctccggcccgaggagcggtgggtggtgttcgtgggtccgtacgagcaccactccaacctgctgtcgtggcggcggagcctcgccgacgtcgtcgaggtcggcgccggcgacgacgggctcctcgacctcgccgcgctccgccgcgcgctgcgcgcccccgagcacgccgaccgccccatgctggggtccttctccgcctgcagcaacgtcaccggcgtgctcaccgacacccgcgccgtcgcccgcctcctccaccagcacggcgccttcgcctgcttcgacttcgccgccagaaacagtgggccctacgtggagatcgacatgaggcccggagaggtggacggctacgacgccgtgttcctgagcccgcacaagttcgtcggcgggccgggcacgccggggatcctcctgatgagccgctcgctgtaccggctgtcgtcgcagccgccgacgacgtgcggcggcggcactgtcgcctacgtgaacggcgccagcgagcgcgacacggtgtacctcgccggcgtcgaggagcgggaggacgccggcacgccgcccatcgtcggcaaggtccgcgccgcgctcgcgttctgggtcaaggcgcgcgtcggccgcggcggcgccgtcgcgctccgggagcgcgcccacgccgacgccgccatggcgtggctgctgggcaaccccaacgtggaggtgctcggcaacgtcgccgccccgcgcctccccatcttctccttcctcgtcttccccggcgacggcgacgaccggcggctgccgctgcacgggcggttcgtggcgaagctactgaacgacctgttcggcgtgcaggcgaggggcgggtgcgcgtgcgcggggccgtacgggcacgcgctgctcggcgtcggcgacgagctctcgctccgcatccgcgccgccatcgtcagggggtaccacggcgtgaagccggggtggacgagggtgagcttcgcctactacctctccggcgacgagctccgctacgtcctcgccgccatcgacttcgtcgcggcgcacggccaccgcttcctcccgctctacgccttcgactgggccaccggcgactggtccttccgccgcgccgcgctcaagcgccagctcatggcgcgcgagctgctccactgccaccttggcagcagctccgccaccagcagcgactccgacggcggcgagttccagacggcgaggaagacaacggcggcgggcaaggttggcggtgacgtcagcgccgacaagttcgagggctacttggagagcgcgaggaggatcgcgcggtcgctgccggacacgtggcaggcgactgtcactgtgccagagggaattgaccctgacattgttctttttcgagtgtga

SEQ ID NO: 2083 - DNA, 1623 bp, Oryza sativa
  Clone ID: PAT_MRT4530_101889C.1
atgatgaaacgcaaggagagatcatcggagttagaggtcgccgtcgccggagatgatgacgatgatcgtctgagcagcctccccgacgacgtgatcggccgcatcctctctttcctgcccgcccggcaagccgcgcgcacgacgcagctgtcgcggcggtggcggcgagtgtggcccgcgcacgtcgccgcgctcaacctgtccgtcctggacttgccgcggcggcgccgccggtgcccggggatgatccagagagagttcgccgctctcgccggggaggccctcctccggttcccgaccaccggcatcccctccatctccgtcgaggtcgaccactacatcaacgtcgccgccgacggatggttcggccaggcgatggagcgcgccgtcggctccgtgcgcgtcacttcgctgcgcgggctcgtcggctggctgccgctcccgccctgcgcccgcgcggcggccatggccgtcgccgcgccgcgcaccgtgctgacactccccggcgtcgacgaccggcaggtgttcggcagattgtccgagctgagcctgtcgctggtgcggctcggcggcggcggcgagcggccgctggacgagttcctgtcgtcgtgctgcccgcggctgaggcggctgcggctgcgcggcgtgagggggcgccacgccgtgcgccggctggcgctccacacgctggaccatctcgaggtcctcgacatcgacggcgtcgacgacctggaagccctcgacgtgtcggcgcccaacctccggtgcctgaacgtgcgctcctgcttccgcggcggcggcggcgacgtcgccgtcacggcgccggggatcgaggccgtcgtctggcaccggagctacccggagcatctcgccttccgctccggcctggcgcgcgttcgccggctcgccgggccactcaagctcgcggcggtcgggcggcgcgacctgttcgacgccccttacaccacgcagctcctgcggtcgtgctccctcgccgtcggccatctcgacatggagctcgtgatgccggaagacatggctctcgccaactggctaggcggcggcggcggcgcgtgcgaggacttgatccgccatctgccggagctgccgcgtgtcactgtactctcgctcaacatcaggtggagcttcgccagcggcggcggcggcggcattgcggcgagcttggcgtcactactctccaaaacaccaagcttaacaaggcttcacattcgaacaagcccctactgcttctcagtctttgagggccaagaggaggttgaggcggtggcggtggcggcacgaggaagctggcacatgtggatgacagatggtgaggacgatagccggaagccgaggcttggtcgtcgtctcgactcccttcgagaggtgagcgtggacgggctcaccggcggcgaccgtgaagagtacagcgtcgtcgtcgagctcttgcttgcgaccatcgtgccaccgtcgctagagaggatgtctcttgcgttccatggccatgccgcgccagccatcattgatgacatcgctagggagatcccgctgcacttccctatcatggcgaccggccgctgggaacgctccccgccgagcgcggtcacatggaaatcaagctag

SEQ ID NO: 2084 - DNA, 1935 bp, Oryza sativa
  Clone ID: PAT_MRT4530_10188C.1
atgtgcaactccggcaccagctcctcgccgtcggcgcctgcgccgccgccgccgccgctcacctcgttcaagcactcctcccacctcctccgcctcgtggacgatgacgccgacgacggccatgcgctgctgctctccaaggtggccggcgaggcgcaggcgatcgggcgggtgtcggtgccgatggcggtgacggggctcgtcatgtactcgcgggcgctcatctcgatgctgttccttggccggctcggcgagctggccctcgccggagggtcgctggcgctcggcttcgccaacatcaccggctactcggtgctctccgggctggcgctcgggatggagcccatctgcggccaggcgttcggcgcgcgccgcgggaagctgctggcgctggcgctccaccgcaccgtgctgctgctgctcgccgtcgcgctgcccatctccctcctgtgggtgacgtccacggggtacatactgaagcagctcggccaggacgagggcgtggcggacgcggcgcagacgttcgcggcgtacgcgtcggccgacctggcggtgctcgccgtgctgcacccgctccgcgtctacctccggtcgcagaacctgacgctgcccatcaccgcctgctcgctcttctccgtgctgctgcacgggcccatcaactacctcctcgtcgtgcgcctccgcatgggcgtcgccggcgtcgcgctcgccgtcgcgctcaccgaccttaacctgctcctcgcgctcctctgcttcctcgccatctccggggcccacagggactcgtgggtggggcccacctccgactgcctccgcgggtggccggcgctgctccgcctcgccgtgccgaccgccaccgcggtgtgcctcgagtggtggtggtacgagctcatgatcgtgctgtcgggcctcctggccaacccgcgcgccaccgtggcgtccatgggcatcctcatccaggccacgtcgctcgtctacgtgttcccgtcctccctcggccagggcgcgtccacgcgcgtcagccaccagctcggcgcgggcaggcccgcgggggcgcgccgcgcggccggcgccgccctctccatcggcctcgtcgtcggcgcggcggccgccaccttcatggtgtcggtccgcagccactggggccgcatgttcacgtcggacggcgagatcctccgcctcacggccgtggcgctccccatcgcggggctctgcgagctcggcaactgcccgcagacggccgggtgcggcgtcctccgcggcagcgcccgcccggccagcggcgcgcgcatcaacctcgcctccttctacctggtcggcatgccggtcggcgtggcgctggcattcggcgcccgcctaggcttcgccgggctgtggctgggcctccttgccgcgcaggctgcctgcgcggtgtggatggcgcgcgccgtggccgccaccgactgggacgtcgaggtggcgcgtgccaaggagctgaccaaggcgtccactacaggcagcggcaccaaccaccagcacgagtgcaacaacagcaacaccaacaccgccaacgcaaaggctaacaccaaaacgacaacgtctcccgccgccaataacatcaatgccggtggcggcggcagcagcgacaaccgcggttacgtgcccatcagcgagagcggccacaacgacggcagcgacgacctggagaagctggaggaagggctcatggtggccacgagtggcggctgctgcggctgcggcgacgcgttaggcgtcgacacgaaggctggggacaagcagcagtgcagcaacggtggtgccggtacggcggagggaaatgcggggcagaggaggggctcggcgtcgtcggagagggccccgctgatcagtgtgggggacgacgaggaggccggggaggagaacgacggcgacggcggtggaggtggccacgtctag

SEQ ID NO: 2085 - DNA, 2142 bp, Oryza sativa
  Clone ID: PAT_MRT4530_101890C.1
atggagtaccagacaccggagctgctaaatcgggggctcgatcggtcacatcggtcttacttgtcagcagtcgagggtgccgagcttagcaccttctgcccacgactttcacgacagctcttgcagatcgacccacggttcgtcgagaggttgcgtgaggctggtcttattccgttgtgcaggctagttgaggacttagcgaatgagaaggatccatcgaggcgatgggtcgtagatcagtcccttctggcagccctggtggatcgttggaggccagagacgtgcacgttccaccttccctgtggggagatgacaccaacactgcaggatgtctcttacctacttggtcttcccctcgcagggagtgctgtgggtcccatcgatggggcccaaggatgggcggccgacatcacagcccgattttcccacgtgcagcgccagcttggactaggtgctcctaaagctctccctcactacattacttctggcccctccaagatgtggcttcttcagttcactagtgatctactccaccctaatgctgatgactactcagttagacggagcttggaggcgtacctgctctggctttttggctgggtgatgttcacagccacggaaggccgcgcagtggacaagggtctaatctactacgcaagagcgatcgctgatgctgaggatggtagtgtcccacagtggagctggggctcagccgtgcttgcggcgacgtatcgtggtctttgtgatgcatgcacaaagaacaacccaacaatgatcatcgccggatgtcctctactcctacagctttgggtggccgagcggttttcgatgggtcgccctgtgatggaccaatctccttatgagggcgggtttcgtgctctgcatgggcattctgccgaggaccgtcccacgatggggacactatggtgtcgacttgagcgccgttacgagcatgtgcaggttaggaaggggtacaagcactttgtgatggagttcgatcgcctgcaacccgacgatgtcgtctgggagccgtacagtgcgcgggccattatggcacgtgcaccactcggcctgtcatttttgtgcacacgtgacaaggtgtattggatgacattagtgccgatggtgttcgacatcgtcatcgagcctcactgcccgcaacgtgtgatgcgacagtttggcctacgtcaacacttccctatggtcgtggagcgtactgtgccacccggcgttcgcctctttaatcgcagtgaacaggcagccaacacgcagtggacaccccgcgtgcagaagtacatcgacaactgggtgttagcgaccgaggaggtcatcgacgaggtccgtgcacacacggaggccacctaccttagatacctcaggtggtacctacctcgcacccgcacgcgtgtgatgtttactcctgttgaccagcagccacacgtcgccgccgtgacggaagcgtacccgagacaccgtgaccaggactactttgtcatgctcgaagccgcgcgtcgtgttattgtggatgctgaagcatccatcagactcttggacgctgggatagtggtgacaggagaggagcacaagatggctttcagtaggatccgtagctcgacgaacacgatcgtgcgtgtgcttacttatcgtgcaaacgtgaactcggtgcctccgctagcggtacctcagcaccggccacaggcccctgtgcccggaggtcagacgtcttcctcgacagggctatcaggtctctaccagcagggttccactcaagcagccacaagtcaacacatagctccccttcccaaaggtttcgttagaccatcagatgtctttgcgggagttggtccgcccatgcaaggaacctgtgcccctcgtccacacgtgccgctaggagtgagcattggcaatgagtttattccaggaggttccacaggtgttggctcatctgcgcaggggtcacaaaccactccgacctcagattgtcatggtaagaggaggaagccttggaaggatagaggtttcgggcaagttctttcactcagctatcagttctctatcatgtcgattccaacgcaacatgtggaatctattcagctcatccacctttacttgactcggctctatttacatacatgcatttaa

SEQ ID NO: 2086 - DNA, 378 bp, Oryza sativa
  Clone ID: PAT_MRT4530_101891C.1
atggaggaagctggccactgccaccggcggccgcaacgaggacccctcgtccccgtcgccgccattgccgaggatcatcatgtccccgacgcccctcctcctcctcctgctgctgcagcagctggcctgtcagaggaggaatcaaccaacgacagcttcaagaaccaggatctgtttgatgttgttgcgtcctgtgtgaaacaaaccgctgatgctggtctccggaacctctgtcttcgacgtcctgaaccgggagaaggcggcaataaggtttttgggaagcttttcgcgcgactactccttgttcgtccgcgacggctcgccttcctctccgctcgcatgctgcgcgccttcgtcgacgcccgcaaccgcgagtag

SEQ ID NO: 2087 - DNA, 153 bp, Oryza sativa
  Clone ID: PAT_MRT4530_101892C.1
atgcagagcctggctcggcactccttgagagctctgctgaacctgcttctgcttctcctcctcaccgtcgtcgtcccttgctgcctcccatgcgtgcaggcatgcaaggatcagtggatgacagatgcgagctctcagatgcatcctgcatga

SEQ ID NO: 2088 - DNA, 507 bp, Oryza sativa
  Clone ID: PAT_MRT4530_101893C.1
ccggctatcactttgcatacaatcatacaaacatacactcagccttaatccttgcattacttctctataagagtagagacgccaatggagctccgcttcctccttctagtcctagtccttctcgctcccctcctgcccggcaccaccggagatcagcagcacgcccacttgcccgctgccgccgccggcggcaacaccaccacggcgccgtcgcgcgatcccctccgcatagttgtgcgtgcatccggctccggcaccggcggcggtgcgtctccgtcagccacggcggcggcggcggcaggcgatgatgcatccactcctcctcctccacagcttagccgtcccaaccgtgacctgcctaccgtcccatctccgcttgaccatgaacccgtgcccacgccaccatcgccggatttcttccccgattcggcgctccgcaccatccctgccaatgccatcgccatgtccgcaatattgctgctactgctcatcgcggcgacgcactag

SEQ ID NO: 2089 - DNA, 420 bp, Oryza sativa
  Clone ID: PAT_MRT4530_101894C.1
aacaaaccctttaaaaaagattcatgtgatgaaatacatgatgaaccccgttttttttcaagggaaaattaattaatgccgtttagttttaactttgtccatcgatctcaacctgtaactgggaccacacactggctacagggcccttgaggtactagcagtttagcagtagctgtagtacgtaacaacagcagcagcaggttcactgttttgattggattggatcggattaataaacctagtttttgacaaacattcccttcttggccttgggggcctccccgtcgttggtgtacttgcccagcttccccaacaagttggccttggcccggaggaacaacccgttctgcgccccctttacgttttccgggtgccccccccacgttttgaggcacgttttctgcaacccccttgcgtaca

SEQ ID NO: 2090 - DNA, 1175 bp, Oryza sativa
  Clone ID: PAT_MRT4530_101895C.1
accctaggcaaccgaagaggtgaaaataaggccgaaaaaaaaattgcaggtctcctcctcctacctccggcgagccctccgccgtccacgcttccccgcccactggcggctctcctcggcccccgcgcagcggaggaggcgatgccacctccgcggcccgccgccgcgggcgcgcggggcgccacgcggaggcagctggcggcggcggcggcggcgacgcggccagcgtggcgtcccgcttcgtgaagcacgtcctcaagaaccggtccaactccggtggcccgcggctggagtttgcgagcggcttctgggccgacgcatcgaggagtctttcgccggagttcgctcctccaaattctgaagtctgactacaattccaagaaggcaggtttgtccagttcggtttctacttgcggtatgcctgctttaaaaggatagagcagggccttcttttctccgcgcaattccaaattcgtctagtaagtccaaaattgtcctctacgccaatggcaggcaggtattacactcccccaactcctcatcctcctcccgagaacacgctagacgtctttatggatggcgatgccatggcgatccgcaccaccatcacgttgttgcattacctcaccacccagttcatcaacgagatagcccgtgagcaacacgagggggggtgctcatagtcagtatcgacacagagtggcgcgaggaccatgagcccgacgacaaaaaatgttacaaggttgttgtgctccagctctgtgtcaaccgtcggtgccttgtcttccaactctaccaagctagcaacgaggttccacgcgagctcgcggagttcctcgccgacgcaggtgtccgtttcgtcggcgttggggtcgacggcggtgtgcggcgactagccaatgagtgcaacctgagggttgcctgcgcggtggatctgagagacgctgcggcggccgtgctcggccggccagagcttgcgagggtgggggctgaagagcctggcgctcatagtgatgggcacccgcatggagaaggcgaaagacataacgatgagcagatggggtgaaccgacgctgacgtgggagcaggtcaactacacctgtattgacgtgtacatgtcctacgagattggccgacggatgctctctgatgaacccatactggccgcaccgtcg

SEQ ID NO: 2091 - DNA, 1224 bp, Oryza sativa
  Clone ID: PAT_MRT4530_101896C.1
atgacgctccgacgccgcagcggcgccggcggcacacctccgacgacacgctcgtcgtccacgccggggagcggcggcgcgcgcgcgatcggcggcgtcgcggcggaggtgacggactactcgatcgcgacgccgatcgtgaccggcacggcgcgctggttccgcgactcggccgacctcgtcgccttcagggaaggcggcgggcggcggcggcggcggcggcacagcttcgagtacgcccgttacggcaaccccaccgtggaggtcctggaggacaagatcagcgccatggagaaggccgaggcgacgatcgtcacctcctccggcatgaacgcgatcgttgcgacgctgctggccgtcgtcccgccgggcggccacgtcgtcgccaccaccgactgctacagcgaggcgcgtgccttcatacgtgacaggctctccaaaatgggcattaggacgacgttcgtcgatctggacgacatggaggcgttgcaatccgttcttgatcagggcaatgtaacgatgttctacgcggactcgctgacgaaccctcacctcaagtgcgtggacgtgcggcgcgtcgcggagctgtgccaccagcggggcgctctggtgtgcatcgacagcacgctggcgtcgcccatcaaccagaagccgctcaccctcggcgccgacgtcgtcctccactcccatcaccaagtgattggtgccggttgggaaaccccatgggtgacggattttacaaccggtatgggtgttggatttcttaactggcacccgaatgcagcgtacatgatcattcgcggtctaaagacgatggcgctgcgggtggaggcgcagaaccggacggcgctgcgggtggcacggctgctggagaggcaccccaaggtggagcgtgtcaactacccgtggctggagagcagcccgtggcacggcgtcgcgaggaagcagatgaccggcgccggcggcgtgatcagcttcgaggtggcgtcggacatgcgcggggcgatgaggttcgtcgacgcgctggagttgcccttcatcgcgacttcgctcggcgggtgcgagagcctagtgcagcagccggccatcatgtcctactggggcaagagtgaagcggagaagaccgagaatgggatcaaggataaccttgtgaggtttagttttgggatcgaaaagtttgaggacctcaaggacgacatactacaagccctagagaagatttaa

SEQ ID NO: 2092 - DNA, 544 bp, Oryza sativa
  Clone ID: PAT_MRT4530_101897C.1
cgcgcaggcccccctttgccggttcggccgggggctctgggtgaggttctaagctcctagtctgtggatgtcgacgtttgatgtcgcaattctggtatttgcatggtatggggatcgtcggtgctaggatatacgcgagacagtacaatatgtggggtagcctatctaactgttgtcgacatggcggtctgaaggtctgactcgtagtcgacaacagggtagccttcctcctcgagctcgtgcccgacggaatcagagacagtgctagatccctacggccggcctctgaaggtaccggatagggtcgatccaggcgtatctctgatgtcgatatccggcggcttgtcttggcgtatgtaggcttctatgttgattgtgttgggagttgattgtctcgtggtgggtcttgatcgtggtgaccgtgttgatcgtgtcccctctcctcctagggggtcttgtatttatacccataggtgtccccttgtccaagtagaactagggaaaccaatatggatacaatccgagtagtccttgtcgtttccat

SEQ ID NO: 2093 - DNA, 629 bp, Oryza sativa
  Clone ID: PAT_MRT4530_101898C.1
cctctctctaaaacttttgctccaccgaagaggagcaagatcacgccgccgccgagtgtcgaacacctggtgagcgccggctgcgccgccgccacagggcttctcggccagtgtgggtggcgggggtgtgctgaggtggtgtgcgcgctgccgttactgctgttggagggagccggaggccgctatgcgagggaggacgagcgtcgaacacctgcgcccgtcgccgaccgccgtccgcccctgtttcaaccgcgccgcgccactcgccgtcgaacttcgctgtttcgccacttcgtgattccgaaggagttgctgagttaatcgaagatctgggtcagcaagactgcgatcaagtggatggcaatgaagtcgaggaggatccctatgcttatctttaggaggatgcggaggataacggcgctccgtaggtcttagttacggccgttgcctgtggccatggcattgccgctacctataatatgctgccttatctatttctgttattgtttgtattgtggaccgtttagtcctatgatctaagactgcctgcgggcctatgatgtaataattcgcgctagacaatctttgtatgcgcacttgatatttcggcatgtaatcgtgagtaccag

SEQ ID NO: 2094 - DNA, 232 bp, Oryza sativa
  unsure (1)..(232): unsure at all n locations
  Clone ID: PAT_MRT4530_101899C.1
ccccttcgtcttcttcccgcgcgccgacgcggtcgaccccgcgggcacatcttgtggaggagcgtgtcccacccggggagcaaccncgccacncaagagcctcggcgccaaccncgncgaccgcccccaagccncaaactccacccaccgncgacgacgtggctgtacagcgacgagaccaggacagccancgctgaactgaataatcccattgatcggagctgttcgatct

SEQ ID NO: 2095 - DNA, 192 bp, Oryza sativa
  Clone ID: PAT_MRT4530_10189C.1
gctccctttcggacagattggtttgacatttacaaactacacaaacacttaggaacacatggattcttacaactactaacatttgaacattactcatacgggtgaacactttatacacttctagaatgtacatcatttgactttacgattcaaatatgacttatagtgctacgacacgaacaatacagtttt

SEQ ID NO: 2096 - DNA, 6701 bp, Oryza sativa
  unsure (1)..(6701): unsure at all n locations
  Clone ID: PAT_MRT4530_1018C.1
ctttattctctcctagctcccagagaccagagtagtagagagagagaggaggccaagcagcatcagcgggcgcaggccagacaagaccgatcttgctttcaccgatggagatccacctatagagctgatcggagcttgaggatcacagctggccccggaatggctagaccccagctagcgtaggtctggagcggtgctctgatcaatatcgtcaggcaatggcacatgactggtatctacgctggcatgacgggggctccattctgagacacagagaacttcacattagaagaacttcttgacgaggatgaaataattcatgagtgcaaagcgctgaatactcgtctcataaaatttatgcgggtgcagctgttaggaggggccaaggtggcggaacccaaggatccttgcgccatggaacagtgccgcccctcctcccagaagaactgccggggacgagaggaggcccctaagtcctttgcgataccccttccatactccgccttccggaacttgttcccccccaacatagagattcctcccgccccctcaccgaagacacctcttgtacacccccgcagtcatcctggttttactgtcgtctgctagatacactgcggctccatggactgccaatccattggcagcccaacgagccctccagttgttcataatactgccctacagacaccttctgcaccagactctctattgtggaagcttatttcgtccggaagttcatagcgcccacttcttgtcccatccacttcatgactgccagcgaggtggcaaagttattgcttttgtgatacgttcctcgatgccccagagaattccgcacacaaacgttactatctgaactgattcagtgccaggaaagtgtgtacattggtcacagaaatcgaatagctgatcagcctagtggatcgaggggatagcaacagcttcatccaatctcatttccagggttacagtgatggagttgcatggtagacaacggccatggtcaatcgcaatgagtttgagatggtatatcaactggtcctgtagacattgtacttctccatatgatcgtagtactgctacagaactgaatgctgcccctactaggttaagaaatgcaccggtacctagaaccaatctcttactcctcaaggccttaaggatgagactcaggacttcccattgatgacgactgaatgatacaaagagagtgtgaggcagtcggctttgatgaaatatgagcttatgtagtgagatgttcgaggtgtttgggcgctcattagtcgcgctacagacaattgacaaattcagatcattgtccctgactgtggactagagggtctaaacctcttcgatgggttattgtcggttattcctttagctaccaaatggaaacttcactaagctcggagtatactgatggggggcaatctagtgagggaactagagttgatccacaactgtatagaacctctcctaaatgtggcctagctggataggccggagacataacagatgtaagtacacaaagtggcattaactgggaaggacattgacgagtgtgctctgaagcagaacatttgtccaaatggggcagataatttaagtgccgtgcgggtgcttttggttggggttaagactaactgtgaggagataaagatgaactacaatgccaaaagttcttttcgaggtatacagatcaaacagttgatcgtaagaccttacagacgggttgtgcctgagggtgcgcgtcatctacttggggttaaatcaggaatattgcattaacttgatctaacgaatcaggtgcagaggtgcacccgtaggaaaattgagtacatgggagaaacattgattggctcataaatatcatatctaaatatggttgttgtctacgttgtacctccagaccgaaagtagctacttgtaagccgatacttccagaatgaatcaaagtactcatacctaagtcccttaccgcacttcttggaactcgtggagaacttagaattaatgagggctgtgcaacaacataaaggtttgggtcactgcatttccagtttgcaaacgagcacttccatatcccttcggttgcacctgatctgaatatgcattatcgtgcatttgcctgtgtttcgatcagggttcaggtgggtatgatcgttttaatctttctttaagacgtcatatgaattggaggtagctttgaggtagaaatgtttcctcggtctgttgggctttgtaccttggaatgggtttcatatatgctaggtgcacttggagattgtcatctgttcagttttcttttgaatgcatgcactgatgaattaactgatagaaagaaggtttctcttggtacccaaccgataagccttcgtacattctcatcaaagggtacaacccacgtgtttgcttcatcggatagaccgactgttatttatagcagcaacaagaagttgctgtatagcaatgtcaatttgaaggaagtcaaccatatgtgtccttttaatacagctgctattcctgacagccttgcaattgctaaagaaggtgaactctcaattggaaccatcgatgacatccagaagcttcatatccgtacaatccccttgaatgaacaagcacgtcgcatttgccatcaggaacagtcctggccattagggttttttcaggttcaggactgatataagtgttagaatactttcacttccagaccttgaattaatcaggaaggagaacttaggtggagaaattgttcctcggtctgttctgctttgtaccttggaaggggtttcatatttgctctgtgctcttggagatggtcatctgttcagttttctgttgaatgcaagtacgggtgaattaactgatagaaagaaggtttctcttggtacccaaccgataagccttcgtacattctcatcaaagggtacaacccacgtgtttgcttcatcggatagaccgactgttatttatagcagcaacaagaagttgctgtatagcaatgtcaatttgaaggaagtcaaccatatgtgtccttttaatacagctgctattcctgacagccttgcaattgctaaagaaggtgaactctcaattggaaccatcgatgacatccagaagcttcatatccgtacaatccccttgaatgaacaagcacgtcgcatttgccatcaggaacagtccaggacactagcgttctgcagcttcaagcacaaccagactagtatagaggaaagcgagacacattttgttcgtcttttggatcatcaaacttttgagttcctgtcaatttatcagcttgatcaatatgagcatggctgctccatcattagctgctcattctcagatgataataatgtttattattgtgtgggaacagcatatgttttaccagaggaaaatgaaccatcaaagggccggatccttgtacagatcccggcggtgatctttggcaccatcaacggggttattgggattattgcttcgcttccacatgagaagtatgtattgcttgagaagctccagtcgactctggtgaagttcataaagggcgtggggaacctgagccatgagcaatggcggtcgttccacaacgacaagaagacgtcggaggcccgcaatttcctggatggtgacctgatcgagtcattccttgatctaagcagaaacaagatggaggaggtggccaagggtatgggggtccccgttgaggagctatccaagagggtggaggagctgactagattgcactaggtctcgataatgatgatataattaatacgtagaagatgtttgctggaacttatttctgaaatgtatatctttttttctactccagtttattaagcatgtgttggtgggttgaatgttgatgccgctggtggcacaggaagaagcattcctgttaagaagagttactaagttacccatgtggttcggttgtagattttactctgttttgttggttggatggtccagtaattaacgtttgagctgccacataaaaaaaaaaaaaataatgagaagctccagtcgactctggtgaagttcataaagggcgtggggaacctgagccatgagcaatggcggtcgttccacaacgacaagaagacgtcggaggcccgcaatttcctggatggtgacctgatcgagtcattccttgatctaagcagaaacaagatggaggaggtggccaaggtttctttgttcttattattcttgaatgttgtccctagcttgcgagacaaggctcaagtggagcaattgcttcgttacatcgtggaagaagtaccagaagattctgaaaagaaacgttcttttaagttcccattcattgcttgtgagatatttacctgtgaaattgacatcatcttgaggaccttagtagaggatgaagagttaatggatttgcttttctcatttgtaagacctggtcatccacatagcacattgttagctggatacttcagtaaggtggtaatatgtttgatgctgagaaagacttcccctctaatgaactatgtccaggagcacccagacattgttgtccatcttgttgatctcatcggcaccacctcaataatggaggttctgattcgactgataggtgctgatgagaccatatactcgaattatgctgacacattgcagtggttagaaaatacagatgtactggaaatgattgtggataaatttagctcatctaaaagtgcttatatatcatacactattttaaccaagcaggattcccctgaagtacacgccaatgctgcagaaattctttctgcagtgactcgatgcgcccctcctgctctcgctgcaaaaatatgcagcccaagttttgttgggagattatttcgtcatgctcttcaagaatcacgccccaaatctgtcctggttcattcattatcagtatgtatatctttgttggatccaaaaagactagcgtcagcctcataccaagcatttagaagtaacttgagccatgggacattggttactgctagtccagagacagttgatggtatgctggagagcctaggtgatttgctgaagttgttggatatttcttctgctgaaaatgttttacctacaacatatggatgtttgcagccccctcttggaaaacaccgcttgaagattgtggaattcatctctgttttgctgacgattggtagtgaaactgcggaacaggagctaatcaaccaatctgcagtaaaacgttccattgatttgttcttccagtacccttacaataactttctgcaccatcatgtcgagagtattatcatttcttgtctggaagttaatagatcccagctgattgaccatgcccttaatgaatgcaatcttgttggcaaaattcttgctgctgaaagaagttcctccctgtcaacagaatctaacacaccaacattactatctgaagggaaggtgcctccaaaaattgggaatattgggcacataactcgaatagctaataagcttattcaactgggaaatagcaacagcataatccagtctcatttgcaggagaacagcgagtgggttgaatggcagacaactgccctggtcaaacgcaatgaggttgagaacgtttatcattgggcctgtggtcgtccgacttctctacatgatcgtggtagggatagcgatgatgatgacttccgagacagggactatgatgtggcggcacttgctaataacctgagccaggcattccggtatggaatgtacagcaatgatgacattgaagaggcacaagtaattgaacgagatgatgaggatgtctactttgatgatgaatcagctgaagtagtaatatcttcgttgcgtttgggtgatgatcaggacagcagctccctctttacgaattcaaactggtttacctttgatggtgatagaggaataaatgaccgtttagctgcctctgtcccttcttcatctcccaattctgaagaaacttctctaaacacggaggaaactgatgaggtgcaaattggtgaggacactagcatcgagccacaactggaaagtgtctctcttgaaaatggccctgttgaggaggccggggacttagcagatgtaagtaaacaaacagattctaacacggaagacgagaaactattgtgcactgaagaggaagatttgtccaaagaagctgaagaatctgagcgacacgtggatgttcgagatggccaggtagacatacaggcagaagatgcagctgaaggatcatgcggggatatgggtacagggatagcagtggatgaacctgtcagcccatcatctgagcccaacaatgcttcggctggagcttcaccagacacaggtgatatccatactgctggctcaactggatccaacgattcaggtgcagagttgcatgccaaggaagattcacaggatggacagaaaactgatgagcccacaacaacagagtgaagtatttacgcataaggggcaactcgaaanctgtaagcattggcaagatgaagtattttatcccttggtttcttttaaaaattggatatagcatatctctgtattgcttaagagaaacatacggctggctttttctctagttaaattaagagtatatttgttcttctgttcgggagtggattctattcccatcgacgatgggataccctctcgtgtacctttacctttcaaatttgatgcaaatagttgtg

SEQ ID NO: 2097 - DNA, 1167 bp, Oryza sativa
  Clone ID: PAT_MRT4530_101900C.1
gggcacaaatggctacgggccgtgttgctggtattcctaattttaacaacactcttttctcactaacttttttattttgagttttatgaaagaagtaaaaataacttgtgacatattcaatcttcaggctttcaccattcaggtcgaattatgttagcgaaacatctgttcaactccacagaagcaagcaacaatgacaacagagttctgtctaattgcttgaaatcataaagctcctacaaatccacacttactgaacgtgtggagcccttttttcttaactccctaatgcaagttcgattccgagaacatgacgaaaaccaagcacagctcagcgcatggtaagttggtaactatagccgcatgaagatattcacttcttcctcttctttgggggctgaagtgagtcttcatcatcatcttcctcatcatcctcattgtcctgatcttcctcttcctcatctactccatcatcatcttcaccaccatcatcatcgtcgtcgtcatcctcattgtcatcatcatcgtcatcgtcgtcatcacctccaccaccctcctggccttcaggctcttcctcatcctcctcaccattttcctcaggctcacctcttttcttgttgttatcgatgccttttggattatcatatccctcaccttctgaaacgtcctcttcgccttccccaaagtcaccatcctcgtccccgtcatcatcaccaccatcttcatccccggcatcagtgggagcagcatcatcactcttcttcccacccatcttgaagtcaggcatatcaaatacaggaccctcggtggctacggcggcggcgagcagattcgcggcggtgacgtcgtcgccggcggcgagcagggctcctcctccgggagcttcagcttcgggtgtcagggacgccatctggacggctgtgttgaggaagctgagaaaggctaggaaccacagatctgaaggcttcttcaaggaggagcagagcacacaactaggcgaactccatgagaggagaggtgaggtgcagaggaggaaggggggagcagagaaaggagaagacttttcacactctagagagagagagaggaggatagagaggcgggcagcgcgggcaggaccccacgcgtccgcccacgcgtccgcccacgcgtccgcccacgcgtccg

SEQ ID NO: 2098 - DNA, 1332 bp, Oryza sativa
  Clone ID: PAT_MRT4530_101901C.1
atggcgttgtcgctggctggcagctcggcgcagcacatccagagccacactaccagtgtgcacaagcgagacacaccacagctcctcgctaccgccggtgatgtcggcgccgcccgcgcccctgccccatcccccactggaggatctggaagtggcgggaggaggagtgggtcgggcactgctgccgcacccgcgggtgggtccaccccgcgtccgtatccgccgccacgggaggcgttcgaggacacggagaagctcatccgccaatgggatgcgaccccggagttgctggtgttcaagggccccgaggaggacgtcgccggctacctcgacgcggtcgacgttgccgtcgacccgctgctctcgggggtgggggccaccaccgaggccgaggcggcgggcgtcgtcgtgcagctcgcgatggcgtcgatggaggaggagctccgccacctcatgcaaattttgccattaaaatatgaagggagtactgtgcttcccaaaaatcggaaaggcaatacgatcgtctttaaagaatggctcctaaatcgtttaccaggttcagctggttcttacgagttttcaactaagttagaggaggtggcagccggtggtggcggatctggtgacggggagccgttagagacggagaagacgacagggtgggggcaccttgtggccaccaccttgtggaggaagagagcaggaaggtggggtgggaaggggagaaggctggctggggaggacctcgctggcgccgttggcgtattccggctagctggtgaggctgggcggccttgcggtggggcggtggtggcacaagagcacaagctgaggcccagagccttaggggtggtcatatttgtaagagatggagagtacaaggtttgtagaaaagccccttgcagatgggtaaattacacgagcataccaaatgcaaagaagaattctaaaataaataaaagaggcaatcctcatcttcatattatttacaagaataacagtcaaatctatgcgagcatagatgacgaaaacgatgaatccatggcaagctatagaatggagattctaggtgcaaacccaaatggtgcctcctacatttggaggtcgaagcaagcaagcatgccaacagtgaatacatcaactgcaactaagagatctgtcatcggggatgaagaaggttaccgctctcgtggttgggtcaccggagaaaagacttggagcggccagcaccaccttccaagggtcaggttgaagggcaagccccacactcaaagaaactttgtcatgcccctagctcagagcgctaagggagaacccaaaggctattggtag

SEQ ID NO: 2099 - DNA, 1608 bp, Oryza sativa
  Clone ID: PAT_MRT4530_101902C.1
tcgtctcttccacccccaacatctccctgaatttagctgctttcgcggcacagatcagtgcgcaagccataaagatcgagccttagcttcgagctggaatttatcggcggatcggctggcattttttcagtttgtgcgcgcgcctcaagctcaagaaccgggagagagatgagctgcttcccgtgctcggggtcgtcggggaagggcggggttgacgccaagagcgtggcggcgctctcgccgggtccgcggcccgcggcgagcgcggcaccagatcgatcaaactcatcacgtggttcaggcattaagaaggacgattctgtccgaagaggaggaagctctgcgaatgatggtccagccaaaattttcactttccgagaattggctgttgccaccaagaatttcagaaaagactgcctgctgggtgaaggtggctttggtcgtgtctataaaggacagatggagaatggacaggttattgccgtgaagcaacttgacagaaatggcctacaaggaaaccgagaatttctcgtggaggttctcatgctaagtctcttgcaccatcctaatctggtcagattaattggctactgcgcagatggtgaccagcggctcctagtttatgagtatatgctattggggtcactagaaaaccatcttcatgatcgcccaccaggcaagaaacctcttgactggaatgcaaggatgaagattgctgttggtgcagcgaagggtttggagtacctgcatgataaggcaaatccaccagtcatatatagagatttcaaatcatcaaatattcttctgggcgaagactattacccaaagctatctgattttgggcttgcaaaacttggtccagttggtgacaaaactcacgtatcaacaagagttatgggaacatatggctattgtgctccagaatatgccatgacaggacagttgacagtaaaatctgatgtttacagctttggcgttgtcttccttgaactcattacaggacgtaaagccattgatcacacccaacctgcaggggagcaaaatcttgttgcatgggctcgtccactgtttagagaccgaaggaagttctgccaaatggccgatccatcgctgcaaggttgttatcccaaaaggggtttgtaccaggctttagctgttgcatctatgtgcttgcaggagaatgcaacatctcgacccctcattgcggatattgtcactgcactttcttatctagcttcaaatcattacgatcctaatgcaccttctgcaaagagttcgaggacttgcccatccaccccaaaggcaaaagcacatcgacgaacaaccagtgttcctgatgcccaacatgctgccgattcacttaactggaacttcccagacttggggaggaaggaaactactagaggggaattcgagcaggatcacagtgaaggttatggcagtggcagtagctctggaaggaatgatggtctagatgttccagaactgctggccttgcataatggacaaaataacagtgaagctgatatatatcacaagtccagtgtcaagcttgatgcccatgagaaacagagatcagggtcaggcaaaggcagcaggcagttttga

SEQ ID NO: 2100 - DNA, 411 bp, Oryza sativa
  Clone ID: PAT_MRT4530_101903C.1
atggttgaaattagcagtagatactccaacgtgggaagcatcggcgtggtgtccgattttcttgtcttgccatgccacccccgcagcggcggtggcggagaagccgaacacgactacgtggttggcctacctctcgtccgcacactgtacaacgtggatggctgggcgcgccatacttctttgccatgcaacgttgttgtgcgcccgcacgacgctgccacgttgcccgggcatgagttcaaccttaccaaggtggtggccaaggccaccggcccatgctccggtggcgggcttggactaccacttcccctgccgatgcagttccctgacttgctccgccaccgctaccgccgccgctccaccgcccaccctcccgccgcctgccacctggggcttcagctctcaccgtag

SEQ ID NO: 2101 - DNA, 639 bp, Oryza sativa
  Clone ID: PAT_MRT4530_101904C.1
gtgcaactctgccatcgtcgtcgcttctcaaggtttatcaatatctctctctcggcgcgtatagccgtcgcgcggagggacgagccaaggccacgccgcatccacagatcgagaatcgcgacggggagaggcgaggcaccgtgtgggccgccgggaagacgcacgcacgagatggcggcggcgtggctcgtggtgctcctcaccgtgcaccggctcctccacctctccggcgtctcggccgtcgaccgcagccagttcccgccggacttcctctttgggacctcttcttctgcttaccaggttgaaggcggatatttggagggtaacaaaggtctcagcaactgggatgtcttcactcataagcaaggtacaattgaggatggaagcaatggcgatacagctaatgaccactatcaccgttacatggaagatattgagttgatgcactccttgggtgtcaactcgtacaggttctccatatcatgggcaaggattctaccaaagggtcggtttggagatgttaatccggatggtgtagcattctacaacgcccttattgatggtcttgtacagaaaggaatacagccatttgttacaatatgccactatgatatcccacatgaactggacgagcgatat

SEQ ID NO: 2102 - DNA, 1613 bp, Oryza sativa
  Clone ID: PAT_MRT4530_101905C.1
atggcggcggcgtggctcgtggtgctcctcaccgtgcaccggctcctccacctctccggcgtctcggccgtcgaccgcagccagttcccgccggacttcctctttgggacctcttcttctgcttaccaggcacgacggcggaatccccactcgaccatgctgcataacaagtctctttctgaactctgcttcttcaggttgaaggcggatatttggagggtaacaaaggtctcagcaactgggatgtcttcactcataagcaaggaagatattgagttgatgcactccttgggtgtcaactcgtacaggttctccatatcatgggcaaggattctaccaaagggtcggtttggagatgttaatccggatggtgtagcattctacaacgcccttattgatggtcttgtacagaaaggaatacagccatttgttacaatatgccactatgatatcccacatgaactggacgagcgatatggtggatggttgagtccagaaatccagaaggacttcagttactttgcagaagtatgcttcaagctgtttggtgaccgaataaaattctggacaacatttaatcaaccgaatttgtccataaagttcagttacatggatggattttactctcctggtcgttgttctgaaccatttgggaagtgtgccttagggaattcttcaatagagccatacgtagcaggtcacaatatcatactgtcgcatgcaaatgcagtcagcgtttacagaaacaaatatcagggaaaacaaggtggtcagattggaattgctttgagcataacctggtatgaaccattccggaataccactatagatctcttggcggttaagagggctctatctttcggtgcttcatggtttttagaccctatacttcttggtgattatcccacagagatgcgtgaagtcttgggtcaaagcctacccaagttcacatcaaaacaaaagaacagactgcagagcacaaaattggattttatcggactaaaccattacacgacatgttatgtgaaggattgcatcttctcaccgtgtgaaattgatcctgttaatgcagatgcacgagtatttagtttatacgaaagggatggagtgcccatcggttactcccaagcaagcaatagcaacatgactgccaaggattttaccaacgacacaggaagaattacctacattcaaggctacctcatttccttagcctcggcaataaggaaaggagctgatgtacgtggctactttgtatggtctctccttgatgacttcgagtggaattttggatacacgttaaggttcgggctctaccatgtccactacaagacactgaagaggacgccaaaattgtcggtagattggtacaggaagttcctcacgggttcactgctgaggagaaagttcagagatgaatctcagcttcataagtttaactcttattaatccatacatgctgttcttccctttccatattactttatgtaaagtcaatatgtgatgctttagcgtacatatgcttgtacttgcatatgttcgcaattatccatcctagaccatatgcatagagtataatatgtactgaataaaagggacggatttttgtgtgt

SEQ ID NO: 2103 - DNA, 766 bp, Oryza sativa
  Clone ID: PAT_MRT4530_101906C.1
tacggataagtcaatctccggaccatatcttttgggtgacaagaaggatcaatgtgtttggatacaaaatattctctagcaatatcaattgttgacatagtctggcaaacatcattaaggaggcagttgctgaaacttgatctgtcaaatgtttcttctccatagcatgttatcaatgcctgaacaacacaaacaacatagaataggtggacgaaagggatgaagaattcagtggacattagaaactgaacaggtaaacagaaaagagttgacaacaatgatgaaaaaggatcttgagcaaggactggatctgcacattgtttccaaaattggatatcagggaagactccaccctcactagtggggtcacccatcggtggcataatgcctttccgcttagtggcattcagaagatctttatcaccagaagtgccagagcaaatagagctcgctaacagttgtagaccttcgaatctcaaaagaacctcaaggcgactcaaatttctcgcagagtgagcaacacgaaataacagagacagtataaatccatttgatgaattcagttcatggcgtaaagattctatgcatgacttcgattcagaatagcttgcaattctaccacgagaagcaatttctgtagataccacagagtatcttagtgtatcccagagaaatagggacgggtttagcctttcagatgctgaaaaactgttgtggctacgacggtagtaaagcatacacaatcttcgtagggaaggatctaaaa

SEQ ID NO: 2104 - DNA, 3328 bp, Oryza sativa
  Clone ID: PAT_MRT4530_101907C.1
atggtttcctcccgcgaccccggcgaggaggccagcgcgccgccgcccccgcccccgcgccgcggcgagaagcggcgaatgcgcggccgcaccccgtcgccggagccggcctccgcgccgcagacaaatggaaagtggcatccacatgaatcgtacagacctgaaattgatgatgcccctgttttcactccaacggaagaggagtttaaagatccaattagatatattacgagcattcgtccccaagcagaaaagtatggaatttgtcgtattgttccaccatcttcttggcgaccgccttgttctctgaaggagaagaacttctgggaatgtacagagttcaatacccgtgttcaacaagttgacaagcttcaaaaccgggaacccacaaagaaaaaatcacaacctcgagttcagaagaagaggaagaggagaaagagactgagatttgggatgactcacaggcgtcctagtgcaaatacatcagaagactgcgcagatgcagacgagaagtttggctttcaatctggctcagatttcacactagatgagtttcagaaatatgcagatgagtttaagcagcagtattttggaataaagggaagtgacgaaatccctctttctgaaattaaaaagaagaaaaaaaattggcaaccatcggtcgatgaaatagagggagaatattggcggatagttgtatgccccactgacgaagttgaggtggattatggtgctgatttggacacttcaatgttcagtagtggattctctaaattatcttcagattcaaatagacgagatccatatggtttatcttgttggaatttgaacaatcttccacgtattcctgggtctgtactgtcatttgaaactgaggatatatctggcgtcgtagtcccttggctttatgtagggatgtgcttctcatcattctgttggcacgtggaagatcatttcctttattctatgaattacatgcattttggtgaaccaaaagtatggtatggtgttcctggtgctgatgcagtgaagctggaagaagctatgagaaagaacttaccaagattgtttgaagaacagcctgatctcctacatgagctggttacgcaattatctccttctgttcttaaatcagaaggagttcctgtttatcgtgttgttcagaatccaggcgagtttgttctaacgctaccgcgagcttaccattctgggttcaactgtggcttcaactgtgcggaggcagtaaatgtcgcacctgtggattggctgcctcacggacaatgtgctgttgagctctacagggagcagcggcgcaagacatccatatcacatgacaaattattactaaaaactgcaaatgaagctgtcagacagctttggatgaaccttagcgactgcaaaagtgaacaaggagtatacagatggcaggatacttgcggaaaggacggaatgctgacaagtgcaattaagacaagggttaaaatggagaaggcagcacggggagggaatatggcactgcgatataagaaaatggatggggattatgattcagctgaccgggaatgcttttcatgtttttatgatctccatttgtcagctgtcagctgccaatgctccccaaatcgttttgcttgcttaaaccatgcaaacattctatgttcatgtgaaatggacagaaaaaccgcgttgttgcggtataccatagaggagctccatactcttgttgcagctctagagggtgatccaactgcggtctaccagtggggacagaatgatttaggtttagtctgcccatctggttctactcagtacaagaagatggacttgggtgaaaacacggaatttccggattcagcaaccaacgtcaatcatggctgcagcttaggaagtcaagatcaatatcactatgaccccgcaaagccagcaggataccagcaagagaagggaatccagattgcttcagaaaaacatgataagaacaagatggttgtcaatcttgagtctccagcaacagctagtaatccaagcaggtcaaagtctgactgcagtggctcactgtccttgaatcattcatctgagttaccatcttcaagaattcaaacaggaaattctacgctagcttccattaccacagagaaactgtttggtgttgacattaaatccaatttagcacagtcttctgatggccaagttagtcaattggccaagccttcctcgagccaaactgatgaagtctctaagccagcaatagctaagtatacggttgagctgctagacagtggaacaatgatgattggtaaaaagtggtgcaatcagcaagctatattccccaaaggatttaagagtcgagttacatttcatagtgtactagatccaacaaggacatgctgctacatctccgaagttcttgatgctgggcttcttggaccattgtttagggtgactgtcgaaggtcttccagaagtttcgtttactcacacatcaccaatgcaatgttgggacagtgtaagagacagagtaaatgaagaaatagcaaaacaaataagttttggaaaatctggccttcctgattttctatcctgcaattctttgaatggacttgaaatgtttgggttcttatcctcccctataattaaggaaatcgaggctctagatccctgtcaccaatgcttggactattggttgtcaagggtttcttctgttggaactgaactcccctcggaatctgtgatggcagcaatggttaatgactccactaaccccccaataaagttgctcgggattgagattaaccggagggaatcagaacaatcaagtagcttcaataattcctgtgtgaggaggtcacacttggcaggttgctgaagaaggctagctaagctcccagaagaaccagagctaatggcgatgaaaagaagtattcagtagcagtctagtgaatcagatagcagtggtatcatctggagtggcaattgccactctccaggatgagatgaacaataatgtagatacatagtgccatgaatagatcagaaatttcagataactcatcctagacagcttccctagggaaccattagaattgaaatagagccaccattggtttgcattcttctagaattgcatttcttgatattcatttcagcttgatcccaattcatttctaacttgatggcaacaagttattgtattctctaattgtttctggattagccagtttattgtgaccaatgtaacaagttgatgtttcctgtcgacataaagcttacatgtacaaaccttggcagctaccaattggaaatgaaaggaagaaaatgttttcggactt

SEQ ID NO: 2105 - DNA, 393 bp, Oryza sativa
  Clone ID: PAT_MRT4530_101908C.1
atgggtcatgggtgggtgtgtgtggactgtggaaaggtggcacgttccgttggcttggcttggcctggcctgggctggcgtgacgtgtggtccgagtcggagtgcacgcgcggctttggtcgggtccggaatgccaggtcagggtggcgcgtttacagtttcgacccatggcgacggcccgggacggtgctgactgctgagcagttcagagttcagacggtgcacgcatcctctgaagaaacaaaattacagggcgcccttgtcattcgccatttaatggatgaggacttcgggcccgaccccaagctgggagggggcagccgccgcaacaccccgggctcaacccccctcggggagagccacgtgggtttgagggcgtcctcctccctctag

SEQ ID NO: 2106 - DNA, 370 bp, Oryza sativa
  unsure (1)..(370): unsure at all n locations
  Clone ID: PAT_MRT4530_101909C.1
ctcacgcattcgttacaccaatcatgacatataccacatccaatgacaaataacatgaaccttatcatgaacaagctntgcatcgacctcatcagctacctcatcctcttgctcaccgccgcgaccacaggatgcaccacacgaagcacgttcgagatcgacgtcaagaccgacggccggaggaacgcccgcacctacgtccacgtgtngctggacatgcgcgccaccatggacccgacgctgacggactccaacctgcagatgtgcggccagatggactacggccacgactacttccagaaggggaacatcgaccgggtcaagtgcatccgcgactgcatgccgtacgagcccttcaacatggagctca

SEQ ID NO: 2107 - DNA, 2575 bp, Oryza sativa
  Clone ID: PAT_MRT4530_10190C.1
acagcgtccggtcgtcgcgtggtcggcgaatattcgagcggcaacggcataacaccattgtcgcccgggacgcgcgctctttctctctctctctctcttcctggcgatggcggcggcggcgggggaggaggtggaggcggcgcggtgggcggaggcggaggacgagaggaaggaggggctgcggcggcggcggaggtacgggcttgtggagtaccgggcgctgccgggctacatgcgggacaacgagtacatcctgcgccactaccgctgcgagtggccgctcccgcaggtgctcctctccgccttctccatccacaacgagaccctcaacgtctggacgcacttgataggatttttcatctttcttgttcttaccatatacaccgcaacacaagttccaaatgtagtagatcttcaaagtctgcagcatttacctgatgtgctgagaaacgctgatcttcataagattcagacagaacttgtggcatgccttccttcgttacctcacctttctgacttgcaaaagctgaaggatgaattgaaaagctcatggaattcaattgaggtgcttccatcattgtcccgttggcacctcttggagttactatcaagttgcttgccgcacagatttactcattccaatgaaaccagtctgtctgttcttcaaagcatgaaggaagatatagcaaacatgattgcgccacagttgattaggccaattccgagatggccattttatgccttcttgggaggagcaatgttttgccttcttgccagcagcacatgccatcttctctcctgccactcccgtcgccttgcatacattatgcttcgccttgattatgcaggcattgctgctcttatcgcaacatcattctaccctccagtatactattctttcatgtgctatccattcttttgcaacctgtatctcagctgcataactattttaggagtggcaactattgctttctctttactccctgttttccagaaccctgagtttcggaccatacgagcatgcctcttctttggcatgggtgcatccggcgtgatccctgtcattcacaaattgatcctcttttggcaccaaccagaggcattgcacactaccgcatatgaggttctgatgggccttttctatggcattggggcactggtcttgctcaagttcaatgcatacataaattgtgtttacaataggagcttgggaagtgaaatgaatgttcaggtggcccgtattctcgcctcgcaacaaacgcacccacacatggatctcctccggcgagtcgccgtggtagccgtgctcctgtcgctgccgtcgcgtggccgctccggcggcggcggcagcgatctgcacccggtcgtgctcgtgccggggtacgggtccaaccggctctacgcgcggctgactgcggcgtacgagccggcggcgcctcgctgcggcgcgcgagaggggaaggatgagtggttccagctgtggccgatcgacgcggcggcgagcgaacccgcccaggccccctgcctcgccgagaagatgagcctcgtctacgaccccgtcgccgacgactaccgcaacgtcgccggcgtcgtcaccagggtcccctccttcgcctccacccgcgccttggttgggtgggacccactggtgcggcagctggaggcgatgggccaccgcgacggcgggagcctcttcgccgcgccctacgacttccgctacgcggtggcgccgcggggccacccgtcggcggtgggcgagcgctacttcgctcgcctcacgcgcctcatcgagagggcgagccggctcaacggcgggcggcctgccgtcgtggtggcgcacagcttcggctgcgcgctcacgtaccagttcctgcgcgcccgcccgctcgcctggcgccaacgcttcgtcaagcacgccgtcctcctggccgccgcgctcggcggcttcgcggaggggatggacggcctcgcctccggcgccggctccggcctccccaacctcgcgccgccggcgagggccaggcttgcgcggagccagcagagcgcgctctggcgcctgccgacgccgatggtgttcggtgaccggccggtggtggtgaccaagaactcgacctactccgccaacaacatcaccgagttcctcgacgccatcggcttcacggaaggggtccagccgtacgtgacacgggtgctgccgatgtggcgggcgctcccggcgccgatggtgccggtgacaagcatgtacggggtcggtgtcaggacgccggagacgttcgtctacggcgaagctgggttcgaggggacaccggaggtggtgtacggcgacggcgacgggaacatgaacattgtgagcctgatggctgcggaggagtggtctggggtggaaggccaaatcttgaaggtggtcaggttgccaggtgttagtcacgttggcttcttcagcgatcttgctctcaagaaagtagttgctgaaatacagaaggcagttagcagcatagaggtacacaggaaagagaaaatcttctcttttctgaataattttgaatttacaattcctgtgccactaggatggtga

SEQ ID NO: 2108 - DNA, 337 bp, Oryza sativa
  Clone ID: PAT_MRT4530_101910C.1
ttcatgcaagattgcaggtaccattaccgtcaataagactacgcctgcctcgaacaaaactgccatggcgatcaggcatgccgaaggcatggccaacaccaccatgaccaggtggagaagcagcattgcgtgcaggactgcaggcaaagactgcgtcagtaggttgaacaagcccactgagacaatgaataagaccgcatctagcagcgctgagagacagcatcactgacggaagcgacaccagcaccacgaccaccaatgtaatatgcagcagtgcatgtcagactagatgtacaggcgccatgagggagacgaagtgatgcactatgacaaccac

SEQ ID NO: 2109 - DNA, 360 bp, Oryza sativa
  Clone ID: PAT_MRT4530_101911C.1
atgcagatgaaggcggtggctgctgtggacaagaacgaggcgtgggagagggcgatggctgcattgcacgcggacggcggcgacggacatgggaagctacgacgaatgcagacgaagacgacgaccgcagtggacaatggtggcggtctagcggacacagacgaggacgccatgcgcgggcgagggatgacgtgggcccacaccgcggaggacgaggatggcgggacggacgctagcgaggatggcaggacggacgcgaaggacgagaacaacaaccgtgtgcgaggagtggctggcgccgtaccccaacatggcggcgccagccacactggcgtcgtgcctgtgccaacgtggcagtag

SEQ ID NO: 2110 - DNA, 104 bp, Oryza sativa
  Clone ID: PAT_MRT4530_101912C.1
atgggcttcctaaggtgcagccgccccacactattgatgcagcccaagaccatgttccatgtaaagcctaagggcctgttcggctgctttgtaccgccgctgtg

SEQ ID NO: 2111 - DNA, 204 bp, Oryza sativa
  Clone ID: PAT_MRT4530_101913C.1
atgggtcaccagtccacgttgaaccgggttcacaagaccggaggggagcggcgcaccatgaggcgccgatgtggcggccacgtggacaaccacgcggccatggcacgtggcggcgcggggtcggccactggcggccagcggcaggtgacgcggagagcgacggcaagagagggagaggggaaaggaggggcgtcctcaccgtga

SEQ ID NO: 2112 - DNA, 481 bp, Oryza sativa
  Clone ID: PAT_MRT4530_101914C.1
gattagacagtcgtccatgagatcgcctgtgcgggccacaacagacagacgcagctgacaatcacttctactgagactgctgacgtcagtttggctacatcaatgacggctgatgcaagtgctaggccatcactcacaatcttagcagcatacacaattagctatagcatcccgatgatcaacacacgaaccacgccacgttccgcctatcttttaaacaagaacaagaaactgcaagaggaatccttctccaatgttccagcatgaacaatgcttgcaaatgatgtggcgcttgatattggctatccagacctgccttctagctaagctactgacagtagcatcgcatgctaccatggcaaattcagatatgattgtttcacccacaagaatgccaagctgatccgcggctaatgaaggaagagaactgataggtacctaccttacacgatggtgaagcctaagatcctgagaggactga

SEQ ID NO: 2113 - DNA, 325 bp, Oryza sativa
  Clone ID: PAT_MRT4530_101915C.1
ggtctccacgggtgcggattgaacccacgggagtatcttggacgggaggggacaaatccgtggagattattttggacgcgattgaacaggaaagtgtgattgatttggggaaaagatgctcatggtgacgctcacgttatggcgagaacagtcgtatctagactgttacttcacatcctgtacagccggatccagatgctatcgtaggatactgtctagacggtggtgggagatatcggaggtgcatgtatacacctgggcgcgtaaatgctgtttgacatctaaacaacttgcatggttaagagggttctgctcgctatgaaac

SEQ ID NO: 2114 - DNA, 1007 bp, Oryza sativa
  Clone ID: PAT_MRT4530_101916C.1
gcctccaataacacagacatttcttgcttcaacaatgagcatcaaacaacaaccatgtccaatctaatgggtacgagtgtacgacacaactagaacacagttattacacattaaagcagcaaacacacagaacatgggtcctgtggaaaacatatttcttatttgccacccagaacagagacatttcttgcttcaacaatgagcatcaaaccacaaccatgtccaatccgaggggtatgacacaactagaacacagttattatacattaaagaagcaagcacattaatgttagcataaagacccggttccatgaactaacatgcaacaggatgaacataccatcagttcattgcacaagtagctgctgataagcacacgcatacatcaacacagaataagcacagacacatgcatacataacaacagtttctgtgacataccatgagcagatacattggatagttagttactcatgggaaaacatgcttttgttgagcagaaacctttcatccagagctcatggtaaaccggacagcagagtgaccgtcacttgccatccttgttgccactgaagagatagtcaagtgatgaaccaccgcctggagcagcctgcaccttggttgacggacggtccgtaaggaaatttccacagttttgaccttcagccctcatgtaattgttcgccttactactttgaataccggctgggatctctttcagcttctctgcagaggacgaaggggcaggcttttgaactggagcaggcttctcagctgacttcggagcttcaccaccaccaaacaggtagcccagggaactctgaccacccccgctgctaacaccacgacccatcttatagaacttcaaaggtcaattactcttacgcgccggatccgggagggaggaagggcgtgggcgcgcggcgcgatcgattccgcggagacgacgaacaaggggaggaggaggaggagtgggatcgctgctcactcccgggggcccctcgtgt

SEQ ID NO: 2115 - DNA, 1281 bp, Oryza sativa
  Clone ID: PAT_MRT4530_101917C.1
atgcataaactgatgaatttggtagatcagaacggactctgtggtggaattaatggtttggagattggaccacatgcactgcactacaatagccaacctgaccaatctattaaggaagtgattgtaagtcgaaaatgtgcagagtcggttcttagaggagcccaggtgtacatcccaggagttttagcttgcagctcacatgttgaaaagggtgacaaagttgcagtgtcggttgctattgaacaacctgctgaggatgatgcacatcatgaagaaagaaagggtttgtacattggtcaagggatcactgcaatgtcaaggtccggaatatttcgtgttcctcatggagttgcagtggagatgactgagagggtggtttggagattggtcagcagaatggtggagagcaagcacacgaagggaattctgtggtgcataagtgcccatattctggcagcaattgctatcctgatgaaagaccaaggagaaattattgcccttgatagatctcacaataaggtgatggatattttgaagttggccgctgagatggacctaaattgcataaaagcttataagcttgatgcactcaaatctgtacggaagaccaatgaagcaaaatatattggcgaagcaggcagccgcactgatgcaattgtgacactggcagaggactctgagccttgtattaataaagtcgatgctgggactactaatgccagtgaagacagttctactacatcagttgttcagactgacctcaggaagaacttaaggcgaatgaggaatggaccaggaagaaataactgctcaggtggtagagttgaaaattctaaaggatttttgcccaatagctttgatcgtgtcctccttgatgctccatgttctgcacttggcttaaggcctcgcctctttgctggtgaggaaacgctggaatcactgagaaatcatgcgacgtaccagagaagaatgtttgatcaagctgtcaagctagttcaccctggtggggtgattgtttattccacgtgtactataaatccaggagaaaatgaagctttggtcagatatgcattggataagtacaagtttttgtcgctcggatcacagcacccaaaagttggaggacctggtattgttggttcatttgagcgatcaaccaagaaatatactgagtaagccgcactgatgcaattgtgacactggcagaggactctgagccttgtattaataaagtcgatgctgggactactaatgccagtgaagacagttctactagatcag

SEQ ID NO: 2116 - DNA, 357 bp, Oryza sativa
  unsure (1)..(357): unsure at all n locations
  Clone ID: PAT_MRT4530_101918C.1
cagcttacccanggacaccaatgactcaggntatnatgcagatggcgnnncaangnaaatgcgnacnggggacgacagtnangcangnctagcnaagacggtcanttntnggagcnaaggtngcntccanggngcaagnnaatttancaaancngtnncccangtatttgtgnatatgaatntccnagcttngttagnggaagagtntnnnaagcnggacgggagtctactgttnctcaangattnatacaagnataggncnttgcaagttttgcaggtataatatccangatnnnanagcctaaaangnntttttntgnagacctncacgncnttnnttnctgagggccttccctn

SEQ ID NO: 2117 - DNA, 483 bp, Oryza sativa
  Clone ID: PAT_MRT4530_101919C.1
atggcaaactatctgcctgtggccttagcggattctacccggtcctggcttcacagattaccccgtggcacaatcggatcttgggcagagctttgcgaccacttcatcgccaacttccagggcacctttgaatgtcctggcacccaatttgatctctacaacatctccgacatcaccgacgacgtcatcatcgccgccttcaccaagggcattcgccatgatctcttagtcggcaaatttggccgtaagcctcccaggacggtcaagcagatgtttgaaaaagccaatgaatcagctgccatctgtactttggtccctgcgcacaacacccagtcgggctacgggccagtcaccgttttttctggtctatggcgcggaagcaatgttgccaaggaggagcgctacgaggaagaccgagtggatgatctcaaccgactggaggaagcccgtgaagcagccttaatccagttcttactgacttaa

SEQ ID NO: 2118 - DNA, 247 bp, Oryza sativa
  Clone ID: PAT_MRT4530_10191C.1
attttacccatgtaaatcttgtcgctgcccagggattgactcaaactgacgcctatgtcaaatcaaacattggctcactccgacgcaagaggctaatccaataatagatgcttgtagagctagaggctcagcaaagattaggcgctcataggactgcgctatcagggaggtttatgcatgccgtgcacgaagcggggctggatataacaggatagctggcccaaatagaggctacatttgagcagat

SEQ ID NO: 2119 - DNA, 987 bp, Oryza sativa
  Clone ID: PAT_MRT4530_101920C.1
atggcaaactatatgcccgtggctctagcggattctgcccggtcctggcttcacgggctaccccgtggcacaatcggatcttgggcggagctttgtgaccacttcagcgccaacttccagggcacctttgaatgctctggcacccaatttgatctctacaatgttgtccagaagtccggagaatcccttcgagattacatccggcgttttaccgagcaaagcaacaagatttccgacatcaccgacgacgtcatcatcgccgccgtcaccaagggcattcgccatgatctcttagtcggtaagtttggccgcaaaactcccaggacggtcaagcagatgtttgaaaaagccaatgagtacgcaaaagccgaagatgccgtcatcgcatccaagcagtcaggcaccacctggaagctgaagaaagatacgccgactgcagggggagcggtagtaccaatcacaaggatcgcaagcatccctcgcacagaattgaagccgagtaatgcgccctttcacggagtcatccccgggctatcttctactccactcggccagatcaccttgccggttactttcggcactcgggagaactttcgcacggagaacatttgcttcgaagttgctgattttgagacagcgaaccacgctatactcggacgcccggcgttagcaaagttcatggctgtcccgcattatacctacatgatgatgaaaatgccaggtcctcaaggagtcatatccctacgaagcgacatcaagcaagccgtcacttgtgacaaggaaagctgcgagctgtcccagacccacgagatcactctggctcgagaggaaatccgactggctgcgtccacagcaaccaaaggagaagtgcttgcaaccaagatgccaaagaacggagaaggcgacgccaagaccaagaaaattcctctagatccctctgatcccactaaaactgctgtaataggcgctgagttagattgtaaatag

SEQ ID NO: 2120 - DNA, 837 bp, Oryza sativa
  Clone ID: PAT_MRT4530_101921C.1
gcacgagggaatccgcctccactcccccgccgcacccgaggaaacccccaccttgcatggccaagcgcctcccggccgacggcctcgccgccatccgcgccgcgctccgcccctccgcccgcggcctccgatcccgcccctcccaaggcggcaaggcggggaagccgtccgctgctccgctggatacgcccaggaacgccgccggcgccggcgccagcgccgggcgcgcggaggtgcgggatttggcggcggcgtgcggactgcaggaggacgaccgggtgccgctctccgaggtggtgctggactgcacgaggcggtggttccaggacacgctcaaggaggcccgcgccggcgacgccgccatgcaggtgctcgtcggccagatgtaccgcagcggctacggcgtcaacaagaacgagcacaaggctcaaatttggacggagaaagcatcacgatatcgatctacagtctggaaagttagcaacaaacgcccaggatacaatgctagtgactcagattcagatgattccaaggaaacaggcaaacaatcacatgttactggaaagtgactacaaaaccagcaaggcaagaaaaactaccccatgatgacatgatgtaccccatgatgcatgaaatacgcggttctatcaaggagattatttgcgtgccctattagttaagcgtgtatggtgctctgttctcgtttgtgtggtttacaaatttacttatcattgaaaatgtaaaattctcaggatgggtttcactgaacactgagcatacgaggaatcagtaaggatattcgattttttgttttgtcaaaaaaaaaaaaaaaaaaaa

SEQ ID NO: 2121 - DNA, 540 bp, Oryza sativa
  Clone ID: PAT_MRT4530_101922C.1
atgggccgatggaaagaacgagaaaaagatcgtgtcccagggaactgcaatgtgaaagaaggggaagtcggcgtcatactccaacctctcggcacggtttcgacggaacaattggacggctacctcagctcccccggtgtcgactcacgaccaatcgagatcgtagagcacgatgacttcggctaccactacgactaccgcaacctcgacaacttcgccgaaggctttgaagataactacatgcccctctacttcggcattttcatggccgacaacgagacggaagaaaagcgtcaagcccaagaaaacgcggttgcagcgatcaccctcctcgacaccctcctcaaggaagacgcactcaatcaggccaatcacgtcgtcaacatcttgaaccagaccaagaccatgatcgcagcttcggtcccgattaactccgcaagcgtccgcacgccgactggcagccgagttcctcctcttcgatctcgagactatcaccaaccgagcctcagcgtcgtcagcaccggcaacatgatctattag

SEQ ID NO: 2122 - DNA, 1191 bp, Oryza sativa
  Clone ID: PAT_MRT4530_101923C.1
atggctcagccgacttggtcagcaaggcgcgtcactgccgccctggtcgtgatggtggtggtggtgctcgcggtcgccggcgggtcgtgggcgcagctgtcgccgagcttctactcgtactcgtgcccgggagtgttcaacgcggtgaagcgggggatgcagtcggccatcgccagggagaagcgcatcggcgcctccatcgtccgcctcttcttccacgactgcttcgtccaaggttgcgacgcatcgctgctgctggacgacacggcgagcttcaccggcgagaagacggcgaaccccaacaacggctccgtcagagggtttgaggtgatcgacgccatcaagtcggcggtggagaccatctgccccggcgtcgtctcctgcgccgacatcctcgccatcgctgccagggacagcgtcgccatcctgggtgggccgagctgggacgtgaaggttggtcggagagactcgcgcacggcgagcctcagcggcgcaaacaacaacatcccgccgccgacgtcgggactcgccaacctcacctccctcttcgccgcgcaggccctctcccagaaggacatggtcgccctctccggatctcacaccattgggcaagcacgatgcacaaacttcagagctcatatatacaacgaaaccaacatcgacagtggctttgcgatgaggaggcaatcaggctgccctcgtaactcaggatcaggtgacaacaatctggcacctttggatcttcagacgccaaccgtgttcgagaacaactactacaagaacctcgtcgtcaagaaggggctcctgcactctgatcaggagctcttcaatggcggagctactgatgctctggttcagtcttacattagtagccagagcacattctttgctgattttgtgacgggcatgatcaagatgggggacatcacaccgttgacgggatcaaacggggagatcaggaagaactgcagaaggattaattaactaagtgattaagaggcaagcggtgtgcatgtccagtagtgcaaatgcacattgtgtcgtgtgttctcgaggatatgtttgcaacatcttccttaatttctttcatgtgtttatgtatcattatgttcgtttgaaataatgaaagtactatgtgatttgttttaatgtaaaaaaaaaaaaaaaaaaaaaaaaaaaagagaaaacaaa

SEQ ID NO: 2123 - DNA, 384 bp, Oryza sativa
  Clone ID: PAT_MRT4530_101924C.1
atgtccggccgcgaaaagcgagaaggggccattggaagcgggtccggccgcggaaagcacggcgaccgttcgatcgccggcggccggccggggcttcgtgccgtcgtgcgccctctgtttacaacagcgtcgctacagctgcctgcctacaatacacagtggagtatatacatcagtcacacaagcattgtcacctcgagggcaatgggagaacacgtgtgggacccatctgtcatttgctgtgtgtacggcgtaggagttttaatccgctaccggcttgggattagcggcgtggtttcagtattttgcggtaggcaaagccaccgcgaacctcgggccgacgaatggccagcaagtaagcgtcttggtagctacccagcctag

SEQ ID NO: 2124 - DNA, 1155 bp, Oryza sativa
  Clone ID: PAT_MRT4530_101925C.1
atggcgaatgcccttggtgaaggcggcgatgatgacgtcgtcggtgatgtcggagatcttgttgcgttgctcggaaaaacgtcggatgtaatctcgaagggattctccggactactagacaacgttgtagagatcaaattgggtgccaggacattcaaaggtgccctggaagttggcgatgaagtggtcgcaaagctctgcccaagatccgattgtgccacgggtttcgcgaagatcgacgggacgcctgcgatgtggggagtggggatgttcggctcgatgctccctgcgtcggtcaggaggcgagtggacagatcgttcaccgtgatccctgctcctgtgattggatcctgcgccgacgacactgacgcttggttggtgatagtcttgagatcgaagaggcggaactcggctgccagtcggcgtatggacgcttgcggggttgaccgggaccgaagcggcgatcatggtcttagtctggttcaagatgttgacgacgtgattggcctgattgagtgcgtcttccttgagaagggtgtcgagaagggtgatcgctgcaaccgcgttctgctggggggtgcgaaaaaccgccgtcccctcgacgtcttgttggccgatgagttctcgtgctcgtcgcccggcctccaaggcgcgctgtcgccggtcctcggcctcctttgcagcccgttcgcgctcctgttgctcacgctacagtcgttctcgctcttgtgtttgacgctcctcctccagtcggcgacgttcagcttcttgtcgcacgcgctattcttctgcttctcaggcttggcgttgttcttccgtctcgttgtcggccatgaaaatgccgaagtagagaggcatgtagttatctttgtagccttcgtcgaagtcgtcgaggttgcggtagtcgtagcggtagccgaagtcgtcgtactctacgatctttgtcggtcgggagtcgacaccgggggagctgaggtagccgtccaattgttccgtcgaaaccgtgccgagaggctggagtatgacgccgacttccctggagctagactggatcggggccgaggccagatcccgcctaggcctcggggagaggacgcccttgtggtgaagacggcagccaagtcatcggggagtttcattaggattaagggataa

SEQ ID NO: 2125 - DNA, 5293 bp, Oryza sativa
  Clone ID: PAT_MRT4530_101926C.1
agcgtaaaaacgacgaatatgttcaatattccaagagctgtcgatatgggtaccgtcttcatgcttgagtcggtaagaacctggccgagtgacttcggaaattatgaacggtccttcccacaagggagataacttgtgccgatcccgtgtagtctgaatttttctcagaaccaggtcgccgactaaaaaagctcgtgatctaacattacgattgtgataacggcgcatcccttgcaagtaccgagccgactgaattaaggctgcttcacgggcttcttccggtcggttgaggtcatctactcggtcttctccatagcgctcctcgctaaagttacgaaatcgtagagattcaaattccacctcacttggcaacattgcttccgctccatagaccatgaaaaacggtgactggcccgtatctcgactgggagtggtgcgcagggaccaaagtacggacggcagctgttctacccacttgccggcatattgatgtagtcggtcgaaaactcgcgcttttattccttgaagtaccataccattggcacgttcaacttgtccattgctcatggggtgcgctacggaggcgtaacaaattttgatgccgaagtcctcacagaaatctttaaatactccgcctgtcaattgagtgccgttatcagtgatgatccgattgggtaccccgaaccggtgcacaatgttgatgaagaaatctctagctttgtctgccgtgattgtaatgaccggtttagcttcgatccacttggagaatttgtcaacggctacaaagagatgagtataaccaccgatagcctttttaaatgggccaaccatgtcgagcccccaaaccgcgaacagccaagacaacgggatggtttgcaactcctgagccggtagatgagtttgtcgggcaaaaaattgacaaccctcacatgttcgcacaattttgtcggcgtcggacacagctgtgggccaaaaaaaaccctgccgataagccttgccaacgatggttcgtgcagcagcgtgattgccacagatgcccaaatgtatgtcctttagcaattgtcttccctcctccaaagacacacagtgttgcaggattcccgatggacttttcttgtacagctcggcctcgtgaatgatatagagcctgctacgcctggagatccgctcggcttcatccttatcttgggggagttcttgtttggtcagaaatcttataaggggctctctccagtcggcttcgatcatacccacgtcttgagtgtccgtggcctcgattgtttctttccttggtatggttggttcataaagatgttcaacaaacacgtcggaaggagcggcttctcgttttgaactgaagttagcgagtctgttggctgcttcgttattgtgccgaagaacgtgggtgagttcgagcccatcgaacttgtcttccagcttgcgtacctcttgccgataagcggtcatgttatcatcaaggcaggaccactctttcataacttggttaacgaccaactgagaatctccacgaactatcagacgccgaattcccaaagagattgcaatccttagtccgtgaagaagcgcctcatattccaccacattgtgagacgtagaaaaatgtatccacaatacgtagctcagtctttctccagtcggggagatcaaaacgaccccggctccagtgcctgaaagcctcttcgacccgtcaaaatgcatggtccaatactccatcttttcctcgggcgtgtcttcttggcactcagtccactcggcgacaaagtcggccaaagcttggtacttgatcgaagttcgcggcttgaaggatatatccaaggacatcaattctaaggcccactttgcgattcgtccatttgcttcacgattatgaagtatatccccgagtggaaatgatgtaaccaccgtgaccgagtgactttggaagtagtgagataatttcctgacggtaattaaaacaccatataatagcttttggacctgaggatatcttgtcttggagtcggccaagacctcgctaacgaagtagattggtcgttggactttttgaacatggccttcttcttcacgctcaacaaccaggaccatgctcacaacatctttctgggagatcggtggtttcatgttgaggatggcgttgattttctccgggttggcttgtatgcctctatgggacatcataaatccaagcagcttccctaacggtactccgaagatgcacttttcaggatttagtttcatcttgaaagcgcggatgctcgcaaaggtttcttctagatccgtaatcaagtcatccttctgcttggtcttgacgactacgtcatccacataagcttcgacgttgcggccgatctgagtcgaaaaagcgttggtaagttgctcctgcattatgcgccattgcccggtcttcttccgaaccaggactgggttagctagccagtcgggatgaaggacttctttgatgaagcccgctgctaacagcttggtcaattcctccttgatcgcgtccttcctgttaggataagaaggatctagaggaattttcttggtcttggcttcgctttctccactctttgagatcttggttgcaggcacttccccttcgcttgccgtggttgaagccagtcggatgtcttcttgggtgatcgcgatctcgcgagtttgggccatctcgcagctttccttgtcgcatgtgacggcttgtttgatgtcacttcgcagggatatgactcctcgaggaccaggcatcttcatcatcatgtaggtatagtgcgggagagccataaatttggctaacgccgggcacccgagtttggcatgatacgctgtctcgaaatcagcaacttcgaagcagacgttttctgtgcggaagttctcccgagtaccgaaggtgaccggaagagtgatctggccgagtggcgtagcagataaccctggaatgactccatgaaagggcgcattactctgtttcaattctgtgcgaggtatctgcatgttgtccaaggtcttggcgaagaggatgttgagtgcactgccgccgttgatgagggatcgccccgggtggaccactcggtctggatgatccgagcggtcaaacttgattgttgtttccgaccaccgaagatattggggcgtatcaggctgaacaacgttaatctcctgttcggtcagcttttgttttcttttagattcataagccaggggtccgccaaagatgtggttgagctccttgcgatggtcttgaaaacctgtcgaggcgtcatcgtcatcgtccttcttttttgacgtgctttgatctccatcggaagccttccgtgcattcttggcgtattgttctgcaaactgcttgtagacgaagcaatctttggctgcatgattggaattgggatgatgcggacattgggagttcatgatcttgtcaaaagtattgacgcgcgaacgttgtcgggaggaatgtgtagtagttgcaacaagttcctcgggcttacgcttacggtccttgtgattggtacttccactccccactgcaatcggcgtatctttcttcggcttccaggtggtgcccgactgcttggatgcggtgacggcatcttcagcttttgcgtactcattggctttttcaaacatctgcttgaccgtcctgggaggcttgcggccaaacttgccgactagatgtcatcggtaatgtcggagatcttgttgcattgttcagaaaagcgccggatataatctcgaagggattctccagacttctgaatccgttgtagagatcgaactgtgtgccagggcgttcaaaggtgccctgaaagttggcgatgaagtggtcgcgaagttctgcccatgatctgatcatgccacggggtaacccatgaagccaggaccgggcagaatccgctagggccacaggcaaatagtttgccatggctttgctgtcccctcctgctgtgcggattgtgagactgtagacggtgagccaagactcagggtttgtggtgctgtcatacttctcgattccagtcggcttgaagccggccggccaatccactcgacgcatgtcgcttgtgaaggcagcaactccatccacgttgttgtcgtaacgatctggtgaatggtgggggatgtagcctcttgccgcgcggcgctggttgatagtttcgcgaagatcgatgggatgcctgtgacatggggagcggggatgtttagcccgacgctccttgtgctggtcaggaggcgagtggacggatcgttcgccgtgatccctgctcctgcggctggatcggacgcttgcagagttgtccgggaccgaagcggcgatcatggtcttagtctggttcaagatgttgacgacgtgattggcctgattaagtgtgtcttccttgaggagggtgtcgagaagggtgattgctgcaaccgcgttctgctggggggtgcgaaaaaccgccgtcccctcgacgtcttgttgctcgatgagctctcgtgctcgttgcccggcctccaaggcgtgctgtcgccggtcctcagcctcctttgtagcccgttcgcgctcctgttgctcacgctgcagtcgctctcgctcttgtgcttggcgttcctcctccagtcggcgacgttcggcttcttgtcgtacgcgctgctcttctgctacttgggcttgacgctgttcttccgtctcgttgtcggccatgaaaatgccgaagtagagaggcgtgtagttatcttcgtagccttcatcgaagtcgtcgaggttgcggtagtcgtagcggtagccgaagtcgtcgtactctacgatctccgtcggtcgagagtcgatgccgggggagctgaggtagccatccaattgttccgtcgaaaccgtgtagagaggctggagtatgacgccgacttccctggagctagactggatcggggccgaggccggatcccgcctaggcctacggggagaggacgcccttgtggtgaagacagcagccaagtcgtcggggagtttcatcaggattgagggataagctctatcgtcttgatcaggtcgtgttggagtagattggatctcgtccgagtggtttgaagccgactcggttgagatgatcctggagtagatctcggccgagttcgggataccgaacggggcggaaacctggcctcttcccgattggttcgaatccgagtcgaggagagaaatcttgccgaagtcgttagtgatgaagtcgaggctaccgaaccggaacgcctgcccgggagggaagatgaagtcgtcaatgccagagacgaaacccat

SEQ ID NO: 2126 - DNA, 1830 bp, Oryza sativa
  Clone ID: PAT_MRT4530_101927C.1
atgggtttcgtctccggcatcgacaactttgtcttccctcccgggcaggcgttccggttcggcagcctcgacttcatcaccaacaacttcggcaagatttctctcctcgactcggattcgaaccagtcgggaagaggccaggtttccgccccgttcggtatcccgaactcggccgagatctactccgcgatcatctcaaccgagttagctccaaaccactcggacgagatccaatctactccaacacgacccgatcaagacaatagagcttatcccttaatcctaatgaaactccccgatgacttggctgccgtcttcaccacaagggcgtcctctccccgaggcctaggcgggatctggcctcggccccgatccagtctagctccagggaagtcggcgtcatactccagcctctcggcacggtttcgacggaacaattggacggctacctcagctcccccggtgtcgactcccgaccgacaaagatcgtagagtacgacgacttcggctaccgctacgactaccgcaacctcgacgacttcgacgaaggctacaaagataactacatgcctctctacttcggcattttcatggccgacaacgagacggaagaacaacgccaagcctgagaagcagaagaatagcgcgtgcgacaagaagctgaacgtcgccgactggaggaggagcgtcaaacacaagagcgagaacgactgtagcgtgagcaacaggagcgcgaacgggctgcaaaggaggccgaggaccggcgacagcgcgccttggaggccgggcgacgagcacgagaactcatcggccaacaagacgtcgaggggacggcggtttttcgcaccccccagcagaacgcggttgcagcgatcacccttctcgacacccttctcaaggaagacgcactcaatcaggccaatcacgtcgtcaacatcttgaaccagactaagaccatgatcgccgcttcggtcccggtcaaccccgcaagcgtccatacgccgactggcagccgagttccgcctcttcgatctcaagactatcaccaaccaagcgtcagtgtcgtcggcgcaggatccaatcacaggagcagggatcacggtgaacgatctgtccactcgcctcctgaccgacgcagggagcatcgagccgaacatccccactccccacatcgcaggcgtcccgtcgatcttcgcgaaactatcaaccagcgtcgcgcggcaagaggctacatcccccaccattcaccagatcgttacgacgacgatgtggatggagttgctgccttcacaagcgacctgcgtcgagtggattggccggccggcttcaagccgactagaatcgagaagtatgacggcacgacaaaccctgagtcttggcttaccgtctacagtgttgcaatccgcgcagcaggaggagacagcaaagccatggcaaactatctgcctgtggccttagcggattctacccggtcctggcttcacagattaccccgtggcacaatcggatcttgggcagagctttgcgaccacttcatcgccaacttccagggcacctttgaatgtcctggcacccaatttgatctctacaacgttgtctagtagtccggagaatcccttcgagattacatccgacgtttttccgagcaacgcaacaagatctccgacatcaccgacgacgtcatcatcgccgccttcaccaagggcattcgccatgatctcttagtcggcaaatttggccgtaagcctcccaggacggtcaagcagatgtttgaaaaagccaatgagtacgcaaaagccgaagatgctatcactgcaaaagccaaaaaag

SEQ ID NO: 2127 - DNA, 486 bp, Oryza sativa
  Clone ID: PAT_MRT4530_101928C.1
tttttcgactctcccaaaccttaataccatggcccatatatcagtgacccaggccctgggcaaactggtccacggcccagggcctgagatgaaaggcccgatgagaaatatgcatttttactaggaataagtctattttttctcctttcaaccatgtaactttgtgttgggccaaaatttccatggggcggcctaggccttggcctatttctgggtccgccccttatcagtgattgtggtgatggcagattcactaccaccactactatcttttaatagtagtaaagactttggagtcatcttgtaattttaagatgtacaagacggtaccataaattgactttaaagtgatttgaatggatgtgtaatgggagaaatcgcttttcaaatgtaaaataatgcactacttgtattagtactaaattttacattagagaacacgatatatttaagggatcttgataacataaaattcctttaagaata

SEQ ID NO: 2128 - DNA, 234 bp, Oryza sativa
  Clone ID: PAT_MRT4530_101929C.1
atggcgatggtggctgacggtggtggctgtggcagtgacggtggcggctatcgacgatgttacctatggcggcgatggttgaaggccatcatccgactgacgggaatcgcgggcgaaagccttgccgagccatttggccggctgacaacggcgacgccgtttggcgtcgttcccctccttagaggcgttgttttagcatacccattttctttccctaccatattctccgggtga

SEQ ID NO: 2129 - DNA, 308 bp, Oryza sativa
  Clone ID: PAT_MRT4530_10192C.1
ggactttagacactgccacggtcgattacccacatttactttaacctcacctacaaccacgggacacacaaaccaaactgacccgtgtacacacgcaccgacggtaccactggtactgacacacctaccggtcccaaccaacgacacgacggcttcactacttacttgttggtccccaccgaccaactactaacgaccgggggaccacgggcacaaccctacggcgaccgactgaccaaccaccacggaccacgaacgaacggccacgacatcgactccgaccacaccggaccaccgacatgacacct

SEQ ID NO: 2130 - DNA, 475 bp, Oryza sativa
  Clone ID: PAT_MRT4530_101930C.1
ttttttgttttttttttttttttttttttttttttttttttttttttttttttttttttttttttttttttttttttttttttttttttttttttttttttccccccaaaaccccccccatttttaccctccaaaaaaggggcgcccccaaaagcccggcaaattcaaccgggaaaccccccctttttgcccccccgggaaagggaaattgtctcccccccaccgggatccttaaaccggaacccccccccgggggtttaaccgtatccaaaaccccggggcttaaggggcaaagggccccaccaaaaaacaggaaatggtcccaaaaaaaattttcccgggcccctatttggggattttcccccccccaaaaaatgtcgaaaaaaaaaacatttggcaccccgggggtcctttgggggaaagaacccttggggccccccccaaaagaaaaaaacactgtggcccccacccttcc

SEQ ID NO: 2131 - DNA, 358 bp, Oryza sativa
  Clone ID: PAT_MRT4530_101931C.1
acccaaacctccccgaaaacgttggggggacccttggtttaccccgaaatttttaaacgggtcttttagaggaaaaaattttttttttttggaagggttttaaaaattggggaaataatgggtaaaaattttttttttggaaaaatgttttttggttaaaatttcaaaaaaaatataaagcgggaagaaaaaagtgaaaacctggggggcgttaagggggggggaaatcaaattattttgggttggtttaattgcctttttttaattggaaaaaatttttggccaatttgttttttaaaatttccaaacgccggggaaaagaggttttttattttgggcccaagggggtttttttttt

SEQ ID NO: 2132 - DNA, 131 bp, Oryza sativa
  Clone ID: PAT_MRT4530_101932C.1
cggacgcgtggtcttggatatatacaataatctacatgtgtatcttgcttattgcgccaaaatagaggcatcaaatgcgggccaaagacaaaacctgcaaccaagttctaaggcctacggcaagcccaaga

SEQ ID NO: 2133 - DNA, 270 bp, Oryza sativa
  Clone ID: PAT_MRT4530_101933C.1
atgcccgaccagatccagattgagccactgcgcccgcctgcctcgccgagtcgtcgccgccatcgtagcaagacacgggttaagaagggggacattgcctccatgaagaggctaaaccaagccctatcccgccttcctcatgagccagccgccatccactccagtggttgcgagacaagatttatggaggaaggttgcaactggctagggctagatagcctagtggaagaagtggctgatatgttcctagatcatgggaagagaaaatag

SEQ ID NO: 2134 - DNA, 1424 bp, Oryza sativa
  Clone ID: PAT_MRT4530_101934C.1
gcgaatcgccacaagattccttcttggtgctctaaatggcatgctggccccaataaaggcttattccattgaagtttgtcgacctgaacatcaagctctaggattatcaatagtaagcactggttggggcgtagggcttgttgtgggtccagccattggaggctactttgcacagcctgctaagcaatatccaaatgtattttccgagaagtcaatatttgggaggttcccatacttcttgccatgcctttgtatctcactcattgctcttgttgttcttataagctgcatatggctaccggagacacttcataagcataaagatactgaaggtgaaattgaaatgattgacaactcaagaagtacacttgaagaagattcacataaacagaagagtctctacaagaactggccattgatatcctctattattgcatattgtgttttcacccttcatgatacagcatatagtgagatattttccttatgggctgtaagtgagaaaagatatggtgggttaagtttttcgtctaaagaagttggtcaagttcttgcagttgcaggtgctggtctacttgtgtatcagcttttcatctatagatcggtccataaatttcttggatccatcaattcatctcgtattgcatcagctttatctgtaccaattctcgctacttatccctttatgacacacttgtcagggtttagacttggaatagctctttaccttggaaccattttaaagggtgttttatcaataactatcataacgggcacttccctactccaaaataatgcggtttcacaaagtcaaagaggtgctgcaaatggcatatctacgacggcaatgtcattcttcaaggcaattgctccagcaggagcaggagctctgttctcttgggcccaagaacgccaaaatgaagccttcttcccaggggatcaaatgatattctttattctgaatgtgattgaattaattggacttgcgttgaccttcaagccgttcctggcaataccaaattaaacaattatcagttgaagtagaagctggaatagcacccccaagcaatgaagaattattatgcaagactacactgtgttgtggtttactgaattgatgtttggcttaagtgatgtacatagaaatatatggcccatcttcagaatcataaaattaatgtacaagagactgtttatctgaaaatgttcttctttccatgaagaccctatgtatggtgatggattagagtttgcattgcgtggatgcaagcatagacttgaaggcagtgcaatgactactaattttagcttccacatttcttgtacgcaagcctgtctctctccccagcttcaaaggaatggggagatcttgtttcatgcgtacagtgttggatgtttactactccaaaaaaaaaaaaaaaaaa

SEQ ID NO: 2135 - DNA, 1237 bp, Oryza sativa
  Clone ID: PAT_MRT4530_101935C.1
gcttccccgggctgcaggttgcggctcgtgcgcgtgtggctgcgactcttctcgtcgcggctctctttttttttttttttttttcgtaactaacaaattctataaattggatattttgctcacatcgctgcaactctttacatagtgacaaactgatggatgacgatcactaatttgctctcaaaatccaaagacttgccaaaggaacgctttacaaatagggcagttcaattcgatgctgcaatcaaaattgtgattctcacttgcatgtgttctctgttatataaatatatgtactaccgcagaacgaaaatactgaatgaacgagatggaatggatctttcttctgccgcggtgaagatggacatacattcaaagtccaaagctgaaagcaaacaagtccggctctcattgcacagggctacctccagcttcaaactctccaaagccctctctagcacatagtacaacggagacttgagaggcggagggagatgctgaagttatgcagctcccaggtttcgccaaccgcataggagtaatatgatcaatatttgcattcctgagctcatgcaaaggtacaagtctatccgtacatattatagaatcaaaattaatatgctccaccctttaaccagccaagataccatggattattcactcagaaaacctctatgatcttcatcatttctgtgtaagcgttgaagcaccatcaccacccctcagtgaaagtaatgggccaccatagaatctcttgccaactagagcagagtccaggaatagtactacaacagtaatatcatcgtgaaagtgtctcctgaccccgcgatcaatctttttcaagtctgagtacctcatttctcttttttttgctgcctctcggaggacgcgtggggtagtaccaaggaaaaaaaaaccacacgaaaacgaaagagaagaatcccaaatccaccccaaatcgggcggaattcctccgcctgcaggctgctgctatgctattcctctccctccctccctcctatcctaattcatactcatactgctgtgctggagtagaggagaagagagaagcggagtgccgtggccagatcgacgacgacccgcgtgggattgattccgccgtgagatttctccaacttctttctttcggattaggattaggatgcgcgggcagggggaaggaggaaggagtatctatctatcccatgtgacccctgcagcccggggatccactagt

SEQ ID NO: 2136 - DNA, 162 bp, Oryza sativa
  Clone ID: PAT_MRT4530_101936C.1
atggcggcagatgactatggcctatgggccatgtggccagcgaattctcttggcccgaggcaacacaatttgttagctgatcgagagcaggacatattttgtggaaaggacttatctgttgagatgatgtctataaacggatcgtaccgaagtgacaaatag

SEQ ID NO: 2137 - DNA, 998 bp, Oryza sativa
  Clone ID: PAT_MRT4530_101937C.1
ggttggggaaaaaaaatccaaaaatcttgggccagatatttgcttgtgggggtctgagattagcgaatttcaatccctgattacactcatgctgaccatttggtagctacaggagacgtatacaattttacatggagtttggatgtacagcattaatcgtcttccaatgtttcttctcctgatcatgtgctaggctctctctctttttctccatggtcggtgaaattaatctactgtattgccgccacacagcagcgctagttaaaattcagctacttgtcccactcatgtatcttccactccggcaattgctgaatgaccatctgtccagttgaatctggattgccgacagtagcctggcacgccaatctccatgtctttggtttccttttcagcaattccttctcaacatcagttttgggggaaagcagttcaccgccttcaactacctcgacgatgcaggtcccgcactctccacctccctcgcagttgagcagaagcttatcgtaaggcccgtagaggtcgatgtagttgtcgagcatgatgtcgcggagcttctgcccgccgcacgccgtccggtagtgcacgtccggcgtcccgtccggcagcagccgcggggcgacgaacgcgaagtcgacgctcggcggctcctccggtgcggccttcgcctcgccgccggcggcggcgtccgtctcgacggcgcggacacgaatcccgcacctcctctgctgtttgtgctgcagccgccgtggcagatgggcggcgccgcagcagctgcagctctgtttcctgacgctgcagctgctggtggtggtggccgtggccacggcgcagtgtggcgcgaggcggggggaggaggaggcgacgccggcgaggccgacgacgagctgcatggtcgctcccatcgccgacgacgagctgcaggtgtgcagagctaagctatagctttggatgagccgcgatggcagcagagcacagtgtgtgtgcgcttgcctcag

SEQ ID NO: 2138 - DNA, 258 bp, Oryza sativa
  Clone ID: PAT_MRT4530_101938C.1
atgtcgacggttgcaagactggccaagtgggcgacagaatgtcattgctggatactggatattagcaacagggacaagaacaagtcttgtggttctgttcaccctagcacaaacatcgtgtatgaattttcatcaagacatgggaagaaaactcaggtggttctgaacttggggttttcacaattctccaaggcgttcatgaaggttctttggatagactgtggttcatttggattccataggtttgttggaggatag

SEQ ID NO: 2139 - DNA, 1146 bp, Oryza sativa
  Clone ID: PAT_MRT4530_101939C.1
atggccggcgccgtccgcaccggcgggaaaggcaccgtgcgcaggaagaagaaggccgtccacaagacggggaccactgacgacaagaggctgcagagcacgctcaagagagtaggtgtcaacaccatccccgcgatcgaggaggtcaacatcttcaaggatgatctcgtcatccagttcgtcaatcccaaagagcttcaagatgttcttcctgggatcattaaccaattgggtcctgacaacatggagcacctaaagaggattgctgaagagatgcagaagcaggtagctgctgcaggtgccactgcccaggcaaaggaagagaacgatgatgatgttccagagcttgttccgggagagaatttcgaagagagtttgagtttgggcacagaaaataatcaccgcaagatggaagacgaacaaaaaatactctgcctagcaaaaagctctctctgctcaaccatggatgaacagcaattggcgcaatatgctacgctcgccggcggcggctcggtgaggcgccgggcggacgtggccgacgggtacgcggaccaccctgccggcgaacatggcgtggaggtcggcggcgtacttgacggtgtaatgatcacgaggcagcacctggcggtgatcttcacgtacctcgtgcgcacgtacacggcggtgccgcacgtcagccgccgcgccgggtggacgctacgggtcacggcggcgaccggcggctccgagaactcggacgccggacgcgccggcttcctggcgaccaccgtcttggggttggacgacggcggccacggcctggcggcggagggcgcgtccggcttcttggagattgagggcggcggcggcggcggccgcggcttggcgacggcgaggtttgacgatgacgtcgcgcgagcgatcttcttggcctgcgcggcggcggcggcggcgggagagatgaccctgggggcggcgagcgccgggaggttgggcgccgacgtcgtgcgggacatgatcttgttggccggcgagtgcgaggagatggaagatggcttgttggcggcggcggtggacttgacgcgggagttggggaactgcggcggcattgcttctcctctcgacggctacgccgccgccgcagccgccgtcgattccgcttcttga

SEQ ID NO: 2140 - DNA, 703 bp, Oryza sativa
  Clone ID: PAT_MRT4530_10193C.1
acgagcgtgccaaaggcggccccaaagatcccttgaacacaatgtgagtgagttgccactttgtcaaagggggtgttgcgagatagacatattacagttctgtcaaagagtggcagatagttacaatggcatggatccaatagcaaatagttaaatttccccttattttctgcttgcctttatagctcagtttgcagtagtgcgtcgaactgtacatgcacgcccgcgagcgaacacagtaaggagaggagagaatggaaggaggagaaggtgtggtgttggtggtggcggcggcggaggaggatggcattctgcattcccaggtttccaacgaatccactcttttctgatggaagatgtgcaattttctcgccacgtttccaacaaggttgagacagatgtggcttatagacattagttggctgtactattaaacttgctctaatcttcggttccctgcccccaccaccgcctgcacagccatggatgagcatccaagcagccatacgggcatggcggaggaggcggccccgaataagatcccttggaacacaagtgagttgccactttgttcagagagggtgttgtgagagagaaagatgagattacggatctatcaaacagtggcaagtagttataatttgcaattgatccaattaacccatagttttttttccccagtgctcttctcttctagctcagc

SEQ ID NO: 2141 - DNA, 648 bp, Oryza sativa
  Clone ID: PAT_MRT4530_101940C.1
atgccgccgcagttccccaactcccgcgtcaagtccaccgccgccgccaacaagccatcttccatctcctcgcactcgccggccaacaagatcatgtcccgcacgacgtcggcgcccaacctcccggcgctcgccgcccccagggtcatctctcccgccgccgccgccgccgcgcaggccaagaagatcgctcgcgcgacgtcatcgtcaaacctcgccgtcgccaagccgcggccgccgccgccgccgccctcaatctccaagaagccggacgcgccctccgccgccaggccgtggccgccgtcgtccaaccccaagacggtggtcgccaggaagccggcgcgtccggcgtccgagttctcggagccgccggtcgccgccgtgacccgtagcgtccacccggcgcggcggctgacgtgcggcaccgccgtgtacgtgcgcacgaggtacgtgaagatcaccgccaggtgctgcctcgtgatctggctgccggcgagggtggtgtcttcctccgacgcttaccattacaccgtcaagtacgccgccgacctccacgccatgttcgccggcagggtggtccgcgtacccgtcggccacgtccgcccggcgcctcaccgagccgccgccggcgagcgtagcatctggtga

SEQ ID NO: 2142 - DNA, 957 bp, Oryza sativa
  unsure (1)..(957): unsure at all n locations
  Clone ID: PAT_MRT4530_101941C.1
gcccggccgggnaaaaccctataatcctcgcaccccccaacacctctcttctcctgcgccgccgccgcctcctcctcctcccgcatctccctcctcgcctctcgctgccggccgcgcttcgccaagatgaacaaggagaggcttatgaagatggccggcgccgtccgcaccggcgggaaaggcaccgtgcgcaggaagaagaaggccgtccacaagacggggaccactgacgacaagaggctgcagagcacgctcaagagagtaggtgtcaacaccatccccgcgatcgaggaggtcaacatcttcaaggatgatctcgtcatccagttcgtcaatcccaaagtgcaagcttccatcgccgcaaacacatgggtggtcagtggctccccacagaccaagaagcttcaagatgttcttcctgggatcattaaccaattgggtcctgacaacatggagcacctaaagaggattgctgaagagatgcagaagcaggtagctgctgcaggtgccactgcccaggcaaaggaagagaacgatgatgatgttccagagcttgttccgggagagaatttcgaagaggtagctcaggagacaaaagcctgatcatagataccacaagtagtgaaatgttacttgaccgctgttctgaggtcatggttttctatgacggccctgttttgcttctcctcgtaggccaatctttgtatttgcaattggaaacttttagtttctccgagtttttacctaagttatgaatgctgagatgccatggagtcctttttacctggttttgatgttcacatttctggttggttcagaatatactagcatcagggtttgcagatgtccttcacgtctcaactatctactagtatcatttatgtttggagatatcctgcaatggtacagtgttgatttttccccaaatgaaaaataatgatgtgttttccctgctct

SEQ ID NO: 2143 - DNA, 394 bp, Oryza sativa
  Clone ID: PAT_MRT4530_101942C.1
aagaaccggccaaccttattttacggaacccagaaggctcgcacatggagaccagactagctacaaactcggaggcttgcttcaaccaacaaaatgatgacatattaacattgccatatatcacgacaccgacccttgacggaaatacacgcgctctataggaacattgaatatctacacagacactctacagaagatatgcttcacggtgacacgggggttgaatgtacatgtacaggccctcttgctctcctatgtacttatccgaagagaaagccgtggaaaccgttgcacaatactgacagccaccatacttcatgcctgagcaaacaagatccctaaaaacatattgaccaaccagaccagatgtcttggaattgtgggcttcaaagac

SEQ ID NO: 2144 - DNA, 1675 bp, Oryza sativa
  unsure (1)..(1675): unsure at all n locations
  Clone ID: PAT_MRT4530_101943C.1
ctaatagtgtttcctactccggacactcttatcagcccattgcggtttcccacgggctgggcagctgacatgggctccagcagtaaggtcggcgaacgccttcagaatgtacttgtgcacactttgttcattgagctgcaggtaataaaagagcagctcctccaagaagtcccagtccaacggctgaggttcctcaccatggtgcatctctattatgttctgcatggatctccggaagtccgtgtaaggatccacggagaacagcattatggccgtactactgttgttgtcgtcttcatcacccgagcttgttcctcttgcgtcttctgcaaccgactctgaccttgatgatgatgtctctgccgctgctggctgtgtgaatttccccggagatggtggtggttgtcgccgctgctgatggttgtcgccgtcgtggatgtagagggaccggaagttgtcgaagaggaagcggtcgacgtcggagagcgtcgccgcctggtctctgccgttgctgccgtcgtcgtcgtcggtggtgcggtggtcgccgccgccaccgccgccgccgtgcagcgatggggttctggggaacctgcaggtggagaggaggcggttgctggtgatcttcgcagggatggctgagctggggatgtgaatcggtgggatcttcttgaggtttcttgagaggaagagcacgttccccttcgcctcgtagctagcgaacattgccctccgcgaaccgtaccgccggaatgagtcgccgatgacattgaggtcgcagccattgtcggggccaaggttgctccttgctctaccaccttcaccgacatgtggggcccacatgtcagtccttccttcttcctccccccttcttccccttcgcccgacgcgcgggatggcggcaagagcgagcagcgacgggcagcgaggccggagccccaccctagacaccgcccagcctggagctgcgctcggcggtgagagcggcggcggcagcgcgcagagctccaccatccttttcctttcttgatggcatattgccatcagacaaaagctgatcatcctcgtcttcctgctgtccgcgtagaagatgaagaggcaaatgtaggcgagctggaacaccgctccaatgccgttgacggtagcgacgagcagcctgccatcggcgacccagggaagtccataccacaggcagatgaggcaattcagcagcgagaacaggtaagggagcccgtcgaatcgctcggtcgatttggccttcaggatcctcttaaacgtcgtcactggcgacaggaagagagcaagcgcaaagatgttgcctgcaagaccagcagcaaagcaggagatatcatacaaggagtccatggttgttggatgcgggatgacacttgtatcttccctcacgcggagagattccagctcacaatagcgtatatttaagttgttgcagttaaaaagctcgtagttggaccttgggccgggccggccgggccgcctcacggcgagcaccgacctgctcgacccttctgccggcgatgcgctcctggccttaactggccgggtcggggggggggcgccgttactttgaagagctcaccgtgctcgagcccngccttcggtctggttgctttagcatggggtttcgtcctcggcttccggtcctgttgtgtcgcccttc

SEQ ID NO: 2145 - DNA, 406 bp, Oryza sativa
  unsure (1)..(406): unsure at all n locations
  Clone ID: PAT_MRT4530_101944C.1
cccacgcgtccgcggacgcgtgggttcgtgactagtttccgtgagcgatcgacaggaggacttggcggaggaagctgcggnaaattttnananaattttttaggcaggcatattaatgaaagtagagaggtttttttttcggttaaacctaatccgtggcgggaaaagagaaaacttctttgtctcatgagaaacggtttcctgtatatgtagaacaccttcgacgcgcaaagctgcggctcttgctcgccgccggacggtatcatcttgcggactaaagatctacatgcagtcttgggaggagcctccggactctgctcccctgttatcccttccggattgtcgctcgcattttcttcatcagccgaccgtacgttgtccctgactacaactccaccgacctgat

SEQ ID NO: 2146 - DNA, 257 bp, Oryza sativa
  Clone ID: PAT_MRT4530_101945C.1
tcatctccccacgtcgcatcccgtcgtccccatcgagcgatccccttcctcctgatttctccgtctagaggcggcatcgatgctcctcgcctcctccaagatcttccatcgtaggtcgtcgcccacgacggcttgccatctgctatcccgtgcccagacgttggatgcatgatctcctccgtcggcacaatccgtgtagccgcatccatcggcgttcgtctccccgtacggtggcgatcggattggccactgaccat

SEQ ID NO: 2147 - DNA, 135 bp, Oryza sativa
  Clone ID: PAT_MRT4530_101946C.1
tcgtcagttgcacccgtgaggccgtggcactgcagaagcagtcaaaccaccaccagctcacgcctgccaagtcccaagcggcgacgcaacgcgaaggaaggagccccgaagccccgccgtgcctcttccgtaaat

SEQ ID NO: 2148 - DNA, 1815 bp, Oryza sativa
  Clone ID: PAT_MRT4530_101947C.1
ccggcagctgggcgggagagagagagagagagagaggccgcttctctagtctagaccaaaggaaggaaaccaaccgagaggcgaggcgaggagaggagaggagaggagaggagggaggaggagggaggagaagatgagagagatcatcagcatccacatcggccaggccgggatccaggtcggcaacgcgtgctgggagctctactgcctcgagcacggcatcgagcccgatggcaccatgcccagtgatacaacggttggcgtcgcacacgatgcgttcaacactttcttcagcgagacgggcgctggcaagcatgtgcccagggccatctttgtcgacctggagcccactgtcatcgacgaggtgcgcactgggtcgtaccgtcagctcttccaccctgagcagctcatctctgggaaggaggatgccgctaacaactttgcccgtggccattacactgttggaaaggagatcgtagatctatgcctggaccgtgtgcgcaagttggcagacaactgcactgggctgcagggattcttggtgttcaatgctgttggtggtggaactggatcaggacttggttctcttctgttggagcgtctctctgttgattatggaaagaagtccaagcttggcttcacaatttacccttccccccaggtctcaacagctgttgtagaaccatacaacagtgtcctctccacccactccttgcttgagcacactgatgtggcagttctcctagacaatgaggctatctatgacatatgccggagatcccttgacatcgagaggccaacctacaccaacttgaacaggctcatctcacagatcatatcttcactcaccacctctctgaggtttgatggcgctatcaatgtggatgtcactgagttccagaccaaccttgtcccataccctcgcatccatttcatgctttcatcctatgcccctgttatctctgctgagaaggcttaccatgagcagctttctgtgcctgaaatcaccaatgctgtttttgagccctcaagcatgatggctaagtgtgaccctaggcacgggaaatacatggcttgctgcttgatgtaccgtggtgatgttgttcccaaggacgtcaatgccgcagttgcaaccatcaagacgaagagaactgtccagtttgttgactggtgccctactggattcaagtgtggcatcaactaccagccaccctctgttgtccctggtggtgacctggctaaggttcagcgtgcagtgtgcatgatcagcaacaacactgctgttgctgaggttttctcgcgcatcgaccacaagttcgacttgatgtatgctaagcgtgcgtttgtgcactggtacgttggtgagggaatggaagaaggtgaattctcagaagcccgtgaggacttggctgcccttgagaaggactatgaggaagtcggcgccgagggtgcagacgacgagaacgacgatggagaagactattagtagctggttaataagtagttctctggttaatgattggtttgtcagtatactccggttccgttgcattgcatattcctgttatgtgtgtttactttttgtactgtgctaaactgttgttagcccctcgttggccatgattgttcatatcttcccattttgctgtgcattgcttgctactcccccccaagcttggtacatatgccattctgagctgaattgcaaaactgtatgctctctatgcatggtccaatggagctatggatgctttcttctattaaaaaaaaaaaaaaaagccaaaaaaaaaaaaaaaaaaaaggaaaataacaaaa

SEQ ID NO: 2149 - DNA, 181 bp, Oryza sativa
  Clone ID: PAT_MRT4530_101948C.1
tttttgttaggataatattacgccaaaatatcactgactcttaacaaactctttgcagctacagacaccggaatcgcacaccggaccaccaccgacggacaaatccagaaactttctcaggaacacagaagaaccgcacatcagcacgcacccaaggcaggcggcgcaagggcccaacgct

SEQ ID NO: 2150 - DNA, 2021 bp, Oryza sativa
  unsure (1)..(2021): unsure at all n locations
  Clone ID: PAT_MRT4530_101949C.1
gcacgagggagagtgtgtgtgtgtgtgtgtcttcgcttcactgcccacttggatcctcgtggctgctgctgctgtagcggaagacgacgagccgcccaagaatccagcacccacccatccactgctgctgctgctcctgctgctgcaccccccgcattgtttcgaatttctcaaatcggccctcgggctgcggcggcgcggtcaccggcggcgaggtgagttcgtcggtgaagaggaagggggggggggggggtgtgaagtgaagtgcgatttgaggagggagcggtggcggcgtgaggaggcgagagccgcacatggccaccgcgcgcggcggtggcggcgtggggtggctggtggtggtggtggcggtggtctgcctgtcgtgcgcggcggcggcggcgaggtctccggcggggagggcgcaccggcacctgaagcggctcaacaagccggcggtgaagagcatcgagagcccagatggggacatcatagattgcgtgcacatctcacaccagccagctttcgatcatcccttcctcaagaaccacaccatccagatgaggccgaactaccatcccgatggcctgtacgacgaatccaagagcggcggcggcggcgagaagcccatggtccagctctggcaccagggcggcaggtgcccggaggacaccgtcccaatccggcgtacgaagcgggacgacctgctccgggcgagctccatgcgccgctacggcaagaagcggcacccggcgcccaaccccatgtccgtcgaccccaacctgctcaacgagggcggccaccagcatgccatcgcgtacgtccagggcgacaagtactacggcgccaaggcaaccatcaatgtctgggcgcccaagatcgagcagcccaacgagttcagcttgtcccagctctggatcttgggtggctccttcggcgaggacctcaacagcatcgaggctggatggcaggttagccccgacctctacggcgacaacaacacgaggctgttcacttactggactagcgatgcataccaggcaacagggtgctacaacgtattgtgtgcaggattcgtgcagataaacagtgagatcgccatgggagccagcatcttccccatctcaagctactctggctcccaatacgatatcagtataatgatttggaaggatccaaaggaggggaactggtggatgcagtttggcaaggattatgttcttggctattggccatccttcctattctcctaccttggcgacagcgcgtcgatgatcgagtggggcggggaggtggtaaactcgcagctcgatggcgtgcacacgtcgacgcagatgggcagcggtcacttcccggaggaagggttcagcaagtcaagctacttcaagaacatacaggtggtggacagcaccaacaacctgaaagcccccaagggggtgggcacattcactgagcaatcgaactgctacgacgtgcaaaacggtaacaatgccgactggggcacatacttctactatggaggccctggaaggagctcaaactgcccatgacaactgaaaactgaactgaacaccctgagcaagtgtttaaccattcaagtgtaatacaccatctgctccagttttttagccctagatagtgtgtgtcatgtgaatgggtccccggtgttgctttctaatctctctctgccttgagctttctttcttccttttttgtaatgccaagtcttctgaagagaagcaatggcatctggtggtggttgtggtgatggcctacctcctttttcctatatggtagattcacttgtctttctggttatggagcttctctcttgggcttaactaaagggtcagagggccatgctttatttttctcatgtcacctttacctcctttgaatgtcagtggtgtataggaaagaggaattggtaggattcagttactcagcaacttgtatgccattcccatggaggagtatctggtagtaggctataaaaagcncaaaaaataaaaaaaaaaaaaaaa

SEQ ID NO: 2151 - DNA, 287 bp, Oryza sativa
  unsure (1)..(287): unsure at all n locations
  Clone ID: PAT_MRT4530_10194C.1
ctccttctcttttttttaaacatacccctaaaaaaaatgttaaacattcaaaaaaaaaaattttaaccttaaagccattcccatggacccccccngaagcttcattttttaaaaacccccctattttttttcctaatatacaacaaccctttcnnttaactccttctttttaaaaaacaggaaagggccaattcccccccctttttggaacctttaccggtaacccctaataataatctcaaggggcattctggttaaaacaccctatttcattttaacattcgggg

SEQ ID NO: 2152 - DNA, 2205 bp, Oryza sativa
  unsure (1)..(2205): unsure at all n locations
  Clone ID: PAT_MRT4530_101950C.1
atggagaaagacaaaactgaagataaaaaacgattagccgagaaagatgtagtattgttggtgaaggacaaggaagaagatgtaactagattaacaaaggataaagaagccatgggaaaattgttgaaggacaaggaagatataattagattgatgaaggagaaggaagaaatggtttggatgatgagggagaaggaaaacatggttagtttaaataatggcagggttgaagataaacatcaactgacagataaagatgtagctaattcagctaagtacaggaatgaaatcattaagttgatgaaggagaaagaagatagtaatgatacaattatgaaattaaatatagaactggaagctatgaaatcctcatatgaaggaacccgcattctgttagattctaagaagaaagaggtacttcagcttttgatggacaaggagagcattgaatatatagtatcacaacttaagcaagagcttgcaatagaaagaagctcacatcagacacatattcaagaattggagactagggcttttcaggcaaataataatttagacaaaggnataaagnaaatgagcttcatgctagaagactctaaacaagaagatttgaggttgtcttctgtttccatcaggcatgaaatcctacactgccagaaaagatggtctgaagaaatttgtgacctcggacaaagccttaaggtattgacaaatgctgctgaaaattatcatgctactcttgaagaaaacagaaaattattcaatgaggttcaggagctaaaaggttgcaaagcaaacagtattgctcatttatatgctgatatccttaactatcaacttcttatattatatgcttatttatcaggaaatatcagagtccattgccggataaggccttttcttcctggagaggatcagacatctactacaattgaatatgttggtgataatggtgaactaattttagcaaatcctgcaaaacgaggaaaggaaggacataagttgttcaaattcaacaaagttcttggcccctctgctagtcaagatgaggtattcaaggaaattcaaccactaattagatcagttcttgatggctataatgtttgtatttttgcgtatggtcaaactggatcagggaaaacatacacaatgactggacctgaaaatgcaaccgagaaggaatggggtgtcaactacagagctctgaatgacctattccatatctcacggagtagaagagacaccgtgatccaacccaatgggcttgctgttcctgatgcaacaatgcatcctgtcaactcaagttcagatgttattgaactaatgagaacaggacttgagaacagatctgtaggcgcgacagcattgaatgaaagaagcagcaggtctcacagtgtagttactatgcacattcaaggtgtagatctaaaaaccggagttactttgcgtggtgcgctacatcttgttgatcttgctggaagtggcaatgcaaagacgctgatgttcgtgcaggtcaatccagatgtctcatcttatgcagagactttaagtactttgaagtttgctgacagagtgtctggagtggaactaggtgctgcaaaagcaaataaagagggaaaagatatcaaagaattcaaggagcagctctcactgctgaaagataaaattgcaaagaaggatgaagaaatcagccgactacaactacagagtcataatactccaagggcgacagctaaacgtgccgattcattgttaaaacattcgtcatcctccccaggcatatcatcactaggaagcaaaatccagcaccgaagaacagcatctggtggaaggataaagatcgttggcagtagagcagggtcggatgttgacaacttctctgacatcagtgacagacattctgaagctggttccatgcaatctgtcgatgatatccagcagtcaagggagattatgggtctctctaagctctccatgagtgagatgggacataattctgttgaccctgagcttccttgctttggctatgatgattcagaggggaggctaagcgacatatcggacagcggtctttccatgggtgcagaaactgattgttctatgagcagtgtggttgagcttacctccttgccagatcaggatagagtctctggcactcagaaagagcaacacatggcaccaagcactccaaaagatcggttgtaa

SEQ ID NO: 2153 - DNA, 1329 bp, Oryza sativa
  Clone ID: PAT_MRT4530_101951C.1
atggggaaaggcaacggtggcgcggcaaagggggagacaacagtgccgcggagaaaggtcgcactagggtggcgtggcgcagcgaaggccgaaggggcagacgagccacggcagagcgaacaaggagaggacgccggcgacgcagcgaagaaggagaaggcgccggcggcgccacgaaggagaggactttgtggcgaggacactcgcggcacagcgatgcgctttctgtggcgagaatcgcaagctggccgtgagagctctcgtattgagccggcgacggagaagaagagccgcgcaaggggatcgaccgccggctgccccggacatatcaacactttgctggctgccaggtcggagagcacacaacacaagcaagctatggcagaaagtgacaagaatggggaggacaagtgcgagatgagggatacggttgataagaagaaacaggagtggaagctgacatgggaagagaaggtggtcgaggtccttcacatagttcgctgcagaggctttactgaatataaccacaagcttcttcgctctcttcctactcgctttcacacccacaacattgccttctttgaccttgataaagaatcaaagcttgggcgtggaccaccagtgaaaaaggctcttgcttcctctgaatattggaggatgatggactctgtcaatgtcatcgcgatcaaggtgaccgagtctgatgtgagttaccctatcagcatatttggcactgtgttggccagggatgtgtacgactacaggtgtatctatttgttcaggcgtggcagggacgatgcccagatcatcacctcaccggaggatactctacttttgacaggacctaatcgagcacttgctgcaagtgataatatatatttcgagttccatctgaagatcaagggtgatgaaggtgtcgacaaagcttccggcgcagtcagcattaaggggctagtatcatccaagttcagtggcaaagtaactgcttggacttctggagacgatgaaaacaagatcattctatatgacagtgaagtgaaaggcactaacagagcacttggacctggtggatcaatcgatttgactcgtcgttttgtcgctgtgaaactggatgatacactggtgctcaatgtctctgtttctgagggcgaccaccatgaagaagctgaattgtttgagctcgttgtaggtcacgatgatgatgaagaagaatgtattcgtcagcaaggtccttatgagctgcaggtgaaggttgtttggacggcaggcttggaggagagttggcggcgaagctccgggggtgtgccggccatcctcgttttgctgtga

SEQ ID NO: 2154 - DNA, 3444 bp, Oryza sativa
  Clone ID: PAT_MRT4530_101952C.1
atgtcctccgccgccgccgatcggaggcgggccgaggcggtcgcgtggctgcgcgcgctgctgcggggatgcggaggaggaggaggagggcagccgctcccgccgccgcacgcgtcggaggacgacctcagggcggcgctcgcggacggggcgctgctctgcgccgcgctccgcaggctcggctgcgaccccgccgccgcctccgacgagggcacgggctccgcggcggcggcggcggcggcggcgggggagggcgatgtcgggagattcctcgcggccgcggagcggatgggcctccccggcttctccccctccgacctcgacacgggcccagtatcatccgttgttacctgtcttcttgcactaagggatcagtttgtatcccatgatgtgggaggcttgagctgtagccttccagaaaaggtcatgatgcaaagcatggaatttcccagaaaggagaatgatccgggcacacaaaattctgaaggaagacgaaagatccccaaaaatcccgctatgtcagaaccatcttctcctttatctcagaccacattatcttctatatcacgccatgcgggacacagttttcatgatgtcttccaactcagacaaggacgctattctgatctgcccagttctaaaatttctgagatgatgaaatccaccagcttggataatgcccctactcagtcacttttgagtgttgtgaatgtgatccttgatgagcttgttgagacgaagattggagaaattccttatcatcttgcttgcctgttgagaaaggtcatactggagattgagcggcgtatttctactcaggcagagcatataagaaatatcattcctgttgtaatagttgcctgtatgcagcaaaataaccttatgaaagcacgtgaagagaaatacaaatcaaggataagagtgctagaggcacttgcaagtggaacaagtgaccaaacacatgtaaactcaaatgcaacaaatggaaaagcacatgtttctccagatcatgcagtgcaccagatgaagatggagaaagacaaaactgaagataaaaaacgattagccgagaaagatgtagtattgttggtgaaggacaaggaagaagatgtaactagattaacaaaggataaagaagacatggcaaaattgttgaaggacaaggaagatataattagattgatgaaggagaaggaagaaatggtttggatgatgagggagaaggaaaacatggttagtttaaataatggcagggttgaagataaacatcaactgacagataaagatgtagctaattcagctaagtacaggaatgaaatcattaagttgatgaaggagaaagaagatagtaatgatacaattatgaaattaaatatagaactggaagctatgaaatcctcatatgaaggaacccgcattctgttagattctaagaagaaagaggtacttcagcttttgatggacaaggagagcattgaatatatagtatcacaacttaagcaagagcttgcaatagaaagaagctcacatcagacacatattcaagaattggagactagggcttttcaggcaaataataaattagaacaaaggataaaggaaatggagctcatgctagaagactctaaaacaagagtaagagatcttgaggaattgttagaatcaagaagccaaatttgggagcaaaaggaaatcaggctgaaccaatttattggtctacaaatacagaatattcaggatttgaggttgtcttctgtttccatcaggcatgaaatcctacactgccagaaaagatggtctgaagaaatttgtgacctcggacaaagccttaaggtattgacaaatgctgctgaaaattatcatgctactcttgaagaaaacagaaaattattcaatgaggttcaggagctaaaaggttgcaaagcaaacagtattgctcatttatatgctgatatccttaactatcaacttcttatattatatgcttatttatcaggaaatatcagagtccattgccggataaggccttttcttcctggagaggatcagacatctactacaattgaatatgttggtgataatggtgaactaattttagcaaatcctgcaaaacgaggaaaggaaggacataagttgttcaaattcaacaaagttcttggcccctctgctagtcaagatgaggtattcaaggaaattcaaccactaattagatcagttcttgatggctataatgtttgtatttttgcgtatggtcaaactggatcagggaaaacatacacaatgactggacctgaaaatgcaaccgagaaggattggggtgtcaactacagagctctgaatgacctattccatatctcacggagtagaagagacacggtgatgtataaagttagtgttcagatgattgaaatatacaatgaacaaatccatgatctcctcggcaacagtggttcagagaagaaatatccttttggatcacaggctttaaaccaacccaatgggcttgctgttcctgatgcaacaatgcatcctgtcaactcaagttcagatgttattgaactaatgagaacaggacttgagaacagatctgtaggcgcgacagcattgaatgaaagaagcagcaggtctcacagtgtagttactatgcacattcaaggtgtagatctaaaaaccggagttactttgcgtggtgcgctacatcttgttgatcttgctggaagtggcaatgcaaagacgctgatgttcgtgcaggtcaatccagatgtctcatcttatgcagagactttaagtactttgaagtttgctgacagagtgtctggagtggaactaggtgctgcaaaggcaaataaagagggaaaagatatcaaagaattcaaggagcagctctcactgctgaaagataaaattgcaaagaaggatgaagaaatcagccgactacaactacagagtcataatactccaagggcgacagctaaacgtgccgattcattgttaaaacattcgtcatcctccccaggcatatcatcactaggaagcaaaatccagcaccgaagaacagcatctggtggaaggataaagatcgttggcagtagagcagggtcggatgttgacaacttctctgacatcagtgacagacattctgaagctggttccatgcaatctgtcgatgatatccagcagtcaagggagattatgggtctctctaagctctccatgagtgagatgggacataattctgttgaccctgagcttccttgctttggctatgatgattcagaggggaggctaagcgacatatcggacagcggtctttccatgggtgcagaaactgattgttctatgagcagtgtggttgagcttacctccttgccagatcaggatagagtctctggcactcagaaagagcaacacatggcaccaagcactccaaaagatcggttgtaa

SEQ ID NO: 2155 - DNA, 567 bp, Oryza sativa
  Clone ID: PAT_MRT4530_101953C.1
atgttggtgaatgcagaaagctttgcacagccggataagtcatcattaatatcaggctccaccagcgagaccaacaatcgcacccttccacgcctagaatctctagtaatatggaactgtgatcgtttggaggttctccatcttcctccgtccatcaagaaattggatatttcttgctgcgaagaacttcagtccctctcaggaaagctggatgccgttcaagaattaaatatagaatcgtgccagagcttgaaatcactggaatcttgcttaggagagctcccgtcgctgcaacaactcaccctttttgattgcgagagcctggtgcttccaccgagcctgcagcaacgtctggatgacatcgaggagaaagagctagatgcctgctacgaagtccccccgagggggtcgggccgcacccgcctcggccccgagggccgaggcgccccgacccctcgtggatttttgctccgcgtgtatgggttagaccggtcagatcgcgggttaggtggcgacaggcgatctgacgcacgcctcgccccatcccgtcaggacgagggcttctag

SEQ ID NO: 2156 - DNA, 470 bp, Oryza sativa
  Clone ID: PAT_MRT4530_101954C.1
agcttagagaaggtttaagaagatttggcctgaatttaaggatacagagattggtgatataatggaagcgacacacaacgacataatgtaacatccacttatgaagaatttattgctgcaactctacctcttaacaagatagaacgtgaggagcacctgctggcagcttttacatattttgacaaagatgggagtggttatatcacattgacaagcttcaacgagcttgtggagaacataacatggaggattcactccttgaagagattatttcagaggttgatcaaacaatgacggccaaattgactacgccgaatttgtagccatgatgcaaggcagcaacgttggactagggtggcaaacaatggaaagcagtttgaatgtagcattcgctttgttggttgttctttcaacgacctgtattacgcatgaaagtcgtcatgtttgcgtaaaaaaaaaaaaaaaaaaaa

SEQ ID NO: 2157 - DNA, 2484 bp, Oryza sativa
  Clone ID: PAT_MRT4530_101955C.1
gcggccgcaagcgggttctagtagatttcgtgtagtggagagcaaaaagtttgtgtggttttggtggtcgagtctggtggtggaagcccctcaggccggagatttcctccttccggtggacgaccaaaggagccgcccttggaaggaatttcttgccatcccagaggtttccacttcctcaccttggctaagtttaaaactttccgctgttttcccttgccgtgtagtaacaagtatgggttgctgatcaagtctttgttgtgaaaaatgtcaggttggggatttcctcacgcccaggaagccaagcaagggctgccttagcgaggaactcttccaattggacgggtttgcgcgtagcggtgcggctatataagtggaaatctgcatccctgggaaggatacaattgttttgaggctgggaactttggaattggtttgcataaggagttcttggaatggggaatcagtgccagaacgggactcttgggagtgattaccacaatcggttcccaagggagcatgccgttgggtacgttcagggggatagctacttggacttgaagaagttcgatgatacttggcctgaggtgaacaacttcaagcctactgctgctagtattctcaggcgggggttggatcctacatctatcaatgtccttgggcggaagacagcggacctaagggagcattatatcattggtcggaagcttggtcagggccagtttggcacaacttacctctgtaccgagatcaatacagggtgtgagtatgcttgcaagaccatcccaaagcgcaagctcatcaccaaggaggatgtagaagatgtgcgccgtgagattcagataatgcaccatttgtcgggccacaagaatgttgttgcaatcaaggatgtctatgaggatgggcaagcggtgcacattgtgatggagccctgcgctggtggggagctctttgacaggattcaggagaaggggcattacagcgagcggaaggctgcagagcttataagaataattgtcagcattgtggctatgtgccattcgctcggggtgatgcaccgtgatcttaagccagaaaatttcctccttttggataaagatgatgatctgtcaataaaggcaatagattttggtctatccgtgttcttcaaaccaggtcaggttttcactgagctggttgggagtccatattatgttgctcctgaggtattgcacaaacgttatggaccagaatctgatgtgtggtcagctggagtgatactttacgttttgctgagtggagtgccaccattttgggcagagacacaacaaggaatatttgatgcagttctgaagggtcacattgattttcaatctgatccatggccaaagatatctgacagtgcaaaggatcttataagaaaaatgctctctcattgcccttcggagcgtttgaaggcccatgaagtgctaaggcatccttggatctgtgaaaatggagttgccactgatcaagctctggatcccagtgttatctctcggctcaaacaattctctgcaatgaacaagttaaagaagttggctctgagagtgatagctgagcgtctttcagaggaggagattgctgggttaagagaaatgttcaaggcagtggacacaaaaaatagaggtgtaatcactttcggtgagcttagagaaggtttaagaagatttggcgctgaatttaaggatacagagattggtgatataatggaagcggcacacaacgacaataatgtaacaatccattatgaagaatttattgctgcaactctacctcttaacaagatagaacgtgaggagcacctgctggcagcttttacatattttgacaaagatgggagtggttatatcacagttgacaagcttcaacgagcttgtggagaacataacatggaggattcactccttgaagagattatttcagaggttgatcaaaacaatgacggccaaattgactacgccgaatttgtagccatgatgcaaggcagcaacgttggactagggtggcaaacaatggaaagcagtttgaatgtagcattaagagacgcacctcaagtacattgatgcacgaatgtatagattttgttctcttctcttgtccattcattcttcactacccaattcgggtctgtgacttgtatgagaagagatcaagtcaattcatttagttggtatttattccaagcaagtgtgagttgataagtagcgtagtctctatggagacaatagcatgagcatatagtggtggtatattggttgatgtagttgcaaggccgcctagcaattaaaaaagaacccaaaagaggtgcattcgctttgttggttgttctttcaacgacctgtattacgcaatgaaagtcgtcatgtttgcgtaactctaatctcaatgcttgcgttcctataatatctttaaagattataatattacatttccatgtcaaaaaaaaaaaaaaaaaaaaaaaaa

SEQ ID NO: 2158 - DNA, 426 bp, Oryza sativa
  Clone ID: PAT_MRT4530_101956C.1
gatatcaaaaaccgaaataacagtaagcgtagaaggttataccctgtgaatgtccctccgctggatcgtgaggcagaactgcctccgttggtgttgtcgttcgcagcgctagatccggctcccggcgtgccatctctaggtgcggcagtggtggcggcagacatggtgaagacgtacggtcgaagacgaggagcaatcgtgcggaagcactccccaaaaacctgatcacccgcctactcggtgcagatcttaggcgaaggtgtggtttcggaggccctgctcgttccgatctcttgtgcgcgcaagcgatcagaagcggggaagcagaacagtagcagcacgggcgcgcgaggaggaggaagaacaccagttggaaagtaaccaagaggatctaatcgggttgcctctttccttatagcacaggag

SEQ ID NO: 2159 - DNA, 2780 bp, Oryza sativa
  Clone ID: PAT_MRT4530_101957C.1
catcctatcgattttgcagtttagccctcgaagaagcaaggatttcgagcccggtccctaggctcgatccggccgtgtcctttgctccgatcgagcgcgcgaggtctcgtaaggtccatcctgagcttgttgctgtggagtgcgcgattccgcgctcgatttcgtttcttccggcgcagatttcgtgttttttggcctagatttggcttgtgggtgaccgcctaggcgtttctcgcgtgtttcggctttttgtctgggatcgatttgtggctggatttgcttgttcctggctgcggagcttggatcttagcattagaaaccctcagattggggatttcctgccggaggaagctttttggaggagctgcctttgggaggaactcttccagttctgagggtttcggtgtttgttgctcgcctggctcgagaagaagctgggaaatctcgtattttagggcgggttctagtagatttcgtgtagtggagagcaaaaagtttgtgtggttttggtggtcaagtctggtggtggaagcccctcaggccggagatttcctccttccggtggacgaccaaaggagccgcccttggaaggaatttcttgccatcccagaggttggggatttcctcacgcccaggaagccaagcaagggctgccttagcgaggaactcttccaattggacgggtttgcgcgtagcggtgcggctatataagtggaaatctgcatccctgggaaggatacaattgttttgaggctgggaactttggaattggtttgcataaggagttcttggaatggggaatcagtgccagaacgggactcttgggagtgattaccacaatcggttcccaagggagcatgccgttgggtacgttcagggggatagctacttggacttgaagaagttcgatgatacttggcctgaggtgaacaacttcaagcctactgctgctagtattctcaggcgggggttggatcctacatctatcaatgtccttgggcggaagacagcggacctaagggagcattatatcattggtcggaagcttggtcagggccagtttggcacaacttacctctgtaccgagatcaatacagggtgtgagtatgcttgcaagaccatcccaaagcgcaagctcatcaccaaggaggatgtagaagatgtgcgccgtgagattcagataatgcaccatttgtcgggccacaagaatgttgttgcaatcaaggatgtctatgaggatgggcaagcggtgcacattgtgatggagctctgcgctggtggggagctctttgacaggattcaggagaaggggcattacagcgagcggaaggctgcagagcttataagaataattgtcagcattgtggctatgtgccattcgctcggggtgatgcaccgtgatcttaagccagaaaatttcctccttttggataaagatgatgatctgtcaataaaggcaatagattttggtctatccgtgttcttcaaaccaggtcaggttttcactgagctggttgggagtccatattatgttgctcctgaggtattgcacaaacgttatggaccagaatctgatgtgtggtcagctggagtgatactttacgttttgctgagtggagtgccaccattttgggcagagacacaacaaggaatatttgatgcagttctgaagggtcacattgattttcaatctgatccatggccaaagatatctgacagtgcaaaggatcttataagaaaaatgctctctcattgcccttcggagcgtttgaaggcccatgaagtgctaaggcatccttggatctgtgaaaatggagttgccactgatcaagctctggatcccagtgttatctctcggctcaaacaattctctgcaatgaacaagttaaagaagttggctctgagagtgatagctgagcgtctttcagaggaggagattgctgggttaagagaaatgttcaaggcagtggacacaaaaaatagaggtgtaatcactttcggtgagcttagagaaggtttaagaagatttggcgctgaatttaaggatacagagattggtgatataatggaagcggcacacaacgacaataatgtaacaatccattatgaagaatttattgctgcaactctacctcttaacaagatagaacgtgaggagcacctgctggcagcttttacatattttgacaaagatgggagtggttatatcacagttgacaagcttcaacgagcttgtggagaacataacatggaggattcactccttgaagagattatttcagaggttgatcaaaacaatgacggccaaattgactacgccgaatttgtagccatgatgcaaggcagcaacgttggactagggtggcaaacaatggaaagcagtttgaatgtagcattaagagacgcacctcaagtacattgatgcacgaatgtatagattttgttctcttctcttgtccattcattcttcactacccaattcgggtctgtgacttgtatgagaagagatcaagtcaattcatttagttggtatttattccaagcaagtgtgagttgataagtagcgtagtctctatggagacaatagcatgagcatatagtggtggtatattggttgatgtagttgcaaggccgcctagcaattaaaaaagaacccaaaagaggtgcattcgctttgttggttgttctttcaacgacctgtattacgcaatgaaagtcgtcatgtttgcgttaaaaaaaaaaaaaaaaaaaaaaaaaaaaaaaaaaaaaattgcggccgc

SEQ ID NO: 2160 - DNA, 327 bp, Oryza sativa
  Clone ID: PAT_MRT4530_101958C.1
aaccaaacttttggattaagttttatatcatattatatatcatatattattaacatatcccaaatcaaatctttattctattattataaaaaaaaatccaccatctctaatcttaatcctaccttatttttcacaaaactattcaaaaacccatatctaaatacaatcaaccttatcaaccccaccttcctttccatgtcgtagcctttaataccgacaaaaacataaaattattccttctcaacctgctctagctccttcatcacctaaaaaaaatcatttcacccccacataaacatttttcacataaaaaaaaaccaaacattt

SEQ ID NO: 2161 - DNA, 219 bp, Oryza sativa
  Clone ID: PAT_MRT4530_101959C.1
atgggacccactccacagttgctcttgctctatgaaagcgcggtaccgagtccactctcgcgcttcagtcccgttgcgaacctcggtatcgcgctttcctcccgcgatttcgatagtatatttgtgcaaatcgatcggcatcaggtatactccctccgtactcataattaaagtgagtcggttagaataatatttaagtcaaatcttgggaaaatgtaa

SEQ ID NO: 2162 - DNA, 1149 bp, Oryza sativa
  unsure (1)..(1149): unsure at all n locations
  Clone ID: PAT_MRT4530_10195C.1
cctgtccgtccaccttnctgtgttaaatgcgtttctagcgtagcgtgcagatccaacaaacacctagcagcagcagcattggtacgtactcctcctagtcctagctagtgagtgagcgtgaggagcagtgagcatggcgtcgccacagctacagctgcaggtactagcgctgctgctgctgctcgccaccacggccacggccacggcgacgccgacgccgacgctgatattccttttgggcgggcagtccaacatgggcggtcgcggcggcgccaccaacgggccgtgggacggcgtggtgccgccggagtgcgccccgtcacctcgcatcctccggttgtcccctgagctccggtgggaggaagcgcgggagcccctccacgccggcatcgacgtccacaacgtgctcggcgtgggcccggggatgtccttcgcccacgccctcttccgcgccatcccgccctccaccgtcatcggcctcgtcccctgcgcccagggaggcacgcccatcgccaactggaccaggggcacggagctgtacgagcggatggtggggcgcggcagggcggccatggccaccgccggtgcaggtgcaggggccaggatgggggcgctgctgtggtaccagggggaggcggacaccatccggcgggaggacgcggaggtgtacgcccggaagatggagggcatggtgcgcgacgtccggcgagacctggcgttgccggagctgctggtgatccaggtggggatcgcgacggggcagggcaagttcgtcgagcccgtcagggaggcccagaaggcggtcaggcttccttttctcaagtacgtcgacgccaagggcctccccatcgccaacgactacacgcacctcaccaccccggcgcaggtcaagctcggcaaattgctagccaaggcctacctatccacgctctaattatatcatttgcgttcactgctggctactaagtactgattcattcctccccttcccctctatgcaaaatctgtcatatggagcgcgtgctgtatgtaggggatgagtatcttaccacttcttccttcattccggattaaaatataatgttactgattttctttttcccccaaaaaaaaaaaaaaaaaactcgagactagttctctccctcgtgc

SEQ ID NO: 2163 - DNA, 357 bp, Oryza sativa
  Clone ID: PAT_MRT4530_101960C.1
atgaggggcggcgtggaggcagcaaacggcgggaggacggagggcgtgcgggtggtgtgcggatgggaggtgtgcaggccgacgacgggtggcgtgtggacggcggcgctggaggacaacgggatggcgtgcagatggcggcgatttgagggcctcttcactttgggggctctaataggatccctgctggatctagatgctggagctatattagctatccacccggagcggatcccgggcagccaaagctacaaaatgaacaccatcgaggagaaggtgcatgtaatccgtggcgcaagagaagatgcaaaagtggcttgccggcgagagagcaagtgcctggctgcctgctgctga

SEQ ID NO: 2164 - DNA, 819 bp, Oryza sativa
  Clone ID: PAT_MRT4530_101961C.1
atgccgtcgccttccccggcgtcgcagccgcctcctcttccccggcgctgcctccgattcgtggggaaatcatcggagacgcgcccccgccggcgtccagtggcgtcgccgccactacaccgtctctggccggctgctgttcgtcgccggtacgccgaccgacgtcgccgtctcctccgtcgacgtcgcagcgtcgtcctctcctccggctgctcctcagtttcgccggaacaccgccgccgccgcgccggcctctcgtttctcctcgtcgacgtcgccttcggtagccccttccgccgtgcccgtgcgccggccgacgtcgccatctccacctccggcatcacagcggcaaggtcgccctcggcctcgcctcccctccacccgaacaccgccggtccgctgccggctgccatcgtcgtctcctcgccgtccccggtcgtcgtcgtcgtcgtcctctcgtcgttcccggttttgctcgtcgtggcgttcgtccctccgtcaagccgatcgcgttcgccgcccgtggttcgtcaggcgagccgctgcagccccgtcgtcttcgtcctcgcctccgcgtcgccaagcgttgcaccggccgcgtctcgccttcgtccaaggatcgccgccgaagtcgctccctcgccgttcgcctccgtcgtctccgagccatcttcgccgcgcccgttcaccgtcgtcgttcccacgcctcgtcgcgtggtgcttctgtcgttccgaaggttctcgaagcgtggtttgcggtcgtcgccgaaggttcggaaggctgttctctctgagcaaggcaagtcacatcacccttga

SEQ ID NO: 2165 - DNA, 476 bp, Oryza sativa
  Clone ID: PAT_MRT4530_101962C.1
gcatgcagcgcctctgcgcagtttgatgttttaggtcaaagatataagcaatatcagctgcagtcgcctgtcctgctacagcaacaagagcttatcccatataatgagttcgtaaggcatcagcatggcatagcggcaagcctcttcttgcaatcagatgcgcttcatctgagaaacaaccaagtgtgacaacagctcgcgctggtggcgcaacaatctcactatcaggacattaacattgctcaagccatagcgcagcagctacaactgcagcaatatagtggtgactactgtgatcagactcaagctcaagcccaaactctgatgaccttcaacttgccatccatatgtggtatctaccctaactactatagtgctcgcaggagcattgacacatgtggtggtgtctggtactgaattgcaacaatataatagctcgtatgttaaacataaagtcatacatcatcatgtgtgac

SEQ ID NO: 2166 - DNA, 1032 bp, Oryza sativa
  Clone ID: PAT_MRT4530_101963C.1
atgtcggacatctatatgcggagattattggtttacttgacaaggcttgcagaagccccctcccgcatattcccgtggcctcaccaccccttcccgccgtcgcccttctctttcccccgcgccggccacctccagccgcctctccctcctcgccctagcgccgtccggccgtgccgtcgccttccccggcgtcgcagccgcgtcctcttccccggcgctgcctccgatccgtggggaaatcaccggagacgcgcccccgccggcgtccagtggcgtcgccgccactacaccgtctccggccggctgctgttcatcgccggtacgccgaccgacgtcgccgtctcctccgtcgacgtcgcagcatcgtcctctcctccggctgctcctcggtttcgccggaacaccgccgccgccgcgccggcccctcctttctcctcgtcgacgtcgccttcggtagccccttccgccgtgcccgtgcgccggccgacgttgccatctccacctccggcatcacagcggcaaggtcgtcctcggcctcgcctcccctccacccgaacaccgccggtgtccgtcgtcgtcttcaccgttcatcctcgccggctcgtcgtctcgcggcgccgcctccgtcgtcggcatcgcagcggcgtgttccacgccgtcctcgtctccgtgcagccgctgccggctgccatcgtcgtctcctcgccagccccggtcatcgtcgtcgtcatcctctcgtcgttcccagtttcgctcgtcgtggcgttggtccctccgtcaagccgatcgcgttcgccgcccgtggttcatcaagcgagccgctgcagccccgtcgtcttcgtcctcacctccgcgtcgccaagcgttgcgccggccgcgtctcgccttcgtccaaggatcgccgccgaagtcgctccctcgccgttcgcctccgtcgtctccgagccatctccgccgcgcccgttcaccgtcgtcgttcccacgcctcgtcgcgtggtggtaaggatccgtcctctcgctgccccgtcctag

SEQ ID NO: 2167 - DNA, 702 bp, Oryza sativa
  Clone ID: PAT_MRT4530_101964C.1
tgatcttttcttgtgtgagatatggaggagagaaatgatgtcaacatggacaagtcagatgagatcctcctgcctggattcaggtttcatcctacagatgaagagctggttagcttctatctcaagaggaagatccagcagaagcctatctccattgagctcatcaggcagcttgacatctacaagtttgatccttgggatctcccaaagcttgcgagcacgggtgaaaaggagtggtacttctactgcccgagggaccggaaatatcgcaacagcgtgaggccgaaccgggtgacaacagctgggttctggaaagccacaggaactgacaggccaatctactccactgagggtaccaagtgcataggcctcaagaagtcccttgtcttctacaagggcagagctgcaagagggatcaagactgactggatgatgcatgagttcaggcttcctacgctcaccgatccatcgctcccgaagaagccgattgacaagaacattccgctcaacgactcctggacaatctgcaggatcttcaagaagaccagttccatggcacaaagggcactctgtcagacctggggagctcaattgcctggaacaattgatccagacatcttctctacattgcaatctgtgcaagcttcacagtttgccctggagaaaactcaaaaggtaggtctctcacatgctaaacatcat

SEQ ID NO: 2168 - DNA, 885 bp, Oryza sativa
  Clone ID: PAT_MRT4530_101965C.1
atggcgacgtcggccagcgcacgggcacggcggaaggggctgccgaaggcgacgtcgacgaggagaaaggagaggccggcgcggcggcggtggtgttccgccgaaaccgaggagcagccggaggagaggacgacgctgcgacggcgacggaggagacggcgacgtcggtcggcgtaccggcgacgaacagcagccgaccgaagatggtgtagtggtggcgacgccactggacgccggcgggggcgcgtctccggcaatttccacacgaatcgaaggcggcgccggggaagagaggcggctgcgatgccggggaaggcgacggcacggcgcacgcacgtgcgcggcacgggcgggagggcgccgctcggcttgggcccggaggcggcccaggaggagatgagggagaggcaggcccgggagagagaggggagggaagggagctgggccgggagggggagggaagaggacgtgacagcaatgccactggacgctggcggggatgcgtttccggtggtccccgcgcgaaacggaggacacgccggggaagaaaaggtagctgcgaggctgaagacggcgacggcacggccggccggcgcacggctgaggcagctggaggtggctggtggcacgggagagagaggaggacggcagggaggcatgatgcggccacgggggagctcgggaaagaggctaaaacgagagaacggaaggagggggttccattttataggcgcggggagggatccggcggccatggaaggtggccgaaaaaaggcgtgggcgttccgagtgatggagggcgccattcaagggggaattaggggggaaataaagaggaaggaaaggggattaattcccccaatcaatttcggaatccaagtttga

SEQ ID NO: 2169 - DNA, 2004 bp, Oryza sativa
  Clone ID: PAT_MRT4530_101966C.1
atgaaggattttatgaaactttatcatcagcgggaaatccagctgcttgtgctcctcagcttcacactccaaatgttcctctttttcaccggcagtcttcggaggcgcaacaccaatgtgttcctcagggtttctatctggacagcttatttgggagcagacttcacagcagtttatgctcttggttacctctcacgacacgatgatattcagaggcaaatgtcagggggaacccagccactagctttcttttgggcatcattcctcctcatccatcttggtgggcaggacagcatcaccgcattttcaatggcagacaacaacttgtggctgaggcatctcttgaacttggtggtgcaagtagtcctagctgcatatgttttctggaaatcgccagcaaggcacagtgcagagcttctagtttcaggtgtccttgtgttcattgccggagttaccaagtatggagaaaggacactgtctctcaagtatggaaggtttaaaagtctcgagagctcaactggagatcactacaagaaacggtttccggaattaaacgattcggatcatggctattctaaggtagttttggatgctctatgttcaatgctaaatgtccacaatgtctttgcagcgcgtaacccatttgttaatggtccagaatctaattccccagttgttattgctcgagacacggtacagggaaccaaaaaaatgctcaaggtggtggagcttgagcttgcaatcatgtacgatgacctctacacaaaggctcttgtgctgagaacaaggataggcatgattctccgatgcacctctcacgcatgttccctccttgcttttgcactgttccttacatgtgacaaacggaggtacaacggagttgatgttgcgatcacctattcgctgtttatcggaggctttttccttgatctttctgcagtgtttatcttcataatgtctccatggacttgggcgtggttgaaggctcagaaatgcgaccggctggctagcttgtcctggttccttttttccagtgatattggctggccagagaaaaggccacggtggtcgaattccatcggacagtacaacttgctgaactgggtttctggtggagaccagccaagatcatacaaccagaaagtggtggctctagtgagaagattgtcgagtttagtcggtgttggaaaagaagatttgttctggctgagcaagacgttggacactgagcatgtggaggccgatgaaaagacgatggagtttgtcgtaaaggggattagtagcttgagcgatgaagtctccgagcaacaacaatggcagcatcttggcccattgctgaaaaagatacgggtctgttttgtcgcagatatgggatgtgctattgtggtgatgcacatattcactcaagtatatttgaatgcagtagaagccgcggcagcgggagacgaaggagggggagatgcagatgatatggtggaggtgtgccgaaaactgtccaactacatgatgtacctctttgtcaaccacccttccatgcttccgctcaatgccagctccgaagccaccgtggttgagtttgcgaaatcgagagaggaactgtctaggacacaacaaggaagcaagatgaccctggatgagctatacaacattatacagcagaataaggatggtgtgtcaaggcaaggaacaatggaggaaatgtacaagatgatactagaagaggatgtccaaccaagctggggtgcagtggaggagatggcagcaatgtggctgcggttcctcatcttcgccgccggcaggtccaatggtaaggtgcacgcggcggagctggccagcggaggggagctcatcaccttcgcctggctgctcatggcccgggaagggctcggcgaatccgagaggagaagggtccggctgacgtccaccatatcgtccatttcgtctgctgattctgctggtgctgcagctgatttgaaggaagcatatgcgttctttttcaactga

SEQ ID NO: 2170 - DNA, 945 bp, Oryza sativa
  Clone ID: PAT_MRT4530_101967C.1
gggaagaagcacccaatgctacaggtgtgctaactgttgatagctacgagcctgaaagatcaccaagaccagcagaagacacacagaaggagcatccagtaccttcccctagaagattttgtcaggatccacgcgagtccctgccaaaagatgagtctccggcaatgaaaaccaagccttctccaagaattcttactgaatctgctccttggaggcagcaggagaagattgccaccagtagcaaggcttcacaatgccgagatgctgaagttcgaccaaggactgcatctctctatgcctacattgagagaaggggcggggggcttgagttcttggagtgcaacaaggacttcagtggctctcaggatactggaagcgctgcacgcaaaggatgccaagcgccagaacgatggcaatggcgcattaacagtggctgctcagcaggcaggggatgcactgaacaccagttccagacacttccagcctcccattgtagtcatgaagccagcaagaagcactgagaagcagccaggggtttcacttgcttcagttgatccccttgcagggttcagaaacctcaggaagctgcaggccagagatgcgccttgcattggcgagcatgagaccagcacaaatgagaaggtccattctcgcatttcaagggcacaatccaagtccgatgaacctgctagccgtgcaagctctccaaggcctacaggatcatcaagccccaggacagtgcagcggaaggcagagtcagaaaggaggtctcgtccacctgtctcaccgaagtccccaagcaagaagtccagtgaagcagcctctcctggaggaagaacaagaacaaagccttctcaagggaagaaccaccgtgacaatgaggtctcgaagagtccaagaagcagaatcagcatggtgaaggagatcgacataagcatcatggat

SEQ ID NO: 2171 - DNA, 2404 bp, Oryza sativa
  Clone ID: PAT_MRT4530_101968C.1
cccgggctgcaggataaatagtagactagagagccactcgggcagttgcattagacgtgaccacctgcggcggcggaagcggcagtctcgccgccggccggagtcgagccgggtcgcggcgatgaggccgccgacgcctctccccttcctgctgctcctcctcctcctcctggtgctcctcctcccgtcgccgtctgcggcggccgcgggcggcgccgacgggtgggaggcgatcggcgcggcggcggcggggggaggcccccgcagggtcgcgtcgccgggagagcaggaggcggccgccgccgggttgctccgcaggctcctcccctcccacgcccgcagcttccgcttccagatcgtctccaagggtggcgtctgcggcgggtcaagctgcttcaggattagtaatgcggatggctcgcgcagaaatggagcagaaattctgatccagggtaccacagcggtcgagctcgcctctggtctccactggtatctcaagtactggtgtggtgcacacatttcttgggacaagactggtggcgcacagctggcctcggttcctttgcccgggtctctaccgcaagtaaaagggacaggagtgaagattgagcgacctgttccgtggaattactatcagaatgttgtcacctctagctactcatttgtctggtgggattggaaaagatgggagaaagaaattgactggatggcacttcaaggaattaatttgcctttagcatttaccgggcaggaagctatctggcaaaaggtttttaagagttttaatgttacagacagagacctagatgatttttttggtggaccagctttccttgcttgggctagaatgggtaacctgcatggatggggtggaccactatcacaaaattggctggatcaacaattgacactgcagaagaaaatattgtcccgtatgattgagcttggaatggtcccagttctaccatcgttctcaggaaatgtaccgtctgtgtttaaaaaattatttccatctgccaacataaccaaacttggtgactggaacactgttgatggtgatcctaggtggtgctgtacttatcttcttgatccttctgatgcattgtttattgatgtggggcaggcgtttatcaggcaacaaatgaaagaatatggcgatatcaccaacatctataattgtgacaccttcaacgagaatacaccacccacaaatgaaccggcatatatttcatcacttggttctgctatttatgaagcaatgtcaagaggtaacaaggatgctgtgtggctgatgcagggttggctgttctactcagatgcagctttctggaaggagcctcaaatgaaagcattacttcattctgttccaactggtaagatgatagtccttgatttatttgctgatgtgaagccaatatggtaactgtcttctaattctagtgatgagtcatatttaaggtgcatctgacacaactttgctggcggcaatgaaaggtatggcgtactagagtcaattgcatctagccccattgtttcacggacaagccacaactcatcaatggttgtcgatggcgtatgcttggagggaatagggcataatccattagtttatgagcttatttctgaaatggcattccgtaagcaaaaagtttaaggtgaggattagttaaaaatagtctcatttaggcgatatggtcaaccaaatgtccatgaatgcttaccgaaagaaagtttcaaatggtcaaaactttaacacgaagaaaattcctcgagctcattgtggatataatgatacactactagcttctgatgataattttctgctggggccttggcttgaagatgcaaaaagccttgctaggactgaaaatgaacgaaagcagtatgagtggaatgctagaacacaggtaacaatgtggtatgacaatacaaagaccgagcagagtaaactacacgactatgccaataaattttggagtggactgctgaagagctactatctaccaagggcatcgaaatacttcagtcgattaacaaaaggcctacaagagaaccagagttttcagctggaggaatggacgaaagattggattgcctactcgaatgaatggcagtccgggaaggagctctatgctgtgaaggctacgggtgatgctttggcaatttccagctcactattcaaaaagtacttcagttagctgcaattgtccacttcgaattattagatgattgaaaatatcacatttccagcccctgcactaggtgcacacgccctaactgttggaataaagccaactgtctactttgttgatgtggtaaataattcatacatcagaaacacactgtttagaagcttgagaatcgtgcaaatgaaggtcgaaaatataaaatgagtaaaaaataa

SEQ ID NO: 2172 - DNA, 818 bp, Oryza sativa
  Clone ID: PAT_MRT4530_101969C.1
ctggtgccccccccggctgcagggccgcaccctgtctcctatatggtcttagctaccgggatctataccctgcaactgtcatcagctgggcatgaagaacagcaggcggccagctatatttgtttcagcttaattctcactgggtacttatactgtggtgaagaccgatcggtgcatggttgattagaccgccaactgattgggatgtcgctcagtttgatcctcatcacagtaggtgcttaattgtttgtttgtcttgctgtgacggtcggagcatgaattataatgcgatccgttttagctttactagggtaccctctacatatccgcctatccccttgcaggagttctttactgctcacgtattagggattgaatggctgcttatacaaaagtgctgtgaagaattaccgtatttcagtatgcaggggcagatatactttgggggtggcgggggctcaagcctctactgttagtaccaggactatgagagttctacgaaacctccactaaattttttattttgccatacgtatatgagaagagggttatagttttatttaattagtttgttcagattccttgttattttttcatggatctaccacccgtgtttatgaataaattttggtactcctacctcattatggccagatcagaccatgcatataattaatcagtaattgttgctgtggattttggatcggatgagtgtgttaaatcggctgtactgtacgttgctgttgttactgctgatacccggaacctgcaatgagcataggaaaagattgtttgcctaaaaaaaaaaaaaaaaaaaa

SEQ ID NO: 2173 - DNA, 570 bp, Oryza sativa
  Clone ID: PAT_MRT4530_10196C.1
gcacgaggcttgaagcctttagctcgatcagttgcccacttttgcagagttcagggcgggcactgccggcaagcaactcaaggagaaacgcgcaggtgcctgcctagcctcagcaggcaggcatgccgattccggttgatttgggcgagcccgacaacaggaggttcttcgtgtgggtggaagacaacatattcacggtgttaccgcctgatgccgagtgaccagtactctggatttaataagtggaccgtccaaaagcctgcaggtggcttaactgccattaacttattgtttccaggcgccgcaaccgctgctcaattattatacggtcgcccagactccgaatgctccaaacccgaggatgttgatggcgtctactgcgtcgaggcccaagttcacttcgttggagaacaacttgatggtaccgagttcgtttcaacccgagaaaatggtattccacaaaggtttatagtgggacaagagaatgtgatgcatggcttaaatttggtggtcagcgcaatgcgaccaggagagagagctatattcaccatccctccaaagttagccatg

SEQ ID NO: 2174 - DNA, 1566 bp, Oryza sativa
  Clone ID: PAT_MRT4530_101970C.1
ctaaccacttccatagtgggatggcaatttttcccatgcgtctgggtatccgcggatacccgacccgatgggcacgggcgagggtgtaatgcagcccaacaagtcgatgggctccgtgagatccttgctccacgactcacgcgctagcacgtgcagcctcgccaggaagatcgccaacgccgtcaccatggacggcaggtagcggtggaagtggaacccgtaggtcagcagtgtcccatcggcgaaccgatgcgccgcctccttcaccagcttctcttccttcccctcgccatagtacctcgtgaagtgctcaccaaaatgaatcccggctttctctagaactccgttagaagaatgccaacactccggcactccatcaaattcttggaggaactctgatattttggagcactccttctggagctttccctcactttccccatctccaccgttgaggccaaggttcggcatggacgtccaagattgcaccccaatgacggttggagggtacttcggacaatcccccttcctttcatcacctaaccagaaatagattgtgatcttcttaaggtaatcagcggtaaattctttaaccagcgggggtgccgtgggtggctcttggaggcaatattcgcacacttcctctcttaggggagcaatcaactcgatgcttcttgcctttgtaaggccactaactataccatggttgatctcttccccatcttgttcttccccctcgtccatgtccgctaaatcatcagtagaatgaaaaaactcatcaagtataactattgccacctccaggcatggcaatgtcatgatcataggagctctgtgttgagggttctttatgcacaaagacattaaacttgaactagatatgagaagatcttcaaatagacaacaattatcgatatctaggtgcaacaaagaaccagatgagatttcagggacctccaaagagcagtccctaagctccaaattttctagtgctgggcatgaagagttgatgggatagaagacattggcatcaatacaaacattgttaaggaccaaaaatttcaggcatatagaagtgaagtccacaaccccatagtccaacttgaaaggttcacaatctatatcttcagaaaactcaaccactttactgcttctcttaatagcatatgttatccaagagccagcatctcttgtatctgcagagtggaggcgcaaagcatccaacaaagaagagccacgttggcgcaacattcggttgacaaagttgcagaacttctggcctctatgccttccaaactgatttacatcaatgttcaggtatgctgatgaggtccaaagatgtctccatcgtgtggataacatgcctgtgtacacaagctccaaagctggtaaggtggacattatggcgtatagcaattcattaggaagattgctgattctgtcgatgctcccattcctcgtatttatcgagcttccttgatccaacatgtggcctgcatctgatacaaaagtgatttttcctgacagttcaggagcccgaacctgtataaaaatccctgtctccat

SEQ ID NO: 2175 - DNA, 555 bp, Oryza sativa
  Clone ID: PAT_MRT4530_101971C.1
atgtcgtggcactggaacgtccaccgaagtacgacgctctcaccccaaatctggtggagggaatcagatcttacccgggtagaggccagacgctcaccacacagaccaagccgtcacgtccagcaccagcaaggaaggctcgcgccgcgtcgagaccgctgggttgccgtcgtcgccgtttcatctcctccaccgtcactgtcgctgtcgccatggcctggcaagcctgtcgggcggtggcttatgctcaccgtcgccgccaccaccaccactcgacccagccactaccaatcgtcgctaccgctaccatcagtcgaccccaccgccagtcgccaccccaccagatctaggcatggatctgagtggtccccttcgccaccgccgccaccaccagtcgccgccgcctatcccactcagccccgacaccagtcgccaccccaccagatccagccggggcgcagatctaggcggtctcctctgccgccaccaccaccaccagtcgccatcgccccaccactcagctccgctagacccggccagatgacacggatctag

SEQ ID NO: 2176 - DNA, 249 bp, Oryza sativa
  Clone ID: PAT_MRT4530_101972C.1
atggccgttgaggcgattagtgagtggttggtggccaggccccactgtcagcgccctgtccccgcgtggttaactcgttaccgcgcgtgcgtttttgacggcaacggtggcgcgtggacgcacgagccgtctggtcttgacgagcgagtgatcactgatcaaggtcatttgctgcggcggtacgacaacagggtcagggaagagcacaggtccaagtccaaccgctaccacagtggagtaccactgtag

SEQ ID NO: 2177 - DNA, 652 bp, Oryza sativa
  Clone ID: PAT_MRT4530_101973C.1
gtcgaaacataaacatgataacataaaggccattgttttgcaatgtgatcggggggggaaaggtggaaactttgggattaagtttaacatcgttgaaacaggatcctattgggtctaacttgacgatgagcctacagcttgcgctacgtaatgcattgcacgccaagattgctttttctaactgactatgatttcatcttggactacgctcatgtcctttctattgcctgtacgctaacactgtattcgttctttctcctgctctttgtttcctttccagttcgttctctcgtttttttccccttttaattctgcatcccttctttcgttgctgatcttttccttattgcatgttctccttcttactctcttttcctgccttccttacttttattttccatttcttcctcataccctatcctttcttcctttcttcttcttccttcctttctattctttcccccctttccttcccctcttcctttttattttttcgtccccttccttctcttccttttgccttttctcttctctatttcatccgctttctctcatctccctccttacctttcactccttttttccactttccctctctcttcttcctttttctgcattctcttaccttttctcctttccctctcttcttttc

SEQ ID NO: 2178 - DNA, 244 bp, Oryza sativa
  Clone ID: PAT_MRT4530_101974C.1
tcgactcctcatccaccatgcgtctcgccgtcttacgttcggaccaccgagctccagcgccgcccatccatcgaagtgggcactaatcgaggcattagggagcatttgcgctcacagaataacacggataacgcgacgaaccgcctgttctagaagaggccgcagcagttcggagacagcggcgcgctgccagctaagaacgaccttagccgcttattatacgcgagccaatgtgcgtgctgca

SEQ ID NO: 2179 - DNA, 423 bp, Oryza sativa
  Clone ID: PAT_MRT4530_101975C.1
atggcgtctagggactcactccatcgctccaccgccaccgccgacctcctcctcggcgacgcgcactgggaccgcttccaggaggccgtcctcgagctcaggcatgacgtcaccgaggcgcaggcggtgctgcggaggggcaacgccgcaaggcgaggctcgcggccgccgtcaggtcccaatgctgggccgaaggagctctgccgcctcgcctccgccactgcggctgccaccaagcacttgtcgccgcgcctcagctttggctccatcgccgaggaaatcgagatggccgccgcggcatccattgctgtgttcatgacaaccatgttcatgttgtggccatggcatcctcatgcaagaagacgccagcatttgtggcctttgcatagaaggcctcgccagagacgcggaggtatctcttga

SEQ ID NO: 2180 - DNA, 732 bp, Oryza sativa
  Clone ID: PAT_MRT4530_101976C.1
atgtcttcaccaggttcgcacagccttgttggctccgagaacctcatcagaaaaaacagttttttcacaaagaatagcatccacacccatgacaagaaagcaggagagagagaagggggagaagctcgccaaagaagccgcatctgcgccgagtccgagctcccgcgccgacggggagagaggagggcgtcgccaacggggagagaggagggtgccaccgcggcccccgccttcacaacgggctacgctcgctgccggccgccgcgcccctcgatctgcacccgccggaactcgccagccacgccgccccccgatccggaagaggaggaggtgaggcactcgagccgtcccgctgcccagcgctgtcaagttcccgccgtcccctactactgcgccaccgagctcccgtgtcccccgctactgcgccgccgacttcgccgctgttgcaccggcgagcaccaggccccgccgctgctccgcccggctgccccggcgctgtctccgctcgggctgccgctccacccggcagctgctttgcccgaccgccccgccgtcgtctccactcgggctgctgctccactcggccaccccgtcatggtggaaggagaagaggagagcggcgtccgagcattggggctcggtggccatccagatctaatggtcctcaaccacctagagactagatctggcaccccggagctcgaggcggcaaccggcgaccttgggcactag

SEQ ID NO: 2181 - DNA, 1234 bp, Oryza sativa
  Clone ID: PAT_MRT4530_101977C.1
gcagttgacgatcggatgcggcgcggccggctgccggaccaccaccgcaccgcagtccacattccggaatggtcgagcgagccagagcgctgcctctcggcggcggccccggtgcgacgccaccatgccccatctgcacagacctcctcaatccccccgactttgtccctaacccccccacaccccccccccccaaaaaccacacttaacatccacctgacctactcatacgggctgcccgctccccccccaccccgaccctgccgaacacccccccctcgcgacgaagggggccagccaccgaagggacgaaacccctgctcctcgcgcatcgggggggcagcgagggcgcccacggcgtctcccccccgtcgatcaccccgccgcggacgcgctcacccgcgatcgagcgcgacccgcgcaacttcgacccacacagcgcccccccgcccatccccctccccggcccctcggtcagcgtccatccaccccccgatccatctacaccgccggcggatccagaggaggagccatgcgctagaggcggaatcgaggactcgtcgccacatcgccatcgcccctagccttggcagcgtccgccgcttccactatcctctgcgcggcccaccggccaccgcgccctcaccacgtttccgcctcccgccacctccactatcctcctcggcgccccaccgcccaccgcgccctcccagcgacgctgccgcccaccgcccgtgccgtcccctcctcctcctccccccccccccctctcccccgcgccccggccccctcctcctcctcccccccccccctcccccgcgccacccctcccaccaacccccgcaccctcttttcttctcctctacgcccttctctccggccattctccggcgccatcaccgtcgcctccctccacgacgaagccgcctttgccgaggtccacctctgcatcggtcaacttcgaggcccgggccaccggcgcccgcgcagccgcgtcctctccgtgactccgcgtctccggctctcctcccctggccgcgccctctccgtcccgcgtccggctgtcgcctactcgcccggcagcctcccgggctcctggcgtcccgcccgacgccgccagcacccagccgcctaggccagcaggccccatccaccgtccgcccgtccggccaatgctagtgcgccacagcgccagtggcaatacaacgacgacacgagacaggatggacgtgca

SEQ ID NO: 2182 - DNA, 669 bp, Oryza sativa
  Clone ID: PAT_MRT4530_101978C.1
atgtgggtcctccttcttcttccttcttcctccctctctcccttctctctctttttctccccttcttcttccccttcggtcggtggcgcgtggcggcaggcaagcccgcagcggcgaaggacggcggccccggctgtcctctcgccgtcactcgtctacccggtcatcgtcgccttctcttcctccccggccccgttgtccgcgttcctcctcttcaaccatgcctcctcgtgctccctctccacctcgcttcccaccttccctgcgctactcaaatcttgcgcccgcgcattcaaccagagctctcgcgccagcgccgcgttggtcttcatctccaatgggatggagctgcattgccttgtcttgatgattggctgcgggaaggatcgctatgtgcggaatgcgcttgtttccatgtatggcaagttcggtcgcctcggggatgcacggaaggcgttcgatgaaatgcctgccaagaatgccgtctcgtggaacgcattggtcggggctcatcgtgccgctgcggcgctgcagactggacgggtgcatctggaagcttatttgatgattaaagaaaacccttcaacagcaaactctctctggaagatgttggcagcttgccgatcgagtgcatgggcacatcaatcttgcttacaagttttttcatga

SEQ ID NO: 2183 - DNA, 1468 bp, Oryza sativa
  Clone ID: PAT_MRT4530_101979C.1
ccggccggcttcaccaccccgaagccccgaactggccgtcgaagccaacccggcgattccgcaaaaatccatgggcggcggcggcgatctcagcccctccagcgccccctcctccccgtcgtcgtcatcggagccccttccccatgagtttgccgaatacgcggccgtatccccggcaatcgatggcgagtccgacgggtgctgcgtctgcgatgaccccgaggtggaggccttcctccatggcggccgactccaggatcggtctctgcgggaggcgaaagaactcatcaggaggtataaacctggggacttggttgaaggagtgtgtggcacaaaatctggagactatgtgttgcctgatataacaacgtttctattggtgggccctagagatgctggcaagagcgcacttgtgaaccgaattacacgggtcttcgacaaggatgatgatcctgatgcaccagatcgagcacaggtctcctgtaattccaaatcaaccggtacaagcttccttcgggagtacagagttcctaggaattcaaattctatatgtatttatgatacaaggagcctctccaacaaccatgaaaacaattttaagatgttgcaaagatggatgacaaagggacttagccatggagatatcatcacgtgggataatgataattactctaagattcagaacatcaagtcaatgggaagacaatacagttttctgcgttgcaagaccaggaaggtcaactttgtgatatttgttgttaatggtgcttctgtcctcgaatcaattgagaacaacaacaaaaactacattgatatgctccacaaaacatttatgtatccattcttgtcatttggagatgataagcctgctgttgtggtcactcatggagatagactaacagcacaacagcgcatgcatgttcgaaatgagttagtagagttgcttggcattcctctgcagcaaatttttgatatatcaggatgtgatgactacgaaactgacttgtctgtattggatatgttgcgttactgtatccaacatgctgagcaaaacttccctattaaaaagaattatcttttagagatgcatggacgtgaaactcttaagcagatagcagtggggttgatgggcttcgatgcagtcattgaaacggccattattttcctatgcatcgttatccttctgcttcgtgtatcagataaattggtgcaatggtaatcaacttctgcatatggtctgtatatatatatgtataaaggggagaagagttatcaccttctcaggagtagcaaaaacaccatggattattatgtaaagcatgtttacattgtgaatactaatattgtctgggtatgcttgtacatattatgcttactatctaaactagtaacatgcatgtgctaacgctacggcaatatttggtaatgcaaataaaacagttaaaacacgatatatgtccaattaaac

SEQ ID NO: 2184 - DNA, 505 bp, Oryza sativa
  Clone ID: PAT_MRT4530_10197C.1
tgcctcagccaaactgcccacctgacaatgtctttggtctgtatcgtagggaaaggcaggagaacgcaagccataagtctttgccatgtgctttctaaggtacaatggtgttagttggtgtgtggctgaatcttcttaataatcatctgatttttttttattttttttttatttttttgttttgttttaattgatcatttattttatgttctttcttttattttatatttatttttcttgattaattgtttttttttttttttcttttttttttatattttttttttattttttattttaattttatttttttattattatttttttttttatcatattattaatatttattaattatatttatttatattgatttattttttttatttagtttatcttttttactagttctttttggccaccatttttttaataatttgatattaatatctcatttatttttttaataaaatattctatttttatgtaatattatttatataaa

SEQ ID NO: 2185 - DNA, 501 bp, Oryza sativa
  Clone ID: PAT_MRT4530_101980C.1
atgggagtggcggtgggcgacggtaggcagggcagcacgcacggcacggcggcgcggacggcggcaggtaggcgttcgacgccgcggtccggtcttcttcttcgccgttgggatggcgctcgggatgggggcggcggctggtggcggaggaggctggaggcgaggctcgggataggggggacgggctggtggcggaggcggcagctagaggcctgcctgctgtcgtgcgtgccactccgagcatcgccgtctgcaccgaccaccctggtggtcatggccaacgacctcatcgtcgtcaccatcttccacgagctacgccatgtaaccggagacatgccgggcgttcatgccgacggcgaacgagctgctctccatgagccacgggccgccgcctcgcctcgcaccgcgcgtgcccgcatgctaccgcccgtccacccccgcgtgccgccgcccctgtgcgctgtctgcccgtccgccgccgctcgccgctgtctgatataa

SEQ ID NO: 2186 - DNA, 363 bp, Oryza sativa
  Clone ID: PAT_MRT4530_101981C.1
atgggcgggggggcgctgtgtgggtcgaagttgcgcgggtcgcgctcgatcgcgggtgagcgcgtccgcggcggggtgatcgacgggggggagacgccgtgggcgccctcgctgcccccccgatgcgcgaggagcaggggtttcgtcccttcggtggctggcccccttcgtcgcgaggggggggtgttcggcagggtcggggtggggggggagcgggcagcccatggggcatggtggcgtcgcaccggctacctcccgtccgtgatcgcggcgggggcgctcctccgcgcctgtggccgccgccgagaggcagcgctctggctcgctcgaccattccggaatgtggactgcggtgcggtggtg

SEQ ID NO: 2187 - DNA, 417 bp, Oryza sativa
  Clone ID: PAT_MRT4530_101982C.1
atggggcctgctggcctaggcggctgggtgctggcggcgtcgggcgggacgccaggagcccgggaggctgccgggcgagtaggcgacagccggacgcgggacggagagggcgcggccaggggaggagagccggagacgcggagtcacggagaggacgcggctgcgcgggcgccggcgcggcgcacgaagacagctgcgccgccgggcgccacagctgggcgcgtgcggctggcgggagcctgtaggccgccggacgcagccgccactttatcgttgccagagctctcgccgaagccaaggactgtcgccaccaccccctcccccagatcaggcgaggtggacctcggcaaaggcggcttcgtcgtggagggaggcgacggtgatggcgccggagaatggccggagagaagggcgtag

SEQ ID NO: 2188 - DNA, 613 bp, Oryza sativa
  unsure (1)..(613): unsure at all n locations
  Clone ID: PAT_MRT4530_101983C.1
gnccccccntggagtttttttttttttttttttttttatgattaattttacatacatatgctgaagtaaagtttatatacatggccctcgtgttctatggacacaacaaaataggcttgtattctttacaaagttgactgcttgctttatttttctacagacgcaaataaatgtactatacattgcctgggcagatttttttgcatgtacacccttaaactttgttgtaaaactgtacaccgctcaggataattcaggcagcagaaagggccccaaggtctcctgctctagcaggaataatcttgcctccacatacatggatagaattgcagaaatctctcttcttcagaaacttcttgatatgttctagtatgattggtgcattttggatgatcaacttcttgcacttttgtacaaaattttctgcattgttgcatcctttcagaagtacctcgattatcttaagctccacatcaggattttcaaggatcagtaaggatctcatcaaacacctcatgggaaggtcgccacgaatcttcatgtcttgggagacgaatgaatggtcacttgggacacaagacttactgattcaccaaaattcttcggggttaaa

SEQ ID NO: 2189 - DNA, 1446 bp, Oryza sativa
  Clone ID: PAT_MRT4530_101984C.1
atggagctgctctgcatcgggacggcggacaccaagctggacgagctgctcttcctcgccgcccgcctccgctccaccctcgccgccacctcctccgcgcaggttcaagtaagccttgtggatgtctccacaactaagaaggtgacatcacaagattttaagggcaccacatttatctcaagagatgcagttctttcgtgtcatttaggtgtcgatcaacatgaacttcctagtgacagaggtgaagcaatcacactcatgtcagaggctctccagagctttctaaaaagaagatatgaaagtggtactctgctaggtgctgttggattaggaggcagtggaggaactgccctaattgctcctgctctaagatccctgccactcggagtgcctaagcttattgtatctactgttgctagtggccaaacggcaccatatgttggaacatcggacttggtgttgtttccttcagttgttgacatatgtggcataaacagtgtcagccgtgttatattatctaatgctgctgcagctgttgctggaatggtgcacggaatattaatggaatccaatgaatctgatgaaactgccacaaaaccaactattggtattacaatgtttggtgtgacaacaacatgtgtaaatatggtcaaagaaagactgagcaaagaaggttatgagacacttgtattccatgccacaggtgtaggaggaaaagcgatggaagaactagttaagggaggtttcatacagggtgtattagatataacgacaacagaagttgcagaccacattgttggcggtgttatggcatgtgatgatacaaggtttgatgcaattatcgacaacaaaatccctcttgttctcagtgttggagccttggatatggtcaactttggagctcgagatacgatacctcctgatttcacaggaagaaagatacatgtgcataatgagcaggtttcactgatgcgaactacagtagaagagaacaaaaaaattgctgagtttatagctgataaaataaacaaatcttcatcgaaggttattgtttgcctgccacaaaagggcatctctgcaatagatgcacctaaaatgccattttacgatctggaggctacatctacgctgctggatgaattatgtagccgtatagagaaaactgacaacagagaggtcaagatgcttccatatcatataaatgatccggaatttgctaatgttttggtggacgcattcttgagtatggatgtaaaggcatctaatacaataagtccagaaaacagcatggtccaaactaatcaagatgtaaatacaaaagaatattgttcaacacagagaacttcagatagttctatcatatggagatctccagtagattttcctgatgcaagaccagcgttactgaaacatctagtcggttgtgagagaatggttatctattaa

SEQ ID NO: 2190 - DNA, 199 bp, Oryza sativa
  Clone ID: PAT_MRT4530_101985C.1
gtcactaagccctacatttcactgtcggggatacattacaaaatgaggaaccctctttgagtttgatagagcaggaaaaaaacataagctccgtttatatagaacttgtatcacttttaacttaatattataaccacttggcaaatttaaataacaagttacgagtctgattattctggtaatgtatcaaaattgcatt

SEQ ID NO: 2191 - DNA, 282 bp, Oryza sativa
  Clone ID: PAT_MRT4530_101986C.1
atggcggtgccgccgcccgaggtcgccgcccactctttgaccgaggtcgccgcccccgctgccgctagctccaggccgagccgcccctaccaccgccagctccaggccggagcccaaggcagccgagccgtgccgctgccaccgccgccagctcccgtcaccgccgtcctaggaggaatggagaggagagaaagagagttaaggaaagaaagagactgcgcggacgtccctgacttgttcctcaagtctacgttcatcgacggcctcctccccgagttctag

SEQ ID NO: 2192 - DNA, 553 bp, Oryza sativa
  Clone ID: PAT_MRT4530_101987C.1
ctcgggccggccggaaaaaaaaaaaaaaaaaaaaaaaaaaaaaaagaagcgatgctaattgcggttgaagcctccgcttgcggcggcggcaggacaaggaggaggaggaggaggaggaggaggaatttgatgtattgaaggagatcggctactttgttattcaaaatcactgacttgccacatgcaacgatcatggatccttaatccccgccaaaaaatgtggcgctagtgggaggtctggaggaagcatgattggctgatgatgacatctacgagactccaaatcaatacctacaagaaatctgctcttaattgagcgagagcaaccatgatgactaggcttcacagattgaagtcagagatctaaaccaatcaattgaaagcactttttccataacagaagatgacaatgagctccgccaagctcaatgctggattccttctcacggccattctggccttccaagctccaagggccacggaagtaaactccaacctcttccgggactacatcgtcgccatgttcagacgggggaagtttaccgaggggcca

SEQ ID NO: 2193 - DNA, 261 bp, Oryza sativa
  Clone ID: PAT_MRT4530_101988C.1
atggcgaggcagggagctctgtctccatctcttggacacacacgcgcagacgtggggacggggaagggtgacgccagtgatgatggtggagggcggtgcggcgataggatggcaggcgctgacagcggcggtgaccgagcggtcggccaccacgcggtcgcgcgaatagggcccaatgtgacctgggtgcgcctgcgggagatccatggtagaggtaatagggaggagctccacgtagcgatgactatgcaggatgtctag

SEQ ID NO: 2194 - DNA, 494 bp, Oryza sativa
  Clone ID: PAT_MRT4530_101989C.1
atgccttcatttgagaatttgcagagaaaagatggttccttttttttgttttaccttgtcgctgactgaacgctgccgcgcaaggacgagccccccgcaccagggtccgccaccgccgcacgttctcgtccgcggccacccgcctaacacccccaaaccctatccgttgccgcccgcaccctgtccctctccctctccagcgccgccaccgagcggctcgcgccgccgccgccgccgccgccacccctcgcgccgccatccccaccatcgccgtcgccgtcgcctcgcctcgtcacggccgcctccgccatcgcctccgccacctccaccatcgtcgtcgtcgtcgccgtcgccacccctctcccaccatcgtctccgccatcgttgtcgccgtcgcctcgcgccaccacggccgctgccgcctccgacttccccgtcgcctcgcgtcgtcgtcgccgtcgcccgcccccgccaccatctccggccccccaaac

SEQ ID NO: 2195 - DNA, 121 bp, Oryza sativa
  Clone ID: PAT_MRT4530_10198C.1
ttgtcagtctgcttttctcacagaagagagcagatcactaatcgaataagaacggtggtgcgcatctgcttgtacgcaaaaaatggaacgagacattacctgtctcccgactaatagggtt

SEQ ID NO: 2196 - DNA, 1904 bp, Oryza sativa
  Clone ID: PAT_MRT4530_101990C.1
caagtcagaaccataagaacatacccaaagtacacatgattctgcaccaatctctggactactaataaaatttcaactaacacagaaaaaaaaaactagatgtaaaaattgcaaaactaaggtaaacctaaatagattccgccttataggcgttagaaaccataagagggcgacttcgatgttcaaccgtcgtattgcccttcagcgaacttgtcctcagggtagaagacagccaccacctggttgttggcaaacttcctcccgtgcatcccattcttcgccttggtcgagctctctacatctgcaaattccaaaaacacctgcaatgcactctcatgcctcccaactccagcaacaggagcaccgctgggatcaggtcgcgggatcacaactttcaccaggttaccgtatctgcacccttcttccctcatgtcttgcacgatgtcctcatactcctcatcatccctcagttcatctggtgaaaccacttgggtcaggcataccacctttgtaggcagtgctccccctccaacttggaacatgagtttctgcatttgcgcctgttgttgtacatgcaggagcatgctttcttgctctggcctaggttgagaagctccttggttagctcgcctaacagtgagggtcttgtctcccatcttgataccattaagagcagcacaggcaatgtccgtgacattaagatcctggtatacacagaaagcatagcccttcgagtttccagtttctctgtccttcacaagatcaaaaccacgcagaggtccaaaggattcgagcaactccctgacttgagcttctgtgaagtaatagggcagcccacccacaaaaatgcggtcaggaccttctaaacctccagctgagccaggtgttaagccaacagcagcaagattgaggttggggtttggctggcttggacccaatgcagctgctagggaaggattatagtctgttggccttctaaccttcacaggtgctccctcaaacattataccatccaaggccattgcattgcttgcttcctccacagacctcatctccacaaatgcaaatttcttatcatggtttatgtagacattaagaacagcatcacctggaccagctgtatttccaccaacagcagccataacttgattgaagtatacagcaacagtatgctcattagcagttggaggaagtccaccaacataaacacgcctagcatgtcgagtagcctgttgtgtcatagcttgtggcggggtttgagtcaaattgaacatgttcggaagcatcccagaaatagcaggggccacaacaggtacctgacctggggctgctccagcagcaagcgcaggaatggctgcttgtggtccctggtcaaatccactcacgcgcttgctagatcgagagcgtgagcgagatctagatctgcgatcacgaccctttgaaggggagcgggagcgagatcgatgcctgcggtgaccatctctgtcacggtctcttctcctttcagaatcatggccccggcgtcgatcacggtcatcagaacgttcacgatcgtggtgttcccttctttcgcttctatcgcggtgctccctgtggcgatcacggtccctgtccttgtcaccacggtcgcggtcccttcggtctctatcacggtctctgtcgcgttccttgtccttgtcccgttctctttccctctctctagactttgaggacctgccatcatgtggctgtgtctcgtgctgagaacggccgccgtcggtggcgccatcggagaagccggtgggcttggcggcggcggcgggcggggacccctcgggcgcagggtactcagcgtacgcggaggcgggggccgggtcgccgccgttcccgttgccctcgtagggctgctcctcgtgctccgccat

SEQ ID NO: 2197 - DNA, 312 bp, Oryza sativa
  Clone ID: PAT_MRT4530_101991C.1
atgtcaaaaacaagcccaagaatcacggcaaatgaagaagcagaaggtagcagtgctttggatgcatcaattacagatctagtactatctgaatatcaactaagaagaattgatatgatcaaaaaagcatcaaatccaggtgagtgcacaaaaacaaacatacaattgaaaatgaagaagcagataaaagcaatgatttggatacatcaattaccggactcacatagacatgtaatttataatacattttcactacaattacatgagaaaaacaatgcaaatttaatacacaacaggaaccacagaatatga

SEQ ID NO: 2198 - DNA, 183 bp, Oryza sativa
  Clone ID: PAT_MRT4530_101992C.1
caggcagcgcgcatgaagagcgtagtaccctacgagatggcgccgccctttttttttttttttgtggtttttttaaagagttgggcgttctcccccaatagaattaacaggaacatgaggatacaggatggaacgactccaaaccaaagcccctaggacgtggatacatatgcacaaaagtaa

SEQ ID NO: 2199 - DNA, 1374 bp, Oryza sativa
  Clone ID: PAT_MRT4530_101993C.1
atggcggcgtcgcaggcgtacctcgacaaggcgcagctccggcagagctaccgcaacgtctggcacaccgacctcaccaacgccatcacggccgacttcacatgctgctgcttgtctctgtggtgcggaccatgtgtgtcttacatgctgcgcaaacgtgcgctctacaatgacatgtcgagatatgtgtgctgtgctgggtacatgccatgcagcgggagatgcggcgagagcaactgccccgaagtgtgccttgcaaccgaggtgttctgctgctttggtaactcggtggcttcaaccaggttcctgctgcaagatgagttcaacattcagacaacccacgaagaactttccgaggcctcgcagttgatttcctgcatatctaacatggtctactggacggtttgctcttgtatgcagacacagcacaaggtcgagatggacaagagggacggcaagtttggacctatgacagtgcctccaatgcagcagatgtctcgcatcgatcaaccggttccgccttatgttggcaaagtgaaggatgaagaccacgagcaggacaagatcggtgcaatggcggcggcttcatcgacgacggcgacgacggccatcctggcggcagtgatcatctctctcgccggcgctgccaccaccgtggacgccaagttcagggcgatgcagtggactcccgcccacgccacgttctacggcgacgagacggcgtcggagacgatgggtggggcgtgcgggtacggcaacctgtacgcgagcgggtacgggacggacacggcggcgctgagcacgacgctgttcaaggacggctacgggtgcgggacgtgctaccagatgcggtgcgtggggacggcgtcctgctacaggggctcgccggcgatcaccgtgacggcgaccaacctgtgcccgcccaactgggcggaggaccccgaccgcggcggcggcggctggtgcaacccgccgcgggcgcactttgacctctccaagccggcgttcatgcggatggccgactggcgcgccggcatcgtccccgtcatgtaccgccgcgtgccgtgcgcccgcgccggcggcctgcggttcgcgctgcaggggaacccgtactggctgctggcctacgtcatgaacgtcgccggcgccggcgacgtcggggacatgtgggtgaaggccggcggcggcgggggttgggtgcggatgagccacaactggggcgcgtcgtaccaggcgttcgcgcagctcggcggccaggcgctcagcttcaaggtcacctcctacaccaccggccagaccatcctggccgccggcgtcacgccggcgagctggtgcttcgggctcacgtaccaggcccgcgtgaacttctcctag

SEQ ID NO: 2200 - DNA, 447 bp, Oryza sativa
  Clone ID: PAT_MRT4530_101994C.1
atgcagccgaggggcggcgacggtcgagcagcgaggggcggcggcggacaaccggcgagggcgcatctggacagggaggaggcatgcggtggccgtggaggctgcgcgcagaggagtcctgatgagggcgacgcggtggaggagcagcagtgcgagcggtggggcggcgcggacggtggggcctccactccggcgatctccaatggcagacccgggttgggagattttgggaggaagccaagtcctttcagggccgacagtggggatgctctggaacaccaccgtaaccccgctaggggcattgtcgtggcgtctctcccatccatggtggaatccttaggtgaaaaccacaccctggtttccaaggtggcggatggcggcaccatcagcatcgaaaccttattgaatgcgtcgtttggaggtctttccagccaaactcctgtctag

SEQ ID NO: 2201 - DNA, 552 bp, Oryza sativa
  unsure (1)..(552): unsure at all n locations
  Clone ID: PAT_MRT4530_101995C.1
cccacgcgtccgcggcagtgcaagagccaccaagatcgatagctccatcgccggcgagcgacggagatggcggcgtcgcaggcgtacctcgacaaggcgcagctccggcagagctaccgcaacgtctggcacaccgacctcaccaacgccatcacggccgacttcacatgctgctgcttgtctctgtggtgcggaccatgtgtgtcttacatgctgcgcaaacgtgcgctctacaatgacatgtcgagatatgtgtgctgtgctgggtacatgccatgcagcgggagatgcggcgagagcaactgccccgaagtgtgccttgcaaccgaggtgttctgctgctttggtaactcggtggcttcaaccaggttcctgctgcaagatgagttcaacattcagacaacccagtgcgacaactgcatcattggcttcatgttttgtctccaacaattcgcctgcatctgttcgctggtcgcttgcatcgntggcagcgaagaactttccgaggcctcgcagttgatttcctgcatatctaacatggtctactggacg

SEQ ID NO: 2202 - DNA, 270 bp, Oryza sativa
  Clone ID: PAT_MRT4530_101996C.1
atggcggcgccagccacactggcgccgtgcccgtgccaccgtggcactagggctgtcgtggaggtgctgactgggcagaatgggggcgctagccacactggcgccgcccctcctaccacggcgccagcatggctggcgcgccccccctctggcggcgccaaccaccctggcgccgcggttggggagggcggcgccagccagtgccgcgaggcrggagggtttcaggctggggggagggcggcgccagctaccctggcscgtggtccatga

SEQ ID NO: 2203 - DNA, 432 bp, Oryza sativa
  Clone ID: PAT_MRT4530_101997C.1
ccagccacactggcaccgtgcccgtgccaccgtggcagtagggctgtcgtggaggtgctgactaggccgaaggggcgccagccagagtgcgccgcccctcataccacaggccagagtggtgggcgcccctcctctgcggccccaccaactttctccccccctcaaaattttcgcttctgcctccgggcaacggctggtgcccccccccaagaccgcggcgccagggttgtggcgcccccctcctccccccatcgaagccyttctgcctccgggcctcggctggcgccgccctcatggaccacgsgccagggtagctggcgccgccctccccccagcctgaaaccctccygcctcgcggcactggctggcgccgccctccccaaccgcggcgccagggtggttggcgccgccctatgcctccctgcaaattga

SEQ ID NO: 2204 - DNA, 254 bp, Oryza sativa
  Clone ID: PAT_MRT4530_101998C.1
agcacaggcacgcaaacactttataattgggtgaatgattgttacagtagcatgtgatgcatgtgataagttcagggatcaggaccactgacaaacagtgcattttaggacaaaaggcaatgttttcccgtcagatgctaccttccaattgatggagcaaaaactggctttgaaactcgccatattcaccaatacattttcaccagtttggaacttgttcctatcccgcatggatatttactgccacaaggatc

SEQ ID NO: 2205 - DNA, 169 bp, Oryza sativa
  unsure (1)..(169): unsure at all n locations
  Clone ID: PAT_MRT4530_101999C.1
tgaacacactccgtgcgcgcgctcgctcgcccgcacattgctctgagctctctgcaggggcccacangtctcgccctactagcagacgtncgtgctatcaacttacgcacatgggtgatgcatacgcgtggctcccctagccgtgaaactcgtaacttctctgacaggc

SEQ ID NO: 2206 - DNA, 297 bp, Oryza sativa
  Clone ID: PAT_MRT4530_10199C.1
atggcgacgaccgataagcgcgctctgctggccgccgagaacggccatggcggcggcggtccagtcaccgtgtcgttcaacaccaatgccatcgtcctgctcgccctcctcgtctgcggcctcggcgcggtcgcgctccacgtcgtcctccagtgcgcgctccgcgtcacgcctaagctgaagggaaagagcagagggttctatggagttagagctgccgtcacctatgacccattagaaacattctatgctcttcttcagtccaaggtgtacctgaagcacaacatcagcccttga

SEQ ID NO: 2207 - DNA, 429 bp, Oryza sativa
  Clone ID: PAT_MRT4530_1019C.1
gggaaaaaaccattgggggggggcatttttttttttttacttggaaaaacacagggggttgggcggggctttaaaaatgggggaacccccccctgaaaatgcccttgcaaattcgggtgggacaagcaacttggcaggctaatggcttattttacccgggcctgggaaaaaaaatcctaaatggtttgaacaaaacgaaacatggggggctccccacccctttaaaaccgccggtttcccccttgggtccaaaaaaacaattttgttttgggcaaatccaaaagggggtcatgggaaatgcaaaaaatttttgcctttttgctcataagttgacggccctgcagtttttggaaatttggccggcaaacccggggaaagggctgatgttgcccattttgaccatggggttgccaaattcccaggaaaagc

SEQ ID NO: 2208 - DNA, 839 bp, Oryza sativa
  Clone ID: PAT_MRT4530_101C.1
atggcggctctagttccagttcttcaggccaaaacatcagtagctattggagatggacagcgtacttctttttggcatgactcctggctcgactgcggtcccttaagtaccaaattcacagctctgtttactcatgcactagacaagcaagcctcagtctaccaagttctttcaacaaactcgcaagcctgttttgtcccaaggctgaaactcacagcttcatcagctccaagagctaattgcttccacttcgctaatcccctccctggatgaaagaaagattacgaatagtgctgcagggagtttactctcttctcgtatggtttatgaatcgtcattccaaagccaacctctctgtgcaaactggaagtttatctggaaaagtaaagctccaccgaagattcaattctttgcctggttacttgtgaaagaacggctcccgacaaaacaaaacctcctcaagaagaaaatcgtgacctcagatatttgtgagctttgtaacagtgaacaagaaacagccttccatttctgctttcgctgcatcattctggcagaaaatggggatccaggctgctattaactcgatgtcggagctcgctcaacttcagaagccccactgtctgccggcaaagcatttccaagttttcttcctactctgcttctagggattgtggaatcatcgtcatgatgtgatctttcgagggatgtcgatatctctcccacgcctagttgcaaagtgcttagaagatgctgctcattgggcagagcgtctgaagatagacgacaggattgtggtttccgtttggaaggaaatcatttcttcctcccttcgtatctct

SEQ ID NO: 2209 - DNA, 159 bp, Oryza sativa
  Clone ID: PAT_MRT4530_102000C.1
gttactcgtgggctagtcaaccgtcaggggcactcagatcggtcgcaagtggcgcgtctgctcgatcaataatcaagacattagatactatttcgcgcagtcattgcagttgtatagctatatattaatgacagtgacttgtgtaggtgtagtaccggg

SEQ ID NO: 2210 - DNA, 1397 bp, Oryza sativa
  Clone ID: PAT_MRT4530_102001C.1
tgcctttgatcaaattaacaaaaatcacatgatgcaaagttgaatcttgtgcccgtggaagctgcggcggaggcgtcgtgcgatgggcggtatgtgtatgtgctggaggtgccacggcggtttcagatgctcaccgagtgcgtcgaggggccgaaggtgttcgacgacccgtaccatgtctgtgtcgtcatgtccaactccggcctcggccccgtcatccctcccgccgccggattccatggatgcaggtataacacggaccagtacgcgctggaggtgatcttccacaatcggatgcggcggtacgagtgcctcaccagcgacatggcggcggcgacggcggtgtacgtggcgttctacccggcgctggagctgaaccggcacaagtgcgggtcgagcgccacggagaggaacgagccgcccagggagttcctccggtggctgacgtcgcagccgtcgtgggcggcgctcggcgggcgcgaccacttcatggtcgccgcgcgcaccacgtggatgttccggcggggcggcgccggcgactccctcggctgcggcaacggcttcctctcccggccggagtccggcaacatgacggtgctcacctacgagtccaacatctgggagcgccgcgacttcgccgtgccgtacccgagctacttccacccgtcgtcggcgcgcgaggtgtcggcgtggcaggccacggcgcgcgccgcgcgccgcccatggctgttcgcgttcgccggcgcgcgccgcgccaacggcacgctcgccatccgcgaccacatcatcgacgagtgcaccgcctcgccgccggggcggtgcggcatgctcgactgcagccacggcctcgagggcagcatcacctgccgctcgccgcgccgcctcgtcgcgctcttcgcctccgcccgcttctgcctccagcctcccggcgactccttcatgcgccgctcctccatcgacaccgtcctcgccggctgcatcccggtgttcttccacgaggcctccacgttcaagaagcagtaccaatggcacgagcccgttgatcgccggcgatactccgtagtcatcgaccccgatgatgtcgtcgaaggccgggtgcgcatcgaggaggtgttgaggaggttcagcgacgacgaggtggccgccatgagagaggaggtgatcaggatgatccctaggttcgtgtacaaggaccctagggtgagattcgagggcgacatgagggacgccttcgacatcaccttcgacgagatcatggcgaggatgaggaggatcaagaatcgaatggatttaaaaaccgactcatacacagatgacgtaccaaagtaccagcaaaaatatcttcaatttttataatggtagagaattgtcaatttacactatataataatctagaa

SEQ ID NO: 2211 - DNA, 319 bp, Oryza sativa
  Clone ID: PAT_MRT4530_102002C.1
caacaccccctccccccaggggggttccaaaatggcccccggaaaaaattttttttccaaaaagattcccccagatttgcccaaaaggaccttttttggggctaaataccccccccttccaggggattaaacagggaccccccccatgaattctaaagggggcctattcccttgattattccaggggaaaaggggtttaaaaactaagtttttttacaggaaacccagggcccgaacagggggttttttggaaatcccccccaaaaagggggggccgccttgtaaaaaaagacaggggccaggggggaaattgtgcccc

SEQ ID NO: 2212 - DNA, 180 bp, Oryza sativa
  Clone ID: PAT_MRT4530_102003C.1
atggtggcgagcggctaccggctggagtgggactgcgcggctgcggcgcacgcggggcaggaccagcagcaggacgtcgacgacatcgcgcaccacggcggcggtggcctcgccgccaacctgccgatggcaaggaaggactcgccacgacggccggttgtgtgcgggccgtcggggtag

SEQ ID NO: 2213 - DNA, 574 bp, Oryza sativa
  unsure (1)..(574): unsure at all n locations
  Clone ID: PAT_MRT4530_102004C.1
gcgctcatcctcctccctctttactgcaccacgctctcaccctcatgacatcaacaacaaccccctataaaattcgagttccggggtggcatcttgcagttgtagagcaagaatagaagcagcagcagcaacagcaatcgcagtaagagcagtatatgtatattactatatatataagttatagcagacagcagcagtagaaactagaaaacttggaagagagtagacgatcgaagagatcagaattgcttacaggatcggccggtcgatggaggtgcagccggagctctccctggggccgacgttgctgggcttcggcgtcggtgccggcgccggcaagagctcgtcgtcgtcggagtcggacggcagcagcgacgacggcagcaggaagaggaggaagcacttcgcctgggaggaggccgtgtcccacgcgagcctggacctccacctcaacgaccccctccccatggactgggagcagtgccttgacctacactctgggagggtgtactacctgaacaggaagaccatgaggaagggctgggtgaggcccatgganggagcacggcggcag

SEQ ID NO: 2214 - DNA, 1676 bp, Oryza sativa
  Clone ID: PAT_MRT4530_102005C.1
ccgttcgcgtcagcttcgaaccccactgcaagcaaacagcgtctcccccccttcccgatccgacggcggcgacggcgatccatgccatgtcgcagccggacgccgccgccgacgacccctccccctccccgtcccccaacccgccgccgccgcccgtcgcgtggccggaggacggcgcgctaacgcgggagtgggtggcggggctcacggcgacgctggactggtgctcccgcagcctccccgcggaccggctccccgacgtgctccccgcggcgctcgtccagcggctcgtcctcgcggcctccgtcatcctgcaccgggagcccaacctcgtgcgggtggacccgcggcccgaccaggccgtcgtcgtggtcggggacgtccacggccagctccacgacgtcatcttcctgctccgggacgccgggttcccctccgacgaccgcgtcttcgtcttcaatggggattacgtcgaccgcggcgcctggggactcgagaccttcctcctcctcctggcttggaaggttttgcttccgaattctgtgttccttctgcggggaaatcatgaatccaagtactgtacatcagtatatggttttgaacaagaggtaaattttaaatacaaaggtcaaggtcctcaagtttatcggaagttcttaagatgttttgaagaccttcctctagcaacaataatagcagggtgcgtctacactgctcatggagggattttccgtgggacgattgtaatgccatcaaaaagaacaaaaaagggaaagaaggggaataaatacaaagcaaattcctctgttgatccaactttgatgaagctcggatccttggatgagttattgaaagcaaggagaactgttctcgaccctccatgggagggctcaaatttgattcctggtgatgttctttggtctgatccttctttggagatgggtctttcctcaaataaagaaagaggcattggcttgctttggggtccagatatcactcaacagtttctatatacaaataatttaaagttaatcatcaggtcacatgagggtccagatgcaagagataaacgacatgatcttttaggaatggacaatggatatacaattgaccatcatgtggaatgtggaaagttaataactcttttcagtgctccagattatccacagttccaagcttcagaggaccggtacaacaattgtggagcatatattgtcctcaatcctccagatttttccacccctgttttccatagctttgaagctgtaaaacctcgacctaaggcaaatccctactatgattttgaagatgtaatagactcagatgaagagttaaatttaggcgctatggacgatggctcggcgagcagttgatcacatcttttgtcttgtatcactgtgtaactgtatttagcatcccgaacagggaaacgccaacaagtttttgttgcaaccgaaactgatattgcaggctttaaaacaaaattcgtgtcatgtactcatgtctgccaagtttttgtctgttggcttcttttgggctaatctccctatgcacatcatttgtacctccaaaaagaaaaattatgtcaagtaaaaggccttgtgtttgcagttctgagctcttgatgcacgaactcatcaagaggatttcgacaaaaaaaaaaaaaaaaaaaaaaa

SEQ ID NO: 2215 - DNA, 807 bp, Oryza sativa
  Clone ID: PAT_MRT4530_102006C.1
atggggggcggagccagttgtgggtggcggagcgggcccgaggacgacggcggccaccggaggcggaggccaaccgggtgcacggggacgcgcggtggccgctcctcctccgagccgtcgcgccgcgccccatcccacctccccgtgccaggatcggcgatggagactggcggacgcggttccaccgaggacgcaggcgtgaatggcgaccgggaatcccgctccaccaccccagatccaaatgcgagctcggtgatgacacatggagcttgggtcggcggccgcgcgtgcgtcggcagcagcggcggcggccacgacagcaacaatgccggcacactagtgccagcgccggtgccggcgtcgtcgtcgtcggtgagcgcggggaggccgagccggcggccgcggtggtggcggatgtggctgcgcgagagcgaggcggtggtgatggagtcgacggagcagagctggagctgtgatgacgctttctctcgtggcccaatcttctgtgctgtctccggaggccgaaatggacttggacttggaattatcattggaacgtgtgaagttatgtgcgtttccgacgaagggtcatccttggaggtatctcatcatgaaaagcaccctcatattcctgcaaaagaggatgtcctcatcaagctggtggacagcatgatcaagatgctgtgcaccaatggcgtctggtggctggaggacctgcaggacctcctcgcctgctacctctcgctcaacgccgccgagcaccaccgcaccatcgtcgcactcttccgccgcgtcatcctcgtctga

SEQ ID NO: 2216 - DNA, 398 bp, Oryza sativa
  Clone ID: PAT_MRT4530_102007C.1
gaaacgtatctgtttacattgatccagttatgcaatggcagcgatatggcgcgcgatccgagcatgcgccgtcgaggctatagcacacctagcaaaaactataacactaacaggcaaacagtctcaaacagacaatgaaaattgatgaatggagccgatccgaacatactatggagctgaccccatcggcgtctacaccgccgatgctgcccaagaagctccacacgctcggtccatgctagaatccctgaggtccctagggcatgggtaactactattactactctcgataatatatttgtcctaaatcgatccatcttccacaacctaccggctgatcaaacaattaatcccctttccgattcgattcgattcggatcggttcgctttcagactcg

SEQ ID NO: 2217 - DNA, 580 bp, Oryza sativa
  Clone ID: PAT_MRT4530_102008C.1
tttttttttttgatgatgatggttgctcgattagatagatagataacttgtccatgagggccccaccgctcagttcctccagttcccgtcggagttgccgccgtcgcggctgccgtagccaccgacgtagccgccggcacacgccacggccgccaccgtagccgccgccaccgtcgtagccgacttcacggcgctggccgtagccaccgccgtcgacaccaacggagccgccggccgcaccatagtcttcggcttcgacagactggccagaagcggcttcggcttcggcttcggaacgggacgacttggccttattgaccgggaaggttgaggcgtcgaactccatggcggttattccctgaaatggcttgcgcatgggctgattgcttgaaaacgttaaaaaacccaaaccgggccaacttcccggtttccgaacggttgatgacctggaattcaggaatctccccaaaggtggaaaaggcggtttcaaggaaccgtccgttgtgggccaagccaaggccgccaacaaacaagggttcctaattatccgtggccgccatgttttccaactaccccaatg

SEQ ID NO: 2218 - DNA, 1123 bp, Oryza sativa
  Clone ID: PAT_MRT4530_102009C.1
cgcgcacggcgaggacgagctcggggacgggcggtcggtgtgggcggtcggcgaggtgaggcgagcgtggcggcgcggaggcggacacatcgttgattcgattggcgaggtgaggacggcggcgcatggggggcggagccagttgtgggtggcggagcgggcccgaggacgacggcggccaccggaggcggaggccaaccgggtgcacggggacgcgcggtggccggtaggctccccctcctcgttgtgggcgcacggggacgcacggggacaccaccgccactgcagctcctcctccgagccgtcgcgccgcgccccatcccacctccccgtgccaggatcggcgatggagactggcggacgcggttccaccgaggacgcaggcgtgaatggcgaccgggaatcccgctccaccaccccagatccaaatgcgagctcggtgatgacacatggagcttgggtcggcggccgcgcgtgcgtcggcagcagcggcggcggccacgacagcaacaatgccggcacactagtgccagcgccggtgccggcgtcgtcgtcgtcggtgagcgcggggaggccgagccggcggccgcggtggtggcggatgtggctgcgcgagagcgaggcggtggtgatggagtcgacggagcagagctggagctgtgatgacgctttctctcgtggcccaatcttctgtgctgtctccggaggccgaaatggacttggacttggaattatcattggaacgtgtgaagttatgtgcgtttccgacgaagggtcatccttggaggtatctcatcatgaaaagcaccctcatattcctgcaaaagcggataatagtggaggatgtcctcatcattcccaccctcttaacaagggcccagctctgataccaaatgataaagatctggcccaggtggggttggccgaggcccaacaaattaagtgggtaatagtagaggatgtcctcatcaagctggtggacagcatgatcaagatgctgtgcaccaatggcgtctggtggctggaggacctgcaggacctcctcgcctgctacctctcgctcaacgccgccgagcaccaccgcaccatcgtcgcactcttccgccgcgtcatcctcgtctga

SEQ ID NO: 2219 - DNA, 1255 bp, Oryza sativa
  Clone ID: PAT_MRT4530_10200C.1
atcatatttttttttttttgatcatctatcttcatgattactctatctacaacacaagtcttatctaaagttcatcatattctctgcataaatttctattccattcgttacccgaaacatactagtgaccacaagaaaattactggtcatcaagggctttttaaatctatttgaggcgcatatgctaattataggagcgaagaatgctactatttacttcgcaattcatacctattttaccctgcatgggttcgtcgaactttcaatttggggcaaaactctctttcaagatcctgagggcttctccaatcccgtcctgagggatgccggcaaaaaaagctgcagctgtagatccactgccagcatagtgaatagcaactgcacatttaggaaacagccaactgtatggtattgatccagaaaagcaaaagagtcgaccattaaaaaggagattgctgtcacaatgaagagcagatgcctgatactcacttgattctgctactgggcactcaacaatttccttgctgaaaccatacagcaacaatggggattcttctcgcatataccacagaggaagatttgttactggatctgtaaaaggaattgggctaagatttagactatcatttctccatgatccccaactttccatgaacaatgcccacatccagtgggtaatgtctgtccagcaaaccatgttcaggggagcttcttgaaagtacttgtatagaagaggaagactttgtttaaattggcgttcaaatgatgcaggtgcactgtatggaacaaaatagggagcagcaatgatgcacttaacttggaacaattctgcaagatgccaaccttccaacgcaaagaagttgatcacaatgaaatcaccatgagtgctcatgtcatttccaaaaacattttcgacggcagacaagcactctctcctgtgctccacttgaatggtctttttcctctgcgaaaaggagtcatgctcaacatttgattgaacagaatcacatgagatgctctcgagctgttcggcagcaaggacaggtgggcttgacacaggcatatatctaacattacagtctgctagatgtgtcgacaagctctgatgtgctgaatgtgtgatgaacactacaccatactgtcgttggtcctgcgcaaaagctgcagcaagtgcagctatggggaagacgtcgccgcgggtgccgaaggccatgaacacggcacgaggccgccggcctccgccgccgccgtccat

SEQ ID NO: 2220 - DNA, 260 bp, Oryza sativa
  Clone ID: PAT_MRT4530_102010C.1
acgcgcgcttcacaagcatcctgatccacgacacgggctgcttatcacgccagcaggggacgaaccccaacgcaacatccataagaggtttcaacgtcgcacacaccatcaaggtgcatgaccagggccggcgcatacataccgtcttgtgtggcgacattgttgctgtagaggggctacactgcgaagggcacatggagaaaccgagatgaccggatgaactcccacgtgaaggctctacaccgggccgactagaggtt

SEQ ID NO: 2221 - DNA, 1135 bp, Oryza sativa
  unsure (1)..(1135): unsure at all n locations
  Clone ID: PAT_MRT4530_102011C.1
atgcgcacaanatcatcaatcggtcctcttcacggtcctcgccgtgctcgtcgcgctggtgctcggctacttcgtggtccggtgccagcggcggcagaggcggcggcggcggcggggcgcggtgctgccgtcgcacggcgcgagggcggaccggttccagtcgggtggagggacgagcgggtacggcgccggctgcgccggcggggcggaggaggcgctcgtgaggttccccgggggcgaggggctcacggtgccgcgattctcgaggcgcccggggaggtggtggccaagtcgggccacagcacgctgtaccgcgccgggctgagcgccggcgaggcggtggcgctgctccggttcgtccgcccggtctgcgccgcggccgccgacgaggccacggcggcggcgcggctcctcggcgccctgcagcaccccaacctcgtcccgatccgcgcgctctacgtcggcccgcgtggggagatgctgctcgtgcaccccttctacgccgccggctcgctccggcggttcttgcaagagggaatcaatgtttcacagaaatggggcataatttgcaagttatctattggcattgtcaagggactggaccaccttcactcagggtcacagaagccaattgtccatggcaaccttaagacaaacaacattatgcttgatgccgatttccagccaaggatatccgactttggcctctaccttctgctgaatcctgctgccgctcaacagatgcttgaagcatctgcaatgcagggctacaaggctccagagctgatcaagatgagagaagccaccagggagagtgatatctacagcttgggggtaattcttctggagatgcttgctcaaaaggaggcagcaaacagtagctcacccaatgcccgtgacatccacctgccttcctctttcaaagatctagttctggagaggaagatatcggatgcattcagttctgagctagtcaagcaaagtaagaactcaggcaaggagcagaacctaaatgcattctttgaactggcaactgcttgctgtaacccatcaccatccttgagaccagataccaagcgtatactcaaaatgcttgaagagatatcaagatgacngggtgccccccggtcaccgg

SEQ ID NO: 2222 - DNA, 332 bp, Oryza sativa
  unsure (1)..(332): unsure at all n locations
  Clone ID: PAT_MRT4530_102012C.1
gccccacttcacacgtcggggctctttctgtcacgttcgacaggtgcgcaaggtctttcaacggcgtcgagttttataaggccccccccaccgatgatgacgacgaacaaatcccncctctagtgatttacttcngctagtactacactctgctgctgatgctgctgctatgaataattactactacagcctggttgagagattgtaccattagcctggcctccccantggcataatgttccattctgttccgcatttcgaacgaatttggatggatttgatcaaaaacttcaatggaatccccatttttataaaaaaaaaaaaaaaaaaaa

SEQ ID NO: 2223 - DNA, 123 bp, Oryza sativa
  Clone ID: PAT_MRT4530_102013C.1
gagcagcattatgacaaaattgacaacacttgctcctggaccgtgacaaagggagaaggttacattttactggactaatattcaacctgacgtcgtggactttttggaggaaggctacgcacc

SEQ ID NO: 2224 - DNA, 220 bp, Oryza sativa
  Clone ID: PAT_MRT4530_102014C.1
atgcacgtggttgatggagattctatatggtatacgatggaggtattgtgtacgtatgggatgcggagtcgaatttggaaggagtccaaatttggtacgattggttatataaagtttctttcttgtactaaaaggtttcctaaagtgtttaagactcttaatatgagtttggttcgtggctttaagcttgctacctcatgtataaaataaagggggagcg

SEQ ID NO: 2225 - DNA, 471 bp, Oryza sativa
  Clone ID: PAT_MRT4530_102015C.1
ggcccccccggacaaataaagccggaacactaaaaaagaacccacaaacggggggttggaaaccctcacaaaggggggggaaaaaaccaaaaggaaaaaaccggaaaaaaaggcccccgcatttttggattcaaaaaaaaaacatccccaggcagccaaaaaaaaaaaaaggggcaaaaaaaaattttttaaacccccccggaaaaaaaaaaaaaagccccccagaaacaaaggggttaaaaaccagatgggtggaaaaggcttttcaaaaaaggtttccccaaaagcgggaggggggcaaaaaaggccgggaaactgggctttacaagggagccatttaaaaccattttttcaaaaaagaagggccccttttttaaagggaacaagagggggagtccacacacatttccaaaggggggggccaaaattcccacaaaaagaggaaagaattcgaaaaaagctagcccattc

SEQ ID NO: 2226 - DNA, 3105 bp, Oryza sativa
  Clone ID: PAT_MRT4530_102016C.1
atgggggccgcggaagaagagatcgagacgttgggagaacgcgtcaccgagctaaccaccaacatcaacaacttgctgggaaccatgcaagggcttgagaagtggattccaagtgttgatgcgggaatcaaggatctgcggagcacggtggaaggaattgccgctcgcgtgacggatctcgaagcaaggcctcaggcgacatcagcaatggcgacgccaatgcccgatgggcaccgcggagaagaatatcaccagggttttgactctggagccaactcggttcaggatcgaaccctggtcaagggtaagccgatttttcacaactcgccagttaattttgatttgtgggagaattctaagagtggggctttgggattccagagtggtggacgagccggaaattctaggttgcctaagtctgatttccccaaatttgatggtgataatcctaaattgtggaaaaccaatagcgagaaatactttagtatgtaccagacttatgaggaaaggcatagtgttgaaagctggtctgaattgtgtgtagcagtgcatagtaagtttgggagggataggtaccagcaacaccttgaggaactagatggtcttagccaaatgagtagtgtagaagagtattacagcaagtttgaagagcttatgcataaggtgctagtgtataacaaggggtatgatgagactttctttgttacaaaatttgtgggaggacttaaaacagaaattaaggcaacaatcaagctgcagaagcctcgttctgttgatgctgcgttgtttcttgcaaaaacacaggaggagcttttgggggaaatgaacaagaaggcaccagtgaagcagacatttaaagagagctacaggactttcaacaagactccatatcaggggaaaggcattttgggtgcaactcctgaagagggtaaaaagttggaagaaaaacccaagtggaaagagaggacacaagtgaccaaagtctgtgcaattacatgtgttggaagagcttttggaggggtgattggtaagaaaaccatacgacttcaagggctgattcagaaccaagagttgttgatattagtggattcaggaagttccagcagtttcatagctgaacatgtggttgataagcttcagctgtcaactcaagatattgtatccacaaaggtaaccatagcagatggggggcagttatcttgcacaaaggtggttccaaatgttgagtggtggtgccaggggcaaagctttgctagtgaactgaaggtgttgggacttggcagttatgacatgatacttgggatggactggttggaaaaattcagtccaatgtggattgattggaagagaaaaaggatgagattccaacatcagggaaacaatgtcactttgacaagggtgaaggatcagacagatcattgtaggctaatcttagggagacagttagcagtaatggcaaataggggggccatatctcaaatgattcatctctgtacaatcagggaggagcctgagcagcaagagaagatgccctctgatgttcaacagttattgcaggagtttcagcagaaaaaggatgggacctggagattctgtgtggattatagagctctcaacaacattacagtcaagaacaagtatcccatgccagtggtggatgaattgctagatgaattggcaggatcacaatggtttactaaactagatttaaggtctggataccaccaaattcgactactggagcaggatgaatgcaaaacagcctttaggacacatcagggtcttcgaaatctgacagaacatgtgtcccatctcaaggcagttttggcaaggctccagcagtaccaactctttgttaaaattagtaagtgctcttttgctcagcaatacctggagtacttagggcacattattgggatcgaaggagtggcaactgatccagccaaaattctggcagtccagcaatggtcaccaccaaagactcaaaggcaacttcgaggatttttgggacttgctgggtactacagaaagttcatacaacactatgacatattggcaaaacccctcactgaattgttgaagaaagatgtgccatacaagtggactaatgttgaacaacaggcttttgacatgatcaaacataaattggttcaagctccagttttggcattaccagacttttctaaagaatttgtggttgagacagatgctagtggtacaggcattggggcagtcctgatgcaagatggacacccactggctttcattagtaaggctctcagtcccagatctcaagctatgtcaacttatgaaaaggaatgtatagctgttctgctggcagtggataaatggaggcagtatttgcaacatgcgccctttgtcattcacactgatcacaagagtttgatccatctgaatgagcaacggctgacaacaagtattcaaaacaaggcttttatcaaattgatgggtttacaatataagatcagatacaagaaaggagaagacaatagggttgctgatgccttgtctaggaaagatgagcagcaagaaatctatgcaatttcaacaagccagcccaaatggttggagatggttgtggaaagttatcacaaggatccagccactatgcagctgatgcagaaactagctcttcagcctgagggtatggatgattttgctttggtagatggggcttggtacacagtcagcatggactttgtggagggcttgcccaaatctggaggatatgacactatactggttgtggtagataaattcacaaagtttgccaagttcatccctttgacctacccatttacagctcttactgtggcaaaagctttcattcaccacatttacgatgtgtttggaatgcctcaaccctatgttcagatgtcagtagttcgacgctcttgtcaaaaactctgttttcgatattttggaccatacaaggtgctggctcgagttggtgcagtggcatatagattggagttacccacaggcagtgcagttcatcctgttgtgcatgtgtcattgctgaagaaggctctgaaacccaacatacctatgtccaacctgaagcagttctacggagacaactga

SEQ ID NO: 2227 - DNA, 346 bp, Oryza sativa
  Clone ID: PAT_MRT4530_102017C.1
aacctatcacaccatcttagggggcaggtgttcaaaaccatctcccaactacacactaatttacccgtacatataacacattctatcacccttcataaactcatcccttgtcttgcatgcttacatttatattaactacaggccaacaaatactgcacccggtaaacacatttaacactttggcgagatatccgcatcgccggaaatcaaggtaagcaagttgaaggcgaagcggtcccttaggagctcggagagggtctcgatcacttcctcgccactaacttaggcccgtatgaacaaccccagcttttaaaacattcccagacgtcctttcttaatctcttta

SEQ ID NO: 2228 - DNA, 1624 bp, Oryza sativa
  unsure (1)..(1624): unsure at all n locations
  Clone ID: PAT_MRT4530_102018C.1
taatacgactacctanntagggcgannattgggtacccccctcgaggccggcccggaaaaaaaaaaaaaaaaaaaaaaaaaaaaaaaaaaaggaatgctaattggcggttgaagcctccgcttgcggcggcggcaggacaaggaggaggaggaggaggaggaggaggaatttgatgtagtgaagaagatctgctactttgttattcaatctcactgacttgccacatgcaacgatcatgggccttaatccccgccaaaaaatgtggtgctagtgggagggttggtggaagtatcattggcttatgatgacaactacgacactacaaatcaattttcacaatgaatctgctcttaatttagtgagagcaaccatgaggacgatgcttcacagattgcagcagcgtcctcaaccaatcaattgcaagcaatttctccatcacagaagtcaccaatgggctccgccaagctcattgctgtagtcctcctcccggcccttctggccttccaagctccaatggccacggcagtaaactccaacctcttccgggactacatcggcgccatcttcaacggcgtgaagttcaccgacgtgccaatcaatccgaaagtccggttcgacttcatcctcgccttcatcatcgactacaccaccgagacgaacccgccgaccccgaccaacggcaagttcaacatcttctggcagaacacggtgctcaccccgtcggccgtcgcgtcgatcaagcagagcaaccccaacgtgagggtggccgtcagcatgggcggcgccaccgtgaacgaccgcccggtcttcttcaacatcacctccgtcgactcgtgggtaaacaacgctgtcgagtccctcaccggcatcatccaggacaacaacctggacggcatcgacatcgactacgagcagttccaggtcgacccggacaccttcaccgagtgcgtcggccgcctcatcacggtgctcaaggccaagggggtgatcaagttcgcctccatcgcgcccttcggcaacgccgaggtccagcgccattacatggcgctgtgggccaagtacggcgccgtgatcgactacatcaacttccagttctacgcctacggcgccagcacgacggaggcgcagtacgtcgacttcttcaaccagcagatcgtcaactaccccggagggaacatccttgcgagcttcacgacggcggcgacgacgacctcggtgcccgtcgagacggcgctgagcgcttgccggactctgcagaaggaggggaagctgtacggcatcttcatctgggctgctgatcattccaggagccaagggttcaagtatgagacagaatcgcaagcacttctggctaatgccaccatcagttactagctagtagctagttttgtttgctgcattattgtttcacatttttaaacaaagatcacaagagctgtactatgaaaataagcaactcaaatttgaaatacgaatttgaattagcatctagtatatatctagccgtgcatcattccagctggaatttaagataaaaccccaaccgtgttatacgtacagacatgcttatgttgtgtatgtcattattggattgttcctgttttgttgaaaaaaaaaaaaaaa

SEQ ID NO: 2229 - DNA, 689 bp, Oryza sativa
  Clone ID: PAT_MRT4530_102019C.1
agtttcagcaggtttttcaggaacccatagaattgcctcccacagggattttgaccacagtattccattgacacctgatgcaaaaccagttaacatcaagccttataggtatgccccaacacagaaggatgagattgaaagacaaatcaagacaatgctgcaacaaggcataattcaacacagtgtaagcccctttgcctctccagttctgcttgtgaagaaaaaagatgggacctagagattttgtgtggattatagagccctcaacaacattacagccaagaacaagtatcccatgccagtggtggatgaattgctagatgaattggcaggatcgcaatggtttactaagctggatttaagatctggataccaccaaattcgactactggagcaggatgaatgcaaaacaacctttacgacacatcagggtctttatgaattcaaagtgatgccatttggtcttacaaatgcaccagcaaacttttcaagggctgatggatacaatctttgctgacatgatcaggaagtttgttcttgtttttgttaatgacatactcatctatagtcaaaatctgacagaacatgtgtcccatctcaaggcagttttggcaaggctccagcagtaccaactctttgttaaaattagtaagtgctcctttgctcaaccacacctgaagtacttaggt

SEQ ID NO: 2230 - DNA, 1293 bp, Oryza sativa
  Clone ID: PAT_MRT4530_10201C.1
atgacgatggagaaacgcacgtcaccgcaacaaccgccaactttattacccaccaactgctcgacgcatttcctctacgcgcgcgcgcccaccaccgccggcgtcacacctcgccagccgcatcaaagcttccgctcctacctcgcccaaatgggcggcaccggcgacgatggcgccaaggcccctgcggccgccgcctccatggacgtcgtgtcgtcgtcgtcgtcgtcttctccggcgccggcgccgtcggtgctcaagtcggtgctgctctcctacgcgtacgtgagcgtgtggatcacactcagcttctcggtgatcgtgtacaacaagtacatccttgatcccaagatgtacaactggccattccccatctccctcaccatgatccacatggcgttctgcgcctccctcgccgtggtgctcgttcgcgtcctccgcgtcgtcgccgtgccggcgtcgccgcccatgacgcccagcctctacgccgcctccgtcgtgcccatcggcgcgctctacgcgctgtcgctctggttctccaactccgcatacatctacctttccgtctccttcatccagatgctcaaggcgctcatgcccgtcgccgtctactccctcgccgtcgcgttccgccgcgactccttccgcagcgcctccatgctcaacatgctcagctcggcatctccgcgggcgtcgccgttgccgcctacggtgaggcgcggttcgacgcgttcggcgtcatgctgcagctcgtcgccgtcgccgccgaggccacacggctcgtgctcatccagatactgatcacctccaagggcatgtcagtgaaccccatcacctcgctctcacatcgcgccgtgctgcctcgtgttcttgacgccgccatggtacttcgccgagtaacttcgtttgagtacttgcagtggcgccgccgcccggcccgacgtgttcgtgttcgggacgaactcgctgtgcgcgttcgcgctcaacctggcggtgttcctgctggtggggaagacgtcggcgctgaccatgaacgtggccggcgtcgtcaaggactggctgctcatcgccttctcctggacagtgatcaaggacaccgtcacgccggtcaacctcgtcggctatggcattgccttcctcggcgtcgcctactacaaccatgccaagctgcaggggctcaaggccagggaggcagagaggagggccgcgtcaatggcgacggcgaaggacggcgacgcagaagccggtgcgcggctgctgccggagaaagatgccggtgagcagaagaactga

SEQ ID NO: 2231 - DNA, 3318 bp, Oryza sativa
  Clone ID: PAT_MRT4530_102020C.1
atggctgaaggcgttgtaggagccctgattgggaagttgggttctgccttagcaaatgaggcagctagcttcgcctcatcaattgtctgccatgaagcgtctgctcttgcaaggctctttggtgagatccatgaggtcaaggaggaactggagagcatgcaagcctttctccatggcgttgagcggttcaaggacacggatgagacaaccggcattttcgtcaagaaaatgcggggcctcactttcgagatcgaggatgtcgtcgatgagttcacctacaagctgaacgacaggcatggagggattgcagccaagatgaagaagaggatcacccatgttaagacctggcaccgtcttgcgcacaagctgcatgagatcaaggccaagcttgaaagagctgataggaggaatgttcggtacatcatgagaggttttgaccaagaatcagctaggaggagcactgatcattcaaaatataaatatgaagccttttatgttgcaagagaagacaaccttgtggggatcaagacgaataaggagttgctgttgaattggctcggagatgatttggaacagagtagtatgattacaacagtttgggggatgggtggagtgggtaagaccactttagtttcccatgtgtaccacactattaaagtggactttgatgctactgcatggttaactgtctcaaacagctaccaagttgaggatttgctgaagcatattactagtgaatttggcataccttccaatgctaccaagttgatggagaatattcataaccatttacaaggtaaaagataccttctaattctcgatgatgtttggggtgttgatgtgtggttcaatataagggatgcatttcctatggataaaaacagccgatttgttattacctcaagaaatcatcaggtagcattgctagcaacaaaaaattgtataatagaaatgaaacctctagaagaggagcattcatggcaactgttttgcaaggaagcattttggaaacatgaacagaaaatatgcccagcagatatagagactctagctcacaaatttgtggacaggtgtaaaggtttgcccattgcaattgcatgcatcggccgcctgttatcgtgcaaaacccctacttattctgagtgggaagatgtgtataatgagttggaggtgcagctgacgaataatgtgataattgatgtcaatattatcctgaaagtcagcttagaggacctcccatacaatctcaagaattgttttctgctgtgtgcattatatccagaggattataaaataaaaaggggtaaggtaacaaggcactggatgtctgctggatttataccggaaaaggagaataagacatttgaagaagttgcagagggataccttaatgaacttgtaaatcgaagcctacttcaggtagtggacatgaatgtggctgggaaagtgaccggttgtagaatgcatgatattatccggattcttgccatcaccaaagcaaacgaggaatgcttctgtacaatttttgatggaactagaacattttcagtagagggagcacgtcgcttatcaatccaatgtgcagacattgaacaattgagtttatcaggggcgactcatcatctccgtgcactgtatgttttcaataacgatatctgcattcacctgttgaattccttcctgaaatgttcgaacatgctgtctactttggatttgtcacgtgttcgtatcaagtcactgccgaatgagatatttaacttgtttaatcttcgtttcttgtgccttaggcatactggtattgaaattctctccgaggaaattggacgattgcagaacttagaggttttggatgtgtttaatgctggattatcgactatcccaaaagttatagcgaagctccggaagttgcgatacctgtatgttggcaatttatttttagaggacaagtacaaagtcgcagttttcactggaacaagggttcctgaaggcatagtgcacttgacaggattgcactcacttcagtatgttgagtcaaatgaaacaattttgagtcacctcggtgttttcacagagataagaaaccttggtgttgccaacacaagaactgaacacttttctggattatgcaactctatcatgaagatgatccatcttgtccatttgaggatttcagcgttagatgacgaacaagtgttgaaagtggaagcacttcgtttgcctccaactctctcgattctcgaactgaaggggcagctggagaaggagtcaatccatcagagtctatcatccttatcacacctccacaacctatccaagttggtaatggcattctcaaagcttgaccaagactctctttacagccttcagatgttgcatggtctatgctttcttcaccttatgagagcttttgaaggggagaaactgcatttttgtgcagaatccttcccgaaactccggacattacgagtgtgggatgctccaaatctcagacaaattgaaatagaagaaagtgcaatgcaaagccttgcaaggctaacacttcgtgactgtccagaactgatgacaattcctgatggcattgagcacctagcagctctggaggaacttcatcttgaacaaataatcaaggagagtgctcacggtggatatggcagatacagagagagcaaaaactcaaaccaacaacctctcatcgtctacctctgttctgctctactcctcctctcattcctcaatcgcgaacctgattccccttcaatctccgagcgtttcgccggaatccgagagttcgtgacatctggtatcagagctcaggttgggcgcatcctggcgaggaagaaatctcaagcaactcttactcagagaatgggggcggcggaagaagagatcgagacgttgggagagcgcgtcaccgagctcaccaccaacatcaacatcttgctgggaaccatgcaagggctcgagaagtggattccaagtgttgatgcagggatcaaggacctgcggagcacggtggaaggaattgccgctcgcgtgacggatcttgaagcaaggccccaggcgacatcagcaatggcgacgccaatgcccgatgggcaccgcggagaagaacatcaccatggttttgattctggagccaattcggttcaggatcgaaccctggtgaagggtaagccaatttttcgcaattcgccagttaattttgaaattggggagagttctgagcgtggggctccgggatctcagagtggtggacgagttggaaattctaggttgcctaaaactgatttcccaaaatttgatggtgataattgttga

SEQ ID NO: 2232 - DNA, 1083 bp, Oryza sativa
  Clone ID: PAT_MRT4530_102021C.1
atggaggaaggcggaggtggcgtggatctggtgaggacgttgccccgtgagcaagcgaaagccaggaaagcgtggcaacgaggcaaggtaaggagccaacatggatctaacaaggcgcgacatgtgacgatcactggtgcaggctccctcgtcaatggttggctgcacggtgacgggaggtggtgccttagcatcacggttggcgatgtaggttgccggatccgtccttggccgcagcttcctcgggcatgtccccttgctcagcctccggcatctgttgtcgctacccaccgagtctgttgtcggttgcctccgaagatagatatcagttacttctgtggacaacagacatcttcctggagatatcccacaatgggcatcagtaagactgaagtgaatctgctgcggttgcttgactcggctccgcggcagcagaaccaggctaaactcattcattatgtcaccacatcgagggaactgttggagaagctggcagcggaaaatacgtcagaagggatatcaagtattgcaaaaggaaggctaaatgagtattcagagaggattgaggaacttgccgcaaggcttgcttctctagtgcctggttacgaaaatgctgttgaagccatcagaaaagaagaaagttaccttgaaggggaacaaattagaagtccaatagccttatcccctggattgaggaggcgattgacagctctgcaagagattgaacaacctaccaatgcaaaagaaagaaatgttgcagaacctcttagattagatgaagcagcccaggcaaacatagagaaatataggaatctgcaagaagatttgactgatgagattgttgaattagcacgccagctgaaggatagcagtcttatgatgaaccagtctgtgcaagcaacagagaagatacttgattcaactgaaagggctgtggcatatagcttggcaggcactgaccgtgcaaatgcacaagctgtggaggatctaaacagggccttaatatccatgtccaagcctaaaactctattttgccattttgcaggatctaaacagggccttaatatccatgtccaagcctaa

SEQ ID NO: 2233 - DNA, 2522 bp, Oryza sativa
  Clone ID: PAT_MRT4530_102022C.1
atggagatggacgaagtcaggggtcgatggacatctctaggacaaatgaaggctacacgagctgcggcccgctgggacccagggtcgggttgccagttcggtctgaatcatcgtaggccttgggttaaggcaggagtggcaactgatccagccaaaattcaggcagtccagcaatggtcaccaccaaagactcagaggcaactacgaggatttctgggacttgctgggtactacagaaagttcatacaacactatggcatattggcaaaacctcgtactgaattattgaagaaagatgtgccatacaagtggactaaagttgaacaacaggcttttgacatgatcaaacagaaattggttcaagctccagttctggcattaccagacttttctaaagaatttgtggttgagacagatgctagtggtgtaggcattggggcagtcctgatgcaaggtgggcatccactagctttcattagtaaggctctcagtcccagatctcaagctatgtcaacttatgaaaaagaatgtatggttgttttgttggcagtagataagtggaggcagtatttgcaacatgcgccctttgtcattcacactgatcacaagagtttgatccatctgaatgagcaacggctgacaccaagtattcaacacaaagcttttatcaaattgatgggtttacaatacaagatcagatacaagaaaggggaagacgatagggttgctgatgatctgtcttggaaagatgagcagcaagaaatctatgcaatttcaacaagtcagcctaaatggttggagatggttgtggaaagttatcacaaagatccagccactatgcagctgatgcagaaactagctcttcagcctgagggcatggatgattttgctttggtggatggggtgattaggtttaagggaaaattttggctaggcaactatcatgaggccaaacaggcagtattgttatcattgcacagtagtgggattggaggtcactctggcatacaggctacctacaaaaggatcaagcacctgttcatgtggccaaaaatgaagaaatatgtcattgagctaaaactgaacattgcaagacaccaggcttgccacacagttagcatggactttgtggaaggcttgcccaaatctggaggatatgatactatacttgttgtggtagataaattcaccaagtttgccaagtttatccctttgactcacccatttacagctctcacagtagcaaaagctttcattcaccatatttacgatgtgtttggaatgcctcaagttataatttcagatagagatagagtgttcaccggtgcactttggcaggagctattttggttggccgatgtgaagctgaacatgagttcatcctatcacccccaaacagatgggcaaacagagagacttaaccagtgtttggagtcatatctgaggtgtacaattcatgcttgtcccacaaaatgggcagactgtgctttgggcaaatctccatatgaagtaatgtttgccaagcaaccaaatcagtttggtctagtgaatcttggagaaagcacagtacctggtatccaagtttggcttcaaaacagagtccatctcaatgacatcctccaacagcaacttctaagagcacagcaacgaatgaaagcacaagcagataaacatcgctcagagcgtcagtttgaagttggtgatatggtctttttgaaacttcagccctatgttcagatgtcagtagctcgacactcttgtcagaaactctgttttcgatattttggaccatacaaggtgctggctcgagttggtgcagtggcatatagattggaattacccacgggcagtgcagttcatcctgttgtgcatgtgtcgttgctgaagaaggtgctgaaacccaacatacctgtaagtaatgatttacccttaaattgctttgataatcctgatactgtccaacctgaagcagttctacggagacaattgattaaacgtggcaagttagctgttccatatggtttggtgcaattgtcggggcttcctgcttctctggcgacttgggaaaatcttcgtcaacttcaagcacgttttccgtcatcaccagcttggggacaagcgtggtgtctgctcccgtgactgccaggctgacttgtgggcccacattgtcggtgagagggggagcgtctccggccgcgcacgtgtggggcagagaggtggtgggatacacgcggttgccgccctcgtcgacgagccgctgccgccgctctcgcctcgcccactgctcgagcctgtcgcaccgtcgcgaggagtggtagagggagaacgaggagacaggggaggagcaggagagcgatggtgagctcctggtcgccgagcgggcgccggatctgccccacccatggccatcactgatggatccatgcgcatggggggcggacaggcggcgggatccgtcgatgagaggggggacagagaagggcaggagcaccagccactcgaactgctcaaagacggcgcgc

SEQ ID NO: 2234 - DNA, 505 bp, Oryza sativa
  unsure (1)..(505): unsure at all n locations
  Clone ID: PAT_MRT4530_102023C.1
actcgtgccgaattcggcacgaggtgaaatgccactcgaacccagagctagctggttctccccgaaatgcgttgaggcgcagcagttgactggacatctaggggtaaagcactgtttcggtgcgggctgcgcgagcggtaccaaatcgaggcaaactctgaatactanatatgacccnaaaataacaggggtcaaggtcngccngtganacaatgggggataacttcanctncaaaagggaaacaccccggatcnccacctaaggccccnaantnaccncccantaataaaggaaggtgggggtgcaaaaacncccanaaggtttgcctaaaaacacccccctttaaaaattgnntttncccccctgntcaaccccttnccctnaanatnaanggggctaaccnatnttccaaactntgggattccaattccccngtgggggaacntcccccccnaaaaggaacncccccaaaancggggtccacaaaacnaaacaaaattttgc

SEQ ID NO: 2235 - DNA, 390 bp, Oryza sativa
  Clone ID: PAT_MRT4530_102024C.1
atggcggaggtcaatgcgacaagggtgacaccacgaggagactggcaaagcggtgggctctggtgcagcggtgcccatgcgccggtggaagttagatggcattggagcaatgtgggactgccgggtgaaatcccagtttgcattctttttgagacctcgacggcagtggtggcggctctttcgtcgcttctctccttggagacgtcgtctagcgtccggcgagttgcggcggtggtgctcatggaggaagggggcggcaccgggggcagcgtcggcgggaagagcgcggaggggatctgcgccggcgccgctcgtggaggcaggggcagcggtggcgggaagcacgcggaggggaaggagcagcgtcggctcacggaggaagggagctag

SEQ ID NO: 2236 - DNA, 408 bp, Oryza sativa
  Clone ID: PAT_MRT4530_102025C.1
atgtcgctcacgggtggccgttgccggctggccgaccggacggacggacggacggcggcggcggcggcggcggcggagaagacgcactcggtgggtagcgacaacagatgccggaggctgagcaaggggacatgcccgaggaagctgcggccaaggacggatccggcaacctacatcgccaaccgtgatgctaaggcaccacctcccgtcaccgtgcagccaaccattgacgagggagcctgcaccagtgatcgtcacatgtcgcgccttgttagatccatgttggctccttaccttgcctcgttgccacgctttcctggctttcgcttgctcacggggcaacgtcctcaccagatccacgccacctccgccttcctccatgctacagcctctctgttgcaccattga

SEQ ID NO: 2237 - DNA, 778 bp, Oryza sativa
  Clone ID: PAT_MRT4530_102026C.1
tcaatggtgcaacagagaggctgtagcatggaggaaggcggaggtggcgtggatctggtgaggacgttgccccgtgagcaagcgaaagccaggaaagcgtggcaacgaggcaaggtaaggagccaacatggatctaacaaggcgcgacatgtgacgatcactggtgcaggctccctcgtcaatggttggctgcacggtgacgggaggtggtgccttagcatcacggttggcgatgtaggttgccggatccgtccttggccgcagcttcctcgggcatgtccccttgctcagcctccggcatctgttgtcgctacccaccgagtctgttgtcggttgcctccgaagatagatatcagttacttctgtggacaacagacatcttcctggagatatcccacaatgggcatcagtaagactgaagtgaatctgctgcggttgcttgactcggctccgcggcagcagaaccaggctaaactcattcatcatgtgcaaccttcaatcgcagtatgtcaccacatcgagggaactgttggagaagctggcagcggaaaatacgtcagaagggatatcaaggtacctgctaatttgcttttatcataaagaagctggcagcggaaaatacgtcagaagggatatcaagtattgcaaaaggaaggctaaatgagtattcagagaggattgaggaacttgccgccaggcttgcttctctagtgcctggttacgaaaatgctgttgaagccatcagaaaagaagaaagttaccttgaaggggaacaaat

SEQ ID NO: 2238 - DNA, 808 bp, Oryza sativa
  Clone ID: PAT_MRT4530_102027C.1
ttggcaaggggatgaccataagaaaaaaatacaggctcactaggtgggatgttgtttgtcaacccaaggaccaggggggtcttgggattcataatttggagatacaaaataaatgtcttttaagtaaatggttgtttaagttaattaatgcggatggggtttggcatgatttattgaagaggaaatatctttataataaatctataacccaagttgacaggaaacaaggtgattcccatttttggtctggtcttatgaatgtcaaaagtactttcttaaatatgggttcttggattgtcaataatggggaacaaatcagattttgggaagatagatggattggtaacttggcttttaaggataaatatccatctttgtacgcaattgttcggaggaaaacatcttctattgccactgttatgggatatgttccgcttaatgtttctttcaggagagctttagttggtcagaatcttgtttgttggcatcagttgtgtgcctctatagtacatattcagttgaatgatttgtctgatagttttagatggaatttccatcagaatggcttgttctcggtgaggtctatgtacctagctttaattaataatggctatatcgagagaaacaagtgtatttggaagcttaagttgccacttaagattaaaattttcatgtggtacctgcttaaaggggttgtgttaactaaggataatttggcaaggcgtaactagaatggcagcttgaggtgttctttttgtttgaagaatgagtcctatccaaccatctctttatggattgtcattttgcg

SEQ ID NO: 2239 - DNA, 267 bp, Oryza sativa
  Clone ID: PAT_MRT4530_102028C.1
atgcagaataaggtggcagagaacaaggcggcagtgaacggctcccaggttcacaatgtggtgctggaaggattcctgccatttgtcaacggttttcaagacccattcggcaacccgatggcaagggagaggtgcaccgggatggaggagaggacggacttggccatatggcccgaggcccaacggcccgacccaaggaacggccatttggcccggcccaagcatgacatggcccaacagtgggctgtgccggggccgatgccttga

SEQ ID NO: 2240 - DNA, 563 bp, Oryza sativa
  Clone ID: PAT_MRT4530_102029C.1
ttaatagatcaagaaactcaatttgaggggtttgttatataccggtaaatattcgctaccgtattcgttccgtctcgtattcgctccgtatctgtattcgataatattcgatttcatttccgtatccgagttttcgattccgattccgaaaaaaatatgaaaacgaatatgttaaagctagtttccgtccgtttccgatccgtttcaatccctagcttcagctaataccggagagattgcccaccgttgagcatttggactatgtagtccctcttatagatttctgggagtgctaaaaacatctccatttggtttggttcctttgcgaaaatacttgctgcgaagaccacctcgcttccagtaaggccaagcttttgaatttcagctatagctgccactttggccttttgttggggttcctcgcacatcttcttctcttgtgtatgatcggtaccacattccatcactgctgctaccatgctttcatggtgagtgatactctgaaaacgatcatgggcgtcttgaacccttcgatggctgatgctgcctgctgaactctgaca

SEQ ID NO: 2241 - DNA, 168 bp, Oryza sativa
  Clone ID: PAT_MRT4530_10202C.1
atggtggcaaacgctgcgttttatacggacgggtcccatccattggcagcgacgcagcgcgcatgcgcgcaacccatccagaccagaataccgcgagcccgtccagaatacggcaagagcccatccagaataccgcgagaaaccagcttgcgagatgcgaagtactaa

SEQ ID NO: 2242 - DNA, 234 bp, Oryza sativa
  Clone ID: PAT_MRT4530_102030C.1
atgaaaggggaagaagagggagaaaataaagaaaatgagggactgaagaaaggagaaggagatgagtccccccttcaatctggttctggatccgcccccgtctacgagggtgggggcggagagagttctcacccgcgggatctagcggatcttatatttgtggtggctcgcgtgagagggagctcggcgtgtttggttgtctacgtctgcctttcagacatcaattggagttaa

SEQ ID NO: 2243 - DNA, 3616 bp, Oryza sativa
  Clone ID: PAT_MRT4530_102031C.1
aaccaaacgccgccctcttcgctccaatctccatctccaccgcgcaggcgagcgcaaccctagcggcaggcagcgcaggcaggagggctcgttcgtcgtctcctcccaccgccgctcgcgggagagactctggttttttttggggggagtttggttggttggtggtgttcttgacggggcatggagggtgccgcgccgccagcgagctccgggtcggaggtgacgggtgcgggctcggggaaggtggacgctggcggcggcgccgccatggaggagcggttcgccgatctgtgcaagagcaagcttgggctggacgagagcataacgaggcaggcaatgcagctgttcaaggagagcaagagcatcctcctatccagcatgtcatccttgggcagtggatcgcctgaggagatcgagaggttctggtctgcttttgttctttactgtgtgtcaaggcttggcaaagcaggcaaagggaaggaagatggtggcatctcactgtgccagatattgagggcatttagtctgaacatcgtcgatttcttcaaggagatgccacagttctgcataaaggttgggtctgttctggctggtctatatggttcagattgggagaagaggcttgagttgaaggaactgcaagcgaatgtcgtccatttaagcctgctaagcaggtactacaagcgtgcctaccaggagctgttcctattaaatgatgccaagccaccagaaaattctgcagaaccaaatgcacaagcctctgactattatcgctttggatggttacttttcttggtgttaagaatccaaacattcagccgatttaaggatcttgttacatccacaaatggactagtttctgtgttggccgtacttattgttcacattcctgtgcggctaaggaatttcaatatcaaagagtcttctagttttgccaagaagtcagacaagggagtaaatcttattgcttccctatgtgaaaaataccatacatcagaagatgagttgagtaaagcaatcgagaagacaaatactctcatagtggatattctgaagaagaaaccatgtccagctgcttcagaatgtcagcaggataggttgtcttttattgatccagagggcttgacatattttaagaatttgctcgaggaagactcattgaaattaagtttgctaatgctggaaaaggaatatgagaatgcaattaacaccaagggagaattagatgagcgcatgttcgcaaacgatgaggacagcttgcttggcagtggaagtctgtcaggaggtgccatcaatttaccaggcacaaagagaaagtacgatgttatggcctcacctgcaaaatcaataacaagtccaagtccgatgtctcctccacggttttgtgcatcccctactggaaatggctactgcagctcaaaaatggctcctatcaccccagtgagcacagccatgacaacagccaagtggcttcggagcacaatctctccccttccttcaaaaccttccggggagttactgcgcttcttctcagcttgtgataaggatgtgacagatgacattacacgcagagctggtattatacttggagccatattcacaagcagttctttcggcgaacgtatatgtaccagcgtgcgaagcacaaacaggattgatgctatctggacagagcaaagaaaaatggaagcacttaagctatattacagggttctggaatcaatgtgcagagcagagactcagatcttgagtgggaacaatcttacatcgcttctgtctaatgagcgattccatcggtgtatgattgcttgttctgctgagttagtgctggccactcacaagacagtcacaatgatgttcccagctgtgttagagaaaactggcataacagcttttgacttgagcaaagtcatagagagttttgttaggcatgaggatacacttccacgagagctgaaacgtcatttgaattcacttgaggaacggctcctggaaagcatggcatgggagaaaggctcatcaatgtacaattctctgattgttgccaggccaacactatctgcagaaataaacaggctaggtttattggctgaaccaatgccatcacttgatgccattgcggcgcaccataacatttcactcgaggggctgccacctcttccctttcaaaagcaagaacattcaccagacaaggatgaagttagatctcccaaaagagcatgcactgaaaggaggaatgtgctggtggacaacaattcatttagatcaccagtcaaggataccctcaaatcaaagttgcctcctctccaatcagcatttttaagtccaacaagacctaatcctgcagcagggggagaattatgcgcagagacaggaataggtgtatttttgagcaagatagcaaagcttgcagctattagaatcagaggtctttgtgaaaggctgcaactttctcagcaagtcttggagcgagtgtactcccttgtgcaacaaatcattatccaacaaactgctctatttttcaatcggcacatcgatcagattatactatgcagcatatatggagttgctaagatatctcaattggcactgacattcaaggaaattattttcggctacagaaaacaatctcagtgcaagccacaagttttccgtagtgtttatgttcattgggcatcacgaagccgcaatgggaaaacaggggaggaccatgttgacattatcactttctacaacgaagtatttattcctactgtgaaacctttgctggttgagctagggtctggtactagtccaaacaagaagaatgaggaaaaatgtgctgctgatggtccatatccagaatctcctcggctatctcggtttccaaaccttcctgacatgtctcccaagaaagtttctgctgctcataacgtatatgtttcacccttgcgcacatcaaagatggatactttgctttccccaagctccaagagctattacgcctgtgtaggggagagtactcatgcatttcagagcccctccaaggaccttaaggttataaacaaccgcctaaacagtgggaagaaagtcagtggaagactgaactttgatgttgtcagtgatttggttgttgccagaagtctcagcgatcaaaatagcgcatcagcagcagcaacaacagcagatatcgccacaaaaacaccagtgaaattggagcagccagactgctagttgtttcagttataccacatcacctgtccaatacaacctactgacggaaatgctaatctgttaggtgtcagctgatctaatagttagatgttcagaagctccattttctctgtttatgtttcctgacatggggaaatttcctcagtgagcagctcttgtcttctgtcacatataaaagagctgccctgagaccccctaattaacctgcctcactttacttctgctttttctctttgaagagttgatactacagtcatgtaatgtagtagcaagtttaacagcttttgtaaatgaaatttggctcttgtcaagccggcttagttgtgaatttttcttgctggtttcacaaaagaaaaaaaaaaaaaaaaaaaaaaaactcgagactagttctctctctctctcc

SEQ ID NO: 2244 - DNA, 581 bp, Oryza sativa
  Clone ID: PAT_MRT4530_102032C.1
ctgcaggaattcggcacgaggcaaagggctcctggagtcctggttcttaaagatcgataacagctttcaccacaaagttctctgcaaattgcataagatcaaatacatgattcgttagtgcatccttgccatctgttttgatacttctatatgcaagtgatctggtgttctttggtgaattcatgtgtaaccactgctccttgaggcagttgaagggggtattggactagatccatcctacacataaccctcatgtgcaagggttctgcttggatatgtagtttttctacacaccattgacaactgataagtatatcagtaaccatgtttcctcctgcaatctaatatcgttctgtgttctgtcatttgttggttagtactgtttttttagtattgacctcaacttagtattatcattatccatgatttggtccctaggtggtttaaggagtaagtagcacatttacacctatccttgtacctgaatacattggttgtttcctcctcctgcaatctaatatcattaggtcatttgttggttagtactgtttatttagtattgacctcaacttagtattatc

SEQ ID NO: 2245 - DNA, 219 bp, Oryza sativa
  Clone ID: PAT_MRT4530_102033C.1
ccagttgatgagcgcttgcaggggaggtatccctccgccaccaccttctcaagattccccgccattactgtaaacggagcccaggcaacagtttggttgaggattggcacgaattccgctgttgactgggacatggcagaggaggaagacggagaatggtggaggagcggagaatcaaggggctattttgttggatttaccctgagagcaaaaccctaa

SEQ ID NO: 2246 - DNA, 2991 bp, Oryza sativa
  Clone ID: PAT_MRT4530_102035C.1
ctggccggcccggctagcagcctcgctctcgcctccctcgtctcctcgacgcgatgccgccttcgccctctctcaaaccctagcctccgcctccgcctttccctcccctccccgtcgcgggcgcctccgccgccgcgtcccccgtccccgtccccatccccatcctccgtccgctagcgccgccgctccgtccttcccatccagatcgcgccaccccgtccgcccgcgcgtcgtacgcctccaccagctgccggtcctccgcctcccggtcaagatccggcaccgcgccgctttcctccgtcgccgccatcctccgtcgcctccgcctcccgttcgagatctgcagccccttctctgcacgtcggtttctgcgctgccgccaagaaggtttcaattttggtaggaacaccatctcaagtgcttatttagcagatatttgcttgtggcgagacagaaattggccctgtttgtgccggccgccctcgaaatccaatccacccgcatcgcatcccacccacgaacgcttcgccgcttgataaaccaaattccccaccgccgcttcgttctcgccgatccggagggctcgagatgaaggcgaggtcgaggtccagcaatggcgactccaggctctcggtgaggaagaccaaggcggagaaggacccgaacaagccgaagaggccaccgagcgcgttcttcgtgttcatggagcagttcaggaaggactacaaggagaagcaccccaacgtcaagcaggtctcggtgattggcaaggctggtggtgacaagtggaagtccatgactgatgctgacaaggctcctttcgtgaccaaggctgagaagctcaaggctgagtacaccaagaagattgacgcctacaacaacaagcaggcaggaggcccggctacctcaggcgactctgacaagtccaagtccgaggtgaacgacgaggacgagggcagcggtgacgagtgatcgatggagggctgcaggtagtagggaaagttctcgagtcggcctaaccaaagtggacgttgctggttgctgctccttgctagtgttcggatgttgctgcctttagcttttagtcttagaggtctcctcctgtagcttagctctcatgtggtgtcctcgctctcttcggcacttgaccaccatcttgtcgtctgttttgtctcactgtctgtaatctaagtgagtactcgtatctgttgctgttttaaatctcagatctcagtagatggtgccatctgtgttagttgctgaagaggaaaaggaaaaaaatataacaagtctcttgcatcctgtttaatgatgcatccggatctgtcagttcgtttaaaaaaaaaatacctttcttctgtaaccaagacagttcgcatttggcaagagagcgagggtggaaaatataattgcatccacacattgaaagatcatactgctgaggatattccgccattcggcaccatggctaacatcagaaccgtctctagcctcggggaggtcaacggtgtcctgcaagagatgggtatcaatacgattgatcaagctcatcaagttcaatttcgtttacacaagcaaacatcccttaaagaagcaacagatataaagatgatgatccgaactggaaggcatggattcaggttggttaaccctgagcttttagattgtaagtttgatgccagcgttaagctagaggagtggtacaataccatgctctttgtcatcagattcaagcatcagttcaaagtatagttcagactcaccctcactgtcaccttcaactagctcgccaacatcacttggtctttcgcccgcttcatctaatttttcccacactttggtgccatcatctaggtccccccttcaccaatcatctaacgaggaaccttcaaaatctggcctggggtcaatacgctctccctccaagacctcttctatagcagaaagaagaggagggttttcatctctgaagttaccatcattccaaaaggatctagtattaccaccaagggtaccgaccagccttcgcagagaagaggaagtcacagataagagtaataataatagtgtaaaacagcttactggtgtgtgttgcccagagaaatgcactggcaatacttcaacagtgcacactaaaactggaataactgagcgtactgacagtatctcagaggcttgcggtaatttacaactattagtctaccgttggcccagcaaggaaaagctaactactttcactcgcaaggatcttgacccaaaatcagttttgatttttgttactcctgaagacagcagaagtgaagcagttaaaacggtacacatttgggtaggaggtgaatatgagagcagcaaatgtgttgacactgttgattggcagcaagttgttggtgatttttttcatctaaaggagctcggcaatactcttcctgttaaggttttcaaagagcatgaaacggagaatcttttggaagtgctgaatgctcgttaatggtaggctcagtctgtaggtatcagcatattgtagtagcttaacaaagtcagccgtgaagtatgattgaatgaaggcatctcctccagaatcgctccatgcggtggtgattttcagcgaggtataagccgttacaactattccccttgaacatatagaccacagattccatttagtagaactgatgatggattggcaattggtgcctacctcatatgatttgcttatggtcagaaaatgggcaggaggctgccagaacgttgtatctgtgagttaaaacacacatggatcaggttttggcacaatttgggtgtatattctccgctcccctgtaatgtaagctcagaaactgggaggcaaccgtgtcgttttcaccctaaaaatttcttgtacatctcgaaaaagaaacagatcagatgtgtaatcctcttgtcttataagtccctccattggtcttaacttttaagctaacaaaaaaaaaaaaaaaaaaaaacctcagcccg

SEQ ID NO: 2247 - DNA, 441 bp, Oryza sativa
  Clone ID: PAT_MRT4530_102036C.1
atggcgactccaggtgagttttgttggtggttttgtgcttgtgctcgcgggtggtttcggctctcggtgaggaagaccaaggcggagaaggacccgaacaagccgaagaggccaccgagcgcgttcttcgtgttcatggagcagttcaggaaggactacaaggagaagcaccccaacgtcaagcaggtctcggtgattggcaaggctggtggtgacaagtggaagtccatgactgatgctattaggggttatgtcgtagttgctgtgccttgtaaggacaaggctcctttcgtgaccaaggctgagaagctcaaggctgagtacaccaagaagattgacgcctacaacaacaagcaggcaggaggcccggctacctcaggcgactctgacaagtccaagtccgaggtgaacgacgaggacgagggcagcggtgacgagtga

SEQ ID NO: 2248 - DNA, 602 bp, Oryza sativa
  Clone ID: PAT_MRT4530_102037C.1
atggacttttatgacgacgacgatgatctccttgctcaatggtgggagtgagaggagttgtccgatgatgatgactactacattgcagctgcccttcttacgaacatagagcataaaagaaccaaaagaaagcgtcgtagttcagtctcaggtcgtgaaataattcatagggacatgtttgctggaaatatacacatagatggagtttatggtaaatggtaagaaatacaccatgagttactatcttgctgatggcatatacccttcttgggccacttttgtgaagaccatttccaatccttaaggcttgtttgcaatggtgagggatcctgctagattttgggatacgaagaccctatggtacataatgtcagtttgtgtaatcgtgcgcaacatgattgttgacactgagcgagatgaagatgtggactttgactatgattggaggacagtgaggtgttgagaaaggaggagcaccaatgacgcaataaacctgtgctagagaagtttctaaagatacataaagaaattgaagattgacatgcacatgagcaactttgagatgatcttgtggaacatttggggcgcttcatggtgctcgg

SEQ ID NO: 2249 - DNA, 282 bp, Oryza sativa
  Clone ID: PAT_MRT4530_102038C.1
atgacgctcgccgcccgggttagggggataggatttctggaggttcctgtcctggtggctctagagggagggccgggggtgaccggcaggaccggcggcaacggcaggcgcgctgccgcgggcgatgcaggccagcaattgggagggaaggcggcgggggcttggggtagaggggttagtgttgggggtggagacgggagggtggcggcggaggcgggggctcttgacggtcgttaccgacaaagttcgaccatcaatttaactaaaataatggagaattag

SEQ ID NO: 2250 - DNA, 483 bp, Oryza sativa
  Clone ID: PAT_MRT4530_102039C.1
gggccaaaatccaaaaaaacttttgcaccttcatgtacatgaaatgaaattggctttacactttaaattttacacatttttacaagggggacaacaaacaagggcttggcacacttgaaaattttcaaacgcttaaatgaagagaaacaagctcatgcagaggattttttcagtgctttatccagcctgacattgaagggagttgagtgttgaatgcacctttttgtatttgcttgtcgtattggggattccattggttcctgaatctgatcttgaaaaacagggggcattggcttgcttggggctactccaggaacttcccaccgtacccaagatcgccttttcacggttatggctgggagaccttcgtggagatgatgtaactgatgattgcttaagggcatcgaccgtcaaagcacccaggacaggcctttcattttggtttacagttgaaatggaacaaggggatccactttgcacctt

SEQ ID NO: 2251 - DNA, 301 bp, Oryza sativa
  Clone ID: PAT_MRT4530_10203C.1
cggcggcagcggcggaggatacgggaggaagaacggcaatggccaatacgtcgtcggcggcggcgaggaggaggagggcgtggagagtgcggtggatgagaaggccggtgtcatgatgacaccggtgccgtggtggtgctgggcggcggagaaggcgccggtgacggcggcgaaagcgaaggccaccgacggcggcgctcgtcgtgcgccgccggcggcggaggcggtggaggactccggaggccacacggccgagagcaacaggctcttctgggaggcctgcattgcccatggctactaa

SEQ ID NO: 2252 - DNA, 2098 bp, Oryza sativa
  Clone ID: PAT_MRT4530_102040C.1
cccccgcctccgccgccaccctcccgtctccacccccaacactaacccctctaccccaagcccccgccgccttccctcctggctccggcggcgatggaattccctcccggctcccgactcaggccgtagccaccgccggagcccccgcccccgcgctaacctattaggattcactgcccccgccgccatcaccgacccaattgctggcctgcatcgcccgcggcagcgcgcctgccgttgccgccggtcctgccggtcacccccggccctccctctagagccaccaggacaggaacctccagaaatcctatccccctaacccgggcggcgagcgtcatcggtaacctccagcggcacattttccgcagcccaccccaagcagaggccccgctcctcactggcccactgcccccggccggcccggcccaacggctagctgtggccccgccgtataaatacgccggtcgccggtcgcctcaaaccctagcagcctcgctctcgcctccctcgtctcctcgacgcgatgccgccttcgccctctctcaaaccctagcctccgcctccgcctttccctcccctccccgtcgcgggcgcctccgccgccgcgtcccccgtccccgtccccatccccatcctccgtccgctagcgccgccgctccgtccttcccatccagatcgcgccaccccgtccgcccgcgcgtcgtacgcctccaccagctgccggtcctccgcctcccggtcaagatccggcaccgcgccgctttcctccgtcgccgccatcctccgtcgcctccgcctcccgttcgagatctgcagccccttctctgcacgtcggtttctgcgctgccgccaagaaggtttcaattttggtaggaacaccatctcaagtgctgatttagcagatatttgcttgtggcgagacagaaattggccctgttagtgcaactaattcctttcgtctgtacccacgcgtccgaattattgcaaactttacagacagttcgcatttggcaagagagcgagggtggaaaatataattgcatccacacattgaaagatcatactgctgaggatattccgccattcgccaccatggctaacatcagaaccgtctccagcctcggggaggtcaacggtgccctgcaagagatgggtatcaatacgattgatcaagctcatcaagttcaatttcgtttacacaagcaaacatcccttaaagaagcaacagaaataaagatgatgatccaaactggaaggcatggattcaggttggttaaccctgagttgttgaattgtaagtttaaagccaaggtcaagctagatgtgtgctacaagaccatgttcaacgcatgcatggtgcaatgtgatcaggagctattaccactggaagcccgcattgcgcagctgaagaacctcattctttccacagacgaccagatcccacataggggacccgaagttgatcaaaggaatcgtggagtgcaactcatgctctacccggaaccccccaacgatcctgattatgagttcggtagtgcaaaccaacgagtcccatatcaagcagcatacgcaaatgatgcacagagaaatgccgcagttgctcgtgacaagcgtgctcagagggcagtttggaatactaatctccgtcttttggaggtgaagaaatccgtcctggagaagaagaagattgaattggagagagttctgagggaagagttcgacaaaatgattgaggagcaatctgacctgggggtcggatatgcgaactaccagtttcctcatctggcataggttttcaaagagcatgaaacggagaatcttttggaagtgctgaatgctcgttaatggtaggctcaggctgaatgtatcagcatattgtagtagcttatcatgtcactgttttgtctcactgtttgtaatctaagtgagtagtcatatctgttgctgttttaaatctcagatctcagtagatggtgccatctgtgtttggtgctgaagaggaaaaggatattataacaagtatcttgctttctgtttaatgatgcatccggatctgttagttcgtttacttgctttgcattgtgatgtctcgcttctg

SEQ ID NO: 2253 - DNA, 735 bp, Oryza sativa
  Clone ID: PAT_MRT4530_102041C.1
atgtacaataacctatttcaaactgaggcaaatagctctaccaatccagaatcatatagccatttttatcagctgatgcccagatctaagcaagctctacaaatccagaatccagataagccatctcatgattggagaagaatgattggtggtggccaattggtgaggcgacgaggagctaatcatgtcccggacgaagccagcgtcgcgatcgccatggcagcagcagcaggtggacgtttactcatccgcatggcccatttagcgcccccatttgcgatttttcgcagcatcacggagaaaagaaaagaaaagaaaaggcgcggatggacgcaatgcatgtgccgtcgcacagagctggatctcgcagcagcagcaccacaccacctatgctctacagcagctatcttctgtgcaagatattcagagagggaatatgtgtcactgtgtggctttggcctgcaaacgcctactaatcctggggaattgcagtggcaatgctcttcacattgccaaaaaccggtgccatgtaatcgtacccagttcagttcagatccactcagagcaatcagcaatgcaaatgggctggctgatctgatcatctccatggtgttcttggcagcaagaaaacgagaaccaaaccaagaacaacatggcagcagcaatggtgttccatggatggcattgcaaatcgatctccacaatggcagcagcaaccttttgactagtccagaa

SEQ ID NO: 2254 - DNA, 1507 bp, Oryza sativa
  Clone ID: PAT_MRT4530_102042C.1
tcgagacctaatttcccaaagaaaaaaaaaagaaaaacaaaatcccatctcccaccgccgccgcagcccaccaccagccgccgcctcggccgcgagatcgccggccgccgccatgtcgaatccggccgcctactacgccgccgtcgcgcggaagcagtacttctgctaccaatgcaaccgcaccgtcctcctcccggcctccgccgccgccgccggggcgctctcctgcccggagtgccgcggggatttcatcgaggaggtcaacgtccccgcccccgccatcatccccttccccttcgccttccccccgatgatgcccaccgccacctccgcctccgccgccgccgccgccgcggcctcgccgacccagtcctcctcctcgtccgccgccacgtcgccatccagcgacctctccgccttcctcaacagcatgctcggcccgctcaacctccgcaccgacgagcggatgccgggaaccacctccgccgcgggcacggcgacccccgaggacgagcccgacgggttcgacgcggtcacgttcttccagaactacctccagaatctcatggacggcggcgccaacatccaggtcctcctcgacgacgccagcgtcggcctcgcccccggcatcggccgcgtcggcggcgccagcttcggggactacttcgtcggcccgggcctggagcagctcatcgagcagctcaccgagaacgacccgaaccgctacggcacgccgccggcggccaagtcggctctctccacgctccccgatgtcgtcgtgaccgacgccatggtcgccgcggcggatggcgccgagtgcgccgtctgcaaggaggatttctcgcctggggaaggggccaagcagatgccctgcaagcacatttaccacgccgactgcatcatgccatggctggatctccacaattcatgccccatatgccgctttgagctgcctactgatgaccctgattacgaggggcgtaagaaatcaaacccacagccaactgctggcgttgatgccggagctgcatctgggagttctactgctgctgaggagcgagaggagagtggggagagtgcgaggttggtcgaacggcggtttaacgtgtcgctgccatggccttttagtggattgggatcgcaaacgccgcagcaggatgggagcaatgggggcgctggtgccagtggctcgaaggatggaggcgcatccagtgacaaaaaataagcataaatgtgcgattgattggaggttttcctcttggatctggcgttcaaaggtctacaatatttatgtgtcgctgccacttatatactatagacatcaaaagaccaaagaaatttacagtctttttatccgctggaacaattgttcattcttgttctcgctgcccgttaggtcatgtacacaaggcacggaaactgccgaggcaggaaacgtgcgttgggagtttgagacttttatgtgtagatttgttaattaaattcatcaaagtaccaaacttggagc

SEQ ID NO: 2255 - DNA, 658 bp, Oryza sativa
  Clone ID: PAT_MRT4530_102043C.1
atgtccgccgcgcggcgggggcttccgggaccatgggttaccccgagggcggcaggcgcctggatgacgagcccgtccacaaggagctgcacggtgttccgcagcgaggagacccacgtcgagcgcgtgcgcgaggtcaatggcgaagccgacgtcgagcaggacctcgaagatgcggacagtgatggcgtggactacctcagcggcgatgaggactacgtcggtcgcgagatccaccggccactgcccgcctcccggccgccggccactgcccgcagcacgccacccccaccagccgacgggcgtcatcgagaaaggaaaagtggctgctcacttgatgccttcttgccaaccctgcagctatacgctctcctccttgctggaatcactcattccctcacaatagcagctgtacctggacctaagttcactccgataatggccctctcccggaggtttctgaatctgatcgtggacaacggcttccctggatccaaatcgctgcgctgcatcgacctcacgctccagaatttcttcaacgctactccaccgaatcggaacggatcagagtccaaagttgtcgcggctgatgcctgcatccagaagcagaagaataataataaggaggaggaggaggccggcgcaagcagcatggata

SEQ ID NO: 2256 - DNA, 1599 bp, Oryza sativa
  Clone ID: PAT_MRT4530_102044C.1
atgtccgccgcgcggcgggggcttccgggaccatgggttaccccgagggcggcaggcgcctggatgacgagcccgtccacaaggagctgcacggtgttccgcagcgaggagacccacgtcgagcgcgtgcgcgaggtcaatggcgaagccgacgtcgagcaggacctcgaagatgcggacagtgatggcgtggactacctcagcggcgatgaggactacgtcggtcgcgagatccaccggccactgcccgcctcccggccgccggccactgcccgcagcacgccacccccaccagccgacggcgtcatcgagaaaggaaaagtgctatacgctctcctccttgctggaatcactcattccctcacaatagcagctgtacctggacctaagttcactccgataatggccctctcccggaggtttctgaatctgatcgtggacaacggcttccctggatccaaatcgctgcgctgcatcgacctcacgctccagaatttcttcaacgctactccaccgaatcggaacggatcagagtccaaagttgtcgcggctgatgcctgcatccagaagcagaagaataataataaggaggaggaggaggccggcgcaagcagcatggatagtattcaacttccaagccccatcttcaacttccaagcttcaagtgtggcccatcactgggagattggatgcttcccgcttagaggtcgcgaggtgctctgcattgaccagaatgggtgttgttttctcttcgacggagacacacgcaacgctgttaccatgcccggcctctgtcagcccaagcgattcccactctccctgttcgtccccagcaccggagttgataatgacagcggcagcctcttcatcatggagtctgttgttaaaccggagtcgacaagcagcgggccgcgcaatgatcagtttgaggcctttgtctaccgcacgccctcccctcgccgccacctttcgtccacctgccaatccctccctccaccccctttcgtccgagaccccaaattctccaacatacgcaccaagatcacctcgtacgcagtggttagtggtggctctgagatgtgcatatcggttgaaggggctggcacttactgcatggacacagtgaagcatacatggaggcatgtcggtgagtggatcttgcccttcaacggcaaggttgagtatgtacccgagctcaagctctggtttggcctctctgccaagaccaaccacttggctgctgctgacctatccgctatggacgacgattgcttccagcagccagagctattgaaaacttggatggagctttccccacccaagaattggtgggatttatccaactctcatcttgtcagcctgggctctggcaggttctgcattgcaaggttcttctacactcgccatctcatgggctactattatgatcaaatagttgataatcgttttgttgtcttgactggtgtcgatgtcgtgccgtgtgtccatgatactagtagtggcattgcaaatggcggcacgggggatctccgaatgatcaagtatgagtctaaacttcacgtgcctaatggcagcggtgagatcgagagagtgttctga

SEQ ID NO: 2257 - DNA, 1695 bp, Oryza sativa
  Clone ID: PAT_MRT4530_102045C.1
atgtccgccgcgcggcgggggcttccgggaccatgggttaccccgagggcggcaggcgcctggatgacgagcccgtccacaaggagctgcacggtgttccgcggcgaggagacccacgtcgagcgcgtgcgcgaggtcaatggcgaagccgacgtcgagcaggacctcggagatgcggacagtgatggcgtggactacctcagcggcgatgaggactacgtcggtcgcgagatccaccggccactgcccgcctcccggccgccggccactgcccgcagcacgccacccccaccagccgacggcgtcatcgagagaggaaaagtggtaagagagagggaagagactatgacaggtggggctcgcgtcagaggttacccaagtcgggtagacctatccctagcagatctccctactcccatccccgccggctgccgccattctgttgggggtgctgggtgctcctccttcccttctccggcttggcgaggctgctcacttgatgccttcttgccaaccctgcaactatacgctctcctccttgctggaatcactcattccctcacaatagcagctgtacctggacctaagaatttcttcaacgctactccaccgaatcggaacggatcagagtccaaagttatcgcggctgatgcctgcatccagaagcagaagaataataataaggaggaggaggaggccggcgcaagcagcatggatagtattcaacttccaagacccatcttcaacttccaagcttcaagtgtggcccatcactgggagattggatgcttcccgcttagaggtcgcgaggtgctctgcatcgaccagaatgggtgttgttttctcttcgacggagacacacgcaacgctgttaccatgcccggcctctgtcagcccaagcgattcccactctccttgtttgtccccagcaccggagttgataatgacagcggcagcctcttcatcatggagtctgttgttaaaccgaagtcgacaagcagtgggccgcgcagcgatcagtttgaggcctttgtctaccgcacgccctcccctcgccgccacctttcgtccacctgccaatccctccctccaccccctttcgtccgagaccccaaattctccaacatacgcaccaagatcacctcgtacgcagtggttagtggtggctctgagatgtgcatatcggttgaaggggctggcacttactgcatggacacagtgaagcatacatggaggcatgtcggtgagtggatcttgcccttcaacggcaaggttaagtatgtacccgagctcaagctctggtttggcctctctgccaagaccaaccacttggctgctactgacctctccgccatggacgacgactgcttccagcagccagagctattgaaaacttggatggagctttccccacccaagaattggtgggatttatccaactctcatcttgtcagtctgggctctggcaggttctgcattgcaaggtttttctacactcgccatctcatgggctactattatgatcaaatagttgataatcgttttgttgtcttgactggtgtcgatgtcgtgccgtgtgtccatgatactagtagtggcattgcaaatggcggcacgggggatctccgaatgatcaagtatgagtctaaacttcacgtgcctaatggcagcggtgagatcgagagagtgttctga

SEQ ID NO: 2258 - DNA, 332 bp, Oryza sativa
  Clone ID: PAT_MRT4530_102046C.1
atgtccgatgtggtgccgggggctactgtcggagatatgggcccgggaggtcggagcctcggggtgccacgtcatgcccctcgggcccttgcactactttgccccgaggccctcgcccaaccgccgtttggggggggggagcaagcgaggagggagtatgacccgtcccatcggggggtcgttcggacggcggccaccacaagtcttcacctattaatgagggaatgacagggttgtcccccgtgtcaggcgagggacggcgctgggccccgctcaaggataagctgtagtttagcttccaggcgaaggcacgggtcgagttccagtcaaga

SEQ ID NO: 2259 - DNA, 360 bp, Oryza sativa
  Clone ID: PAT_MRT4530_102047C.1
atgacaacgctgctgtgccgctgctttgcctacatgccgaggttgttcctgcaaaagtcctcggctgtccacgaccgtacctattctgtcacgcctccagtgttctcggtgacaacggcagtaagcggaggcgttcggctctacttgctggatggcaggggaggggagatggtgtccgtgcgtactgtcctccatgtggtgctcaacttcgccttccttccgcggacctccctccgacgtggtgcgcgtgcttgccgcatcgtcgtcccccatcacaagagggtggcgatcaacctcaccgccctccttggacctctcgccagcatggtgttcgatgaattgctgttgaggaagggataa

SEQ ID NO: 2260 - DNA, 579 bp, Oryza sativa
  Clone ID: PAT_MRT4530_102048C.1
acggcacgaggcggcggcgcgtggcagggcagcagcggcgagggcgtgcgcgcggcgcggcagcggctgcaaggacgggggctcgcgcggcgctccgacggggcagtagccaggcggcggcaacggccgctcccaggcgcgcggagtagccggcggccgtcgcggcggcggcgagggcgaccggtttcgcaccaccttcgcgcgctcatgccgggcaacgctgcgccggcagcggcgccggacggccgcctcccagcggcggaggacgagcagctagcgctcgacgacgtcgctggcatctccgagctggccaagtgcttcttttccgctcataaagttccagttcaggatgatgctactggtggttttgcacttcaggagtttactgcataattgtggagttagacgtggcgataggggtggatggaaggcggctggttgaagatttatgatgtccggaattaatttcagcgtgtgatatgttagctttgatttggttttgttttcgcttcagattgaattaatttggctgaggctagtttgtgtcaaaattctattaaaatgttgtcgaaattttat

SEQ ID NO: 2261 - DNA, 254 bp, Oryza sativa
  Clone ID: PAT_MRT4530_102049C.1
atgtctatttttactccctattgtttatgtgtcaggcctggcctgcggcccatcgtgccgtaccagcccggccgtgccgggccagcccaacgtgccggtggagaggcccaggcacggcccgatggtcgggctgggctggcacgggcctgacccctgacgggccgtgccgtgcttggaccgggccaaaacgtcgtgccgtgggccgggccgtcgggcctcgggccttttggccaactatactcacatcggcggga

SEQ ID NO: 2262 - DNA, 267 bp, Oryza sativa
  Clone ID: PAT_MRT4530_10204C.1
atggctgagtcagcagaggtagccccggcaggagtggaggaggcccacaggcgtgacaaggacgatggcgtaggcggaggcgccattgacacagcagccagggtgggcgcgtggcgaagcaggaatcttgcatggaaaaggtgcccaacattgacggacttgctggtggggatggttgcgtgtgatggcgcggtgctcgaagaagttgcccgtgaggccgaagcagccaaggccgccatggatcgcggcactgcggagccatcgtag

SEQ ID NO: 2263 - DNA, 1006 bp, Oryza sativa
  unsure (1)..(1006): unsure at all n locations
  Clone ID: PAT_MRT4530_102050C.1
ggtggttctggtcctcgggtggcggcgcgcggcggctccagcagctgtgtgtggcggcgatggcgacggaaggagagtgcgcagcggcgacaatagcaatgcatgcggcggtgatggcgacgaaaggcgagcatcggttctcgggcggtgacgcgcagtccctttgcctccctcctcttgccgcctctttccctcctcccttctctctccaccgccaccagcctnccttccctctccaccgctgtgtgggggaagagggcagtggcacggggaaggaggtgtggcagcggcgtgccatgggtgccgcttcatcgtcttcgtcgtcgtcgtcgtcgtctccgtcgccgcagggtcaagcccaagcccaagcccaaggtaaaccgaactacagtacatctctgactgatgaggagtggaggaagcgcctgacaaaagatcagtattacattactcggcagaagggcacagaaagagcatttactggggaatactggaacaccaaaaccccgggcatctaccattgtgtctgctgtgacacccctctttttgagtcatcgaccaaatttgatagtggtactgggtggccgtcatattatcaacccattggagataatgtaaagtgcaagcttgatatgtccatcatattcatgcctcggactgaggtgctgtgtgctgtctgtgacgctcatctggggcacgtgtttgatgatgggccacgaccaacagggaaaagatactgtatcaatagcgcatctctcaagctgaagaagacccagtagacctgtgaagattatggttaccatgtacctacacggctacactatccgactagttataagggatagattatgtatatagaatatgtaaagaattaagacttgggtattatgtttacttgtgtatcaaggaaatgacgtgtagtcctagttcggtaagattgtaaagtagttgtaggagatttaaaccatattaacttaaatctctatcttataaaaaaaaaaaagaa

SEQ ID NO: 2264 - DNA, 315 bp, Oryza sativa
  unsure (1)..(315): unsure at all n locations
  Clone ID: PAT_MRT4530_102051C.1
tttccatcacctgttcattctttcatctcatctcatcttctctccctatagctagatcaattgcactgttgctattatacctaatnaatcacccaatccaagattccaaaacctagctagtgtgatcatcagcttgtgatcgatcctagaangatcttaagataggttgttgatttgatcatcatcgttggagatgagagctggggggngcacggtncancaggcgctgacggcggaggcggcggctgtggtgaagnagtcggtgagcctggngcgtcgacgcntgaacgcatggttaancgccgttgcacgtgg

SEQ ID NO: 2265 - DNA, 320 bp, Oryza sativa
  Clone ID: PAT_MRT4530_102052C.1
cgcaatgggagagtcaatatatccttccgcagtggggacaacgtgctgtacgattgggccggcgatggcgcgccgcggcgctactgctcgtggcgcggggtgctctgcgacaacgtcaccttcgccgaggcggcgctcaacctctgggggctcaatcttggtggctaattcaaccagggtgttggcaatgcgaaaagcgtcgagagggaccaacttaaacctcgagggaggcggctggccacatccatgggggggggggctaataaacagccatgacatgcagcagcaggtgcgctagcagctcaggctgggagcgcaac

SEQ ID NO: 2266 - DNA, 564 bp, Oryza sativa
  unsure (1)..(564): unsure at all n locations
  Clone ID: PAT_MRT4530_102053C.1
gcgttattttcctccgtatgcccaacgtccaactcactgaagcaattcgatggcagtggttcaccgggatataactaatactaataatttcccaaaaaaaaaagtaaggagtagtactagctattcacgcatttagaaaaaagaaagggttgctcctaacattatataaatgactggtgtattgctatatttgtgtatctatatatgtgtgtctaacgagcaaagctgcagcaagcaggggagtggaaacctataaaagataattctacaatgtgatttgcttaagcttaaatgaaatttgactattaaagatcaaatgtatttgactctaagtacccatttagcttccggtttgctgtgaagggtgtattcactgattaagaatgaattttgataatttatgaagcaaataataaagcaatcaaatattgtattatcaggtatttctttttcttgatgttatgagttttaaagcaggaattgaaatgactgtaatatgattngcgttattggtctttacctgaagtgacaattatgaaatanacgtcctttcaaaaattgggt

SEQ ID NO: 2267 - DNA, 144 bp, Oryza sativa
  Clone ID: PAT_MRT4530_102054C.1
atggatgagaaattttataatttgataaagaaaaagggtatccctgagaagatgaagttccgcaaaatctccaagcaacactcagcaaaggttccttcagaaagaatgggtgacaatcttgagacaattcccagcaaagcttga

SEQ ID NO: 2268 - DNA, 384 bp, Oryza sativa
  Clone ID: PAT_MRT4530_102055C.1
atggccggcgccgccgggaacgccaccgccgcggtgatcatcgtcctcgccgtggcggccgcgctggtcgcgtcgtcgctggcgccggcggcggacgcgttccgcacgtatttcccggaggacgagcagcttctccgtaacaagggtagcggagccacggtggtggtgatgacggcgccggtactgtcagggagcccggtcgtcacaccggccggcgcgcccagcggcgccgagctcatcgcgttcgcggggcgcgacgacgtcgacgccgaagatggcgccggcgacggcgacgacgtctcgcccggccccgcgccgtcgtcggccggcgtgatcagcttggactcggagcgcgcggcggcggacgacgtgctactaccctga

SEQ ID NO: 2269 - DNA, 315 bp, Oryza sativa
  Clone ID: PAT_MRT4530_102056C.1
tcctcctgtttttttctccagccacctgattacccccaaagtgtgggtttttaaaaaataatgggggtttcaaaactaccacaaatgactgaacttctccgcatacatgtgactaaagcataataatttattgtaccatatgttgagaaattcctttctgaattcccaaatgtgagtgttttgctccttgaaaatgttaaatttaacaacgaacaggttaataatgccctacagtatgccaatacgccttgcctccttagcagacctatatctacataatgcattccaaacagcccacataatacatgcatcaac

SEQ ID NO: 2270 - DNA, 419 bp, Oryza sativa
  Clone ID: PAT_MRT4530_102057C.1
ggtgttttttgttaagcagagagaagttgtgccagtctgtcgtgttttttttttgggtaaaagcggatagcggaaggtcacgcgtagggagacggcggcccaggcgtgggcgggcggaggcacatgaccgggggcggggcgcacgaacaagaaagcggccaagcggccagcctgcgggcgaagtgcggcgaccggggtggcgaacacgcgcaccaccagggaggcggggggcccagccaacgacggcgggggcagcgggacaatgacggcgggcgcggcgaaccctaccctaccgagcccgaactgtacaagggccgaccgccaggcgcgcagagggggagcgactcctgacccggagatgccagggacctcgggtaggcaaaggagaaggggggtacgcagacacagagccaatagag

SEQ ID NO: 2271 - DNA, 960 bp, Oryza sativa
  Clone ID: PAT_MRT4530_102058C.1
tgcgtcgtcgggacggacaggagggcgcgcgtcctccacccggtcaccggcgccggcgccgacgacccgctgccgcacgacctcgccgaggagaacaagccatgggcggggtggcggctcgaggagaggttccacgcgttcacccacgcgttcggccgcgcctcctcgactggcgagtacaaggtgctccgcgtggcgagcctctcccccgacctgcgcgtcgagcagctcgtcgaggtcctcgccctcgaccgcgccggccgcgcccacgccggtgcgaggtggagaggcatgccgaggccgccgttccacctcgccggcgccagcaacgccggcatggccgtcgtcgccggcgtcgtgcacttcttggcagttgacatacccctccccttcctccccttcgagcacgacgacgacgacatccaccacggcgccattgctcgcttcgacctcgacaccgagcaatggaggccgcttctccgtggaccactcaacatccatcagatccaacaagacaacgatctgtcgccgccattgctgaccttgaccgagctgaaaggcttcttggttacagttcatcgcgatcgatctcatcaatcatcatcaatggatctttggtttctgatcgactctgaagaagaaacctgggtcaaagaatacaaaattcagatccaccttcgccctcgagaattctacgcgcatccattgttggtgttggatgagaggatgatcgtgttctgcgtgcgacccaaggggagggtgatggtgtatgatctggagatagggaaatgcaaggatttgggtgatggtgattgtgttgaggttggtgtgtacaagggatgtttgttgagttcagaaccaaaggttttgaattcgaatctggctggctacttggcttacaatctatctataagccacatggtggtgtttaaatcttctaaagatgaagatgaaggttaa

SEQ ID NO: 2272 - DNA, 111 bp, Oryza sativa
  Clone ID: PAT_MRT4530_102059C.1
atgtcctccgacgaggtcttcccccaaaagaacaatgctcctggtcgagttgctgcaagaatgacttacaaccgcgtcagaagccttggaaatttatcgtgggttgccaaa

SEQ ID NO: 2273 - DNA, 486 bp, Oryza sativa
  Clone ID: PAT_MRT4530_10205C.1
atgcgtgactggtatctcgacagtgccaaagagagagaaaagagagatgtgaagcgtttggctgcacgccatggccacgcagctttgggggcaaaagaaagccggcctcgcttgtgtctctctcctcaaaagagcagcgagcgaaagaagaggagaacgagaccatatgcatatgcatcggcgagcattttgcaaaggcagcaaaatgcgcggcgcatacgccacgcagctcaatgtgcagcgagcagcagcaggcacaagtactggtacgacactactaccatacttccatctcctctccaaggttccatccaaccagaggctcacgagaagacgacgtgctacggctacaggcttagcagacgacagactttcaggctttgcatctggtcgtctgagctgaataagccccaaattatcacaagcgacttcgtcacaggatcggaagaagcccaagaaattaatcatcacaccagtagaagctaa

SEQ ID NO: 2274 - DNA, 585 bp, Oryza sativa
  Clone ID: PAT_MRT4530_102060C.1
atgtgcacggtgactggcgacggcgacgacggcgaccacgacggaagcggcaacgacggcgaccacgaaggaagaggcggcaccgcgccctcccatcgtctcctctcccctccgccatatctgtccgaggggaggaggctgccgtcggggaggacggacgcggggaggaaggatccgcccggcggcgcgcacggggagcacggatccaccccggcagcggcgcagggagcacggccacggggcctcgggcggtggagcgcgaccgtcggcctcgaccttgtcacgactgacgccgccgggccgcgggcagtggtgctcggatttctgtggatttcgacgcatggatcggcggcccgtgacgaggaagagcagatccggtcgcctcttcctctccctctccgttggcttcatcgaaggcggccagatctggggagggggaggtcggggtggtgggttggtggcggcgatgtccggcggcggtggtacggtggccaagccgtggccaagggaaatggaggtggcagcggcggtggccaagggaccctggctgcgattggcagtggcgcattgacaacaacggagtga

SEQ ID NO: 2275 - DNA, 499 bp, Oryza sativa
  Clone ID: PAT_MRT4530_102061C.1
catgtccgccgccttcggccggcattcccgtctcatatggcccctctcttcctctctaatctatttcttttcgtttttaggtcgtcccggtcgccgtccgccgcgtgtcgacctccctccgtcgctcctcgtcgccggtcgccgccgtcccctccggtgaggacttcctccccttccctttcctttcccgattccccgtgcgtcgccgccgcccgcgctcgccgtcgccttcggtcgctgccgccgtccgctgccgccgatcgctgccgccgcccgcgccgccgcttgccgtcaccggtggacgcgcgcgcgtgccgccacccttgccatggccggccggccggccttgtgccgagccgagccgagccgggtgccgccgccccgttccttcccaccccaagccgctgaccggtgggcccgcgtgccggcgcccttcctccctctcccgagccgctgaccggtgggccccgcatgtcggcaccgccccctccgtgctgac

SEQ ID NO: 2276 - DNA, 267 bp, Oryza sativa
  Clone ID: PAT_MRT4530_102062C.1
atggggcggggtggtgtggatcggatcaggggcgggcgccattgcagcaccagccgctccgctccagtgtgctccccgccgcgcgggatctccggatctgggggtggtgggggtggcaggcagcgcagccgtcgcgaggttaagggaggtggtggactggtggtgtggggaggaggaggaggaggaggcggcgcggccagcaacgacgccccgccccgcactggcgcgctcgggagtcgggacgccggccgaggaagatttggttag

SEQ ID NO: 2277 - DNA, 405 bp, Oryza sativa
  Clone ID: PAT_MRT4530_102063C.1
atgggagtacaggctatttcagtggccagcatcctggatgaatttatttgcctccaagaatcctcctgttcaaggcggctggatgaacatctgagatggatgctactggctgtggaggtaggaggttttttctcgtcatctgcatcagggtatagaaatggcctcgccctcttgctgcttggacacaaaggggaagagaagcctgtcaaggtgacaccgtggaatcactaccgactagttggtggtggagaagccgagccagcttcagaggaaaacaatgttccttctggtaaatgtgcttccttcatatgctttggatgtccgcctgcaaggctcaagggggtgtctcctccaaaattggcttcaagcgacacggctgggaactcatcagagcaatcaccctga

SEQ ID NO: 2278 - DNA, 2880 bp, Oryza sativa
  Clone ID: PAT_MRT4530_102064C.1
atggggggcgacggcggcggcgatgcagcgcccccaggcgacggcgcggcggcgctcgcgggcggcggcgcggggatccccggcggcggcagcgaggcggcgctcccgggcggcggcgcgcggcactcatgcgcggcggcccccggcggcggcgcggcggccctcggcggcggcgcggcggccctcagcggcggcgcggggctcccaggcggcggcacgtcggctccaggcgacggcgtgacagcccccggtgacggcgcgggtcaccgcggcgggtccaagcggcggcgcgcgaccctcaggcggcggcccgcggctccaggcgacggcgcggcggcccctagcgacggcgcggggctcccagtcggcggtgcggcggccctcgactgcgatgtggtgctcccaggtggcggcacggcggctccaggtggcggcgcgtcggtggcaggctctcaggcgacgggaggcgaggaggtggcaagtggcggcacagggggtggtgcgggggctgcatgcgccgatggattggagcacagtgaaggagagcatgaacatgaggggatggattcatcttggattccggatggaatggacacatcttctacttatttacttgacgtgagaataatgggtaagacatgtaggcctgaatttccgggtggtttttctttcaaatggcctattgatgcagacgtaacaaacttcaaagattttctgggtgatatttgtgaaaaatatccatggggtttaaatgaaactgtatgtttgcattatattcatgctagtagcaaagaactcattccaatatgcaaagatcaggacttgacagcaatgttggagtgctttcatcatactaaaaggggtgtagatgatgagaaacaatactcagttggtattgatgactcttcatcggagagtgatgactcttcatctgagagtgatgactctattgctgaaactgataatgtgcctgaggtagaagggggagatgatctgagtatcactgatagtgatgatgaagagtggattgcacgagatgctcaggcagatccagtaatcccacaagttgcatatgacaaagaaaacccacccatgactgttgagactatttatccttcaattagattcagagctagatgtatcaaagaaggatgtggatggaggcttcatgcgtcaactattcatggtggtccagcagtgcagattaaggtccatgagatgtaccatggttgtcttagtactagaaaaagcgagaaggtcaggaatgcaaagagagcgtgggtttgtgataaggttatggggtggctacgtgaggatgctagtgttggggccatggaattgcaaaggaggataaaggacacacataagttaaccatcccctacaagagagtacattctgggagggaattagctatgagtaaattgtatggtgactgggatagtagctttgacaagctatatggttggaaggcggagatcgagaagaggtccccaggaagtatagtcgccattgaccatatgacattcaaggacaagaagagattcacaaggctatttgtggcactacacccttgcattcaaggttttttaggaggttgtaggccatacttagcaattgacagtacacacttgacaggaaagtatagaggtcagctagcaactgcatgtgctattgatggacacaattggctgtacccagtggcctatggtattattgactcggagactagcattgactatgctattaaagaggtatttggttatgcagagcatagggaatgcatgcgacaccttgtgtccaatttcaagctcaagttccatggcaaagtttttgaggaacatttatggccagcagcatatgcatggactcctatagacttcgatgaacacatggcttcaataggtgaagtaaagcctgaagctatagcatacttgaaaacccaccacaaaaggttatggatgcgaagcgagttctccacgcactctaaggttgattacatcaccaacaatttagcggagtgcttcaacaattggatcagaaagcataaaggtcttatgccatacgaattggttgataagattagaaaaaaggtgatggataaatttcgtgtgaggaagaaggtggtagccaaattggaaggtaatatcattctaccttgtgtcatgaaggagcttcttgagaaaagtagaggactaaactttgacctagatagaagtgatgatttcattgccgaggttactgataaagacccaggtggtaagaggcatgtagttgatcttgaagagaagacatgtacatgtagagagtggcaagtgtctggaaagcttgtgctcatgccttgtgcttcatcacatctattaggggggtgcagatggacaagttgcaaagaagcagatccagaagccaaagaggcctatgctttagtggcaaaacaaagaaaactgaaaaggaaatcaaaaccaaaatctacttctgctgccactgttgccactgaaaacattgatcctactgctatgtcaagtcaaatcttggctagcctatcaagtgccgttggtgggacaattagtgattctggacttgagtctaataatgagcctttgccatccttaccaagctctatgaccattgtgccactacaacatgttgctgcacctgttgccaaggggaaggggaaggagaaggggaaggggaaggggaagaaggaggacaaagacaagaaaatcaagagaaaaccatccccaacagtacaacctactactctacctgccaaaaggaggaagaataatgaagtaccacatgacagtctagcaatgagaactagaagcaagaagagtagtccagcaatggggactagaagcaagaggagaataattgattga

SEQ ID NO: 2279 - DNA, 208 bp, Oryza sativa
  unsure (1)..(208): unsure at all n locations
  Clone ID: PAT_MRT4530_102065C.1
aatttntgcaggagcaggcgatggcgagcccgcagtgctgcgcgaacccaccgangctgaacccggccggcggggaggggaaggtggtggagagcttcggcgggatcaaggcgtacgtcgccggcgccgcggagtccaaggccgncgttggtcctcatntccnatntctttcgggttttaaaggcgccgaacntnangaaggatagcc

SEQ ID NO: 2280 - DNA, 876 bp, Oryza sativa
  Clone ID: PAT_MRT4530_102066C.1
atggacccatcttctacttatttacttgacgtgagaataatgggcaagacatgtaggcctgaatttccgggtggtttttctttcaaatggcctattgatgcagacgtaactaacttcaaagattttctgggtgatatttgtgaaaaatatccatgggctttaaatgaaactgtatgtttgcattatattcatgctagtagcaaagaactcattccaatatgcaaagatcaggacttgacagcaatgtttgagtgctttcatcatactaaaaggggtaaagtggtaatcactctgggaaaccaaattaatctgtcccaagttattgtgccttgcactccatcactttcagtcccctctcaggcattttttactcaggaaggcagcactagtcaggcatccaaaagtgatgcatacctagaaaatccattcccgcactatgagcatgtaggtgtagatgatgagaaacaatactcagttggtattgatgactcttcatcggagagtgatgactcttcatctgagagtgatgactctattgctggaactgataatgtgcctgaggtagaagggggagatgatctaagtatcactgatagtgatgatgaagagtggattgcacgagatgctcagtcagatccagtaatcccacaagttgcatatgacaaagagaacccacccatgactgttgagactatttatccttcaatattcagagctagatgtatcaaagaaggatgtggatggaggcttcatgcatcaactattcatggtggtccagcagtgcagattaaggtccatgagatgtaccatggttttcttagtactagaaaaagcgagaaggtcaggaatgcaaagagagcgtgggtttgtgataag

SEQ ID NO: 2281 - DNA, 3901 bp, Oryza sativa
  Clone ID: PAT_MRT4530_102067C.1
atggggggcgacggcggcggcgatgcggcgcccccaggcgacggcgcggtggcgctcgcgggcggcgacgaggcggcgctcccgggccgtgcgggcgacggcgcggtggtgctcccgggcggcggcgcagggatcccccgcggcggcagcgaggcggcgctcccgggccgcgcgggcgacagcgcggtggcgctcccgggcggcggcgcagggatcccccgcggcggcagcgaggcggcgctcccgggccgcgcgggcgacggcgcggtggcgctcccgggaggcggcgcagggatcccccgcggcggcagcgaggcggcgctcccgggccgcgcgggcgacggcgcggtggcgctcccgggaggcggcgcagggatccccggcggcggcagcgaggcggcgctcccgggccgcgcgggcgacggcgcggtggcgctcccgggaggcggcgctcccgcggcactcaggcgcggcggcccccggcggcggcgcgtcggcccccggcgacggcgcgcggccctcaggcgcaggcccggcggcccccagcaacggcgcaggcctggcggcccccagcaacggcgcagggctccccggcggcggcacgtcggctccaggcgatggcgcggcggccccaggcggcgcggggctcccagtcggcggtgtggcggccctcgactgcgatgtggtgcttccaggtgacggcgcggcggctccaggcgtcggcgcgtcggcggtagtctctcaggcgacgggaggcgaggaggtggcaagcggcggcacaaggggtggtgcgggggctgcatgcgccggtacggtggtcacaggggccggcgaggaggtcactggcagcggcataatagtcccagcaggtggcacatccctctcagatggattggagcacagtgaaggggagcatgaacatgaggggatggattcatcttggattccggatggaatggacccatcttctacttatttacttgacgtgagaataatgggcaagacatgtaggcctgaatttccgggtggtttttctttcaaatggcctattgatgcagacgtaactaacttcaaagattttctgggtgatatttgtgaaaaatatccatgggctttaaatgaaactgtatgtttgcattatattcatgctagtagcaaagaactcattccaatatgcaaagatcaggacttgacagcaatgtttgagtgctttcatcatactaaaaggggtaaagtggtaatcactctgggaaaccaaattaatctgtcccaagttattgtgccttgcactccatcactttcagtcccctctcaggcattttttactcaggaaggcagcactagtcaggcatccaaaagtgatgcatacctagaaaatccattcccgcactatgagcatgtaggtgtagatgatgagaaacaatactcagttggtattgatgactcttcatcggagagtgatgactcttcatctgagagtgatgactctattgctgaaactgataatgtgcctgaggtagaagggggagatgatctgagtatcactgatagtgatgatgaagagtggattgcacgagatgctcaggcagatccagtaatcccacaagttgcatatgacaaagagaacccacccatgactgttgagactatttatccttcaatgtgtgagtttagattggctgtggctcaatattccattaagaaagaattcgagttttttgttaaaaaaactgatcctagtagattcagagctagatgtatcaaagaaggatgtggatggaggcttcatgcatcaactattcatggtggtccagcagtgcagattaaggtccatgagatgtaccatggttttcttagtactagaaaaagcgagaaggtcaggaatgcaaagagagcgtgggtttgtgataaggttatggggtggctacgtgaggatgctagtgttggggccatggaactgcgaaggaggattaaggacacacataaggtaaccatcccctacaagagagtacattctgggagggaattagcaatgagtaaattgtatggtgactgggatagtagctttgacaagctatatggttggaaggcagagatcgagaagaggtccccaggaagtatagtcgccattgaccatatgacattcaaggacaagaagagattcacaaggctatttgtggcactacacccttgcattcaaggttttttaggaggttgtaggccatacttagcaattgacagtacacacttgacaggaaagtatagaggtcagctagcaactgcatgtgctattgatggacacaattggctgtacccagtagcctatggtattattgactcggagactagtgagacatggctttggttcatggagaaactgcatgaagctattggtgaaccagctggactatcaatttgttcagatgcaggaaaaggcattgactatgctattgaagaggtatttggttatgcagagcatagggaatgcatgcgacaccttgtgtccaatttcaagctcaagttccatggcaaagtttttgaggaacatttatggccagcagcatatgcatggactcctacagaattcgatgaacatatggctttaataggtgaagtaaagtctgaagctatagcatacttgaaaacccaccacaaaaggttatggatgcgaagcgagttctccacgcactctaaggttgattacatcaccaacaatttagcggagtgcttcaacaattggatcagaaagcataaaggtcttatgccatacgaattggttgataagattagaaaaaaggtgatggataaatttcgtgtgaggaagaaggtggcagccaaattggaaggtaatatcattctaccttgtgtcatgaaggagcttcttgagaaaagtagaggactaaactttgacctagatagaagtgatgatttcattgccgaggttactgataaagacccaggtggtaagaggcatgtagttgatcttgaagagaagacatgtacatgtagagagtggcaagtgtctggaaagccttgtgctcatgccttgtgcttcatcacatctattaggggggtgcaggtgcatgattatgttgatgaatgctatagtgtggccagatttaaagccacatatgcagcccgcattccagctctaactgacatttcccagtggccaaagaatacacgtgatttctttctttatcctccaatattgaagagatctgcagggaggcccaaaactttaaggcacaaaggtggggttgaggggaataagaagggcaagagaaaagcaggtaccaaatgtcagcaaaagtgtcctatctgcaaaaattatggccatagatggacaagttgcaaagaagcagatccagaagccaaagaggcctatgctttagtggcaaaacaaagaaaactgaaaaggaaatcaaaaccaaaatctacttctgctgccactgttgccactgaaaacattgatcctactgctatgtcaagtcaaatcttgggtagcctatcaagtgccgttgttgggacaattagtgattctggacttgagtctaataatgtgcctttcccatccttaccaagctctatgaccattgtgccactacaacaagttgctgcacctgttgccaaggggaaggggaaggggaaggggaaggggaaggagaaggagaaggagaaggagaaggggaaggggaaggggaaggggaagaagggtgaaaaggaggacaaagacaagaaaatcaagagaaaaccatccccaacagtacaacctactactccacctgccaaaaggaggaagaataatgaagtaccacaggacagtccagcaatgagaactagaagcaagaagagtagtccagcaatggggactagaagcaagaggagaataattgattga

SEQ ID NO: 2282 - DNA, 1443 bp, Oryza sativa
  Clone ID: PAT_MRT4530_102068C.1
atggaggggttctgcttcgcgcggtgccgcttcacgcggctggtggtggcgatgcagctggtgatgggcgtgctcgtcatctgcatcagcatggccagcctccaccgcttctacaccaccgacgccctcctccccggcgggctggacgaccccgcccgctgcgccaggttccacggcgccgtcgccggcgggtactccggcttcgacatccgcgcgctggcggaccgcgtcgacgaggtgctcgtccagctcgccgagctgcaggacaagctggaggccacggcgctcaagatcggcaagaagaccaagaagaggaaggggaaggggaagctgcagcagcaggagaacatgaccatgacggagttccagcgattcctggaggacgaggtgatccacccgctgtacggcgcgcacatcgtgctccggctgatccgcatcccccgccccgaccccgacggcggcgccccggccgtcgacccgctggtcaacttcttcgccgcggaggagacgcgcaagtacgtgacggcgaagcgcaaccgcgaggggcggccgggcgcgtacggcgcgaaccggacgtacggcagcatcgggcacgcgtgcgtggtgatgcggcgggagctggacgagtacatgagctacgacgtgggcgcgctctgccccgacgactgggacctcggccagcgcctgatgctcggcggctgcgaccccctcccccggcgtcgctgcctcgcccgcgcctccaagctgttccgccggccgctccccatcaacgagtcgctgtgggcgctccccgacgacggcaacgtccggtggagccgctaccactgccgcggctaccggtgcctgtcggcccgcaacccgcggcgcggctacgaccggtgcgtgggctgcttcgacatggacagggagaagcagcggtggatgcagggcagcaacggcaccaccctggccgacttccggatggaggaggtgctggcggtgaagcccggggagatacgggtggggctggacgtgacggtggggacggggagcttcgcggcgaggatgagggagcgaggggtgacggtggtgacgacggcggtgaacctgggggcgccgttcgcggagacggtggcgctgcgtgggctggtggcgctgtacgccgggctggggcagaggctgccgctgttcgacaacagcatggacatggtgcacacgggcggggtgctggatggttgggtggacctgcagatgctggacttcgtgctcttcgactgggaccgggtgctccgccccggtggcctcctctgggtggacaagttcgcctgcgcgcgcaaggacctcgacgactacatgtacatgttcctccagttccgctacaagaagcaccgctgggtcgtctccttcaagtccagggacgaggtctacctctccgccctgctcgagaagccgctacgctcatga

SEQ ID NO: 2283 - DNA, 1029 bp, Oryza sativa
  Clone ID: PAT_MRT4530_102069C.1
atgggtgtcgagaagacgacggcgaacggcggcagtggcgccgcggcggtctccggcggagggcgcaccgtctgcgtcaccggcgccggcgggttcatcgcgtcgtggctcgtcaagctcctcctcgagaagggctacgccgtccgcggcaccgttcggaaccctgatgacgctgccaagaacgcgcatctcatggcgctggccggtgccgcggagcggctgaccctcgtccgggcggagctgctcgacaaggagagcctcgccgccgcgttcgccggctgcgagggcgtcttccacaccgcctcccccatcaccgacgacccggagaagatgatcgagccggcggtgagcggggcgaggaacgtgatcaccgcggcggcggacgcgggcggcgtccgccgcgtggtgatgacgtcgtcgatcggcgccgtgtacatgggcggcggcggcggcgaggaggtggacgagacgtgctggagcgacctcgaccactgcagggacaccggaaactggtactgctacgccaagacggtggcggagcaggcggcgtgggagctcgccaaggagcggcggctggacctcgtcgtcgtcaacccgtcgctggtgctcggcccgctgctgcagcgcggggtgaacgccagcacgtggcacgtgctcaagtacctggacggctcggcgcgcacctacgccgacgcggcgcaggcgtacgtgcacgtccgcgacgtcgcggacgcgcacgcgcgcgcctacgagtcccccgccgcgcgcggccgctacctctgcgccggccgcacgctgcaccgcggcgaggtgtgccgcatcctggccgccctcttcccggggtacccggtgcccaccaggtgcaagggcgacgccggcgagacggccgaggggtgccggttcagcagccgcaagctggcggagctcggtgtcgccgtcatgccggcgagccagtgcctgtacgacaccgtcgtcagcctccaggacaagggcctgcttcccttcgtccctgccgccgccatgccgtga

SEQ ID NO: 2284 - DNA, 339 bp, Oryza sativa
  Clone ID: PAT_MRT4530_10206C.1
gtgaggtcatagcggttgccgggcgttacgtcgggctcctcgtcgaccacattgacatggacgatggaggttttgttgacgaggtgatggaagagacgaagcgcggcaagggcgacggagctgttgggcttgctggagtgggcagcaagatgcatcatctgttttctcgttattgcaaggaaacctatgttgtatgtgacgccgacaagaaggaatggcagccggtgccaagagagaagtaccctaaacctttgatcttccacgatggccggctcgccttcaagctgacgccctgtgccgcggtggcgatgtacacctacctaccttggggtatctttc

SEQ ID NO: 2285 - DNA, 530 bp, Oryza sativa
  Clone ID: PAT_MRT4530_102070C.1
gcacgaggagcaaaggtggttctttcctcatgtttgggccatggaccatccgagtcaattatttattcctttgctattgggctggataagtgggcttcggtggacggtatatgctgttgttcatggccaccgtgtgggcctaacctcctgctcagggtttctgtaggaccaggtcctcctgcgcatgaattgtttcttctttttgttcatcataaaagccaagatgtaaaaggcttaagagtcttagtttaggttatggtgttttgtttaagtctagcagggtccgctgcagctcgaggacgagctgctcaaaaaggggggagtaatgtcatgggctttgggccgggcatcctaggctcattagataggattagggtttgttaggattagataaggtttattaggattagattaagtagtcctccatctatataaggagggatcctatcccaggtcagttaggcattagatcaagatttatcttagtgcccatcggcctgccttcttagtgcgacggagagcgtcgcgcc

SEQ ID NO: 2286 - DNA, 1014 bp, Oryza sativa
  Clone ID: PAT_MRT4530_102071C.1
atgaccaaattaccctcctcaacaaaggataaatccccttctcttccatcccatcgccggccactatttctcccctccacttcaatcgccagctcccgatgggcgacagcggcaaggcgacgctcccaggcggtggcacgtcagttccaggcgtcgacgcgacgggcggcgaggaggtggcaggcggtggcgcggggctcccaggcggcggcgcggtggtcccaggcggcgcctgtggcagcggtcccaggcgtcgacgtgacgggcggcgaggaggtggaaggcagcggagcgtcggtcccaggcggcggcgcgtcggcagcaggcgtccgcgcggtggtcccaggcgttgacgcgacgggcggcgaggaggtggcatgcggcggcgcggtggtcccaggcggcggcgcgtcggccgcaggcacggtggtcccaggcgacggcgcctcggcagcaggcatccgcacgacggtcccaggcatcgactcattgggggaggttggccgtcgatcaccgaaaaacgctattactcgcccgggctcaacgatgccgctagctccgccactggccgtcgccggcgcagtgtacgacgacatcgtgggcgcgtaccgcgggttcatgccgtcgcggacgcgcgcgttcctcgtcatccaccatggcccgctcgagccgcacgtccgctgcccctactgcggcgcccgcgtctggagcatgaccgccgcggggctcgcccgcctctcctcctcttcctccagcgacggcgagcgaagcgccgactccgactccaaccacagcgacgacgagtcattcgccgccgctgacgtgagcctcccacttcctctggctagccgcgtgtcaggccggcgccttcgaggcaggccggccatgcgcccagttcacaacgccgcgaagacggtgtgggaggaggatgcaattcaagtcttcatcctggatgtaaagagcaatttctcaagagcgacgtgcagcgtagaaccaggtggcagacggttgtag

SEQ ID NO: 2287 - DNA, 2415 bp, Oryza sativa
  Clone ID: PAT_MRT4530_102072C.1
atccccgggctgcaggagcgcgccacacaacgcaacgccgcgcttccgcctctccacccgccgccgcctccctcgccggcttgccgccgccgccgcggtcgcgaggcggagaccttgcgggacgatcggagcgacgtccctctacacccctccccctccgcagcggcgagaagaacaagggggccgcccgccatgctgcgccggtgcgtgcgggatctgtacccgctgcggcctcttaggaggatccctaggccgatctccagcgaggtcccaagtccagcatttcttcgacccagaagcaagtcgacaaaagcttcccaacagagttcaacacagaatactgtccctggccctcaaggagaaccttctcagtcaggaagcaatgttccgaaagttctgcttggaactctgatggtcggcgctgctgctatggctgcttatcaagctggctacatagacgatcaatttaaggatataatatttccctctacaatgaaggaaaaaaatatcagaaagatatacgatgatctgaaggctccttctgaacaaaaagttgatgagaagcaagtagtatcagatccaaatgttgacattgttcagaacagtaacaacgaggctcatcctcaaaaggaccttccaactgaagggatgggtccaccagaaattccaaccactgatgagcagactgtttcctctgaagaaaaggaaaaagaaacccttgcccaggggacaccgcaaattccagatgaacatggagctgctgctaaaccactgtcccaagatattcctgttattgacataaatccaagtgttgatgataaggcaacaggagaagttcttcctgaacaaactgacaagacaaccacttcagtttctccggtacaatcgagcctagcaacagcaggtccttcccatcatgtacacacagatacagatggaccaaaggatccatcaagcgctggtgcagttgaacataaatctctggctgagacatatttactacaagaacctgataattctaaagacatgggtgctaaggaaagtaaacacgatggtgttattagtacgggaacttctgatgatgggaaaattgtacttgatatcatagaggctattcatgctgctgaaagaaagcaggcagatgcagatgcttacatgtattcagaagagaaaaggaagttgaaggagaaatatgaaaaggagctgaaggacaccagggctcgggagctcatgtatgctgaagaggcagcaattctggacaaggagctgaagaaagagaaattgaagtcagctgctgtgattaaggaactgcaagaaaatgctgaacaaaagctaagggatgagctgcagcagaaggatgaggaaacaagtcaacaagttgagaaggttcgcgagttagcaaaggctgagcttgctgcagctcttgcaaaagagagagcatcccagatcgaacagattgctgaagcaaatctcaatatagatgctttgtgcatggcgttttatgcacgatctgaagaaactcggcagagtcattcggttcataagcttgctctgggtactcttgctttggaagatgctctatccactggatcaccaatccggacagaggtggatcaattgcgcaaatctcttgaaggtattgataaggactcactgttagaattggctctttcatcaattccagaagatgttctcgagtacggatcagatacccctatggatttgaaacaaaagtttaattccttgaaggaaacagtcaggcatttcagccttataccagcgggtggtggtggtatgctgactcatgctgttgctcatgtggcttcatccattaagatcaaagaggaccaatctggagacggaattgagtctcttctaaacagagtggagaacttgattatacatggagacttgagtgcagcagcggaggccttggaaagagggttacaagggagtgaagcagcagaaatagctagcgagtgggtgaagcaggcaaggaaacgtgcaatagcagagcagacgcttactctcctccattcttatgcttcttccatcacattctcgtgattttgttcatcaatgtagtattcaacaagatctgcgagttacagacttacgttactcagtccaatcacaaatatcttaagaccatattgcaaatacctgaatatataggagccagagccattcctgtcaggcggctgctgaactttcctccttttaacagagctaataatttttggcatgtagctacaagctacttggcattcttgatgttttagtcgccagttgaggcacaatttggatagaattgccgattttgctgcggatgtaaattttcttctgtacaatgatgatgattttcgggggtcgagtttatgaaatcagaaatcctgatgcaaaaaaaaaaaaaaa

SEQ ID NO: 2288 - DNA, 183 bp, Oryza sativa
  Clone ID: PAT_MRT4530_102073C.1
atggcgaacggcgaaggcaggggcttggggcttcgggggcgctcatttatggtgggcggcagggtggtggagagacataacgctatctctgatctcgccggatgcggattcgaggaggaagtctaccctggtgtcgactatgagttagaacttcagaccgccaagtcgacaacagttagatag

SEQ ID NO: 2289 - DNA, 378 bp, Oryza sativa
  Clone ID: PAT_MRT4530_102074C.1
gataaaaatatccagccaaagatgacatatatttcagggtcatatgcaacagctacctagatatatacacttttggtccaacacttatataacgtcagcctgcgaaactaacggatagcttagctggcactgcactgactagaacagctaattaacccaaactaaaccggaccttacattaatactttgtgcacgaaaagacatcactcacacactacacaacgtggccttaacaatcaccacttgcaaattatttaaacacaattgcacaaatatgcaaattaattaacacaattgcaacaaccaccgcttctctggcactaaactagcagttcatctcggcctttgcgagcttgcacttgaccttttggaacacca

SEQ ID NO: 2290 - DNA, 216 bp, Oryza sativa
  Clone ID: PAT_MRT4530_102075C.1
atgatcggacgaagagatgaaacgaatgcaactcttatcgatcaagacatcggcaccgttactaccaaaggttcttttataggaaaagtattggtggagaccgggtgtcttataaccggccttatctacagcctcgccccggatgaatgccaaaaccatcctatgagcgagaggatcagattgatgaagacactaccattgacgtgttttgcatga

SEQ ID NO: 2291 - DNA, 2793 bp, Oryza sativa
  Clone ID: PAT_MRT4530_102076C.1
atggcggcggaggcggaggcggagccgcggcggtgggcggcgacgtacacgaagcacgtgaagcagaagcgcaaggcgtaccaggacggcgccatcgtcctccaccgcgcctccgtcaacctcgtcctcctcgacgacgcgggcggcaccgtcgagtgcaggacgctccgcaccggcgaggaggtgttccccggcgcctcgctcgcgttccagcgccacctcgtcgacgtcggcgagcccgagccccaccccgggtcggggtcctcctccgccgccgcatcccccgcttcccgaggcgtccaccgcggcggcgcaagcgccagggcgcgtcccagcgcggtgaactcgcggcctccccgtgcgttcgcggaccctaacacgaaggggggtggcggtggcggtggcaaggatgaagccgtgggttcgagtttccaagagtggaccgcactgtacaccacccagctgactcagaaggcgaagaagttccatgatggtgtcgtcaggctcgcgcaggtcagttcgcacgcgaagcagataattttgctggatgaagagggcggagtgctagccaccaggtacctcaagtcaggggaatctttggaaactgggaagaaatgtcatttccctaactatcttattgagatttgtgaggcgaagagtgtaaacaaaggttgttatttctgcattgccaatacgcaggtttacaaactaattcctcggaggaacctatggtgcaaacaagaccaaggagtggggagaatacaagtaacaaaacaggatcaggtccaacgagtaaaccactcaaatttaccagtccacagaaatttcatgtgcgaaatgtttgtctctacaagtatagatcttgaggacagtaaatcatcaaatactgctggttcaagtaagccagaaacttcaaagattggagttgtggatgctggtagctcaggaagcattatgggttcaacagactctgaatttaaagaatggagtgccttatataccacccaactaacacagaaggcaaagaagtaccatgatggtgtgataaagcttgtgcaagttggttcgcatgcaaagcagattgttctgctggatgaagatggtggagtgcttggcagcagatatctcaagtcaggtgaatctgttgaaagcgggatgaaataccagttgcctaattatcttatcgaagtttgtgagataagaaaacaaaagaatgaatggagtgccttatataccacccaactaacacagaaggcaaagaagtaccatgatggtgtgataaagcttgtgcaagttggttcgcatgcaaagcagattgttctgctggatgaagatggtggagtgcttggcagcagatatctcaagtcaggtgaatctgttgaaagcgggatgaaataccagttgcctaattatcttatcgaagtttgtgagataagaaaacaaaagaatgatgtagagtctaaacacccttcagaggtggttttgagtcaaactggatcagcgaatggacataatacaactgacaggacagatgggagaaacaaatctccaaaatttgtcagtccactgaagttcaatcattttcaaaagagtagattacaaggtagtaatggtttcaacaggccaacggttgccaaatcaatacatactaacatgattgatacactaaaatttcatgatactcagaaggctaaaccagattttactgttggctacaagacagaccttggcaaatcaacatttagtaacttggatgatccacatcaatttaatgataataagcaagataaaacagaatatgctgcaagctataatccacaagaagttggcaaatcaagttatgatagagtggacagtcctctaggattctgtgatcttcaggatggtaaatcaggatcttccactagttttttgaggagagaggctggcagaacaacttttggtaacacggatgattctttgagaactgctcgtgatgcggatcatagcaagacagcttctaacatttcagtgatcaacagttcaaacagaactattggtgttaatatgaactctcgaatgtctcattgtgctacacaacttcgtgcatcagtgctggcttgtttaaatttagaaactctgcagccaaggaactcaatatgcactactcttcagagtgagttatcagggagtgcccatccaacttatgatcatcagacagtcatgagaccaacaacttttgatagtctggaattggacatggtggataccccaacatctgatgtatccaatgcaaaagagcagagtcaaggttcaacaaggaaccatcaaactgaaagttctaaagattctgcaccagctatgtgtactactagctcagaccctccatcgggtaaaggtgaaactgcagaccaggtttgcatcctatataacctttcttggaaaaagactgccgtttgtgaatttaagctcagttcagattacagagtggtggaagaaaaatgtggcagttacccctttttatctgcaggcgacctgacggtttcgttgagggattccttggccttcttaaactcaatctgttcactgcttaaggagaatggatggcgtgaaggcgcactctgcgttcctgaaggaccaggatgtacgctgaaaatcttcacttcaccaacaactggaactgggagtagaattgagtgtgatactaatttgatcctcaagttttctacaggttcacatctatctttggcgtttcgttttgtccaattggtcaattgggctcgctctcaagtttgcattcaattcaaaatgtag

SEQ ID NO: 2292 - DNA, 426 bp, Oryza sativa
  Clone ID: PAT_MRT4530_102077C.1
ttttttttttttttatttttttttatttttatttttttttttctttagtttatttttgtttttacattttttgttcagttattttatttttttttcaaaagactgaaaaaggtgcaaggctccccgggggaaaatttttgaggaaaagccccagattggttaccggtaaaaaacaaaaaaaaggggggggtcccccgggcaggggggcaaaaaaatggcccaaaaaagtgccgaccaaaaaaaaaatttcaccccgggcgaaataatgggagggggtgggcccaaacggggcaggaaacccgggggagggaaaacgcgccggggggaatgggcaacaaaaaaaggcaatgggggccaactgttctaggggccaaaagtttttcaaaatgttttttgaaacaaagggggccccaaggatttttggac

SEQ ID NO: 2293 - DNA, 1856 bp, Oryza sativa
  Clone ID: PAT_MRT4530_102078C.1
cacgcatgcgaccgcggcctgatccacccccatgacgacgacgacgacgacgagcgccatcggctccctcctcgtgctcctgcttgtggtggtggtgggaggggtgtgctccgcctccgtgggcggcggcggcggcggaggggaggcgtggcgggcggaacaggagcgggaccgggtggcgcgggtgcccgggcaggacttcgacgtcgggttcgcgcagtacgccgggtacgtcgccgtcagcgaggagcgcggcgcctcgctcttctactggttcttcgaggccgccgacgacccggcgttcaagcccctcgtgctctggctcaacggaggtcgatggctggaatcaagtgtacaagggtgttcatcaattgcatgtggcgttccggaagaagtaggtccttctcattttaatgcagatggacagggtgtacatctgaatccctattcgtggaaccaagtggcaaatatcttgttccttgattcaccagttggtgttggttattcgtactcaaacgcctctgatgatatattaaataatggggatgccaggactgccaatgattctttgacgttcttaacaaagtggattgaacgatttcctcagtataaggggcgtgagttctacgtgacaggagagagttatgctggccactatgttcctcaattagcacaagctataaagaggcaccatgaagccactggagacaaatcgatcaatctaaagggctatatggtaggaaatgctctgttcgatgatttccacgatcaccttggcatatttcaattcatgtggaccaatggcttgatttctgatcaaacatacaggctactgaatgttttctgtgactacgagtcctttgtgcatacatcttcacagtgcaataagattcttgacattgctagtgacgaagctgggaatatcgattcgtatagcatcttcacacctacttgccatgcatcttttgcctcctcaaggaacaaagtcatgaaaaggttacattctgttgggaaaatgggagagcggtatgatccatgcactgaaaagcattcaactgtatacttcaatctggctgaggtgcaaaaggcacttcatgttagtccgatcatcaacaaatctaaatgggaaacctgcagtgatgttgttaacactaactggaaggactgcgaaagatctgtgctgcatatctatcatgaacttatacagtatggtcttcgtatatgggtgttcagtggagatacagatgcagtgcttccagtaacatcaactagatacagcatcaatgccctcaaacttccaacggtaaccccttggaatgcttggtatgacgatgatggtgaggttggtggctggactcaagggtacaagggactcaacttcgtgactgtgaggggcgcaggtcatgaggttcctctgcataggcccaaacaggctctaattctcatcaaatcattcttggctgggagcccaatgcccagtgttcaagatttttacagtgatgtgtaacatattttggctacaattatatattaccaagatcacaaaaggtaactcagacggggttgctagtatcacatggaactcgtaccatatattggtaacaattcttccctaaataaaatagggaacaaaatcatgaaatagttttcgtgccacgaatcgacactgtctgttgatattgatatgaacctaagacaaaagtattaatcaagggtgaacgttcacattgttgtcgtacaggatgtgtataacattgttgtgtataacaaaactattaatcaagggtgaatgttcacattgttgtcgacaaaaaaaaaaaaaaaaaaaaaaaaaaaaaaaaaaaaaaaaaaaaaaa

SEQ ID NO: 2294 - DNA, 312 bp, Oryza sativa
  Clone ID: PAT_MRT4530_102079C.1
atgcggccggatttcatggaggcggagacatcaggaggcgtgatgaggaacttgacggagtcaccgcgtggtcttgaatcggctacggcggcgctgcttgcttggaggcagcggcgtatcccggcgtggatgcggcaggatgggagggaagacgagagatgggacccacggggatacggggacgggggaatagggaacgtccccgtccccgctccacccgatgggggcctttttcagccgttaacaccccatgggagcctccgcgccaccgcctccgacatcggcactgcctactgtaggatcagatggtga

SEQ ID NO: 2295 - DNA, 1870 bp, Oryza sativa
  Clone ID: PAT_MRT4530_10207C.1
atggcgaagaagccatgtgaatttccaacggccgttctctccttccgtcgcttcctccagagacgcttcttgggagggcggcaccaccaccgcccaacgtcgaccacggcaactggtgcagctataccaccggcagataagctacacaaccaaactgtaatgattgatctggagtcatggctactgaggtcgcccatgtcgaccttcccttacttcatgatcgtcgccatcgaggccggtagcttcctccgcggcctcatcctgctgctgatataccctctcttatggctccttctcagccatgacatgcttctcaaggccatggtcatggtgtccttctttgggttgcccgagaaggaggtggtcaggattggtaaggcagttctaccaaagttcttcctggaagggatggccatggaggggctggaggtggtgaggaacgcgaagaaagtggtcgtgtttagtccgttgtttccgagggtgatggtcgagggtttcttgaaagagtacataggcgtgaacgctgtcatcggaagggaggtcatagcggttgccgggcgttacgtcgggctcctcgtcgaccacattgacatggacgatggaggttttgttgacgaggtgatggaagagacgaagcgcggcaagggcgacggagctgttgggcttgctggagtgggcagcaagatgcatcatctgttttctcgttattgcaagtgtatttgcagtacacgtaacagtgcgatcttaatgcaggaaacctatgttgtatgtgacgccgacaagaaggaatggcagccggtgccaagagagaagtaccctaaacctttgatcttccacgatggccggctcgccttcaagctgacgccctgtgccgcggtggcgatgtacacctacctaccttggggtatcttcctcgccgtcttccgcagcctggcatttggcctcctcccctaccgtgtgtccgtccctctcgccgcgttcactggcatgcgctcccgtctgatcgccggcccgtcgcctgatgccacccgccggaacagcgggacggccgggggtcgcctctacgtctgcaaccaccgcacgctcctggaccctattaccgtcgcggccgtgctgaacaagcccatcactgcggtgacgtacagtgtaagcccggtatcggagttgattgcgccaatccgcacggcgcgcctgacgcgcgaccgggacgaggaccggcggcgcatggaggcgctgctggcgcgcggcgacctcgtggtgtgccccgagggcaccacgtgccgtgagccgtacctccttcggtttagcccactcttcgctgagctcaccggcgaggtgacccccgttgcgctggagacacggattgacatgttctacggcacgtcgacgaagcctgccgccaagtggctggacccattctacttcatgctgaattcgagaccggagtaccacgtcgagttcctgcagcccgtcagcaccgctccagtagacggtgaggcaggcggtcacggccacagtatcaacgccgcaaacagggtacagcgcgtgctcggcgaggcgcttgcattcgagctgacagagcagacgcgaaaggacaagtacgagatgctggccgggaataaagggaacgtgaaaggtgaagccaagatgtaggtgcgacctgatatcttgagagattgtattgaattaatgttctgtatgggattctttattgcgttcatttttttaaactcgtttcagacatgttgttttattttagtaagtttatgccatgcattacttattcttgttctaatgttttattgtgtgcgaaagttcttgtaaacaaacatattaattaaaataagattgttctgccttcttttctatt

SEQ ID NO: 2296 - DNA, 165 bp, Oryza sativa
  Clone ID: PAT_MRT4530_102080C.1
atggcgacgatttcggagacactgcccaactcggaggccgtctcccacgcctacaagttcgcctccacctgggagaaggtcggtttcctcgcttcgctgcgtggtcgggtgggtgtgtggtccagtggtagcactggtggatctggtggatctgatctgatctga

SEQ ID NO: 2297 - DNA, 2004 bp, Oryza sativa
  Clone ID: PAT_MRT4530_102081C.1
cccacgcgtccgcccacgcgtccgcccacgcgtccgcccacgcgtccgcggacgcgtgggtggcagtggcagtggcagtggcagtgggagttccagggacgtagagcagcgcggtgcggattgtgcggggaggcgcgggaggaggaggaggaggaggggaagatggagagcaccatgaaggggatccgcggggacaacgcgccgtgcgtgctggacctggacgacgcggcgacggtggggggcggcgtcggggacacctacggcgaggactgcgccaccgaggagcagctcgtcacgccgtggaccgtctccgtcgccagtggttacaatttgctgagggatcctcgctacaacaaggggcttgccttcaacgaaagggagcgcgaaacgcactacctccgtgggcttctgccaccagcaatcgtatcccaggagctccaggaaaggaaaatcatgcataacatccgacaataccagctgcctctgcagaaatacatggctatgatggacctccaggaggggaatgagaggcttttctacaagctcctcattgacaatgttgaggagctacttcctgtcgtttacactccaacagttggtgaggcctgccaaaagtatggatccatatttagccgtcctcagggtctttatatcagcttgaaggagaagggaaagatccttgaggtgctaaaaaactggccagagaggagcattcaggttatcgttgttactgatggtgagcgaattttggggcttggagatcttggctgccagggaatggggatccctgttggtaagcttgccctttacactgctctaggaggagtgcgtccatctgctgagtatgctgattttcttcatgaattcatgactgccgtgaaacaaaactatggggagaaagtactcattcagtttgaggattttgcaaaccataatgcatttgaactccttgcaaaatatggaacaactcaccttgtattcaatgatgatattcagggaacagcttccgtggtcctttctgggcttgttgcagcactaaaattagttggtggttcattgtcggagcacagttacctgttcctgggagctggagaggctgggacaggcattgcagaacttatagctctcgagatatcaagacagaccaaagcaccaattgaggagtgccgcaagaaaatatggcttgttgattcaaagggcttgattgtcagttcacgaaaggagacccttcaacacttcaagaaaccatgggcccatgagcatgaacctgttggaaatctcttagatgcagtcaaaactatcaaaccaacagtattgattggcacatctggaaaggggcaaactttcactcaggaggttgttgaagccatttcctcatttaatgagaggcctgtcatttttgccttgtccaacccaacatctcagtctgagtgcaccgctgaacaagcgtacacatggagcaagggccgcgcggtgtttgcaagtggaagtccatttgatccggtggagtatgatggcaaaatatacgtgcctggccaggcaaacaacgcctacatcttcccagggtttggccttggtgtggtgatgtctggtgcaatccgtgttcatgatgacatgcttcttgcagcttcggaagcactggctcagcaggtcacacaagagaatttcgacagggccttacttatcctcccttctcaaacatcagaaagatctctgcccacattgcagccaacgttgcagcaaaggcatatgaacttggtttggcaagcaggcgccctcggccaaaggacctggttaagtatgcagagagctgcatgtacagcccactttaccgcaactaccggtgaatctggtcatccgacaccagaaaagattctcccgggggtcgtgagtgcgatgcccagacaggaaccattgggaaaagctggcattcatagtaggggggcattgcttgaaatggctttggccacagcatatgtttccaaaagcaaagatccaatgtga

SEQ ID NO: 2298 - DNA, 2932 bp, Oryza sativa
  Clone ID: PAT_MRT4530_102082C.1
ccacggggctttccgagcgatagatactgctcccgcctccgctccccccttgctctcggcggcgacggcgactagccatggaggtcggagttgcagctcgatatcgatccgctgggcgcggtctgtggcccagcccggggctgagaagaggatggagcttggttgcattgcaccctgctcgggaggcgcgggaacaatgcgcgttacgtgctggaactgtgcagctcggcggcggtgggggggggcgtggcggctccctgcatacgaagaggaggtctctccttcttcagcgactccctcaagatcttgccccaaacttgctgagatctggtgaagagcagtagcgcgaagatggtgaagatctgctgcatcggagctgggtacgtgggcgggccgaccatggcggtgattgccctcaagtgtccgacgatcgaggtggtggtcgtggacaatctcccagccgcgccatcgaacgcccctggaacagcgagcagctgccgatatacgggccggggctcggacgaatgtggtcaaggagtgacaggggctgaatgctcttcttgcagaacggacgtcgatcagcaccacgcggacgcgggacaatcaccttcgtgtccgtgaactcgctaacctagacgcccgcactcgccgccggcaaggcggccagccgcacggaaagagagatgcgctgcgagaaagactgcccacatgggagcattcagattatagttgttacggatggtgagcgaattttggggcttcggagaacttgaggctgccagggaatggggatccctgttggtgagcttgccctttacactgctctaggaggagtgcgtccatctgcttgtttgccaatcacattggatgttggtacaaataacgaggcgctgctgaatgatgagttctacattggcttaagacaaaagagggccactgctcaggagtatgctgattttcttcatgaattcatgactgccgtgaaacaaaactatggggagaaagtactcattcagtttgaggattttgcaaaccataatgcatttgaactccttgcaaaatatggaacaactcaccttgtattcaatgatgatattcagggaacagcttccgtggtcctttctgggcttgttgcagcactaaaattagttggtggttcattgtcggagcacagttacctgttcctgggagctggagaggctgggacaggcattgcagaacttatagctctcgagatatcaagacagaccaaagcaccaattgaggagtgccgcaagaaaatatggcttgttgattcaaagggcttgattgtcagttcacgaaaggagacccttcaacacttcaagaaaccatgggcccatgagcatgaacctgttggaaatctcttagatgcagtcaaaactatcaaaccaacagtattgattggcacatctggaaaggggcaaactttcactcaggaggttgttgaagccatttcctcatttaatgagaggcctgtcatttttgccttgtccaacccaacatctcagtctgagtgcaccgctgaacaagcgtacacatggagcaagggccgcgcggtgtttgcaagtggaagtccatttgatccggtggagtatgatggcaaaatatacgtgcctggccaggcaaacaacgcctacatcttcccagggtttggccttggtgtggtgatgtctggtgcaatccgtgttcatgatgacatgcttcttgcagcttcggaagcactggctcagcaggtcacacaagagaatttcgacaagggccttacttatcctcccttctcaaacatcagaaagatctctgcccacattgcagccaacgttgcagcaaaggcatatgaacttggtttggcaagcaggcgccctcggccaaaggacctggttaagtatgcagagagctgcatgtacagcccactttaccgcaactaccggtgaatctggtcatccggtatccggatctattccagtcatgtatatctatgaactgtttcctgcaaaatcttactacttgttcagtactgcacgctgtaattctgatgagtctaccggagttacttcaagcctttttttccccgtgtcgttcatgcctgtattgtaatatttccttttcgacgtgatgtgaagttccttgtatccagttaccttaagcatgggcatatgtattttcatcacaagaatgttaccgtcctagggatgggtaataaatgataaatctggaataaagtttctacagttcctttctcggtactgtttctatgttcaaaaaaaaaaaaaaaaaatccacataaagtggggctgttaactgagcaggccttcctcgtattgtcagtgttgtggattgctcaagttaaggtgtgtgtgtttttatatctatgagctgtttcctgcaaaatcttagtacgtgttcagtgctgcccacggtgtttatcatgagtagcccagggagaccgcaatcctcgttttactccatcggcaaaccgcttgacgcctggctcaaggacatgcccgccgtggcatgataagattcatgtgaattttaatcgatcgattcgattctcaacctcgattcgagctgcaggaattcgacttggaagaagagcaatgcaagatgggttggccacttaaaattctttatagttcgttttttttttttgcaggagacgacactaccattttctcaggcataaaaaagttgggtgttcttgttagtaaaatcatcgtcatcgctgttgaagttttttttttcatcgtttgcactgttctagatcactataatccccaccccactccccctccccctccccctccccctgtcatcatggctctttctgtttgagggccatctgaacgaaaatttacctgtattattcagtcaacttgttatagcagattggttattccattgtactattctc

SEQ ID NO: 2299 - DNA, 1830 bp, Oryza sativa
  Clone ID: PAT_MRT4530_102083C.1
atggatgaccacgacgatccagccgatgatctcgaccggatcagcgccctccccgacgacttgctacacatcatcctctccaatctgaacaacgcgactacggtgacgaggacggccgtgctctcgcgacgatggcggcgcgtgtggaccaatgcccaggcgctctactttgccgatatgaatcccaaacgacgacgggccatcaagccaggccagttcggtagtttcgtggactgggcgttcgctgaacgcggcgacgctgacatacaatctctcactatccacatgtcctaccgcaagagcgccacgcaggatcagatcaacgactggctccgctacgccatgcgacgcgccgtcaaagctttcaggttttattacttttcgaacgcacgtgatggtcaggacctgcagctgctgccaatcgtcgagttgcccagccatgcgaggacggcgtccatcgttctatttctgggttcttcccgtctccggctccctgcgtccccggcggcatgttacgaagcgctgacagagctgaaccttcgctgggcgtcgttcgacgaggaagagggcgccagcgccggcggccgcaccctcggcgacttcttgtcgacatgctgccctcgcttgcgtaagctggagatgtcgagcctgaagctgttgtctcggctagttctgcgcaccgagtcactcgaagagcttcgcatttcctacgcaaacgatctacaatcgctggacgtgacggcgcccaacctgcgcgtcttcacccacacattctgctggtacggtttaactctcgatgacatcaacgcgcggtcggtgatcaaaatcgtggcaccgaggctggaggagatcgccatggacaaccaagtgttcatgaacactccggatttacatatacatggcttgaaaagcgttcgccgtctttgtgaccttaacctaacggtgcatggacaatactgcagcaaccgtggctacggtttatggctcctcaagaactgccctaatgtcaaacacgtagaccttcttcttaaatccagcgtgttcaccacggacgaggagcttgctgatctgacggacgagagcgcaccccggcttcacaaagttaggagcatggtcttgaaaacatctaagttgccgcaccaccattttacggcaagtgtacggtcgtttcttctgatgtgccctggcctaagatcactctgcatcaacattactgaaaggggacagggtgcgtggtggggtgttgatggcggcaccagactgtgggttccagacccgatgtcgattgcggcggtaggtagcgaggtgcgctgcggggccagcatcgatggacggcgaggtctggggccagcgttgatggcggcggcggcgagctgcggggttcaagggttcaaggtggcgtgcagcctgcgagatccagccccagcttcgacggcggtggcgagcatcaggatatcactatttaaggaccgagatacattggcgaatcatccgaagttaacgttggaattgcttcaggaggtaactataactggcttcacaaggacggatgaagagatagacctcgtgagtttgctgtttgggagctcaagttcaatcatgagcgtcaccatacatgccactgaaaaggaggatacagagaaagtctcgttgaaaaatattatggcagaagatgatgacaacgacgatgatacaacaactcatcagcaactactggaaattccatttactgatcacggctgttggcgttttcaaggagatgtatatagctggaagcgatacacaacagaggacgcactgagtgactcagtgacaagtggtgcctgctga

SEQ ID NO: 2300 - DNA, 414 bp, Oryza sativa
  Clone ID: PAT_MRT4530_102084C.1
cgtataggacatagtatgtggtgggtcctgccgagatttagtcaactactattaggtatgtagtatccataaccctgacagatcttttggctactgctggttataatgcacatttttttttttgttactgcaacaacatccctgaattttgtttgtaagcgtttcgttatctacgaggaacacgatagcttgagactataatcaattagtaccttttacacttgcgaaattatatcagactataaatgaatttgagaaaaactatatattcttgaaaaatggcaaatatctagtccaagggcagaagcgatctgcatcccgtgcttgtgatgaaacggaaatgttcttctgaagcatctgcatcctgcaatattatggtctatgctttttgtctgatttcttttttgtggaaca

SEQ ID NO: 2301 - DNA, 1155 bp, Oryza sativa
  Clone ID: PAT_MRT4530_102085C.1
atggcgcatgtcagcttctccgatctgccacctgaagctctcgacgacatcgcccgccgcgctggcgccctcaacaacgtcgtctgctccgccgtctgccggccatggcgccgcgccctgaaaaccacgcgcctccgcctactcaaacgacctagccgcccgtacagcgtgagactagacaagtggaggaacggcaccatcagtctctgcctggccgttcgcctcggctgcagcagtgaatcaaccatctatgtccccatcgccatggttgacggcggcgacaagctaccaacccgcatcatcgggtcctcccatggctggctcgtcaccgtcgacaaggagtgcggcctgtccctgctcgaggccttcaccggcagggtgttcccgctgcctcccatcacttcgtccggcagcaagaaggtggccaaggagctcgaccagtccatgttctacaaggcgacgttggctcccggccgccggctgggcgcgttcgccgtgatgctgatccacggcggcgggttcggcctgtcgttcctccggcccgatgccaaatcgtggacggcggtgcgcgtgccgaaacggatgcagcacaagtacacggacatcgtgttccaccgcggtgcgttctacactgccagccgcgacggcgaggtggccgcctgggcgccggacgcgagctccagcggcctgcacgcggggcgcgtctcggagccgacgcaggagtgcacgtgggccgccctcgtggagtcggtcggcggcgacgacctgctcatggtgagcagcttcgtcgtggaagaaggctttgccgcgcatggccaatggtaccggctaccgcgccggcggtacgcggtgtcgcgctacgacggcgagcgcgaggggacgtcgtcgtggctccccgtggaggatctcggcgaggctgccatcttggtgggaagcagctgcagcttgtgcgtgtcgacgcgaggcttccacgacgatttgcgcaaccgcctctttttcgcatggccgtcctacgaatcaggcaaatactactgcttccaccctgacgagtatcgcctgccgacggcgacgccgggttgtacttacctgattgtgccgcattacggcggctcttggtttgcgccttatgttgcacctgaattccattggtattag

SEQ ID NO: 2302 - DNA, 1092 bp, Oryza sativa
  Clone ID: PAT_MRT4530_102086C.1
atgtcccccgccgccgcatgccgcggcaacccgccgtcgcggtccgccatcgtggccgacacggccaccgggtaccacctcctcagcatccacggctactcgcgcaccaagggcacccccaccggctcgcccctcaaatccacccgcttcaccgtcgccggccaccgctggcgcatccactactaccccaacgctgaccgcgccgactcagccgattacatatcgatgtacctctttctagacgagaagagcaacgccaccaggagcgtgaaggcgctgtttcagattcgcttcgccgatcaggtgaaggcgcagccttcactggcgctccatgccgtaagaacttttggtgatggttcttggtcctggggctatgcgaagttcgtcaggagggaggttctcgagaagtccaaggatctccgagacgactctttcaccatccggtgcgacattgtcgtcgtccgcgagttcgtcgcggaggaggcgaccgagatactccccgctggatcctttgtatccgtgcccccgtccgagatgaaccggcatttcggtgacctgctggagaccgagaagggcgccgacgtggtgttcgaggtcgccggcgagagcttcgccgcgcaccggtgcgtgctcgcggcgcggtcgccggtgttcggagccgagctctacggcctgatgaaggagggcgacactgctggagtcgtacgcatcgaagacatggaggcgcaggtgttcaagatgctgctccgcttcgtgtacactgactctttgccggagatggaggcggaggaagacgtcatgtgccagcatctgatcgtcgcggcggatcggtacgacctacaaaggctcaagctgatctgcgaggagaagctgtgcaagtacattggcgtatgcacggtgtcaaacatcctggcactagctgatcagcaccattgcgacgggctgaagaaggcgtgcttcagttttcttggctcaccggcaaacctcagtgctttcgtcgccgacgatggcttggaccatctgagcaggagctgcccctctcttatgaaagaactggttgttgagctggcacttccgccgagtcatgcttag

SEQ ID NO: 2303 - DNA, 824 bp, Oryza sativa
  Clone ID: PAT_MRT4530_102087C.1
acgggtggggcaacggccggcgagagcggcggcggcggcggagggcgagtgtggccgcggcaggcgaagctggcaagagcgactgcgggcgaccgcggcgggaggtgggggcgggatccaggacgggctcctgctccgggaggggattcccgcggtgacggatatgtcgccgccggtggcggaggaatcaaaagggggtggcggtcgaatgccgagcgcccaaggtcgggcatgagcttgccggggatgctcatgaggtcgaagaacggcaggtcgccgggctatgggcagaacggagacgggcggcgcggcggcacgcgaagcggcgttggacggcggcgggcgagcggaaggcaagcgcgacgggctgtgggcagagcggacggcaagcgagcggacgagcatggcaggcggaggagggggccgcaacggcggaggtggccgaaggaggagcgtggcggcctactccgccggtcgcgtcgtcgttggcggcgagagcggcacacaaagtggacagagcgaacgagcacgtcgttcttgccgctggttcccgtcgccgccgtcgcactccttggaggagcccagcgtggtggcgtgccgcagcggcgggaacggacggagcggggggagatgaggccggcgggaggggggaaagaggcgacgcctcgccgccgctcacccgccgcgccccccgcgtcccccccccctctgctccgcccgcgcccggagacgccgctgctccgcctgggtcgggcccatgcaccgcccacgctcggagccgccgcttgcccgccgtcgcgcttggccgctgcttgtcgccgccg

SEQ ID NO: 2304 - DNA, 2295 bp, Oryza sativa
  Clone ID: PAT_MRT4530_102088C.1
atgaccaaagagttaatgataccccaactaaaagaacaattgagagaaatggtggaacttttgtatgaaggtaaactggacatgaggagattaaactatggagtcataactttgatccccaaggttaaagatgctaatactatcaaatcgtttagaccaatatgcctcctcaatgtgtgtttcaaatttctcaccaagatcctaacaaggaggttgtctgaaattgctcagaaggtaataggggagagtcaaactgcctttattccaggaaggcagaatctggatggggtggttatcctacatgaagttttacatgaactaaaaaaagagaagaaatcaggtatcatcttcaagctcgattttgaaaaggcatacgacaaggtgcaatggagttttttgtttgatgttctgcataagaaaggtttcagtgatagatggattcagtgggttaaaatggcaaccataggagggaagatggcagtcaatattaatggggaggtgaaagacttctttaagacttataggggagtaagacagggggatccactttcccctcttttattcaacttggttgctgatgctttatccgaaatgttgaataatgctaaacaagcagtaccacatttagttcctggtggcttgacacacttacaatatgctgatgataccatacttttcatgaccaacacagaggagaacattgttactgtgaaatttctgctatactgctatgaggctatgtctggtcttaagattaactaccaaaagagtgagatcatggtcataggtggagatgagatggaaactcaaagagtggctgatctgtttaactgtcaagctggaaagatgccttttacttacctagggatcccaatcagtatgaataaactgaccaacgctgatttagatattcctcccaacaagattgagaaaaggcttgctacttggaaatgtggttacttatcttatgggggaaaagcaatcttaataaactcatgtcttagcagcattcctttatatatgatgggagtttacctattacctgagggagtgcacaataagatggattctattagagcgagatttttttgggagggattggaaaagaagagaaagtaccatatgattaaatgggaggccttatgcagacctaaagagtttggaggacttggcttcattgacacaaggaaaatgaacattgctttgttatgtaaatggatctatagacttgaatctgggaaagaagatccctgttgtgtgttgttgaggaataaatacatgaaggatgggggaggttttttccagtctaaagctgaggagagctcacagttttggaaaggcttacatgaggtgaagaaatggatggatttggggagttcttacaaagtgggaaatggtaaagcaaccaacttttggagtgatgtttggattggggagactcctttaaaaactcagtatcccaacatttacagaatgtgtgcggataaagagaagactgtctctcaaatgtgtttagagggggactggtacatagaactgagaagatctctgggggagagggatttgaatgagtggaatgaccttcataacacaccaagggagatccatttaaaggaggaaagagactgtataatctggaaactaaccaaaaatggcttttacaaagcgaaaaccttgtatcaagctctaagttttggaggagtcaaggacaaagtgatgcaggacctgtggaggtcctccatccccttgaaagtcaaaattttattctggttaatgttaaaggggagaatacaagctgctgggcagctgaagaaaatgaaatggtctggaagtccaaattgtaaactgtgtgggcagactgaagatgtagatcatttgatgtttagatgccatatctctcaatttatgtggtgctgctatagagacgcctttggttgggataatattcctagttctagggaagatcttttagagaagttaaacattcaaaaagatggacaaaaatctgttttgcttgcatgcttagctgcaggcacatgggcgatttggctgatgcgaaacgattgggttttcaatggaaaactaacctctgatccctctcatttgcctccaaagctgtttcttttcttctacagtggagacaactggcgccgcagatccagcggagcgatttggacgcctcaagggccttactgcttgccagtactcgaagggcaacaggctcaaacccctgatgaagacctgaatgattttcagcttatactccagggatgtctttttggttgttcactctga

SEQ ID NO: 2305 - DNA, 207 bp, Oryza sativa
  Clone ID: PAT_MRT4530_102089C.1
atgatgaccggagataccaaagacattggagaggacgaagacaatagtgctggtgagggtgaggagccactgattatgggttgggatggtcggcgaagactggggggctatggagattgggttgcgatgtttggcggcaacaggctgggacatatgacggtgttggggccgaggtggcacgatcgcgatggggtcatggatatatag

SEQ ID NO: 2306 - DNA, 292 bp, Oryza sativa
  Clone ID: PAT_MRT4530_10208C.1
aaaaaaaaaaaaaaaaaaaaaaagggggaaagaaaaaaagggaaaaatttttaaaagaaaaaatgtaaatacgcgggggttggatgatataatttttgtatatttgactgctgatttatttaaatggtcgttttgtaaaattctggagtggtaaaactttgtctgttttgcaacttaatcccctttgcgcacatgctcttttagccaggaggcataatacgatagaggttttcaccgattgcccttactgacagttgcatagaatgcatggtgaatgggacctttcctttat

SEQ ID NO: 2307 - DNA, 935 bp, Oryza sativa
  Clone ID: PAT_MRT4530_102090C.1
tttttttttttttttttttttattagagaacggcaacacttattatttgtttccatggccatgaccttttatgctacagattaatcgaatcaatgacttcacgacaaacgagtgatggtcatgtgctgggtacatgagttcgaacccattgacacacggtatgaactcatgaacatcaactttgcagagtacagtctacaagttacaaacaattcactagcaacagcgccacactgcgcagatgattgaaggatcaagcagaataacaaaaagattccagtgataaaacaattaaagctgtgggttctcagcgtcttattcagatcacttctcgggtattactgaaggaggaggagtttgcagcacagattaggagtaattgctagtgtagaatttcttcaggaagtctgaggacccttggtctttctccatatcctgcaccagtcccttttggccgaccacatattgcccgatgacgtgatggcgctgcttcgcgtgttcggtgatgttgcccagctcctccatccccttaaacaggagcatatcaatgaccttggggttagtgacgccctggttcttgcggatctccttggcgatggtggagcggagctgggacggggtgacgacgtcgtcgaggttgtagatctccatgatggaggggatggcgcggcacgcctgcctgaagaagtcgaacacgcggtgccgcgcctcctccagcgacgccgagttcggcggcaccttcaccgcgcgcatcgtgaacgccatctctctctctctctccttctctcctccggcgaatcggcctctcgccccccgcagccgccgccgtctgctgcgccgccgctctccggtggctccgattggtggtggtggtggtggtggattcgagctcggagagagagagaagggtatcggaatcctctcgcggccttgtt

SEQ ID NO: 2308 - DNA, 757 bp, Oryza sativa
  unsure (1)..(757): unsure at all n locations
  Clone ID: PAT_MRT4530_102091C.1
ccggccgggatagttggcacccatccttatctcttatctccaaaatcgattccccaaccctaacctcccgttctcaacgacggcgccgccgcacagatctggcactatccggcgaggcttgagctgcctggggccgggctccgtcgcctcctttgtcggcgcacggacgaaggaagccgaggctttagtctagcgtcgtcccttttctgtcaggaaaggcgaaggttatggttcgccgccgaacttcgtcggctgaaatcatggcgccgccgtggctgatgccacctgtgttcagccggaaggggtccggcacatcgcgagcgtcgctatatagggggcaaatagctccgatgccggcgaggttatcctccggcgatgaggtctttgcgggttttctcatcagaacgagctgtcatcgcatcgtggcggagtttgggtttctctgagacatgacggggagcacgagcttgaggaccgcggcgtcgtggcggtgtttgggtttctctgagacaggacgaggagcacgagcttgagctaggtccttcttttgatctctggatgaccgagagatgcgagatgccaccgacctgattatttggtggttgatccgtcacttgaatttgcatgatcgtccacaagcattcggagcacatggggaaatatatatgnatatgctactggtttttctcctattgcctcttctactcggatcttcttctactagaacgatttaaatcactacagcgttccgagcaca

SEQ ID NO: 2309 - DNA, 1152 bp, Oryza sativa
  Clone ID: PAT_MRT4530_102092C.1
ttagtagtttaaaaagcgtgcgcgcgaaaaaggaaggagatgagttggaaaaattaggggaataacacaggaaccggatcgctcccgcatattggatgcgcgggaccggcccctctctcccgcatggcggatgcgcaggactgccactccgtcctttccacattgtgaatacatgtccttgcggatctctccctgagctccggtgatcacgttgacctcgccgagcttgatgagcgcctgcgggaagagcgacgggaagaggtcggagttgttggcgagcaggttgacgatccacttcgtcgaggcgccgtcgccgtagaggttctggtcgcaggggagcacgccgcggcggcgctgcagctgcttgtagtagttgctgtccacccgcagcgcgctccactggtcgtcgaggaagacgacgttgccgtcggacgccgccgcgttggggcacacccacgtcttgtacacgaacgcgtagtacgggtccagcgccgggtccgtcgcgccggcgcggccgccgtacttgtacagccggctgtccttgatcacgccgcagtgcgtggcgccgacggtgtgcgcgcccaggaggagcaccgcgtcgaactcgctcagcccgagcttgcggaagaaggcgacggactgcgccgccgtgctgtccggcgccggcaggaccacgtcggaggccctcgactggcggcggtccctccgccccgtgcgcaccgcgtacggccgcccgccggcgagcgcgacggcgtcgcgggtggcgaggatctggatgtcggagcaggacaccacgccggggcaccgcctctccagctccgccttgatgtcggcgatgaggtcgtaccccttcacgctcaggttcggcgacgccgtcttctccgtgcctggcccgtcgatcagcagcccgccgtcgcacccattgacggcgcactcgtggaactgcatgcgcaggaggtaggcgacgatgggggcgtcgcgggcgaagcgtgaacggacgatgccctgcaccaccgcctccacgtcgttggcgccgcacttgcccttgtagaacccgttctgcagctgcgcgtggccggcgccggcgagccccagcagtacggcggccgccaccattagcgccgccgtcgccaccctcgtcatgatcgccat

SEQ ID NO: 2310 - DNA, 13235 bp, Oryza sativa
  Clone ID: PAT_MRT4530_102093C.1
atggcagggcttggcaccggagcgcctattgtgaaggtgtatcatgagaaatctatgatcttacctgatgtttcaagggtgctcacatgcctctatgagaaggatgtcaagtttgagccttgcacaacctcttacaagagcctacttagactccaggcatcaacccatgctccagttccattctatgatggacctacatttctggaagaatccagagaaatctgccgctacattgcagaaacttatgaacatcatgggtatccatttctccttgggaaggatgccctcgagagggcttccatcgagcaatggctccaccatgaggagcatgctttcaaccctccaagccgagccttattctgccacctggcctttcccttggatcaagaagatgatctagagatgcagaaggcaaagctggatgaggttctggaagtttatgagcaaaggctcagtgatagtgaattccttgccggcaataaatttactcttgcagacctcgtacacctgccaaactcccactacatcaaagcatctggcaagtttgcctacctctatgactcaaggaagaatgtgcagaggtggtggaatgctatttctacccggcattcttgggatcaggtactgagttatatgacaaaggtggagcaggacaacaaattagaggaacttgagaaacagaagcagcaggagtggcagagagagtatcatacagccactggacgcagaactcgactgtactcacggaagcatacccgcacaaagtctcagacaatattggttcctcctcctgatactgtctcagcgtctcccacggctcctcagggagagcagcctcctcctgctgattctttatctgagaaggcatcagtattctcaagccaaagtactactcataaatctatagcttccccaagcaaaaaaaatacctcatctaccccaagcttgggtaacttccctagcacagctgataaacctccaagaattcatgctgatatgtctagcattagagatgtctcagtcccccctgacaccactgagacagagcaccccactagatccatgctaagttcatccaaggaagtaggaacctatattgaacctaccccacaaaagcctccagcatcgctggataatttctctgaatctgatgggcctatcagtggtgctagtcattctcaaatcagtccaagaacagccaaagaagattctgaccgactccatgcatctgatttgtatagaagtgacagaaaatctactggtcacagttatgaagctacttatggcaaatctcccacccggggagctacagacagttctcccaacaagctccactctactgaagcacaccagatgctgcaggctgagaagtggcacgctgttcaagctggattgcgcaatctacagggagatattgataattcagtgcctagtcgacaagtaaaaccaagcaaagaagtgcaacagtatccatcacaagattcagagcaagtaagcatccgtcctgttgctcaagaaccattgagtatggacggccaactggttcaagggccagaaggtacagctcaaacaccccatactgatcagacaatgggtgtttcttctccgcattggcaacatgctgctgatgctagaagaatttctgaggatgaggcatcatctgatcgaaggataaaaggtgctcattggtcaaagcatgcagcagatgaagatgcccaagctataccattccaaacagcacgcgatgattctcaagataccacccagagagcaagagaaactgattctgtgacaaggagtacaagggatcaagatgcacatgatagcagacaaggaataatgacttatgactctgcaccatctagattgcaacctatggatgcttcacacgatgctcctctgccatcaaagaaatcaacatctcaaactccttacacagccgcacatattcctacagggtaccaaggtgctcaagagttcatccagcaaggtagggagagacctaaaccaaggtcagtagtgccttatgatgcccaaggcagcactgaagaagaaaaaatggctgaatctccaccatccaaagcacaaatattgggttctcgtggactcgatgtttctccaccaaaagaagtgttgaatgaagatggttatggtgcaactggtccattgcaaacaagatatggagatgatcaagatgattggattcaagctagagatagcaccactccaaggcatatgaatcaagatgccattgaagaaacagagatggctgattctgaaccatccaaagcacgaacattagattctcaacaagcttttccacaaaagcaaccaccagctgaagatctacgatttgctgcttcaacatccaatagaagatattttgatgatcaagatagcaccaagaaatctaaacacactgcttcaattccaaggcgaatggaggctcaaggcagcttagaagaaactaaggctggcgaatctggattgcctagagaacaaccatttttgcaagcacaagctaaagatgctcgcagcctgactccaccatcacaagagggatatgcaggccctcaagctgttagcaagcaacgtggagaccctggttctatatcaaggcgaataagagcccaagatgctagagtcacatttgtagaatcaaaagctgatgattccacatttaccagagagcagccttcggatgcttggcaagctacgggtcctctcccagagcacaaagtatatgatgctcaaagctcaacctcaccatttcaggacgccaccatgaaatcagaagacaccactccacaacagaggagaggtcaaggtgccaaagaaacgaagttgtctgattctgcatcgctacaagttcagccctcggattatcagagaagtgattctcattttcaaaatcaagaagaaattgaagatccacatggtgcaatttcaccacacaagagaagctacactgatgttgaagatatgaccaaacatcctggagacaaaatactgggtgaggatgctcaagatgtctctgaagaaacaaaggctcttgactctacaatagttagaggcagagcacatccccaggatactcatcaagctgcaattcctccacgaaggcaagcagcaaccaaagatgctctgggtgtgactccacatttcccaacaagatacccaactgcagaagacaccagcaggcaactcagaagaactgcttctacaccaacagagaaagctgttcaagatggtagagatgccttcagagaatggaagagtgttgattccacatcatccagagaacaaccttcagatgttcagcgagctgaggcttccttcccaaagcaagaagaagctgattctcatagcacaactgtgccattccaaaggaggtaccccgatattgaagacacaaccaaagaaccaatcgataagccaaaggaaatggtgggcgaggatgctcaagctggctttgaagaaacaaaggctcttgacgctgcgacagaaccccgagatactccgcgagctgcaattactccatcgaagcaagtaatagcgaaggatgctctcagtgtgactccacttcccccaacaagatatccaacagcagaagacaccagcaggcagcccaaaagaactggttctacaccaacagagaaagcagttcaagatggtagagatgcctttagagaatctaagagtgttgattccacatcatcgacacaacaaccttcaggttatcggcgagctgctgcttccctcccaaagcaagaagcagctgattctcgtagcacacctttgcccttccaaaggaggtaccctgatgtggaacacaccaccaaagaaccaagagataagccaaaagaatcagtgggcgaggatgcccaagatggctttgatgaaacaaaggctcttgactctgctataattagaggcagagcccaaccacaagagactccaagagctgcgattactccatcgaagcaggaagcagccaaagatgctctcagtgggactccactttccccaacaagatatcaaactgcagaggaaacggtgggtgaggatagtcaagatggctttgaagaaacaaaagcttttgactctgctatatttagaggcagagcacaaccgcaagatactcgtcgatctgcaattactccaccaaagctggaagaggccaaagatgctctaggtgcaactccacatcccccaacaagatatccaactgcagaggacaccagcaggcaacccacaagaactgcttctacaccaatagagaaagcagttccagatggtagagatgccttcagagaattgaagattgttgattccacatcatccagagagcaaccttctgatgttcggcgagctgctgcttcccttcgaaagcaagaagcagctgactctcatagcacaactgtgccattccaaaggaggtatcctgatattgaagacaccaccaaagaaccaagagataagccgaaggaaaaggtgagtgaggaggctcaagatggctttgaagaaacaaaggatcttgactcttcgatacttagaggcagagcacaatcccaaggtactcagcgagctgcaattactccaccgaagctggatgcagccaaagatgctcccggtgcgactccacttcccccaacaagatatccaactggagaagatgccagcaggcaacctagaagaactgcttctacaccaaccgagaaagcagttcgcggtggcagagatgactttacagaatctaagagtgttgattccacaccatccagagagcaaccttcagatgttcggcgagctgctgcttccctcccaaagcaagaagcagctgattctcgtagcacacctttgccattccaaaggaggtaccctgatgtggaacacaccaccaaagaaccaagagataagccaaaggaatcggtgggcgaggatgcccaagatagctttgaagaaacaaaggctcttgactcttcgatgtttagaggcagagcacaaccgcaagatactcgtccatctgcaattactccatcaaagctggaagatgtcagagatgctctaggtgcaaccccacttcccccgagaagatatccaactgcagaggacaccagcaggcaacccacaagaactgcttctacaccaatagagaaagcagttccagatggtagagatgccatcagagaattgaagattgttgattccacatcatccagagagcaaccttcagatgttcggcgagctcctgcttcccttccaaagcaagaagcagctgattcttatagcacaacagtgccattccaaaggagctatcctgataatgaagacaccaaagaaccaagagataagccaaaggaaaaggtgagcggggaggctcaagatggctttgatgaaacaaaggctcttgactcttcgatacttagaggcagagcacaaccccaagatactcagcgagctgcaattactccaccgaagctggatgcagccaaagatgctcccggtgcgactccacttcccccaacaagatatccaactggagaagatgccagcaggcaacctagaagaactgcttctacaccaaccgagaaagcagttcgcggtggcagagatgactctacagaatctaggagtgttgattccacaccatccagagagcaaccttcagatgttcggcgagctgctgcttccctcccaaagcaagaagcagctgattctcgtagcacacctttgccattccaaaggaggtaccctgatactagagacaccacaaaagaatcaagagataagctaaaggaagcggtgggcgaggatggtcaagatggctttgaagaaacaaaagctcttgactctgctataattggaggcagagcccaaccacaagagactccaagagctgcggttactccatcaaagctggaaggagccaaagatgctctaggtgtgactccaattgccccaacaaggtatccaactgcagaagacacgagcaagcaatccacaagaactgcttctacaccttcagagaaagcagttccatatggtagagatgccttcatagaatcgaagagtgttgattccacatcatccagagagcaaccttcagatgttcggcgagctgctgcttccctgccaaagcaagaagctgctgattctcgtagcacaactatgccattccaaaggaggtaccgtgatattgaagacaccaccaaagaaccaagagaaccaagagataagccaaaggaaacagtgggtcaagatgtccaagacacctatgaagaaagagtaactactgactctgtgctgtttaccaaacaaccttctgatatgccccgagctgcaatcactccatcaaagaaagcagcaaatgatgatgctcctagtgtgtctccacctttgcctacaagatatccaagtgctgaagacaccagcaagcaatctataagacctcaagatagtagggatgtctttagagaacaaaaggctgttgactccacatcatcccctggaccctcagattctctcagggcttctgcttccctcccaaaccaagaagtagatggtactcgcagaactactgtaccatttcaaaagagagagcctgaacttcaaaacagcacaaagcctgttaacgacagcatttctacgtcatgggaaatgacagctcaagatactcaagacacctttgaagaaacaaaggttcctgattctgcagcattcagtatgcctgaagtggattctcagagaactgatgcagaggctcaagcagaagctcaagatactcgggatggaggcagccgaagcagatggtggcatgcatctaagacattaccagatggaactcctatttctggcgatgatgtgactggattgtctcctggtgatcaaatgccaacacggatggatcaagatgcaattccaagcactcagattgccaatgggatcaccgaaagatctattaagcaaactgctgaaccacctgcaccagtagcaccacaaacaatttttcatcagcaagccagaccatctgcaccaatcacaaaagaagttcaagcctcagataaccaaggtgccataagcaaaatccagcaagtttctcctgataatcatccaactgattattcagccgtaccacgtgttgcagctcaagaacaagtttcccacgcaccacagacaagtcctggtcgagaaggcataacgcctgcgcaaagagaaatggattctccaatttcagatgccctacctgcttcagcaaaagttcaagaacctgcccctgacaagtcaacaatgccatttgtctcgagtgtaaaacaaggttctcatgttggacatgatgttgaaccacatgaagggccactacccgatacttatggtgctgtagttgacaaagagacaactaaatctctatcttggcaagatcggagtttggaagctagtcctgattcaacaccaacccatggctatgttcatcctacaagcagggatgaacctgccattttacctggtcagggggcaccccaagaaccaacacatcctgatgctctagattctgcatccacccgagacgtaactgctgattccttggttggtcctaagaaattcaagcaacgttcaactgatcaagaggacatttcatttgcatctaaccaaacatcaggtatgggcgctcaaccttattcttcactggataaagtagcccgtgctgaacagaaatctgacctgtcagatcaagatccaagtcattctgcacaagagactgttcttgctgctgccgaacggaccaaggcactgccaaaacccattgatcaacaagagacaccggacagtagaaagcctccaacaccagatacccaatatgcttcgcagataatcccaagtcaggagaaagttgctcctgatgttccaagccaagagaaagtttcccaggctgaactgtctttgaaaccacatgaaggatcaactcctcatatgcatggcagcattgttgatgaaaagaaaactagacctttggctagcccaactaaaagttcaaatgatgtgcttgatctgacaccagcaggtgctgatgttcatcctacaagtagcactgagcctcccagaagtgctttaccagttcaagcacaaacaccatctgctacccaaacacctccaccttttgcatctcacaaatctgtgcgtactgaagatatacgtgctgacgccaatggcaaagttaaatccgtgaagccatcagcatctccagatgctccacatgctaccgcacctggtgaagtagctctttctgaacagaaattagcttcagcaggtcgagattcgtctcgtgctgcacaattgccttcatctgatgagccaaggaatgaacagattaaggattcagatcacactgcacagccattttcgtctgctgcacctgatcaagccaaagacttgcaaagaacttttggtcaaccagacatttcacgtgcaccaggaacatcagaatctccatattcagatgtatatgatggtgcaaggaaagttgatcctgattatcaactcattgacaaaacaattccaagccaagaacaagtctctcatccagatcttgcttccaaaacaaatgaaggaccaacagaaactcctggaccagcccctctcatggatgtatatgactccatatccacccaatatatacaggacggtgacttagacaaagatcaagattctgctaattttgcacagaagtattcgtcaagtgagccaaaagaagaagagagtactgttgctgcacctgatcaaaccaaggaaatacaaacaacagttggtcaacaggacatattgcctgctgtaagcaaagaaaaagatccatcttccggcgtccaatatgattctatggaagttcaggaagtcgctccgaaggatcaacacatcgatgggtcaattccaagccatgaacaagctcctaatgttgaagaacccatgacacatataacaggcccaacatcagccctagacactcaacatgatcaagactcgtaccagtacccagaactaccttcctctgctaaatcaaggaaagagacagatgttgctgaagctgataaaaccaaggcaaaacaaatgacctttggtcagcctgtaccagtcccaagtgacgctacaagatctgtaactgatcaaggggcacagcaaccgcagcgacctgcaaaaattgagtcaccaccatttttggagacaataaagaactacgagtacacccaaaatgtatctgatgagaccttggacaaaaacaagtcatccggaaaaccctctgctgatcaagaagttatgtcacctaaagtagtcccagcaacatttctagaccctcaacgtgttactgtcccagatgatgagcaaaaaattgctaagccagatttaactcgttctgcacaacctcctttctctgctgagccaacaaaaagaaagactgttgttggtgcatctgatcaagccaaggcttcagaaacaattgttgatcgagaaggtatgatgactgccccatacagagaaaaatctctttgtccagatacccagcatgctttaaggaatgttttggaaatgtctcctagtgataatcttactgataatccatttgcaggccaagaacatggttcttttagtgaggggtcaactactgactcacgtgatgccattactgatgagagcgcaaccacatctacatctggtagcgaaaaagtcttggatgcttctattttgacagcaactcatgatgatgctcatccgccaactgtaagaaatttgcctgagcatgagacacaggcacctgcatcaactcaaagtgcatctgtcgaggcctcagacaaagctaaatcaactgatcaagaagacatgaaacctatggcaagccaggcatcaattctggacactcaacgtggtaccaatggtgataagcctatagcaagatttttgcatgatcaaggggcacagtcacctgaattaactcatccacagcagcctcctgaatctccacctcactctgcatcacaacatgatgcgcccactgatgtgttggacaaaaccaaaatgactaaactgacctcaactaaccaagaaggcatggcacccactgctggttcaagatcaactttggaatcccaacctgatggtaccttcgcagctgaagtagtccatgacgagcagaaatccactctgtcagatcaagagtcagctcgtgccacacagcccctttcatctgttgaacgaagcaaagaagatactaatgtttctgcagctgatcaacccgaggttccacaaacaatttttcatcaaaaagccagatcatctgtaccagtcactagagaagtacaattcccggatagtctaggtgccataagcaaaatccaggaagtctctcctgataatcaatcaactgattattcagcagtacaacctgttccaactaaagaacaagtactccatgcaccacagacaagtcctgaccaagaaggcataacacctgcacaaggagaaaaggattctcctatcccagatgcccaacttgttccacatgctctacaagacaaaggttcacctcgctctacacaaccgcctccccctattgaatcaagtgaaaaggagtctcaaattgctgaagatggtcaaaccgttttactacaatcatccgttgttcaagaatccacaccatctttagcaggccctagagaatcatcaagttcggattctccgtatccatcagcggaaaatcaagtatcaacccctaaggaggtggaaccacttcctcctacgacaggtatgatggatcgcgtccagccttcttcggaagcaacacctggagtagtcgctggcatctcagcgacacctggtgacaaccaaccgtcaccagacagggaaagcgtggaagtagctgaagaaggcacggaccaacaaaaggctgaccaagctagtgtgcaatcaccacaggacaacatgggccaagttaaagaaaccgaggagcaggacactggaacaggtgagacttaccaagctactgtgcaatcaccacaggacatcaaggagcaacgcgacgaaacagagcagcaggacactaggactggtgaggcttaccaagatgcaccagccccagatgctccacaagacaaaggttcacctcgctctacacaaccgcctccccctgttgaatccagtcaaaaagagtctaaaattgccgaagatagtcaaacccttttaccgcaagcatccgctgttcaagaatccacaccatcttcagcaggccctagagagttcacaccatatccatcagtggaagatcaaggatcagcccctaaggcggaggaaccgcttcctcctacgacagctaatcaacttggaagtggaagcccttggaaattcaaatatcaggttgatctcgtaggtatgatggatcgcgtccagccttcttcggaagcaacacctggagtagtcgctggcatctcagcgacacctggtgataaccaaccgtcaccagccagggaaagcgcggaagtagctaaagaaggcacgggccaacaaaaggctgaccaagctagtgtgcaatcaccacaggacaacatgggccaagttaaagaaaccgaggagcaggatactggaacaggtgagacttaccaagcttctgtgcaatcaccacaggacatcaaggagcaacgcgacgaaacagagcagcaggacactaggactggtgaggcttaccaagatgcaccagccccagatgctccacaagacaaaggttcacctcgctctacacaaccgcctccccctgttgaatccagtcaaaaagagtctaaaattgccgaagatagtcaaacccttttaccgcaagcatccgctgttcaagaatccacaccatcttcagcaggccctagagagtccacaccatatccttcagtggaagatcaaggatcagcccctaaggcggaggaaccgcttcctcctacgacagctaatcaacttggaagtggaagcccttggaaattcaaatatcaggttgatctcgtaggtatgatggatcgcgtccagccttcttcggaagcaacacctggagtagtcgctggcatctcagcgacacctggtgataaccaaccgtcaccagccagggaaagcgcggaagtagctaaagaaggcacggaccaacaaaaggctgaccaagctagtgtgcaatcaccacaggacaacatggaccaagttaaagaaaccgaggagcaggacactggaacaggtgagacttaccaagcttctgtgcaatcaccacaggacatcaaggagcaacgtgacgaaacagagcagcaggacactaggactggtgaggcttaccaagatgcaccagccccagatgctccacaagacaaaggtttacctcgctctacacaaccgcctccccctattgaatccagtcaaaaggagtccgaaattgccgaagatagtcaaacccttttaccgcaagcatccgctgttcaagaatccacaccatcttcagcaagccctagagactcattaagtttggattcttcgtattctttgatggaaaatcgaggatctgttcctaacgtgggaaaaccgcttcctccttcgacagatatgatggatcgtgttcagccttcattgggaccttctcttgaggtttcaagcgacgagaaaaccactgtccctctggatggtctggcgaacaacctatcaaatgtcagtccctctgtcacagctagccaagtacttggtcgatctgaaaatggttctggtactggagcgctctctggagaaacggtaccatcaaattctcaagaaaattctgaagggacgccaagcgaagaaatatcaaagcagcaaccgcaaactaacatgtccagtacaaaattatctaaagatgacaataaagaagccgatggctcagccaatgacaccaaacctggagacagtgaagataatccatctcgatgaattttgcaacccgtcaacctacccaagattctggagtgcactattaaataaatatttatcaactgaaaccaaaactgggagcagcttcattggaaggaacagcatcacataagggccagtgagactcagaactgcaccagtagtttcagtttctgaattatcttgccttttgtttaaccaagtgatttgcttgattgtaaacgtatttacattttatctgggtgtttatgttaatgatgaagctgcaacaacgttcattttatttt

SEQ ID NO: 2311 - DNA, 414 bp, Oryza sativa
  Clone ID: PAT_MRT4530_102094C.1
ttttggttttttttacgttgaggggttattgtttttaacaattttttttgtatttcagtcattgattgataccggacaaaaactgatcgacaaagcgagaaatttaaccaggaagcacacaaaaaccgcacaatatcataaaagcaaggaaggaggctgaagcaggacaattttattacccaacaaaaaaaaccccggaaaaaccaaagaccgcatcctgatgatggagcggaagccctaaccatagggcaggaggaaaaacgcagagagggtctccgaaaacggcactctcagtgtgatgaacaagatcacctccatcaagggggggatgtaaagctaggaaacgctgggcaaaaggaaacggggctagccgctgccgaaaaaggcaccccggagaggcccatccttggggaa

SEQ ID NO: 2312 - DNA, 1388 bp, Oryza sativa
  Clone ID: PAT_MRT4530_102095C.1
gtacaaaaaccaaattgcatatgtaaatgaaaaatgagcatagggcaaagcttctaggtttaacgttgattttttttttttttttttaaaaaataactgttgcagtttggaaatgtttttgtgcagatcgaacgcagggatatatgtagagtattctaagtagcattgtggttgtcatggtcaatccaagatattctagtctatgcagttaatagcagtgaacaaaaaggagggcgaacttttctttcctgctgatcaatacactgagcaaaaactacctgtgtctgcgtctcttggcattttcttctgtgaaggattcccatgcactatggtcaagcttgctcaaatcttctagctctgcaatggtaagcaggtattgtgtaagcttcaccagctcttgatcagtgcctctgtttgaatgggtcctcttgtatggtttgatcacaagaccattctgtggattcatgacaaagttccttctgaggtcatcaaacatgattgtgtttgtttcattgtactcggggaactgagcccaaatgacaccaagaggcttgcaatcaaaagttttcttttctgacaggttttcagattgcacagttatcatcgccaagtgatccataagagcagtaattttgtagttggggttgccaagaactccaagttggtccatcttcatccccacccatttcatgctagttgctgaccatatcatgatatcatattctgaatatgcagcagagaggaactcgtgtagatatggacgcatcaattcgatagggttctcagcagcggacctatggtcgaatagagtataatcaatgtctaagacaagcagttttttccctttgcggcatggattcaatatcttgatcttatattgacttgcacgccgttttagtttttgcttgtagacatctttatccttgatagcagtaacttcattctggcctatttcataatcattgagtatctctggatcatcttcttggtccacaaatatttcatcttcaacagtgccgatcatgttgatcttgacgttgggcttgaaggggatggaggagatgagctcggagtccttgcactcgttgagcttgaacttggggtagagcagcttctgccgtttagggagaacccccgtgacctcgcagatgcgccgcttcagctcccccagcgtgtcgtccccgaccacccgcaccgtgtagtcgttccctttccacttcgccaccagcgtcatctcctccggtggcgctgcctccgccacggcggcaatcgcctccgggtccagcggcgggaccgccgccgccgaggacgaggacgcctccgccatcggcttggggtctgaagaaacaagtggagagagagagagagagagagagagagagagagac

SEQ ID NO: 2313 - DNA, 167 bp, Oryza sativa
  Clone ID: PAT_MRT4530_102096C.1
cgccaggaagaaagcagcggacgccgtctgcctacaactgtttcgtcaatgggctcacttacccagaatccagcagaagcgaggcagggatagctgctgaactacacctgcaaaacaaggcaaacgaaattaatgggcacgagtaccaggcagcagtgagctactag

SEQ ID NO: 2314 - DNA, 930 bp, Oryza sativa
  Clone ID: PAT_MRT4530_102097C.1
tttttttttttttttttattggttaatagaaaccatggagtggagctaacgaaatcctaatttaagtttataaaaaaacaatcttccaagctccatttaacacattccatgctgtagtacaccagcaacgatttcaggcggtgaacaagctggaagctaagagcaatagttcgtctaacatgtcagtttggggatctagcttcaaaggcttcattggtcaaagtctgaggcaccaaaaaaagagtaatctggatcagcagatgagccaagcaaagggatgtactctgatcctctcacatgaacactgaagcaagcattctcaattttcactacactttgcagcatagtctccatcttcttcttcatctcactattgtcatccatcagaggcaccacaagggtcagctccctgtatatatcacgtacaaatgcacaaatgtttttggcatattcaacttctccatcagatatacggccaattgcaagcctcatcagctctcctgacagatcggcaacccctaaaacatagtcgagtacatttatctgtaagggctcaacagatttgtcacccagctctagcaaagaatcattgatttcagcaagacttaataaagtgccagtcttgcaaaatctgcagaatgttgcagcttcaacatattcttgtaccaacttcccaatgtattggttaaccacaacagtgagatcattttcagcttttgaaagaacctcttccttgttattcttacttatcctgtgaacctgaaagatggcctttttgctgttcattgtcaaatcccgacttgctttcacaagcctttcccttttatcattcagggtgttgaggtactcggcgtgcttggcgaactcggccttcatcgcggagcaccccgccgaggccgaatgcgccgtcgccgccgcgtcggtggccat

SEQ ID NO: 2315 - DNA, 2205 bp, Oryza sativa
  Clone ID: PAT_MRT4530_102098C.1
atgtcacggaagcgcgagcgcccgctcgaggtcgtcgcgccgccggcgaccccgctctccccgagcaagcggctgcggcgggcggggctcgtcgttatgtggctgcgcaggaagccgaagccggtcggcgtggagcagatggcggcgcgcctgattcggcagatgcaagtgcagatggtcaaattgtttatgcttctcatgtttctcgtcgcgcgccttggcaacgtggagaggctgcttctcgagcaaccgtatctgatccgaaggttgcttgaggagcactttggtatttttcagagatctttgatggaatccatacaagatacggttcgcaaggctgtccactcagaggccagtattttggaccttattcacatgaaggaaagacagacaacattactttctggaggtgcttatcagcatccaagaccaaatatatcagaaggttttccacaaactggagggagcactagaatggttaagttattttttgttgatgttgagagaccagaagacccacttttcacaggttctccagtacaatggcaaaatggagccaacgctaaagttgcaatatttgaaaatgggagtcaaatcacacagggtggtctttctaaactacaaatcgagattttaccagtccatgatgatttcttcactgagcgaggaccagcaaatttcaccaaagaggaattcaacaagcagatatacatgtgcaaagggaaagagtcagtattgaaaactgtcaatttaacaaatggtgaggccaatcttggttccttcttctttacagagagttcccatgggaaaaggttaagattggcagcaagagtaaaatatcaggatcttgcagtcagggttcaggaagcaaccagctattcttttgttgtcaaagaccgtcgtagtaaatctattctggtctcgtacatgcaatggcacttttctagtgaaacgaagtttgccacttgtcttgcacttttagaagggaacacctccagccaaccttattgcctactttcagtaaataaaaagagcaattctccatctaaggaagaagggattcattgtttgaagaaaatttccctaaaaggaaaacgttgcaatgaccttgcgggcaaatatattactaaggtgaagcatttgatgcgctgttaccacagagatccagctggtctccaaaagcttactggcatgaagaatgaagattggaataccatgattagtcatgcaaccacgtctgatcctggggatgagatccattcttacagagttgagaaaaatactataatcttcttcaatgatttctttgctctagtcggtatgtcggttgatggctcctatgctccttaccacgccaacaatcttaatcagctacagcagcgtaaaatgaacaagtggaaggagtctgcgtatcagaaatttgaggaactggagaagttggggtgtcttattcctgatcatgtcatgatcaatggccaacctgttcccgtgtctccaaaaaatgatgccagtcattccatacaagccaacccaacatgctttaatcaccagattgcacttgaagaatctggtcgggagggtccttctatgcagcataatggaacttcttactctctgactgaggaaaacatcttgaacggtctaggctctggcttagtacaatcaactatcctatctcaaaatactgcagtagtcccaggtgcagatccacggcacagtggatatgccagcacctctacagctgacgctgctggtacttcttgtcctgtaacagatggagttggtccatgggactatccgattttcagtgatctgtatccaaatgtaatgttccaggaaccgtcaggactaatctatgggcatgtggtggaggcagaccaggcctttctcccagatagccacgaactggcaaatgccgacaaccaatttactggaggtaatgatgatagtgctccatttgactgaaatcaccgcaacaagttattgtctactctcaaccatactaaagtgttcagtacttccagtgtgattataagtgtgtagtagttcgtaaatatagtagggacatattatgtcagctattctttaatttgttccgctcacgttaaatttgctgcctgcacatttggcatagtttgtttgtactactgaatactgagatcaaatattgatattgatgcaccacgcctaattcaattcaattag

SEQ ID NO: 2316 - DNA, 892 bp, Oryza sativa
  Clone ID: PAT_MRT4530_102099C.1
taatttggaatgttttggaagctgagcgtccagatttaaggcagttgcatgggaagtctcttgttgaagtaaatagaagtttccttgaaaagcacagtgcttctttgacgcacagagcagcagcagctgaaatgatgtacctcttggaaccagataagaagcttgaggcaatcaaattaattgaagattcagtaaacagcacagcatcaggaaacagtgtgcttggtcctgtgaatgaatggaaaattctagactgtattgatgttcacaaattgctggagacaatctttggtgaccaggatgtggcaaacagttggaaggcacgatgcgctgaatatttcccatactcaacctactttgaaggcattaagagtgctagtgctgcctattgttctgttgccaatagtcttgaggattcatcagaaaatggaattgtagcaaatgcgcaaatgaaatcagcagacggagaaacatgcactttgaatggaactgtgcatattgtggatgaactgagcaatctaagcattaggtaatgcgccataagcagggtacctggttacagctggaacagaacacattttagagccagtgcttaattaaccaagagtgcacacagaagacgagagatctagagggcgaagtgctagactgcaaagaggaacttcttgatgattttcatttggaatatattattgattgggagctgagatctcttcggtctctggtgaatttctgagttccagcttgtaccttttcgttgtcatcttgtagatggtgaaaaggataacctttcatctccagttcccatgaagctttgcccgggggtttgctgccctggctacatcagggcgtgacattctttttgaagcagcggacccttgaatttgttgca

SEQ ID NO: 2317 - DNA, 696 bp, Oryza sativa
  Clone ID: PAT_MRT4530_10209C.1
atggacgccggtgtgggtctccgggcgaagcccggcgcctgggccggactcggaaacccacgccgctcttccacggcgagggttccggtgaggttcgcggtggagaagttcgctcagccgttggttttgggctctgatcgccggagctgcggtgccaaactgaaggtttcgtgttccaggaaaccggcaggtattgacaaaacctattactctgctgatgaagctcttgttctaaagcaaaaagcagaggacgtggtcccttatttgaatgaccggtgtatttacttagttggaatgatgggttctggcaaaactacagttgggaagatattagctgaagtattaggctattctttctttgacaggagttacatgaagaaagggtcaacaatctggttagatgttccattggatgcacttgcaagacgaattgctgcagtaggaactgcttctcggcccctcttgcatcaagaatctggtgatccttatgcaaaggcttatgcaaaactgactgcactttttgaacaaagaatggactcatatgctaatgctgatgccagggtttcactcgaacatattgcagtgaaacaaggacatagtaatgtgacgacacttacaccaagtgccattgctattgagggtaaacagccgcgggagagaggttggacagtgccgactgaagtacagagatgctag

SEQ ID NO: 2318 - DNA, 195 bp, Oryza sativa
  Clone ID: PAT_MRT4530_1020C.1
atggggtgcggcgacggcaagcgctccgccacggcgttgaagatggtgatgtccgtggtccgtccagccgacgccggtggtgtccggtcggaaataggccggataccacgtcagctaaaacaaacatacctccaccctactataggacctgatttagactgttttgccgagaagaggggtgaagatttctggtaa

SEQ ID NO: 2319 - DNA, 119 bp, Oryza sativa
  Clone ID: PAT_MRT4530_102100C.1
ttaaaaaggggcttgttgtggagattgcaaatatctttaaagaaggtgggaccggaaatgaaacgttggtaagggggtcgattatgtaatagctatcatttttaaggtataaattgtca

SEQ ID NO: 2320 - DNA, 3951 bp, Oryza sativa
  unsure (1)..(3951): unsure at all n locations
  Clone ID: PAT_MRT4530_102101C.1
ttgtcttttcaggcacataatgtttctctttgttgcaattgattaacatgtctcatatattaagtatatataaatcgaatctcagaaagcctatggataagatagctgagatttcttataaaatggtaacttcctttcctgttgcctcttcctgttaatgtacatactgtgaatgggaagcctatgttgccatgctgataccaactacaggtttggagcctcaatgtaaaacatgtctatagtttctttggtttagatagtagactgatttcgtgttgtacagaaacaataaacacggaataggcccatattatgtctgcaatcatcttaatctgctagatgatattatcagaaacgtagcattctggccggttgtcacttcttattccgggaactagaagattcagtccagttatgaattcaatcattttcagttatggtctcctcgctcctggccaaggtggccaacctcttcaaagtcatcgtcaaatcctatgagacaaagcaatatatgaagggcctgaaggcagcagattccattttaaagaagttccctgagcatggagaaaccttatcaatgaaaggtttgacgctaaattgcatggatcggaaatctgaagcatatgaacttgttcgccgtggattgaagaatgatctgaagagtcatgtgtgctggcatgtctatggcttgctttatcgatcagacagagaatacagagaagccataaaatgttacagaaatgctctgaggattgatccagataacatagaaattctacgtgacctgtcacttctccaggcacaaatgagggacttgtctggctttgttgagactaggcaacaacttttaacactgaagccaaatcaccgcatgaactggattggttttgctgtagctcaccatttaagttccaattcttccaaggcaatagaagtattggaggcatatgaggggacactggaagatgattatcccccagagaatgagcgatatgaacacagtgaaatgcttctgtataagatttcattgttcgaggaatgtgggatgctggacagagctcttgaggagatgcagaagaaggagagcaaaattgttgacaagctatcgttcaaagaacaaatggcctgcattttgttgaaacttggccgctttgaggaggctgagaaaacatataggtccctgcttttcatgaatcctgataactacaagtatttcatagctgttcaaaagtgccttggtctatactcagagaatggtcagtattccactgatgatgttgaccgattatgcgaattgtatagctcacttaaagaagaatatggttggtcatctgctgttaagcgcataccccttgatttcctggaaggagagaaatttcaggaggcagcagataattatgtcagacccctattaaccaagggagtaccatcactattttctgatcttagcccattgctacgcacacccgggcggcaaacatattggaggaattgtttcttaagctagaacgttcaattaggacttcaggatgcttcccaggaagttcgcatacggaacctccatccacactcctgtggactctgtttttgatctctcagcactatgacagaagaggccagtatgatattgctctagataaaattgatgaggctatttcacacacgccaactgtaattgatttatactcaataaaggggaagatattgcagcatgctggcaatttctcagcggctgcagcattggcggatgaagctaggtcaatggatctcgctgatcgttatttaaacagcgagtgtgttatgcagatgctccaagctgaccaggttggtctagctgaaaagacagctgttttgtttactaaggacggcgatcagcacaataatctccatgacatgcagtgcatgtggtatgagcttgcttctggtgagagttactatcgtcaaggtgatctcggcagggctctcaaaaatttcttggctgttgagaagcattatgctgacatgactgaagatcaatttgacttccattcgtattgcttacggaaaatgacactaagggcatatgtttctatgctgaagtttcaagatcgcttgcatgctcatgaatatttccacaaggctgcagcaggagctatcaggtgttatatgaaattgcatgattcaccatcaaaatcatccactgaggagaatgatgaaatgtcgaaattgccacctgctcagaggaagaaactgagacaaaaacagaaaaaggcagaagctcgtgccaaaagggaggctgaagagaaacaggaggatgagacaacttcatctcacacttcaaaatctgggaagaaacaaaacgcaagaccagttgatttggatccacatggtgaaaagttagtgcagattgaaaacccacttgctgaaggaacaaagtatttgaagcttctgcagaataactcatcagactcgttggaaactcatacactttcatttgaactcaacatgagaaaacaaaagattttacttgcttttcaggcagtcaagcagctcattaagttggatgaaaatagccctgacagtcatcgttgtttgataaggtttttccacaagataaacaatcttccctctccagggacagattctgaaaagctaatttggaatgttttggaagctgagcgtccagatttaagagcagcagcagctgaaatgatgtacctcttggaaccagataagaagcttgaggcaatcaaattaattgaagattcagtaaacagcacagcatcaggaaacagtgtgcttggtcctgtgaatgaatggaaaattctagactgtattgatgttcacaaattgctggagacaatctttggtgaccaggatgtggcaaacagttggaaggcacgatgcgctgaatatttcccatactcaacctactttgaaggcattaagagtgctagtgctgcctattgttctgttgccaatagtcttgaggattcatcagaaaatggaattgtagcaaatgcgcaaatgaaatcagcagacggagaaacatgcactttgtggaattgtagcaaatgcgcaaatgaaatcagcagacgaagcaaacatgcactttgaatggaactgtgcatattgtggatgaactgagcaatctaagcattaggtaatgcgccataagcagggtacgtggttacagctggaacagaacacattttagagccagtgcttaattaaccaagagtgcacacagaagacgagagatctagaggcgaagtgctagactgcaaagaggaacttcttgatgattttcatttggaatatattattgattgggagctgagatctcttcggtctctggtgattttctgagttccagcttgtacctttcgttgtcatcttgtagatggtgaaaggataacctttcatctccagttcccatgaggctttgccggggtttgctgcctggctacatcagggcgtgacattcttttgaagcagcggaccttgaatttgttgcacggttggttttttcagtcgctctccttggactgcaaaaattttggcataaaacaggtataatctcaaaaactttttttttgtgatatcatgaatatgttctttgcaatagttggatgtacttggggttgccctacccctcattttgcaacttttgatccttggcgctgtaaaatagttaactcgtgtgggacattgatattgtattccccttgtcctgacaaataatggccattgttaaccaaaaaagtttcatatgtgcaatacgttgggtatgcaacaatcaatcagtcgagctgttttgtggatgttatcgtggattctggaatgctaatttggtttttacatgggcaatacgattatatcatattctgattggttgcgagtccgncggaagtggtnntgagcttaattggagnccgattattcnagannnaagcgatttagncaagntcc

SEQ ID NO: 2321 - DNA, 474 bp, Oryza sativa
  Clone ID: PAT_MRT4530_102102C.1
ggtcttcgttcgcgcacccggccatcggcaccacctcctcctccgcccccaagtcggtgcctctctttccttcctttagtttttactctttttctttttttgattgcggattgattgcttaagagctcctagaaggaaactccctcagctcagatgctttgctcaacttgttcaaagtcatccatcctagggagaaattcactctgtgcggcgtaattagttttgacgaacagagatctgaatcatcaatgcccgtactggcttacaatacagagaggcatagctgcatagtagatagtacatgttcatggtgttgacaactactgctttttctatgtgcttgtagtaccttaatttacagacctctacaaaccttacatattgcgccactaatgtaaggcagatcaaggcgagtctagtctgagatataaaaatcacactagccaaagccaataaataaatgaatagagaatc

SEQ ID NO: 2322 - DNA, 333 bp, Oryza sativa
  Clone ID: PAT_MRT4530_102103C.1
atgaaggaggacaatgacaccttggcggttgatggcggtgatcggcggctgttgaggcgacgacactgcttggggcctcgctaccgaacgctgggcagcaccttaactagcaaggaggtgttcacctgggccaatagcaaaaaccagcggctgctccatatgatggatggctgctactgcgcaacgtcgagctcatctctagaccacaccgctacatccttccatgattccatcatcgactactgctcgccaactggttgccctctccactaccagtcacaagacacataccatcctcttcatccttatagcaagatccagcaaagccactag

SEQ ID NO: 2323 - DNA, 891 bp, Oryza sativa
  Clone ID: PAT_MRT4530_102104C.1
atgatggaggcggcgccggacgaggaggccgggctggcgctccccgagggcgagcggattctggaggtcaccctcatctccgcgcaggggctgaagcctccctccggcctgcggcggcggctgctgcaggcgtacgccgtggcgtgggtggacgcggcgcgcaggctccagacgcggccggaccgcgcgggcggggtcgacccggagtggcacgagcgcctcctcttccgcgtccacgaggccgcgctcgccgacgactcccgcgccgccgtcaccgtcgagatctacgccgcgcccgccggcggctggcacatcgggggggactccctggtcggctccgcccggttcctgctcggcgaccacggcctcctgtcccggcccgtcgggtccccgtcgatgttcgccgtcggtgtgcgccgcccctccggccgcgtccacggcctccttaacgtggcggccagtctcgtcgccgcgccgccgtccccggcagctgcccacgctctccgctcatcccccgccgtctccctcagcggcctctccacggcgcccatcccagcaggccgcgtgctccgcgtcctcaaccgctcgtttccgacgcccccaccctctccgacggttcttacgaccaagaagcagcagattgcagccaagccgaacaagaagtgcgctgacaagctggacgttgcggtgaagctgaacaatggcgcagatgatcggagcgatgaggagcgtgaggagttgagagagatgggcggggtggtgttttgcgggccttgtatcctaccattaccaagaaagatccacataagcccctctgacgagaacctgcaggcctttgctagcatcttctccggcggagttggcattaccagacagagccctcgccattga

SEQ ID NO: 2324 - DNA, 327 bp, Oryza sativa
  Clone ID: PAT_MRT4530_102105C.1
atggcgacgacgcctggatccactgtcggccgccaccgcgtctcctccgcgagctgccgccacctagccccgatctggcggagggaagggctcctccccgccagcgagcccaccgctgcctccccacatcgagcctccccgcccgccgccaaccccgccgaccccgccatcgcctcccctcctgccgccgccgccgccgcccctctcaccggatctggcggaggggagggcgtggtcgccactgccgcctccgctgtccagccgccggcagcgggagagaagggagggagagaggcgagacgagagacgaagaagaggcgaaggtag

SEQ ID NO: 2325 - DNA, 177 bp, Oryza sativa
  Clone ID: PAT_MRT4530_102106C.1
atgctgcctctgtctccactacctcgtccctgccctccacccacggatcgatctagccaccgaatcccgccgcggcaggaggctgccccgctcgccacgatgaaacagggcgccagcttctaccgtatctccgaggagacgcaccgtatactgcaccgcctcgccggggtggattga

SEQ ID NO: 2326 - DNA, 697 bp, Oryza sativa
  Clone ID: PAT_MRT4530_102107C.1
ctgtcttcttctccacaagttagagaaggctgggtccactactagaaaagggaaaagaaaatatcatatccattccccttctccttccccaaacacggcgggggctgcacgcgactcctgccccctgcggcggcggcggcggcgtaccaagaccccggcgaatggcgtcccgcatcggctgtcgccgtcctgcgccgctccaacgccactatgggcctcatgaggagtcatctacatgccaggaactacagactacaactgtcagttcttattccacttggttcccacagctcacagcttacgacaagacgctattacttgccacatgcctctccgtaccaactatggagcaggtcattggcactctgacaatggagaccatgtcgaagctgtcggccctttcatgggcgaatatgacactgacggaactcttgctaacttcttgaacaaacctgatgacagagacgaggctgatgagcccatcgaacagattgaaactgataaggatgctatagatgtcgctagcccggacgctggtgttattgaaaaggcccttgctagcgaaggcgatactgtgtactacagcaccaaagctgctatcgtatcagagactgcggaaccagctgagacacatgttggctccgtctgaggattcaaccccaaaagaaacgccttcaaaagctgcagagacaccacc

SEQ ID NO: 2327 - DNA, 1056 bp, Oryza sativa
  unsure (1)..(1056): unsure at all n locations
  Clone ID: PAT_MRT4530_102108C.1
ggaaggaagagcagagagagcaaagctcccgccgttcatctcctcgtctcgccccgctccaagcgcgccgccatggccaccacctccttgtccctgcatggcgtcccatcccccaccgccaccaagctctcctcctcctttctcggcgcccccgcctccttcctccggccgacgccgccgccgctcgctgccccctcgcggagggcgctcgccgtcagggccatggcgccacccaagcccgggggcaagcccaagaaagtggtgggcctcataaagctggcgctggaggccgggaaggccacgccggcgccgccggtcggccccgcgcttggtgccaagggtgtgaacatcatgtccttctgcaaggagtacaatgccaagacggccgagaaggccggctacatcatccctgtcgagatcaccgtgttcgatgataaaagtttcacctttatcttgaagacccctcctgcctcagtccttctcctcaaggcagcaggtatcgagaaaggttcaaaagaaccgcagcgagagaaggttggaaaagtaacagcagatcaagtacgtacaatagctcaagagaagttgccagatttgaactgcaagagcattgactcggccatgagaattatagcgggcactgctgctaatatgggaatcgaggttgaccctccaatacttgagaagaaggaaaaggtgctcttgtagtctgtttctctggcacccatgaatcaccttactgatggccacctgtagattttacttcctttttgttcgtcaatatgttgttcctagtgcttgaatctttttccctccgtggtcagtttgagagcaaacagaccatctacttttcacaagctgtaatcatttacatccaaactgtagatggttttcatgctgcacctatttggtggagtttccacattttttcttgtgaagtccctatgatacaccacatgtgcacatagctcagcttgtcaaacctgagtaagatcttactgttcctgttgcccaaaaaaaaaaaaaatgtttgtttcaaaaaaaaaaaaaaaanaaaaa

SEQ ID NO: 2328 - DNA, 444 bp, Oryza sativa
  Clone ID: PAT_MRT4530_102109C.1
cccacgcgtccgaaaatagaaagatctagtgtcccgcagcaatgaagatcattttcgcctttgctctccttgctatgggtgcatgcagcgcctctgcgcagcttgatgttttacgtcaaagttataggcaatatcagctgccggcgactgacctgctacagcaaccggtgcttactccatatactgcgttcttactgtaacaacatggactatcggcaagccctttcttgcaatcagctgctgcacaactgagaaacactctactctgatcacagttcgcgctggtctcacaccattctcactatcagcacatcatcaatgtataggccataccgtagcaactacaactccagcagtacgatgaccactcttgtcatcggaatgtgactcaagctcacactctgttggcttttaacgtgccatctagatatgatatcaacccta

SEQ ID NO: 2329 - DNA, 117 bp, Oryza sativa
  Clone ID: PAT_MRT4530_10210C.1
atcctcctgatttgcgcagaacctttactagaaatgctggagggtcgttaggctatcttcatagccaccgctcccgatccctaggttctacgccactcccgcctacatgagagttca

SEQ ID NO: 2330 - DNA, 1591 bp, Oryza sativa
  Clone ID: PAT_MRT4530_102110C.1
gcaagaataatcgggaggagaaacccaaacccccctcctcctcggcggcggcggcgggcggcggcgcgagcacatggcggccacctccatcgtgcgatcgaagcgcaggctcgccctgccctacctccaccgcctcctccactccggccccgcgaccccttcccccaaccgcttcctccgccacgcctcgccggtgccccgcgaccccgaccactcccccttcctccgcctccccgacgcgcgcgtctccacgctccccacgggcctccgcatcgtcacgcaggcctacccggccgccacgcggatggcctccgtcggcgtctgggtcgacgccggcagccggttcgagctgcccggcaccaacggcacggcgcacttcctcgagcacatggccttcaagggcaccacgcgccggcccaccgcgaacgcgctcgaggtggagatcgagaacatgggcgcgcgcctcaacgcctacacctcccgcgagcagaccacctacttcgccgatgtgcaggggcgggacgtgcccatcgcgctcgacgtcctaagcgatatcctccagtacccgtgcttccccgcgaatgccctccagcgcgagcgcggcgtcatcctccgcgagatggaggaggtgcaaggaatgatggacgaggtgatatttgatcacttgcatgccgcagcattccaaggtcatccgctgggtgacacaatattaggtcctgtagagaatattaaatcgatctctaagaaagatttggagcaatacattacaactcactatacctgtcctcgaatggttgtgtctgctgctggagctgtcaatcatgatgaggttgttgatcaagtgagagaattttttacaggattctctactgacccaactactgtagatcaacttgttgaagcaaatccagctatttttactggatctgaggtccgtgtggagcaaccagagatgcctctaacgcactttgcaattgctttcaagggttcatcatgggctaaccctagctcaattcctcttatggtgatccaaagcatattgggaacttggaataggagcattggggttgggaactgctcagggtctgctttagctcgtggtatcagcaacggtaatttagctgagagcatgattgcattcaacactaactaccgagatacaggattgtttggcatctgcactattgctcagccggattccctatatgacctatcacagttaataatgcaagaatttagaagacttgcatttgaagtgtcggaaacagaggttgctcgtgctcgtaatcagttgaaatctgctcttttacttcacattgacggatccactgctgtttctgaaaataacggccgtcagatgctaacgtatgggcgagtaatgccattcttagagctttttgctcgcattgatgctgttgaccgtgatacagtaatggaaacagctaaggatttcataattgacaaggatatcgccctagctgcagtgggaccgctcacgaatttgccggagcttagttggtttcgctcacatacatactcggatgatgaatttagttcaagaacgttcttgcaggatgcacagaataattga

SEQ ID NO: 2331 - DNA, 377 bp, Oryza sativa
  Clone ID: PAT_MRT4530_102111C.1
gtcacgtgaggccccaaccgcaaaggaagcatgggggcccttagtagactggccggcggatccagaagcagactcgccttatcagatctccctggaccctgcacttctactagtcagccaatgcgattataaactccttgttaacagctgactggatttccctctattcgccagaatctcgctttatatggcgttggtgtttcggtggcttatatattagggaggagtttggatggccatcgactcttgaggagatctaccgatttaattaggccgacttgctgcttaatttgtccttaaaaaaattttagcacccttggttcttaattgattctttctacccgtttcgaattttgaacaacgttttttctaataca

SEQ ID NO: 2332 - DNA, 1949 bp, Oryza sativa
  Clone ID: PAT_MRT4530_102112C.1
ccgccccagtgctccggccggagtccccctatccccctccccctcggcggcggccgcgggcggcggcgcgacctcgcttggggaagtcccgcgagaccatggcggccacctccgtcgtgcgatcgaagcgcaggctcgccctgccctacctccaccgcctcctccagtccggccccgcgaccccttcccccaaccgcttcctccgccacgcctcgccggtgccccgcgaccccgaccactcccccttccccagcctccccgacgcgcgcgtctccacgctccccacgggcctccgcgtcgtcacgcaggcctacccggcgctgcgcgcgcagaggtgcgaggggtgcccggaggcgcagcagtgcgtccggatgggccgcgccacgcggatggcctccgtcggcgtctgggtcgacgccggccagccggcttcgagctgcccggcaccaacggcacggcgcacttcctcgagcacatggccttcaagggcaccacgcgccggcccacgcgcgaacgcgctcgaggtggagatcgagaacatgggcgcgcgcctcaacgcctacacctcccgcgagcagaccacctacttcgccgatgtgcaggggcgggacgtgcccatcgcgctcgacgtcctaagcgatatcctccagtacccgtgcttccccgcgaatgccctccagcgcgagcgcggcgtcatcctccgcgagatggaggaggtgcaaggaatgatggacgaggtgatatttgatcacttgcatgccgcagcattccaaggtcatccgctgggtgacacaatactaggtcctgtagagaatattaaatcgatctctaagaaagatttggagcaatacattacaaccactatacctgtcctcgaatggttgtgtctgctgctggagctgtcaatcacgatgaggttgttgatcaagtgagagaattttttacaggattctctactgacccaactactgtagatcaacttgttgaagcaaatccagctatttttactggatctgaggtccgtgtggagcaaccagagatgcctctaacgcactttgcaattgctttcaagggttcatcatgggctaaccctagctcaattcctcttatggtgatccaaagcatattgggaacttggaataggagcattggggttgggaactgctcagggtctgctttagctcgtggtatcagcaacggtaatttagctgagagcatgattgcattcaacactaactaccgagatacaggattgtttggcatctgcactattgctcagccggattccctatatgacctatcacagttaataatgcaagaatttagaagacttgcatttgaagtgtcggaaacagaggttgctcgtgctcgtaatcagttgaaatctgctcttttacttcacattgacggatccactgctgtttctgaaaataacggccgtcagatgctaacgtatgggcgagtaatgccattcttagagctttttgctcgcattgatgctgttgaccgtgatacagtaatggaaacagctaaggatttcataattgacaaggatatcgccctagctgcagtgggaccgctcacgaatttgccggagcttagttggtttcgctcacatacatactcggatgatgaatttagttcaagaacgttcttgcaggatgcacagaataattgaagctccggtcctggtagtgttgttgtagtaactcaagctcacccaagaaatattcgatcgtaggaagcatcaagcattttagttatttgttagatgttctctatttatttgatgctattttgcaaataactcccttcgttcggattgtaaactccttccgttcaccttttactttcttagcatacaattgcgtcaaattctaaatataaaaaagaaaagaaacttgacataaccataaaaaaaaaaaaaaaaaaaaaaaaaaaaaaaaaaa

SEQ ID NO: 2333 - DNA, 939 bp, Oryza sativa
  Clone ID: PAT_MRT4530_102113C.1
atggatagactcctgaatatcccaggggcactattgggcagcatcgacaacattgagttggctctgattaggagtgcgacctttgaccgctggtgggccaaatggaagaaacacctctttcaccaatcgacctcgagaccacagaatctccacctcctcacatcagcaaaagtgaagaaagagggccaagtcgtcggacgccaaatcccccctaaaggaaaggcttcaaagaagcataaggcaactgctgctgatgacctgccagccttagacctggatgtggaggagtgcctggacaacgaggagatggagcaggccatagaggaagctgttgccgatgtgagcgaaacgagagagggtgggcaaacccctccagttgatccaccaagcctaaagaaggttcaaagccctgtgaaaatccatctgtcgcctcgttctccgtctccttctcggcaagaatcgggtgagcagactccatcgaccggccatgatctagatgtagggttgccagaacagccgaaccttgctgcaccgggtttagccgatatgctctcgtttgacatcaatcagttcatggacgaagaaggggaggaaatcactagtaaagttctagccctcctcaatgatgatgttagggggaagcttgtggagatcgctgatcggctgggcagctctttagactccttagtggataactgcgggccgatcagagataggtttgaagaaatccagcgtcagattctagatgcttatgccaatgccatttccccagtggtgtatttagagcagcatcggcttaaactggagagggcgatgcagcagattgctgacagacgtcagagagctgagttggagaccacgattcaagcgaatcggctatccatcaaaggggataaagccaaacttgatgagatggaggccggcccgagctctacttag

SEQ ID NO: 2334 - DNA, 386 bp, Oryza sativa
  Clone ID: PAT_MRT4530_102114C.1
gggctcaaataacatgccctgccattcacaaccataaaccattcaccttaacccagcatttgatacactaaattagcagatataatatttttgcgattcatagggaaagctaaaataatcattacttttaacgattcctttccattcaaatgttacatgaagcaatgccactgaactagtacatattgggggaatgagaatgtaaagggttgaatcatttgggcgagcaactgttttgtccagcaaggtccagcttaactttcatccaatcattgttcgctttctgccacgttgcctgacttgagctagcttgttcgaagtagcccaccattgctttgaagcttttttgtaccccgggagaattttctccatcacatcaccacatg

SEQ ID NO: 2335 - DNA, 303 bp, Oryza sativa
  Clone ID: PAT_MRT4530_102115C.1
atgtgctgcaaggcgattaagttgggtaacgccaggggcgaattcgagctcggtacccggggatcctctagagtcgacctgcaggcatgcaagcttggacccgagaatgaggacgtagagttgggaatcaaaaatcatgttgtagatactctgccatgcgtcgtcatcttcatgcacgttacaacgattctcccaacacatgatgagtcgcacgcagctactactcctacagtagcagctagggacaatttcttcttcagctcaggctcagctgctgagccggtcgcgcctcccaacgcatag

SEQ ID NO: 2336 - DNA, 182 bp, Oryza sativa
  Clone ID: PAT_MRT4530_102116C.1
attaacggtattaggtatatgcggtgatttttttttagaaaaaaggcgtggtttaaagaaggccggtctaaatttaagggagctaaaaaggaaaacggaccactttttttattaaaggggcgctaaagaacattgtgtaaaagccaccccaaataaaaagacgggctatgacgacacgcgca

SEQ ID NO: 2337 - DNA, 718 bp, Oryza sativa
  Clone ID: PAT_MRT4530_102117C.1
gccatcaccaatgcggtgcttcagcccgtgcccctagcgacggacatcccctttttcatcggtgtcgtcccctgcgatggaacgcgtccctctgctgggggatgcggctctctctgtgcctcactagcttttcgtgggaagacgcagccaggcgccgcgtttctcgtcgcgccgcgcccgacaccgctggcgccgcgcctaccaccgccgggaccgccaccgtcggccttagagagagagagaagagagaggcgacggtgatgacgatggatcggcgacgaccggatccggccaccgcgcgccgcggtagccatcgaccaccagctagcgacgggcggagatggcttgaggcgcctgtgctcgccgcctcgcgcgccttgcccggcctcctccgccggtgccttgcccgccaccgccggcgccacggggggcctagatccacccactacggcgccggatctggcgctcccgactgaccacgacgcgaggcggaggatgccggggaggacgccgacgggagagagaggaagagagaggggcggtggtggacgccggcaacaggagaggcggccctcctcgtcgtcctcgccacgccgctcccggtccgacgaggccgccgcggccaaggaccgcgccatcgccgagcacgcctcgagtctccggcgagcggcggcgcgtagggcaggatgttgcccggcgacgacgaggatggccggcg

SEQ ID NO: 2338 - DNA, 663 bp, Oryza sativa
  Clone ID: PAT_MRT4530_102118C.1
tcacctccgccaactagtgtttttgccttcatggctagcttataatgccaccgactagtgatcttgccttcacggctggcctattaagttgccgttgatgggcgtcttcgtcttcacagccgaccgccttcgcctccgccgactagtattctcaccttcatggctggcctattacgttgccgttgatgggcatctttgtcttcaccgccagctaccttcgtcgctgcagactggtgtctttaccttcacgattggcctattatgcccccgctgatgggtgtcttcatcttcactgccgtccactgctgactggtgcctttgcctctgtggctgcatgatttcatcgttgctatgcgtcttcatcttcaccgcccgcctcctttgccgccaccgactagtgacctcgccttcacggctggcatattacgttgttgctgatgggcttcttcgtataaaccaccggccgcctttgcctccgctgactggagtcttcgctttcaggggtggactgcgccaccgccgttgatgggcaacctcgtcttcactgtcggtcgcctctaccaccatcaattggtcttctcgcctccatggttttgcgactttgccgtcattgcttgataactttatctttgccgccggccgccacaactgcttctacggttg

SEQ ID NO: 2339 - DNA, 2241 bp, Oryza sativa
  Clone ID: PAT_MRT4530_102119C.1
atggcgaggggtggccgtcagatggaaatcgcggtagaggaattgagagtgaattttgaggagtttcagaagaaggttggggaagagaataagatgctgcaagagcagattcagaatcaggcagtgcaggctaagaatcacaaggacgaagtgatgcaaaatctggaggtgatacaagatattttgggatctatcatcggttgtcaagggcaagatggtcgagcttttgatttcataggagttccctgcccgatgcctaattttgaaatgggagaaacatatgccatacacgctcacaaaaccattccaactcaatcaccaccaccccccacaattcatgtatgtactcagaatacctacccaaatctggagtggaacacttcagtttactttggaacaccacctatacctccacctccacctccacagtatagaactggccaattgatgaccaatggacaaaaccctaccttaccaccatatttctaccctccctatcaatctccttggggttatcaaccaagtccaccacctccacccccaccctcctttgatttccaccgacctcttgatcgtggaccaccattctggcacagacaggaggagactcgttatgattctgttgatcacagttacagaaaaagacctcaatatggtgacccttttaatcgtaatcataagcatgtggattttccgttaagtcagtatggctcagtagacaattacattgacaagtttgaagaaattatgcctcttgtcaaacacaataaaccccatctcaatgaagaatacttcttggaatacttcatcttaggactgaaggatcatatcaaaagacctctcaagtctttgaagatgcaagcttatgaacatgctcacaattatgacagccccaccttctcttctatacagccagctggcactgctcattcttaccctaaagtggctcttaaggattcccctatgcaacctgtcaagaaggaaccaatgcaaacagacgcaaatctcttcctgttgtccaaaccagaggagggggcaaatgcttcaaatgccaggagccgtgggtccctggaggatgacctaccagttgaatattcaggtgatgttatttacactactcctgacagtcctactgaacctcaaccttctcctgaagtgtcgctgcatgctttgaatggtctaaatgctggtataactaccttcaccttgcaagttaaaattggctctctccttgctactgcactggttgatagtggcagtactacgatattcatgtctcccaaagtgaaggtgccgcgccaacgcgccgtggtgaggaatccttcgacgatgggcgggagcggcgcaacgaggctgctgcacgcgaggacgtgggtgagcacgaccgccgagaggccattccgacggaggccgtcgaaggcgaggccgcggcagcgaggtaggacaatgagcattgtggccgtcggtggcgaggccgaagttgcacatgctgagctcccacatgacgcggtggacccgggtgttgtcgacggcgagcccgacctggagcggcttgagctcatcgagacgtcgacggggcatacctcgacactgttgatgactggagccgtggaagaggcaacaggaaccgggatgggggtgaagagcaacacgtcgagcaatctgtgggatggcgcacagagatgcagatggggtgatgttctcccagcgggaggaggagctggagggccggggcagggacaagacatgaggatttgggcggttgcattgcacaagacaagatggtttgtcgcatcctttctgctgcaccccacccctggtctgttcctgcttcatcctcccactgccaccactggcgccacctgcttcgagctttagctttatggcaccgaccatcagatccagcttcatcatctccacgttctcaatgtaaatagacataacattgactctgtccctcaatggttctataccacttacactatcatttaaagccacagtacctgatcggccgccgccattgttgctgctcccaccccgcacgtcctccgagacggcgttcaggtcgtcgtcaacctgttcttcctcctctcctcgagcatgagcacgaaggcggcggctgctctctgatgaaccccctctcgtggccagcgaccgagcgacgcctccttcttcgcctgcttccgccgacgacgacctcatcacgccattcccacccgctgccctcgtctcctccgccat

SEQ ID NO: 2340 - DNA, 1256 bp, Oryza sativa
  Clone ID: PAT_MRT4530_10211C.1
ccggccgggccgtccctctccctccgctcgtccctgcacacagaatcctcctcctcttcctccgcggcggcgccgccgccgccgagttctccattgatccggcgatggccggcaaatccaatcccgtctccaacaatcaggaataattaagaccctgtcgttgtcgggtctgatcgatttggagaggagatggacgccggtgtgggtctccgggcgaagcccggcgcctgggccggactcggaaacccacgccgctcttccacggcgagggttccggtgaggttcgcggtggagaagttcgctcagccgttggttttgggctctgatcgccggagctgcggtgccaaactgaaggtttcgtgttccaggaaaccggcaggtattgacaaaacctattactctgctgatgaagctcttgttctaaagcaaaaagcagaggacgtggtcccttatttgaatgaccggtgtatttacttagttggaatgatgggttctggcaaaactacagttgggaagatattagctgaagtattaggctattctttctttgacagcgataagttggttgagaaggcagttggcatatcatctgttgctgaaatctttcagctccatagtgaagcattcttcagagataatgaggagttacatgaagaaagggtcaacaatctggttagatgttccattggatgcacttgcaagacgaattgctgcagtaggaactgcttctcggcccctcttgcatcaagaatctggtgatccttatgcaaaggcttatgcaaaactgactgcactttttgaacaaagaatggactcatatgctaatgctgatgccagggtttcactcgaacatattgcagtgaaacaaggacatagtaatgtgacgacacttacaccaagtgccattgctattgaggcattgctaaagatggagagctttcttactgagaaggcaatgatcagaaactaaccacttttgggtggttaaaagcacatcaacaaacaaaatctcttgtttgttctgttgtatttatcgcatatacctaaggcgtgtttcttagtatagcatgaacttgttagtcacccagtatgaaggagggtgatttgagtttgaacttgtgtaaatggataagtaatagctttcaattgaaagaaaagtttgtgttgtgttttgtgccgattccctgatctcttccttcctgacagattcagaaacaaaagaaatatttacacaaatccaaaaaaaaaaaaaaaaa

SEQ ID NO: 2341 - DNA, 429 bp, Oryza sativa
  Clone ID: PAT_MRT4530_102120C.1
atgcagaagaagaggatcttggcccaagtgtctcttggaacaagggtaagggcgtccccttccaagtttttagtgttttctaatcttcaaagctgcaatcaaggtcggggctcgccggatccagccgcctccaacctcatcgccgtagatcaacgcctccagttccaccatgtccacatcgtcatcatctctgatgccgacaccgccgccgccaccgaagacgagatacagtctatgaagactgtcatcgtcgtggcaccaacagcgaacacaatgggcacgcccggcgcatggtggaaccgcgaggcatcagctttaccaccttctccgtcatgcatggctaccgaatctgacctcttgaggtcatggctcaccggatccactgggatggattataagtgttataatctctatagacgccggttctaa

SEQ ID NO: 2342 - DNA, 581 bp, Oryza sativa
  Clone ID: PAT_MRT4530_102121C.1
aggattgatttaccaaagtcaaggatgggctaggcacgacaaagacattttctttgatgtgtgagctgtcaagttagaacatacataagcatgaaggtagcaccattttctctctttctcctgagacttcctgaggggtttttttcctttgttggagccggaactgaaagcgcgtggtgtgcatggatcatggtgttcttacgggagtcactgcacgtattgcaaagcatagtccactgcagtattgcaaagcatagatcctgaggtagaactcgtttcttgagctggatcctcactaattatcagggattcggattatacagcctcaccgagaaatggagaatgaggatacagtaaccgtgttcatgaaaccctgctggtggagttgggcttgacaattggccattatcttttgtcccgcgcagccgtggtacttcagaactgttttattttttttttccgtttattagaatgtaggcacaacgtgtttctgtacgaagctatgaatgtatcctgtaaatagtttggataaaacagcttctgtgctaaaaaaaaaaaaaaaaaaaaaaaaaaaaaaaaaa

SEQ ID NO: 2343 - DNA, 804 bp, Oryza sativa
  Clone ID: PAT_MRT4530_102122C.1
atgggctgcgctaatgcttacctcttctctgctttcttgtctgctcgctgttgctgtttttgctggccaataacagggaaaggggtaaggaagggagagaagaagaaaaggaaaattaggggattttgtggaattataggattggtaccaatgtggtatcccccgtcgatagtggagtgccaggtaggggaacttggtgcacaaggttctaccgagatgatttcaagcttccccgacgtctgcatcagcactagcttcggcccaggagatccaacccagacgtcgctagtgtggactcaagttggatccatcgtctttccggtctacgctgcaaaaccaatctcgtatgccctagtgtttgtcgagattgagaatggtgcagcaaagaaaacgagaaacgacatcacttcagccgcacctcccgtctcgacagaaaagagggcgccgactacgacaacactcaggaagaagcctcaagcggccaaatctcgttctttttctgcgaaacaggctctgacggactacaaggtgagtcctttcgatccggttctgtaccctgaagcagatcactggttggaagaatacgatctacaatatccaacctcaacagtgcctttacagcaacagctggaccagcaactcagggaccctcttgtcttccggcacaaggagaagaggtgcatgccgatgggaacgtcgatgctaccgaaatcctttgcgagcacccgagtcgagattaggccggaacctttggaacgcctcaccaagacgacaaagtcagcagaccctatcgccccgagatga

SEQ ID NO: 2344 - DNA, 489 bp, Oryza sativa
  Clone ID: PAT_MRT4530_102123C.1
ggggggggctactacgagattaaatattaaaggcgtctgaccatcttttattttttagatttttagggtgccgaattcggattaggtcactcgtgggaaggttgttgtgctgttgttgtgatcatgggttcttccgtcggtggctatgaaaaagggtcgactacgaaagagttgtcgaaacactatgttcgtgatgggggacatccggatctttttttttggtgaggaccgccggtatccccgccgtcatctgctccggctgcggtccagaccctgaggtggaactgtgggcttgccaactttccggcttgctgtctaaaatccgggccgacatgacctgtaatgcctcgctcccacccgtctagaccataatcgcactaaaccccgacccgattccctgttcccgattccaaaaataatatttcccgtcaaccgaggctctgaactcgtccactccccggtctccggaacctctaacttccggctttc

SEQ ID NO: 2345 - DNA, 975 bp, Oryza sativa
  Clone ID: PAT_MRT4530_102124C.1
atggttgactatcagctaggacgtgaggtggataaaattttccaatccatagcagaatttgtcgttggaaatggcaagaagccaagaatgcaaagttctgatctgcgaactggcttgggggggcagcattgcctggagatggcccattctctcgacctatgtgggcagatcacaactgacggtggctcaagcgctaacgaacaaaacaacagatgggttagagaccttcgtggatccctatcgaatgaagctttggcacagtacttcgagctatggagtaaattgcagatgatacaccttagtcaggaagatgacaccattagatgcaagctgacgccggacggtcaattttcaagctcatctgcatacgatctgttcttcaaatcaatggagctctgcactgttggagaactgatatggcacacaaaagcgccagccaagattcgctttttcatgtggctcgctgcgaaggggcgctgcctgacagcagataacctgcaaaagagaggatggccacactctgattgctgcaatctgtgctcgcggaaacctgaagactgcacacatctgttcaccaaatgcgattacacagtgagggattggatgatctcagcctcacagcttggtggatgcaggctagacgatgttttcgggaatgctacagaggcaatttcgacaggggatgctaatttaaatcttaatgaaatttggtcgccggttccttcggccgacccagcaaaaacagtgtccgtaactaagaaagaagaggcagtgagagatgtacaaggctcccacaaaacccacgacgaacccgacggccgctccgattattccgatactgtagtcaccgtagcttgtgctgcaactatcaaacggcattggatatcaagttcagaaccaaaacacaacgatgaactgctcaggagcagcaaccagaagagaagcccggtgtcaaaagacattacagacacggac

SEQ ID NO: 2346 - DNA, 615 bp, Oryza sativa
  unsure (1)..(615): unsure at all n locations
  Clone ID: PAT_MRT4530_102125C.1
cgcgtacgntagcttggnctanctanagcggccgccctggggggcggggggggtttttaattttttttttgggggggttttttttttttttntnnnngggaaaaaaattttttcaaatttggataacatggttacaaaggcgggttgctggcgatttccttgcccatcaccccctttttacctttttttcgggggattgctgggggtttttttttttttaattttangggagggtttttttggctaaaatggagggggtgatcgaccgaccactcttggttttttggctttgggggggcggttggctggggccttaacccgttttttgccccaaaggggggaaaccttttgggccccgtcctggaacagatcacctaactggccctggcgggggggctcttggtttggggcctccaaattttgggcccctttgggcccgttttccgggccctccttacggggttaaccttcccgggggggggggggggccctcggccccttttgggggcgggttggtggggcgccccgaagggggtcgccccctgggcctataaaggcccccgggctttttggggttgtggggcccgggggcccttgtggttttttggngggccc

SEQ ID NO: 2347 - DNA, 1411 bp, Oryza sativa
  Clone ID: PAT_MRT4530_102126C.1
gtcgtgcttccgcggcaagaagaacaaggagcggaaggccaacgccgccgccgtggtcgcgcggcgccaggcgctcacgccggcgccgtcgttggtgacgcatccgccgcactccccgtcgacgcccgagaagacgcaagcggcgacgccctccgcgacacagccgccttcacccgcggtgaccgaggacgggcgcactaattctccggcgacgcccaaccggataataccggtgacgccgaggccgggcaagcactcgacgagctcagcctcagctccgtcgccgttcccgccgcagtggcagcagccgaagcaggtggagggcctggagatcgtcgaggtggccaccggcgagcggctgtcagcgcacgacgtcgggctcatcgagatggtcggcagctcggccgacgtctccgcggagtcgtcggtgaagtcgtcgctggattatgccaacgatccgccacagcagcttacggtgtcgtcgaaacggaagccggcggtagtgaaggccaccgagccgacaagggtgtggcttaacggcaacgcggtgaagggcaaggccggcgagcggttcaccgggcctccggtggcgggagaggctgatgaattgtgggcgcacgacattgcctgcagccgcgtccacgctgtcatgctggctgagacggcgaagaccatagtccgtcaccaactactccctcctccccgccgcgccgccgcgccacagtcgtgggcgaagcggacaccctcggcgacgatacttatggccgccgccacctcccaatccttcctctcgccggcgcccaacccccttctccgcccgaggatcctccccttccccgccggcgggtccgtgtccctccgcggccgccgccccgccttcccgtccgtcgccgcggcgtccacatcgatggcgtcctcggagagcgaggagaggaaggagaccaagctgtggggcgggcgattcgaggagggcgtcaccgacgccgtggaagggttcaccgagtccatctcctacgactggcagctctacaagtacgacatcatgggcagcaaggcccacgcatccatgctcgccgcgcagggtttgataacggctggcgataaggacatcatcttagaggggcttgatcaaatagagaagctgattcaggatggaaaatttgagtggcggacagaccgggaggatgtccatatgaatattgaggcagctctgatcgaaaaggttggtgaaccagccaagaaactgcatactgctaggagccgcaatgaccaaatcgtgacggatctccgcctgtggtgccgtgatgctattgacaagattttgttccgcatcaaacagtttcaggtgtctcttgttctgttagcttcaaatatgttgacttaatagttcctggttacactcacctgcaaa

SEQ ID NO: 2348 - DNA, 435 bp, Oryza sativa
  Clone ID: PAT_MRT4530_102127C.1
atggcaagaaatgaatcaagaaggttcaacatcctcaacatctgtgcagatgtacgaggctggttggaagccaactggggatgcactcggatggacccaagctccacaccacagcatcggaggctcggtctgggaaagtgccagcgagagctgatggcgggcgcctcatggcatacactaggggaacatgaacacttattcccccagatcaagcgaaatatacagagttcatccgcttacaccgaggtacgtgagaaagatcacttcccaaattactggggttacatcaaagaagagaaactggagaaggccggcaaaatctgcacagaccaaaccgacaagaactgtgcatcaaccgtcagcgttggtggctgcacctccagcgaattcatcgcggttctgcagcacaagtttggccctctcccggaggagtga

SEQ ID NO: 2349 - DNA, 2046 bp, Oryza sativa
  Clone ID: PAT_MRT4530_102128C.1
atgagctcgagctttctggcagtttgtgccacttcttttgtgctggtgtgctcggcagctacgccacgagtattggcttcagtctatggagttggtggagggctcttgattgtcccttctaatgactccctcgctcactgcccctctagctgcggggaagtcgatggcatctcctaccccttcgggattgggggaggctgctttcgggacggcttcgagcttacctgcaacaccgccaccaaaactcccaagctccttgttgccaatagtacaacccagataacagcaatggaatatgacatggctttggctcctatgtacttcaattttacgacaaggcaaggtatggacacctacaacatttcatgggtgtcgccagctaagggtattaaaatttcagatgagaacactttctatgttgtctgttgtaattttgatgccaccttgttcgagtttggtacgggagatttcgttggttcttgtatgagtagatgtgacattgagaaggcaccaatagcaataggacagccttgtaatgggaacggatgttgctccatcaagttatcaagggacatgcggggatttcagtcaacacttgttcaagctgaagctgcagcacaaatatcagatccgctgcatcatgggatcatggctttcatgtcatatacggattattacgtacgtaatgcgagtgatcttttcttgagttggacgaatgtgagcaacgttgagggagccgagcttcagtttgccatcacggaccaaccaagctgtggaagtgcactggtaaacaaatcaagttatgcttgtaccaccggcagcaattgccaaaatatatcatcgggaggttacacctgtgagtgcaccaatcgttatctacaaggcaatccttacattttgggaggatgcaacatgcaagatcatatcacagttttggaaacaagtgaagcacaatttattgtgactaatgtgtctgttgaagatgggactctgactataagtaatttgttgaataatacggaatatgggagagagatactaataactcaaggacatggcacagtttataaagggattctatctgaccagagtgtggtggccattaaaaaatcaaaaattgtggaacaaactgagatagatcagtttatcaatgaggttgctattttatctcaaattatccatcgcaatgtggtgaagctttttggttgctgtctcgaatctgaggtgcccttactggtatatgagttcataccaaatggtacattgcatgatcgtcttcatactgatgttagtgttaaatcctcattgtcatgggatgatcgaattaggattgcttcagaagcagcaggggcacttgcttatctgcattcggctgctgcaatacctattttccatcgagatgtgaaatcttccaatatactcttggatggcagctttactacaaaggtctctgactttggtgcttcaagatctgtttcactcgatgagactcatgtggtgactattgtccaaggcacatttggttatttagacccagagtattaccacactggacaactaactgaaaagagtgatgtatatagttttggagtgattctggtggaacttttgacaagaaagaaaccgattttcatcaacgatgtaggcacaaaacaaagtttgtctcattatttcgttgacagactccgtgagggatctcttatcgaaataatagattatcaggttcttgaagaggctcacagggaagacattgatgatattgcctcacttacagaggcatgcttgaaactcagaggaggagatagacctactatgaaagaagtagagatgaggctgcaattcctgagaactaagaggctaagaaaattccaatttctcccagtcccaggaagtggtggagagattcagcaccttttaagcccaaatgctggtaaatcccaagcacagaacaactataccagtgcaggtgatttatcatatgaagggatctccagttgctacagtttggagcaagaattatcatcctcagtcagtttgccacgctag

SEQ ID NO: 2350 - DNA, 5085 bp, Oryza sativa
  Clone ID: PAT_MRT4530_102129C.1
attatgaattttacaagatttaatctaattaaagcccatttaaaaagaattaaatacttatccacaaatgtcaacacctgacaatcagctaaggcagcacaccgcaaatcaagttgtcccagagcatttggttcataatgtgcaaccaggtcaaatgatgtaatgagagaacagttcgggcttaagccgaaagatgctagaaatttgtatcggcatccttaccccaagtggtttgagagagttcctttgcctaaccgattcaagattccagacttttcaaagttctcagggcaagatagcgtttcaacctatgaacacgttagccggtttttagctcagtgtagcgaagcatcggctgtggatgccttgagggttaggttgtttccattgtctttgtctggatcggctttcacttggttttcttctttgccatgtggatcaatcaacagttgggccgatttggagaagcattttcacagctatttctatagtgggattcatgagatgaaactgtccgatttaacagcgattaagcaaaggcatgatgagcctgtgcatgagtacatttagaggttcagagagatgaggaataaatgctacagcttgagtttaactgatgcctaattagccgatttggcttttaagggtatgatagctccgatcagggagaagttctcgtctcaagactttgatagtttgtcacatcttgcacagaaggtaaccttgcatgaacagagattcgcagaagccaggaagaactttagaaaggttaatcatgtctgtcgttacatatatggatcggatgatgatgatgatgatgactccgaaatagcggcagccgtatgtgttagaagcaagaaagttatactatgccaatgggtaaaagagttctggaaaagaggagaggtatgaatttgatattaccaaggctgataagatttttgatttgctacttcgagagaaacagattcaacttcctgctggtcatacaatcccatcggctgaagaattgggcaagagaaggtattgcaagtggcataattctgggtcttattctaccaatgattgcaaggtcttcaggcagcaaatccaggcagctattgagggaggcaaaatcaaatttgatgattctaagaggccgatgaaggttgatggtaatccttttcctgtcaatatggtgcatacagctggccaaacagccgatgggggtcgtgcaagaggttttcaggtgaattcggattaaattatcaataagtatcagaagaagtgtaacaaacagcaggagaggcattatgaagaagatgatggcggtatgaggctgccatctattgaggactgtcctgggtgcaataatgttgcaggaagttcaagccgatcgtataatagaagcaatcggctaaggcaagcaagagtttctgttcatcaaagattgggctcgatgaaccaagattgtgaccaagaagacaacaaagacgggaagactcaatggtgtccttttggtatttttacaaagaataagaagaaggagaagacgaagctgaagcaggagtgacgtgttaagaatcaagttcctacagccgatgaagccgcagccgatgaagcaaagagattggctaaaggaaaaagtgttgtgactgcatcggttaacatggttttcacgttgcctgctgaatttgggatcaagcaagccgatgtcgatgaagttgaagaagaatcggctaagttgattttatcaccagaacaagcagtcttcgagaagccggaagggacagagaatcggcatcttaaaccattatatataaatggctatgtcaatgggaagctgatgtctaagatgatggtcgatggtggggctgcagttaatttgatgccttatgctacatttaggaagctaggcagaaatgctgaggatctcattaagacaaacatggtgctcaaagattttggtggcaatccatcagaaaccaaaggggttttgaatgtagagctgacaatcggcagcaaaactatccctacaacattctttgtcattgatgggaagggttcctacaacttgttgcttggaagggattggattcatgccaattgttctattccttcaaccatgcattaatgcttgattcagtggctaggcgacaagattgaaatcatgccagccgatagccaattgaagatggagagcccaagctattattttgagggcgtcgtggagggttcaaacgtctacaccaaggacacagtagatgatttcgatgacaagtaaggagaaggtttcatgtcggccgacgatttggaagaaattgacataggtccagaatttagaaccaagttgatagagctgttaaaggaattcagagattgctttgcttgggagtattatgaaatgccaggactcagccgatcgattgttgaacatcggctacctatcaaacaaggggttagaccacatcaacaacctccgaaaagatacaaagccgatatgctcgaacccatcaaggctgagattaaatgtttatatgatgctggttttattcatccttgccgatatgccgagtgggtttctagtatagttcctgttatcaagaaaaacgatttaaataatgctaccccaaaggatgagtatccaatgccagttgctgatcagctggttgatgctgcttcagggcacaagatattgagttttatggatggaaatgcagggtacaatcagatttttatggctgaagaggatatccataagacggcttttaggtgtcctggtgcaattggcttgtttgagtgggttgtaatgacttttggcttgaaaagtgctggagcaacatatcaaagagccatgaattatatttaccatgatctgatcggctggttggttgaggtctacattgatgatgtggttgttaagtctaaagagatagaagaccacatagccgatttgaggaaggtttttgagagaaccagaaaatatggcttgaaaatgaatccgacaaaatgtgctttcggtgtatcggctggccaatttttgagatttcttgttcatgagaggggggttgaggtaactcaaaggagtattaatgcaatcaagaaaattcagcccctagagaacaagacggagttacaggagatgatcagcaagataaattttgttagaaggtttatttctaatttgtctggaagattagaacctttcacaccattgttgagattgaaagccaatcaaaagtttactttgggggcagagcaacagaaagctttggatagtattaaggaatatctcagctctcctccagttttgattcctccacagaaagggataccttttagattatatctgtcagccggtgagaagtcaatcggctcggtattaattcaggagctagaaggaaaggaaagggttgtgttctatctaagtcgtcggctcttggatgcagaaactagatattcccctatggagaagttatgcttgtgcttgtatttttctagtacaaggttaaggcattatctattgtccaacgaatgcactgtcatatgcaaagccgatgtcgtcaagtacatgttatcggctccaattttgaaaggaagggttggaaagtggatattttccttaacagaatttgatcttcggtatgagtcaccgaaggcagtcaagggacaagctataaccgattttattgttgaacatcatgatgattcaatcggctcggttgaggttgtgccatggactttgttctttgatggatcagtatgcactcatggttgtggtatcggcttggttataatttccccttggggggcaagttttgagtttggttatattattaaaccttatgcaactaataatcaggttgagtatgaagcagttctcaaagggttgcagttactcaaggaagttgaggccgatgctattgagattatgggagattctttgctagtgatttgtcaattggcaggggaatatgagtgcaagaatgatacattaatggtttataacgagaagtgccgagagttgatgaaggaattttggctggttactttgaggcatgtatctcgagaacaaaatattgaagccaatgatttggcccaaggggcgtcgggatataagccgatgatgaaagatgtcagggttgaggttgctgcattaacagccgatgattggagatatgatgtacatcgatatttacaaaatccatctcaatcggcttctcagaaattgcgttacaaagcgttgaagtacactttgttggatgatgagctttattatcggacgattgacggggtgttgcttaagtgtttgagtgccgatcaagctaaggttgcaatcggtgaggttcacgaaggaatttgtggtactcatcaatcggctcataagatgaagtggttgctacgacgtgcggggtatttctggccgactattgtggaagattgtttcaaatattgcaacggatgtcaagattgtcagaaatttggagcaactcagagagcaccggcgtcggctatgaatcctatcattaaaccatggccgtttagaggttggggaattgatatgatcggtattattaatccaccatcgagtaaagggcataagtttatattggtagcaactgattattttactaagtgggtagaggcgattcctttgaagaaagttgattccggggatgctatacagtttgttcaagagcatataatctttcgttttgatattcctcaaaccattacaaccaatcaaggttcaatcttcgtgtccgatgagtttgttcagtttgtcgatagatgggtatcaaattgttgaattcttcaccatattatgcacaagctaatgggcaggccgaggcatctaacaagagtctgatcaagttgattaagagaaagatttctgattatcctcggcagtggcatactcgatttgccgaagcattgtggtcttatcggatggcttgtcatgggtcgatctaagtccctccttataagcttgtttatggacatgaggctattttaccatgggaggttagaatcggttcacagagaacagagttgctaaatggcaagtacttgaagaaatattacccaagtgtttgggttaataca

SEQ ID NO: 2351 - DNA, 299 bp, Oryza sativa
  Clone ID: PAT_MRT4530_10212C.1
gcacgaggctcacattcgaaaaatttcaaattctccctctctctctctctctctctctctctgcggcgtctctctctcgctgggccatgaggtctctcttctccaagcacggccgccacccggccacgccgccgccgccctcgctctccggcggcggcggcggggacacgcccccgtcgcggcgccgcgtccccaaggagaacgtcgacccggggtcgtcccccgcggggcactcccccttccgctccccgacctcctccgccaagccgctcgggaaccgcaaccggggcctcctcccc

SEQ ID NO: 2352 - DNA, 366 bp, Oryza sativa
  Clone ID: PAT_MRT4530_102130C.1
atggaggtgttcgccgctgctcctccatgtccttcggtgttcgaactcgctgccgcggaggtcgccgccgtgattatccctgtatccgtcatcgcgccggatacgccctaccatggtcagatccacgcgcgtggggcacagatcggcggccgggtgcaccgcctcgtcgcctcctacacactgtcgaccgtcgccgccacgcctgcagccgtgccgtatcggatccaccgacgtcgcgcctgccgccgctcggtggtggaggtggcgctcgacgtcgcgccaccagccgtgccgtgccggatccgcccaatgccgccaccgcccgccgccactcccgctcgccgctctcatctccaaaaaaaatag

SEQ ID NO: 2353 - DNA, 382 bp, Oryza sativa
  Clone ID: PAT_MRT4530_102131C.1
aatatgaatgcaagaatgatacattaatggtttataatgagaagtgccaagaactaatgagggaatttcggctggttactttgaggcatatatctctcgagagcaaaatattgaagctaatgatttggcccaaggggcatcagggtataagccgatgatcaaagatgttaaggttgtagttgctgtaataacagcctatgattggagatatgatgtgcatcaatatttacagaatcgatctcagtcggcttctcggaaattgagatataaggcgttaaagtatacttttttggttgacgaactctattatcggacgattgatggggtgttgcttaagtgtttgagtgccgatcaggctaaggttgcaatcggcgaagttcat

SEQ ID NO: 2354 - DNA, 500 bp, Oryza sativa
  unsure (1)..(500): unsure at all n locations
  Clone ID: PAT_MRT4530_102132C.1
attcggcacgagctaccccaatcacacaacggcggcggcagcgcaagcgggtggcggcggcgcgggctggcgcgagcaggcgacggcgcgagcaggcaacagcagcggcggcagcgcaagcggatctgggagcaacgccgccggccgccgtcttgctcgcattgcctgggccctggagctcttccccgtcttggtgaaaanatcccatcggatcagtgaacggctacggtggccatcgggggtggtttcgtacaagcccgttgccatctctactccggcctcctagtcctagaanacgacactccccgccatccagaagctgccctatatggcagaaaccggttcaatcccanattcgacgcaggattnantanaagtgttgntttggtgttaccgtcacattacccaccttggcgaataaagacatattcggcatnnttattggcctnagttcaaaaaatgccatcgtaataacatgcgggcattacttttatgangaa

SEQ ID NO: 2355 - DNA, 803 bp, Oryza sativa
  Clone ID: PAT_MRT4530_102133C.1
ccggccgggctactctcctctcgtcttctccttccttccgttgctcctccgccgccgccgggatgcaggctgccgcacggacgtggacatggagatggagatggagatgtttccactccacagccgccgctctttccaaacccacgcctcacatcaggtttgccgtccgcgaaaagcgcgctgatgctaaggctgttctgaagaacattctacttaacggtggtccctgtcaggaaggcagcaataaacaaaagaggcaacaaaaaggtagcggtaaatcaaagcttacaaactccagctatggaaaaaatccacatagaaaaggcaaaagtgcgcagaagtggaaaaactttgatgaagatgattgcagtgataccccttatgggaattttggcggcaagagatcttttacctggtactggcctggggaggatgacgaaagtgggagtcccagtggatttcagtggcgggatgagtctcaatcaaataaatcaagggaaagagtttggaatgaaagtgatgtagatgaggaagagccttgctatgataatcttcgcagccatagaatatcacttggtttgccgcctttaggtcccttagaacttgatcatattaagtccgcttttcgtgcatcggctctcaagtggcacccagacaaacatcaaggagcatcacaggctgaagctgaggaaaggttcaaacgctgggtagaagcatacaaggcattgtctggtgctttcaaaccaagtgactaaccctgtctgttcatgaatgaatctgaagactatcactaaagatgttac

SEQ ID NO: 2356 - DNA, 1099 bp, Oryza sativa
  Clone ID: PAT_MRT4530_102134C.1
atgggaaggccagtggcaacactgttcgtgctgtgcttcatctctgtgacggcgtgctcgctctcggagcaggccacgcgcggccgcctcctcgccggcgtcgacgcgacaccgccggcggccggaggcgcagtggccgtgcccatctacctgtcgtcccaggggctctacgtcgccaacttcaccatcggcacgccgccgcagcccgtgtcggcggtcgtcgacctcaccggcgagctcgtctggacgcagtgcacgccgtgccagccctgcttcgagcaggacctgccgctgttcgacccgaccaagtcgtccaccttccgtgggctgccgtgcggctcccacctctgcgagtccatcccggagagcagccgcaactgcaccagcgacgtgtgcatctacgaggcgcccaccaaggccggcgacacgggcggcaaggccggcaccgacaccttcgccatcggggcggccaaggagaccctcggcttcggctgcgtcgtgatgactgacaaacgcctcaagaccataggcgggccctctgggatcgtcgggctagggaggacgccgtggtcgctcgtcacccagatgaacgtcacggcgttctcatactgcctggccgggaagagcagcggcgcgctgttcctcggcgccaccgcgaagcagctcgccggcggcaagaacagctcgacgccgttcgtcatcaagacctcagctggctcttccgacaacggctcgaacccgtactacatggtcaagctggcagggataaaaaccggcggcgcgccgctccaggcagcgtcgagcagcggcagcaccgtcctgctcgacaccgtctcgcgggcgagctacctggcggacggcgcgtacaaggccctgaagaaggcgctgacggccgccgtcggcgttcagccggtggcttcgccgccgaagccttacgacctctgcttcccgaaagcagtggctggagatgcgccggaactcgtgttcacgttcgacggcggcgcggcattaaccgtgccgccggcgaactatctgctcgccagtgggaacggcacggtgtgcctgacgatcgggagctcggcaagtctcaacttgaccg

SEQ ID NO: 2357 - DNA, 2142 bp, Oryza sativa
  Clone ID: PAT_MRT4530_102135C.1
aaaaatgtgcttcatttttatacgtcagctgcactccagttacattgttaagggtcaagtgatggccagttacatacttacatattgtcaattgtgcactcattgaaccaccacaaaaaaaaattgcacactaattacatttccaatctttccctgcatatttttttactatagttctcactcctacagagctacagacactgacaatcaactcctgtctatatagacataaaaattagaataaaatatctgttcattgactataatctccgactcactagataaaccattcaaggacaatgcatgatgggaacaaattgagtagaggataacttcagcataatcagatgaacttgcaactcaccaggactttttttttgtttaattgatcaacagaagttgcatagttatctgtcacgagattacgatgtttgggatatgacagatcttgaaccaatccttgcctgtatctttctagggggagcggatccatcgccccgccccgtcgaccgccacggccaccgcctctcgaccggcgcacgccgcttcgcctcccacaccaaggaggagctccaccgtcggcttgctctccccgtcgccgccttctcggccggcaatccattctggaagcgcgtccaattcagtgcaattgctgatcttcagctttcgcagagtggtaaggtacctgatgggttctgcaagaacacgtagcatttcgcagtattcgatggttagttcctcaagttttggcaatatctcgctgctgtcggagattgacaaatctgttatagcatctggaaggcatggtttcggcctgagctttgggcatcccttgtcaatctcatggtttcgaggaaacaccgagcaatacgcgaagcattgcttcagaacgggtggcatttgatcatagctgagtttgagagatggcaagatggtctcctccttatccagctgccaaatctcactgtccctgacagcaatccatgattcctcattcctcttgaacctcagcatgctcccaagggccttcgccgccagcggcacgccgccgcatttggggacaatctccttccctatcctgaccaattttgggtacaattcctcatctgcttcctcaaaggccttcctcttgaacagctcccagcaatcctcatcagagaggctcttgagcatcaatggcggcacggtgcccaccatcatgccgatcctccggctccgcgtcgtcacgatgatcttgctgccccgcttgccgcccctgaggagcagcctcagccgctcccactcgtcgtggctctcgctccacacgtcgtcgaggaccagcaggtacttgttccccgtgaacgccatggacaagaagcgcgcgatggcctccaggttggtggtggttgtggtggcgaggtcgcacctctcgctgggcgcggcgacgatggggtgcacggcctggaccagcgtggcgaggctgaagccggcggacatggagacccagatccgggggtcgaacacctcgtcgttggccctccggtcgttgaacgccagctgcgccagcgtcgtcttgccgaggccgccgatgccgacgatggggatgacggagacgccgtcgtcgtcgtcgtcgtcgtcgtcgcccgccgcgtcgaggaccatcctcatgagcctctccttgtccgcgctcctccccaccgtcttggcctcgtcgaccatggagatggtctcgcgcatgagtgggacggaggggagctgccgcgacgcgggcgggcgggcgtcggggctcagggagaacctgtccttggatgcggcgacggcgcccagctcgcgcctgagggacctcagcctgtgcgccatggcgaacgagcgcggcgtgaggccgccgcacacggagcagtcgcccccgccctcgccgcggcggaggtcggtgtggcaggcgtcgaggaagtcgtcgatgtcgtgggcgacgtccctgagcctgcggagccagtcgcggacggcggcgtcggcgagcacggcgcggatggtggcgaactgggcctccatggccgcgaggtccgccctgaaggtacagaggagcgcgagctcgtcccagacggaggagccgaacttggtcagcacctgcctcacgatggtcgaggcgagagcaccctccgccat

SEQ ID NO: 2358 - DNA, 1362 bp, Oryza sativa
  Clone ID: PAT_MRT4530_102136C.1
atggagaacgacgcccgcctcctcgagtttatggaggtgacgtcgtgctacgacgtcaccctcgccgcccggcagctcgcctcctgcggctggcacctcgaccgtgccgtcgatctcttctacgccggagtcgtcgaaggcggaggacgaccgtcgtcgtggtccgcgcgacacgacggcgaggagtcgacgtcgtcggcgtccgcgtccacgtcggtgcgcgctccgatctccgctcgctccgacaccctctacggcgtcccgtacccgtccgtcggccgcgccacccgccgccgcaggcagaccaggtgggagagcgaggaggacgcggctcttcggcgccagcgcgagggggaggccagcaccagcaccagcggctacggcggcggtcgcgacgactcggacgacgagcagccgccgcctgcgtccaagaagaggaagccgtcgaccctggcggagctgtaccgggcgccgcgcgagctgacgtacaggggcgggttccacagcgccaaggtgcacgcggcgaggctgtcgcgttggctcctcgtgaacgtgcaggcggagtacggcggccgcgagttcgcgtcgcatttgctgaaccgcgacgtgtgggcggacgagacggtggcgatgtacgtgcgggacaacttcgtgttctggcaggccgacgagggagacagcggcggcgagggcagcaaggtctgctgccactacaagctcgaccgtgccaagctgcccgccgtgctcttcgtcgaccccgtcaccgggcagctcatggaaaagctgcaccatatcacggacccgaccgactttctcatggccgccgagaagttcatcgactcgaagtcgttcatatccaccaccaccagagctaacagaattacctaccaccgccttaccgtggtgggcaaggagttcggcggccaatgcggggtggacgcgctcttcgcctattgccggtcagtcatcggcgtcgagcagccgttccgggtgatgcggatgccggcgacggccggcgcgaaggaagaagtgcgcgaggacaaggacgtgtcgtttgagcagctggggcttaacatgtccacggtggccgctgctgagtcgcactgtcgcctccaccgggtccgcaaggtcgagagctacctcgaccgccgttcgcccatcgtcttctgccgctggaacccgcctcccctcggttgctccagagctcatataccccttgccgccgtcgttgctgtcctatccgtgccggtcacaggtgtcatcggccatctcgtcccgagccgcgcccctgtcccaatggcggtggaccgccgcggtaatcctggtccacggtggaccgagcgttgtgtcaccgacgggtag

SEQ ID NO: 2359 - DNA, 255 bp, Oryza sativa
  Clone ID: PAT_MRT4530_102137C.1
atgctcgacaccgtcgtcgccgacaccgacgtgaagatcaggtccaagtccatgggcctcggcaccatgctggtcttcatcggcagagctttcagcatcaagaaacccaagagggagatgaagaggaagtacagcagttggagccagaatgggtggcggttgtcctgtgacgagcggatccaccactgccaacactgccacgagtggatcctcactggcggccctgcgatgggtgtatctgccaccaccggctag

SEQ ID NO: 2360 - DNA, 298 bp, Oryza sativa
  Clone ID: PAT_MRT4530_102138C.1
tttttgtgtgtgaagatttggtggccacagcatcgtattgatggtgcagctgaatcaatgcacatgaatgaggacggcacgcaggacaccctgtgacgtgcagaagagcatattcagactaggtgccaagggatgacgacctgattaacaaattaactgttatacatgctagtaatatatacagcaagcacgaaactgacactgcattcacacacgtgcctgtgtaatttaggtctgaccattcttgccagaggcgtcgactagcctgaggaaccacacgcaggcgcataagccggtt

SEQ ID NO: 2361 - DNA, 233 bp, Oryza sativa
  unsure (1)..(233): unsure at all n locations
  Clone ID: PAT_MRT4530_102139C.1
gcagaatgaattaggtgacactattnaagagctatgacgtcgcatgcacgcgtacgtaagcttggatcctctagagcggccgcatccgccgtcggcgtcgacggctcccccagcgcccggctcgccgccctcacctgccccgcgatcgcgtccgcaggcaccggaactgccgcgagatggtaccgacagacgccagcgaccgtgtacgtcctacgccgaacccgacccccgac

SEQ ID NO: 2362 - DNA, 177 bp, Oryza sativa
  Clone ID: PAT_MRT4530_10213C.1
atgtcggtttgggagagaggaaccgacatgggcggtcaagccggcgagctggcgctccggctagcgtccaaagcggcgacagaaggcgctgacgacggcggcgaccgggcggagggcttccgcagcagcgacggcgcgtggtgggagcacaccagcggcctcatcggcgccggctaa

SEQ ID NO: 2363 - DNA, 420 bp, Oryza sativa
  Clone ID: PAT_MRT4530_102140C.1
ttctatttggcactgcaggcatcccaatatcgggacgattcaattaaaatcctgtgcggctcgaccacatcacgccctcgaggagtcgtgggtctctctcgcgaccgacttaccacgcgttatccctacgcgtccgtctcccccctttatttttatcgcgcccgccaccgaaaagacgaaaaaaatctcccaattccccaaccctaacgccgatctcgcctccaccccccaaatcccgaatccgtcgcctcttcgttcgtcgtcgagctcgctcgctcgtccaaccctagcgcgccagatctacccgtccccgagcagccgccatggcggagaccctcgacatgacgctcgacgacatcatcaagaacaacaagaaggccaaccccttcttcggccgtggacgccgcggatctgccgctg

SEQ ID NO: 2364 - DNA, 1467 bp, Oryza sativa
  Clone ID: PAT_MRT4530_102141C.1
tcggtagctctctcttgctcgtagcgaggtcgcagatcctcaccgccggcgatcccccgcctccgtttcggtaccgccgccgccgccgccgcgagagaggggagcagaatgttgcagtgcgtcttcctcctctctgattccggggaggtgatggtggagaagcagatgacggcgcaccgcgtggaccgcggcatctgcggctggttctgggactacgtgctcgcccacgccgccggcgacgcttccaaggtggtggtctcaccgacgcattacttgtttcaagtttatcgaaatggggtgacattcttggcatgcacccaagtggagatgcccccgttgttggctatcgaggttttgacttttgctcttttttatggttctgtgaatatgatttgcgacttccagtttctctcacgggttgctgatgtcctaactgactatcttggagatttaaatgaagacataatcaaagacaacttcgtacttgtgtatcagattttagatgagatgatggacaacggtttttcactcactactgagccaaacattttgaaagagatgattgccccaccaaatattgtcagcaaaatgttgaatgttgtgactgatgcagctgcttcttttgtaccatggagaacaactgttgtcaaggatgcaagtaatgaagtctatgttaacatagttgaagaactagatgcatgtgtaaacagagaaggagctctagtgaaatgtgaagcatatggtaaaattcaagtaaattctagccttccaggtgtaccagaactgaccttgtcattctctaatcctacaattatcaacgatgtgaggtttcacccttgtgtccgattcagaccttgggagtccaatcagatcctttcgtttgttccccctgacgggcagttcgagctcatgagttacagagttaagaaattgaagaccacaccaatttatgtgaaacctcagttaacatcagattcggggaattgccgtgtcaatgtgatggtggggattaaaaatgatcctgggaaaactattgattctataacagtgcagtttcgattgcccccacttattgcttctgctgatttgactgcaaactatggcacagttgatattcttgctgaccagacctgcttttggacaatagggcagattccaaaagacaaagccccgtctctctctgggaatttacgccttgaagaagggcttactcatttgcatacattcccaacgtttgaggtgaaattcaagattatgggggttgcactatctgggcttcaaattgataagctggaagtcaaaaacactcccaatgctccttacaaaggttttcgagcccagactcaagccggaagggtgctccaacttacagtcatatgcatagtcaatcaccttgacttagtatcagttctactggagcattctcgaaagaaagaacaagtactgaacgcgtggaaacttctttaa

SEQ ID NO: 2365 - DNA, 282 bp, Oryza sativa
  Clone ID: PAT_MRT4530_102142C.1
atgacgaggaggggaaggaacggcaaggcggccggagccctagcaaacgggaaggcggcgaggggaggagcgccgctggcccgcccccttccggcctcagatctgtcaggcacggctatgattgacgcgcgggcgatacaaggtcgtgggcgcggcggcggcggcggtggccgcagcggcggcgactcgaagctgtctacgcgagcttgccggaggtcgagattatcttggtcgtgggggacccagcttcagcgcgtcgcggcctccacctaccttccctaa

SEQ ID NO: 2366 - DNA, 828 bp, Oryza sativa
  Clone ID: PAT_MRT4530_102143C.1
catccatctgttgcagtgcatgatgctttggagcagggtgagcaaatccatgcgcagacgataaagagtggcttcttgtcagatgttgtggtgaacagcgcactggtgaatatgtacaataaatgtgggtgtattcaagatgcaaacaaagcctttcttgagatgccaacacgaacttttgtcacatggacttctatgatctcaggctactcgcagcatggccaacctcaggaggcgatacaactcttcgaggaaatgagattagctggggtgaggccaaatgaaatcacatttgtaagtttgctctcagcttgcagctatgcgggtttggttgaggaagctgagcattacttcgacatgatgaagaaagagtattgtattgaacctgttgtggatcactatgggtgcatgatcgacatgtttgtgcggttggggcgggtagaggatgcattttcctttatcaaaaggacaggttttgagccgaatgaggccatctggtcaagtttggttgctggatgccggagccatggaaacatggaacttgccttctacgctgccgataagctgcttgagctcaagccaaaagggattgaaacctatatcctgctgttgaacatggaccgcagctggattacgataaaagacaaggtgtatttcttcagagctaatgatagaactcatcctcaagcaactgagttgtatcaactattggagaatctgttggagaaagctaaagccattgggtatgaaccatatcagaatgcagagttatctgatagcgaggatgatgagaaacctgccgctggatcactaaaagcaccacagtga

SEQ ID NO: 2367 - DNA, 2218 bp, Oryza sativa
  Clone ID: PAT_MRT4530_102144C.1
atggcggcggaggccgcggcggagatcgtgcgggagatcgcggcggtgggcgccgccgatttggctgcggccgccgagccgctgcgcgcggactgcctccgcctcgctcggaaggtctcgctgctgtcgcacctcgtcgcggaggtcgccgaggcgggggccgggggtggggacgcggacgcggcggattcgtggttgggggatctggtcagggcgctgcaggccgccaggaggttcgtcgagctcgggcgcgcgccggcgcgaccgtcgagggcgtcggatcaggtgagggcggagaccatttgggatgccgtctgcaacaatgttgctgttcagttcaagtttgtgacttggcagttgcaaacagttctagcaagacttccacagagctgttttcaaatatcagatgaagttcaagaagaggttgatttagtgcgagctcagcttcgaagagaaatggagaagaaaggagacattgatgtaaacattttttcaaaattccatgatatcttagctcttcatgttagtactgttggatcgcagtctgagcaatcacatggccagccagacacaccacagatggaaaacttatgcaacggtcatctggagttgcaaaatatcattatgctagtttcagaaataagtggggtgcccaagtctgacgcagagagaataacttctcagctaattgaaggacttgaaaacatgagagttacagattctaaaaaacctgtcagtgttagccaatcaagtgatgaaacaaaagcatctcctgagacacataagaagtctgacgccgtggctattcctgaagattttcgatgcccaatatctcttgagctgatgagagatcctgtcattgtttccacaggacagacctacgagcgtgccttcatccaaaggtggatagactgtggaaaccggacctgtcctaaaactcaactgaagctacaaaacattactctgaccccaaattatgttctgcgaagtttgatattgcagtggtgtgaggaaaaagggatcgaaccacctaccagatctaagaacgatggtgcatatcttgaggttggtggggagagagtagctattgaaacattagttcgtaatctctctagtagctcattagatgaacggaaatcggctgctgccgaaataagatctttggccaagaaaagcactgacaatcgtatacttctagcggaatctggtgcaatatccgctctagtgaaacttttgtcctccaaagacctgaaaacccaagaacatgcagttacagctcttctgaatctctccatatatgatcagaacaaggaactgatagtagttgcgggtgccattgtcccaatcatacaggtgttgaggaaggggggcatggaggcaagagaaaatgcagctgcagctattttcagcttgtcacttattgatgataacaagataactattggaagcactccaggggcaattgaagcattagttgagttgctgcagagtggcagtccaaggggtagaaaagatgcagcaacagcactgttcaacttatgcatataccaagcaaacaaggtccgtgcagttcgagcaggaatcctcgcaccactgattcagatgctgcaggattcatccagaaatggagctattgacgaagcactaacaatcttgtcagttcttgtgagccaccatgagtgtaaaattgccatagcgaaggctcatgctataccctttttgatagacttgttgaggtcaagtcaggcccgtaacaaggagaatgctgcagccatcttgcttgccctttgcaagaaggatgctgagaacctcgcttgtatagggaggttgggtgctcaaataccactaactgagctgtccaagaccggcacagacagagccaagcgcaaggcaacctctctcctggagcatctcagtaagttgcaggtgctctaattccactgtccatcgcataccattttgcgtgtgtgcgtgttctacatgtacgtatacatacgaaaagctgtaacctcatctcttatagagtgtgaatttggtgggccggtaatgggttatttcagttaccggcttaccctcaacctcaagtgtgcgttcattgattgctacataaaaaagggttggtgttacagacttgtgtattgttgctcatgggcatgaagtttctttgaagatcaaaaatgcaaaattattacggtctaaaaaaaaaaataaaaataaa

SEQ ID NO: 2368 - DNA, 2316 bp, Oryza sativa
  Clone ID: PAT_MRT4530_102145C.1
atggcttccaccccctccctctccgtctccgccgccgccgccgtcttcccgtcggccgctgacccccgcaggccgccgccgccctccgtcgccatcgtcgacaagaatagttcatatggcaggagcttgcaggcggctgacaatggcggcggcggcggcatggaggctcccccttcgacctctgggatgtccaggaagcgatgaccatgctgaccgagggcaaggcgggtgcagccagcgatgtacgtgccgctgctgcaccggtgcgtcgagacggggagcctcggcgccgccagggcggtgcacgggcacatggcgaagacgggcgccagcgccgacatgttcgtggcgacgtcgctggtgaacgcctacatgcggtgcagcgcggctcgggacgcccgcaggctgttcgacggaatgcccgagaggaacgtggtcacgtggacggcgctcgtaacggggtacaccctcaactctcagccggcgctgggcctggaggtgttcgtcgagatgctggagatggggaggtacccgtcgcattacacgctcggcgcgacgctgaacgcgtgcctggcatcgtgcgatgtcgatttggggaagcaggttcatgggtatgcgattaagtacggggccgagtcgatcacgagcatggggaactcgctttgcagtctgtatgccaagttggggagcttggattctgcgttgagggcgttctggaggatccctgagaagaatgtgatcacgtggacgacgatgatatctgcgtgtgccgaggatgaggaatgcgtggagcttggaatgagcttgtttatcgatatgcttatggatggggtgatgccgaatgagttcacattgacaagtgtcatgagcttgtgtggtacaaggctggatcttaacctgggaaagcaagttcaggccttctccttcaaaattggttgtgaaacaaatcttccagtgaagaactcgacaatgtacctctatctgagaaagggtgaaactgatgaggcgatgcggttgttcgaacagatggaggatgccagcatcatcacatggaatgcaatgatctcaggctatgcccagatcatggactcagcaaaggatgatctccaggctcgatcaagagggttccaggcgctcacaattttccgcgacctcaagaggtctgtgatgaagccggatcttttcactttctcaagcatcctatctgtttgcagtgccatgatggctttggagcagggtgagcaaatccatgcgcagacgataaagagtggcttcttgtcagatgttgtggtgaacagcgcactggtgaatatgtacaataaatgtgggtgtattcaagatgcaaacaaagcctttcttgagatgccaacacgaacttttgtcacatggacttctatgatctcaggctactcgcagcatggccaacctcaggaggcgatacaactcttcgaggaaatgagattagctggggtgaggccaaatgaaatcacatttgtaagtttgctctcagcttgcagctatgcgggtttggttgaggaagctgagcattacttcgacatgatgaagaaagagtattgtattgaacctgttgtggatcactatgggtgcatgatcgacatgtttgtgcggttggggcgggtagaggatgcattttcctttatcaaaaggacaggttttgagccgaatgaggccatctggtcaagtttggttgctggatgccggagccatggaaacatggaacttgccttctacgctgccgataagctgcttgagctcaagccaaaagggattgaaacctatatcctgctgttgaacatgtacatttccacagagagatggcaggatgtggcgagagtacgaaagctgatgaaacaggaagatgttgggattcttagggaccgcagctggattacgataaaagacaaggtgtatttcttcagagctaatgatagaactcatcctcaagcaactgagttgtatcaactattggagaatctgttggagaaagctaaagccattgggtatgaaccatatcagaatgcagagttatctgatagcgaggatgatgagaaacctgccgctggatcactaaagcaccacagtgagaggttagctgtcgcgctagggctgctgcaaacacctccaggtgccacggttcgcgtcacgaagaacatcaccatgtgcagggactgccacagctccattaagctattttcgctacttgaaaacagagaaatcattgtccgggacagcaaacggcttcacaagttcaaggatggccggtgctcctgtggagattttggtgctctattgtga

SEQ ID NO: 2369 - DNA, 956 bp, Oryza sativa
  Clone ID: PAT_MRT4530_102146C.1
atggcgatcatcgtgctcagctcatttgcatttgaattgaaagatcaagagagaaatcaagaagagatcgagaggatcgaagctgtaatctccgtagagatggcggcggcggcaatggatgactcgttcaggagggcgggggcgataccgttcaagtgggagatctgcccggggacgcccaagcacgccaggagcgcgagcgcctccgcggcgtcggcggcggtggtgtcgccggtgccgccggcgctggccaaggtggcgacgaggcagcagctggcgctgcctccctgcatgacgtcgccgcgcgcctcgccgtcgccgtactaccactccccgcgcctctcctccgccgccgcgtgcaggtcggcggcgtcggcctcgccgtgccggagcaggtacgccggcggcggcagcgagtaccgcccccgccccaccgccttcctcgacctcgctccccgagccaccacggcgccggacttgtacggcgccgcccacgaagctgatcacgacgagcccgcggcggcgccggcgtacgggtgcttcctgctcccgttgctccggaggaaaggcagcagcaagaaacgcggcggcggcgggtattcgtccggctccggcggctcgagctcctccggcagcttcaggtcggacggcgagccgggcggtgggctgcggcggtcggcgtcgtcgtctttctccttcgctcgcggcggcggcaaccggatcaggctcgccgccggagcgaggcagcaggaggaggtggaggcggccagtggcagctggttcttctgatcatcatgtcgccattgttgatttgatcaagttaaagttgtgaaggatttattagctaggagaaattaaaggaattagcagctttaatttttgcgttttgttgcgtggtgaggatgagagagcccagttcgatcgattacatcagactggtggctgtttgtgtgtgt

SEQ ID NO: 2370 - DNA, 299 bp, Oryza sativa
  unsure (1)..(299): unsure at all n locations
  Clone ID: PAT_MRT4530_102147C.1
aaaaaaaaaaataccccgagcttccatatttttaattcacatatgcctcacccaacaacatttattcgtaacaaatcccacttttacattaagtcaaaaaaaaatcaggttaaacaaaaacaaaagccgagcccggcctgtaaaatcaaaaaacctttaacaaacttggaacccaccaaacaaggggggggacttttttcaatcagagattaacaattaaacaaggtttttttttaccatgaccgtttaattgccaccaaactcctntaaacccgggggcttttaagcaataaaactta

SEQ ID NO: 2371 - DNA, 156 bp, Oryza sativa
  Clone ID: PAT_MRT4530_102148C.1
atggctctcacgttctcaggagctgattttggggacaaggagagctaccttgtcgacaacgtggagccactgccgatactgttgaccgttctggagaccaagccaatattgcgcaaggagcttgacggccacctcagcttagtgtgcaggtggtag

SEQ ID NO: 2372 - DNA, 717 bp, Oryza sativa
  Clone ID: PAT_MRT4530_102149C.1
atggctatcgaggccggagccttccagatccgctcagcgggtaaccggcagtggcaaagacggtgtggtcgggcacctctgtgcctagacgatggcagggacaatgatagtggcagtggcagaggatgtggcggtgcagtgggtggatgtgaaggatctagaacaaggagggagaggccatggttcaccggatggcggcagctctcctccttcgtagcaacgagctacgatagtggtgttgtgcatggacttcggcttcttcctcgagaaggggcctcctgtatggtgtccgctggcgattggcacttgtgcggtagccatgcgttgaagggattttggatggtagcggctgttgggagtgatggagatgtggcatgggagggccaaaggttctttgggagaaagtccaggctgtttagggttggcagcggcagcgctttctggcgccgcaaccttcttggagacgttggtgtggagtcttcttccttcctaggggattattcgggtgaaaattgccctgctcctgggacaggcgatggcgacacccttggcgtcgtaacctcattggaggtgtcgtttgaaggccctttcccactaatctctaatctagatgatttgtcctcctatgccggcgcttttgggatggccatgttggcgggtctgcgcgggggagagtggatgcatccttctctctcgccttctccctctcctacctaa

SEQ ID NO: 2373 - DNA, 303 bp, Oryza sativa
  Clone ID: PAT_MRT4530_10214C.1
atgagccaggcgagatcgccgggacagcgcgtggagcggcgcgggcgcccgctacgcacggcgggctcggagaacggggccggcgacggcagctcgcggcggcggcggctgctgcggagcgacgtcgccttcaccccacccgcaactcccatggcccggcacccggcggacgccacgcggctggcgcagcacctcattcttctcccccgcggcgcgccggtgtacggatgcggggaggaggcgaggaggaataagaggggagaggtaggtggtggtggggagcaaaaggtgggagagaaatag

SEQ ID NO: 2374 - DNA, 271 bp, Oryza sativa
  Clone ID: PAT_MRT4530_102150C.1
ggagaagtaaaatacttaaaagtaaaagactttttgatggagtattacaacaggcagcaggggcattaataccccaggacattaattaagtgacccaatggggggctccatttgggtttttttaaatgaagtcgataacaaaatttgtgtggccttggagaggaacactgggatatcatgggcttggaattaacaatgggaggcatacaaaagagggcccaacgacaacagaagaggcgggcattggacattggcgggccttatttggggg

SEQ ID NO: 2375 - DNA, 1269 bp, Oryza sativa
  Clone ID: PAT_MRT4530_102151C.1
atggcaccatttacagaagataaagttgatttgtctaatcttccagcagatcttgcactaagaaagccaatttcacagtataatgtgaatgttcgtgacgaggtgagaagagcttacctccaaagaggtccatttcagactccagatcataagttctcccaaaaagatatgagtgggtgtatgcgtcgttttaatccagattggtttaagacatttagtaattggttggagtacagtatagtagaagatgcatcatactgtctttgttgctatttgtttaaaaatgaaactctagggcatggtggaggagatgcattttcaactcaggggtttagaacttggaaattcgataggttcaaaattcatattggtggcccttctagtgttcataatcagaatgtgaagagatgtgatgatctcatgaaccaacaacagtctattcgatctaatattgttaagcaagaaaagaaagaatgctctacagaagtgggtgctgttgttcttaaaaatgctcccaagaacttcaaattggttgctcctgaaatccaaagagatattgtgagagcttgtgctgaggaaacacttaaagctatcatagaagatcttggagatgagtactttgctatattggttgatgagtcccgtgatgtatcacacgcggagttagttgaagaggcattgcaattgggtgaacttggaacaggacgtggtctaaatcaagaacttggccttaaaagagctggtgatactagatggggctctcattttaattccctgctgaatatgattgttatgtttccttcggtagttgaagttattgatgacattgcacacaatggctctaaagctgttgataggcttaaggcaaaaggggtgttggatgccatacagacatttgatttttcttttatgctgcacttaatgaaggaccaagatattgtgaaagctatttcatatctgggcacaactaagagaagactacaagacctgagaaatgatggttgggaaggtatgttcaataaggttattgacttttgcatccagcatgatattgaacttcctgacatggatgacatgcatgttcctcggggatcaaaatcaaagcggaaagctcaagttgatggcatatcaaatgaggattactaccagagtgtcatttacgctgttattgacctattacgtgttgagcttaatgaccgttttagtgagagcagcactgtgttactacttggtgtggcttgtttggatcctgctgattcattctcttaa

SEQ ID NO: 2376 - DNA, 513 bp, Oryza sativa
  Clone ID: PAT_MRT4530_102152C.1
atgcagcgcggggaggtggcaggtggcggcgcggcgcggggaggcggaaggcggcgcaccgcgggtaggcggcgcggggaggcggcaggtggcggcacggcacggggaggcggcaggcggcgcaccgcgggtaggcggcgcggggaggcggaaggcggcggcgtggcgtggcgcggcgcggcggcgtccttgctccctctccccacaggatctagaggccgccgctggccttgccaacctcggcccgctctgctcgatgaagcgacggcggcggacagcttcggggggcagcggcagagcttcgggcagggatggcgacggcgagcgcagaggctagcgacggtggcggcggctcgcgacgatgacctcgatgacgacccgacgacaacgactgcgcagaggaatagcatagccggcctggctcaacacgacattgacccacaaatggtgcagaccattaaagcatcaccgggcggcctcgctgttgtcgccgaagccaatggcgctgcttag

SEQ ID NO: 2377 - DNA, 992 bp, Oryza sativa
  Clone ID: PAT_MRT4530_102153C.1
ggctctcattttaattccctgctgaatatgattgttatgtttccttcggtagttgaagttattgatgacattgcacacaatggctctaaagctgttgataggcttaaggcaaaaggggtgttggatgccatacagacatttgatttttcttttatgctgcacttaatgaaggttatacttggaataactaatgatttgaacatagccttgcaaaaaaaaggaccaagatattgtgaaagctatttcatatctgggcacaactaagagaagactacaagacctgagaaatgatggttgggaaggtatgttcaataaggttattgacttttgcatccagcatgatattgaacttcctgacatggatgacatgcatgttcctcggggatcaaaatcaaagcggaaagctcaagttgatggcatatcaaatgaggattactaccagagtgtcatttacgctgttattgacctattacgtgttgagcttaatgaccgttttagtgagagcagcactgtgttactacttggtgtggcttgtttggatcctgctgattcattctcttaactttgacaaggacaaaatactagaaatggctcgattgtatcctgatgattttgacagtgaacacaagattgaagagcttggttgccaacttgaaaattttgttgagaatattcgtgatgattcaagattctgcaatctgaaagggcttgctgatctgtgcaagaaattagttgaaaaaaagaaacacacttcttatcatttggtgtttttgttattgaagctggtattaattctacccgtcgccacagcatcagtcgagagagttttttctgctatgaagtatatcaagtctgatttgcgcaatagaataggcaatactttcttatatcattgcatgattgcctatgttgaaagtgatgtgtttcaaaatatcactactgataccatcatgaaccgatatcaagggatgaaaacccgtaaaaaggagctc

SEQ ID NO: 2378 - DNA, 109 bp, Oryza sativa
  Clone ID: PAT_MRT4530_102154C.1
cctcaccctcatgcccaccctgcaccctgcactgctgcaccctgcaccctgcaccaccccatgtgctgcatgtgctgctgtgtgtggtctgtcctgccttaccctgcct

SEQ ID NO: 2379 - DNA, 1225 bp, Oryza sativa
  Clone ID: PAT_MRT4530_102155C.1
atggactccgtcgtcgacggcggcctcgacacgcgcctctctctcgccgtcggctgctgcccgccgcggaggaggccggtgttgctgttcggtgaggtgctcccgtcgccggagaagaaggtggcggcggcggcggtggtggctgctgggaagcgaggccgagagcagaggggtgaggctgaggctgaagctacgacgacgaggcagcggcggagctgcaagaagggcaggagggggaggggagacgacgatgacgacgacggtgatcgccggagcccgagcggcggcggcggtgacgaggaaggcgcgagcaactagtagcacttacttgtagctatgatctagagcacttaagacatggagaggcaaggcttggatcttggcctgagcctcgggctaggcttgacgacggcggcgacatggccggctgctgggttctgtctgaactccggcatggcggacaggaagtgatcaggcgtgatgatgtggttgcggcggcggcggcggaggatgacaggttcgcgtgccacccggcagcccggtgtcgagcggcagctggaagcgaggagcggctgcggcggcggcgacgggagcggcgacgccagcagcaacgtcggcggcggtgctccgcgtaggaagcggcggctgaccacggaccaggctgccgcacccgagggaagctgcagctgagccagcaccagcccgccctgccggagggtcgcgtcgacgaacatagcacactcacccccaagcaaaaggttgctttggcgaagcagctgaaccgggggccaggacatgaagaggagggagctcgactgcgagcaggcagaacgaaggtgaaaccggcgggcgggcaacgcttgccgcgtacagcttccgcgcgcacagcttacggtgcccaacggagaacccggacctggcggcgaagcgcggactgagcgcacccccgctagaggcgtcgtctccgaacaggacgccaaggacgacgttcccgcagccgcgggcccaatgtgacccgcccccccgctggtccgacccgctcgccgcggacaacgcgcgcctccgccgccacctcgcggagctgcgccgctcctcctcctcgccgccggtgtccggcctcgccgtggccacgcccgtcgtctgcccctcctgcgcccacgacgacaagcgccgcctcgccttcgccaccgccgccgccgccgccggcgacatggccagtaactga

SEQ ID NO: 2380 - DNA, 669 bp, Oryza sativa
  Clone ID: PAT_MRT4530_102157C.1
aacacacaaaaattatttgactgtcagaccatgaatataactcccatcacaaaaacacaggtgagcaaatcaccagcaagcgccgatccaactaagtcaatctgaccctcatatctttggatgactaacttatagtgccccaccaatcccaaggtatccacggtgaccgagcctgccacgtaccagagctacccatcactgtgattgattaagaccgctaggccgcgacctactctgtggaccttcggggaatagccacaatcacgatgaattgagccacctgtactacaaccgggacgcttagtggaccaggcattctttagacctttgccggccatgcggcgacgggaactggttctctgagttgtgcaccatttgaaccatacctgccgtctgttagcactctattactggggctactgtacgctgagcgacttgaaactgttgtcgtgctcgagaaccgacaactcacggctgaaagactgttacgccttggtcaacattcttggacctaccaacatgccatcctattgtggatatttcataactatgactggcaggacacacacaaagatcatcagctccatgtagttaatgactgtcaccgtgttgtactttgagtcctaaaaaaagacacactgtgacagagaggaccctactttgcccccg

SEQ ID NO: 2381 - DNA, 535 bp, Oryza sativa
  Clone ID: PAT_MRT4530_102158C.1
gtgggaggaagatgtcattttcccatgacgacatggtccatcattaaatcggacgtgatggctgcgttgctgaaattttgctcagccaactctcagaatttggaaatgctgaacatagcgattattacgttgctgccaaagaaggaggcctctacccttttgaaggattatagacctattagcctcattcacggctttgccaaattggcaacgaaggtcatcgctctgaggctcactccgagaatgggtgagctggtctctcgcactcagacatcgttcatcaaaggccaatctatccatgagaacttcattttcgttcaagggctgacaagataatttcatcgacagaggaaagcaatggttctccttaaacttgacatctcgaaggcctttgattcagtttcatggagcttccttttggatatgttaaaacacagaggttttgggaggagatggagagaagttaaccagtggagcagagcaccaaataattcgctctatgccgacgacgccgtcatcttctttaaaccggttc

SEQ ID NO: 2382 - DNA, 788 bp, Oryza sativa
  Clone ID: PAT_MRT4530_102159C.1
cggacgcgtgggggagcttcacgccgtccaccccgccgccgccgcccaccctgccgcccaagcgccgcaagggcattccacaccgcgcgccattcggcagcctcatcgtcgagtactagccattgccaaccaacagcaacttcacctgcaggaatccagcgcgtgcgcaattgggaatcgcattgcaaagcggccgccacctcgtcggcctttgcccattgccattaccattgttgccttttggtggtgcttctcgaggtggatgccattacctttgcacaaaggaaaggaggaagatgaagaaaaggaagggtacaaaagcactagcttttccattgctaattgctccattaccattactaggaacacattaaaaatacagacaggatatgtatacatctttaattagtgaccaccccctccctctctctcttgtgttcaaccttctatatagtcttttttttttcattttgagatgtttcaaattttagatgtctttgaccagacttgtagctaatactcctagtggattagcagtgatgataataagtagctggtggtgcttaagttttgtgatggctgctactaactggtggtaccaggattagtgctactttgttcagttcatctgtaaatatggatgctagaagagggcatgaatgatccttgcttattactcccggttataataatttaatttattctctattacactttcttttctcccttcatttttctcatactcaactccataatctacactctctcattaatacccttctacttat

SEQ ID NO: 2383 - DNA, 2166 bp, Oryza sativa
  Clone ID: PAT_MRT4530_10215C.1
ctaaatgttctgtttacttgaaggaaaagttcgcctcctcttcagatacattctcttgctgggcgctttatcatgcatggcctccatcagatattcttccttgtgtggatttgtagatttgatgtcagatacacattcatcttgaaaaacttggtctgctctatctgcatagttggaaggtccagcctcttgtgctgctgactgaaagtttgtgcccagcatctcatctccgtagctacagtcactgcagctctcactttcaccagagcagctgctggttccattctcagaggaagaggtgccgctaaacgtgttaaagactgtgatgctctcttcccgtgagttgcgaaacgaatggctcttgtacttcgtactgttcaaaggcaagatggaatcatgcttcaggcctagcatatccctgccaaggctgtatgaggagcatagtttcctctcgatacattccttagcatttacagtttcacccaattgtcccaaagcttcattcgaggaggcgtcgtggacagtcttctgctccagctctgatatcctcttgcctaagattttcctcttagtgtgaagagagtgcctcttctccaggaactttttcaagccattcttttgaagctttttcttcctccaaaagatgcagcaaaagcagttaacaatcgctatcactatgacaataaaatggaagaagagaacaagacggatgttgcggtcgccttgatcattgccaaagttgggttttactgttctgagaaaagaaacatacttctcgtgtagcactgcgtagtgctgccaattcctcagaacaatggtctcatctagtgcaaaatcattcaggtcagtactggacagaaaatctgatagttctccattggaatcaacaggtggcaagattttctcattactcagtggaccaatggtctgctgccatgaaatgtttcctgtcaaaacatcaagccccattacaattgacttccttggaaggacaatgtataagagcccattatttcctggtacaatattcatcactttgtcaagtgagcccaagtcttggatccatctgtactgaccgctcttaatgtacaaggagtagagctggccttcagtatttgatacataaagagttccctcacatcgatcaacaactggaggtgaattgaaatagcagcctgagatatttgttttgcagcccagacggctgacgagatcagccacaggcccgatgatctcctcagacctccctggtgttgcattgtaactgaaaaatacttctgacggtggatcagcagtgtgtagtttcttcggagttatctttatgaccttgttatcttctgccaccaaatatatctcatccctctcggcaaccggactgatgccctctttacaggtgtgaccgagagtaaccatccaagcgatggacccatttcgctcgaaggcgacaaggctcttcttctcagagcaagcgatgagacggccgtcatgcccaatcagggggctcccgagggcaccagcgactcctggaggacgcctctgtaattcatcagcactatcttcactatctgaaacaacaatcctctccacaggagttgtgttttgttggatggaagacttgctttgcctggcatctttctgtggatcaatggtacccaagatctgatttttgaggacaggcgctgacaacggaagttcattgggcttcctgttgttttgagaacaatctgtttgcatatattccttctcaatggtcttgtcaatgcgctttgcactactcttctctaaagcattatcagaagatcccatgacaggatgcttagtgttcgatgatgctgatgctagaagatgattaggtaacttatcttccacactgccattactgttcttgctaggaccttctgatgtaacaggaagcccctgcccaagtaactgcaagttccttctagttccttggtattctttctttgaagtcactgcactatctgcgatgacagatatgctttctgaggtatcattcagtttgcctgaaacatcagacaagcatgcagtaggatcagtgggtcttgctgtcgatgataagtggtttgtcaccaggtcctttttgccagtggtggtattctcttcaggtactgatttcagagataacttttgactaagtagcctcat

SEQ ID NO: 2384 - DNA, 1767 bp, Oryza sativa
  Clone ID: PAT_MRT4530_102160C.1
atggactatttcacggggacggggactatcgtggtctccgacgacagcctctacgccgccttcggctacggcgaccccttcggcttcgccccgcgcgcgaggcccccgatccgttccctgcccttcgccgccggcggctaccagtggtgcctctggttccaccccaccaccttcgccggcttcttcggcttcggcgtcgagctcctcaccgccggcgccaaggccagggcgtccttcgagttcggccccgtcgacgccgcctcccacaacgtcatcgtgcggatgccgcccttcctcttcgaccacccccaccaccccatggtcatcatggtctggcccaaggccatgctcgccgaggaggcgacactgttcgtccgcgaccacgccgtcgtgttccgggtcgacgtcaccgtcgtcccggacgagccgctgcctccggacgccggcgtcggcgacgacgacgtgctgccgccctcggacatgctggcccagctcggcaacgtctacgacaccaaggagggcgcggacgtgacgttctccgtcgacggcgagctattcgccgcgcaccgggtcatcctcgccatgcgctcgccggtgttcagggcggcggtgtacggcgagatgagggagagcggccgcggcggcggaccgatcgccatcgacgacatgcgccccgacgtgttcgacgcgctgctccgctacatctacaccgacgccctccccgccgccgccgacgacgacgacatggaggcaacgtggagcgacctcctggtcgccgccgaccggtacggcgtggagaggctgaagctgatctgcgagcgcgcgctgcgcgggaggctcgacgccggcaacgtcgccgacatgctggcgctggccgaccggcagcactgcgagacgctcaaggatgcttgcatcaagttcatggcgacgtcggggaagatggaggaggtgaaggcgagccagggattaataaagatggtggccgatagagaaacgggagccaaagaccaaatcggcgtctaccttgagctcatcaccaagggaaccaaggcgagagcctcctacaagctcagactactcaaccatgtcaccgcctgtccttgcttgtggtacacctgcccactcaaaatctatgactctatcgatgataacaaatctttcacctggggaaccaagaaattcgctgacaggagcaagctagaagtcgcatcggagtatctacaagacgttcgcctcgtaatcgagtgcgatgtcatgccattagtaaggatcgaagcgatcgcggaaatcatccgatcaccttcttctccttggtcgcaactgtcagaagacattggcaagctgctagagatggagaccggacggagccgacgtgagcttcaaggtcaacgctccactttgaacaccattgatcgtgtcgctagcaccataagacgggccaatgagagggaagagaaatatctcggtgaagaagagaggaaggagttgatcaagcatctgctcattaccgtggatcgctatgctatcgaggggttgaagacgatgctcgaagacggactctgcaaggtccttagcttaggcaacgtcaaggagatgtttgccctaactgatcagcatgattgcagcatattgaaggatgtgtgttttgaatttatcacctcctcatcggtccatggattgggcgatgtggctttgagtgaagggtatgagagcctacgagaatcttgtcttgctgccatagtagatgccttacagcgagtacaatag

SEQ ID NO: 2385 - DNA, 702 bp, Oryza sativa
  unsure (1)..(702): unsure at all n locations
  Clone ID: PAT_MRT4530_102161C.1
ggtgggggtgcattnccctgtgtgtggtgtctgtccagacaccctggttatcagatgtattaatgggtcttgagtcnttgtggctgtgaggctttcaccctgttgcccatgcgtgtccccacggcttgtttctctggcacttcacctggtcggtgtcgcgcctttggcacaantataccactttactggacggaattgccacgntctgtgggacctgtggctaggaatgacccgtgttgttcaatggaggtggaaagggcggtgtgctgtgatgtgttgcatggtgtgatgcactgtgccaccangtgggatggtgggggagtggtgtgtggccagccactggaggactgncccctcaaatgtgtggtgcgganatgtgtggcctgcccgtgtctgctgatgtgtgaaaaagatggtgggatggctgatgtgaccaatgaatgtngcattggctggcagagctgccnaaatgaaatggaggtgcgtgatggttgctgtgttgagaatggcaacaggattgcatgtggtaaaatgcaggaaagttgtgcagcatggtgcatgagtggctgtgagcctgtgccatgatggcggcaaatgcagtagctccaagatttagaagattggatgtatattgaattcggttgtttctcttgtcgantaaattcggtcatcttggtttgggctaaaaaaaaaaaaaaaaaa

SEQ ID NO: 2386 - DNA, 1845 bp, Oryza sativa
  Clone ID: PAT_MRT4530_102162C.1
gcacgaggcccaccggcctccaccctccgcagcgcgagccaaaccgagaagacatccacatgacgacgcctcgcgccaccaccaccacgtcgcccttctcctctctcctcctcctcccgatctccccctccgccgcgactcctccgcgccgcgccaggacgccgccgccggcggtggcacatggcggcgtgcggtggacggctggcgggaggcggcgacggcgagggtgccgggccgcggtcgtcgtacacggtggctgcctgagtctccccaaagaacaggaggacgacgcgtcggcggcgagcatacgactggagggaggagtggtacccgctgtacctcgccaaggaggtgcccgacgaccgtgggctggcgctcacggtggtcgagtggccgcgggtgtcctacggcggctccccgccaaggccgggcgctcggcagccacggcacagcggccaccaaccctatccaaggagctactcgcggatgggtcgctggacttcctaagggagtggtagggacacgacggcgagggcgtatgcctcgctcaagaacgccttccccgccctcgccacgtcgccggtgacgcctggccatcctgccggcgaccaggcaattgaaggcggtcctgctggcgtccgcggccgctctagaggatccaagcttacgtacgcgtgcatgcgacgtcatagctcttctatagtgtcacctacctgtccacggtgcacgagctcccctacgaccactccatcctcctcgagaacctcatggatcccgcgcacgtccccatctcccacgaccgcaccgactggacggcgaagcgggaggacgcgcagccgctcttcttcgaggtcaccgagcggacgccgcgcgggttcgccggatactgggggaagcaaaggacgccacaccttcgcaacctgctccggttcgaggcgccgtgcgtgcttaccaacacgctggagttcgtcgacaaggacggcaaggagcagtgcttctcggcgcacttcctctgccgccccgcggggcaggggaagtcgatgctgctcgttcggttcggatccacccagacgtcgccgctggtgaaggtgctcccgaggtggtacttccaccagaacgcgtgcaaggtgttcgagcaggacatggggttcctgtcgtcgcagaacgaggtgctgctccgggagaaggtgccgaccaaggagctctacctcaacctccggtcgtcggacacgtgggtggcggagtaccggaggtggatggacagggcggggcacggcatgccgtactacttcgggcacagcacgctgtcgccgccgccggtgccggccgttgtcgagcaggcgccggcgggggcggtcgccgggatgtccgcgtcgttcccggccaagggcggcgtcggcgccacgcacgcgcccaacccgaccaacaggtacttccgccatgtcgtgcactgcaaggggtgcagggacagcgtcaagaggtacgcctcgctcaagaacgccttcgccgcgctcgccgcggcggcggtggcggcggccatcctggcggcgaccaggcaattgaaggccgtcctgctggcgtccgcggccgcgctcgccgcggcgtcgtacgcgtgtaactgggtgctgtctctcatcacgaccaattttattaggacacacaggagactgtaaccgtggcaatggctgtcatgctttggcacatactaatagcaaggtagaatggtacagctatttcattatttttgcccatgtatatttgtatcactacatgagtaaacgacgtttagttatcgataaaaaaaaaaaaaaacatgaacccccggcgtcgtcctgccccccgggg

SEQ ID NO: 2387 - DNA, 313 bp, Oryza sativa
  Clone ID: PAT_MRT4530_102163C.1
acaattcacaagtgtagactagaagggggggggtctgttttactgaagccggctgaaaaccagcggaggcaccttccagccccgccagctggatccggcgcctgccgaaaccatcaccagtggccggtgcttactatactcctgattggacagggtaggccgtacaaacgccttcactgcggatgtcgatgccacgcgtgctgacgtggcgcaaaccaacaaaggctcgcttcggacaggggcggaaacagagccggctacgggacggggcgaccacctgacactgcacgatgctcctacatcgctgggagag

SEQ ID NO: 2388 - DNA, 804 bp, Oryza sativa
  Clone ID: PAT_MRT4530_102164C.1
atggcttccacgtcgaggaaacgttcggcgcgtagcctgcaagaagatgagcagacctcatcggcggcagaggcgccggcggcggtgcgagaggacgaggagcgggttgcggtggcgggcatggaggcgtggaggttcgggttctcgagattctcctggtttcccgcgttcaagttcgaccccaccgacgccgacatcgtcgcctcctacctcctcccgcgcgcgctctacggccgcggccacgccgccgttatccaggacgacgtgtcgaggtgcgagccgtggacgctgatgcgggagcacggccacgccaccagcgcgcacgccttcttcgtccacgaccacgagagcgtcggcggcggcggcggcggcggcaggcgcaaggtgcagcgcgcagtcaagaacggcggcggcgtgtggcggatccagaagggcgaggtggcgatcctcaccatcgtccgcggcggcggcggaggcggaggcgagctcgacgtggtgtacaagcggcgcaacctgagcttccaccgccgcggcgagagctcctcctccggatgggtcatgcacgagtacgagatcacctcgccgccgctccccgccaccgtgctctcccggatcagggccacccccagggccaaggacaagaagctgtgcatcaaggaggagccctcctgctccacctccgccgccggcgagcgctctggccctaacccagaccacaccgccgccggcgccggtgacagcgccactgccaaccacaacaatacaacgtcggcggcgacaacaactatggcagcggcggtgtag

SEQ ID NO: 2389 - DNA, 276 bp, Oryza sativa
  Clone ID: PAT_MRT4530_102165C.1
atgctatatcgcggtggccgtgcatcttccgacaatggaggggaggggggaagggggaagggaagagaggtacgatggcccaccggagaaatatggcccgcctatcccattgcggcgttcaacccacataggtgcctgacatgcaagacggcgaggaaggtggagggagcatgtggtgaagagggagcccatgacatgaggccattgacagtgaactcagaccatgttggacctacaaggggtggcaagggaggagatgccatagggaaggactag

SEQ ID NO: 2390 - DNA, 1056 bp, Oryza sativa
  Clone ID: PAT_MRT4530_102166C.1
atgctggttttgggagggaggaaaccgacctcgtgggcggtcaaggaggggcggtcaagggggagctggcggcagggcgtggtcacgggcggcagagggggaatggtgccggcacggcagggcggcatgggcggctgcatggcgcaggctgccagggctgacgcggcggcgaccgggcacaacttcaaggagcaggcgatcgagtacgtgaagcaggcggtgcaggaggacaatggcggcaactacgtcaaggcgttcccgctctacatgaacgccctcgagtacttcaagacccacctcaagtacgagaaggaccccaagatcaaggacgccatcgccgccaagttcaccgagtacctccgccgcgccgaggagatccgcgcggtcctcgatgggcacatcggcggcggcggcggcggcggcgactccgagcaggccaagccgaggggcatgctcaggtcggccatcgtcgccgcgaagccgagcgtcaagtggagcgacgtcgccggcttggagagcgccaaggaggcactgcaagaggccgccatattgcctatcaagtttccacacttctttacaggaactggaaagtcttatttggctgaagctgttgcaaccgaggttgattcaacattcttcagcatatcttcatcagaccttgtttcaaaatggatgggagaaagtgagaaactagttgctaatcttttccagatggcccgtgaaaatgctccctccattatcttcatcgatgaaatcgattctttatgcggccaacgtggagaatgtaatgaaaatgaagcttcccggagaatcaagactgaacttcttgtgcaaatgcaggtgaaggatgcgttatttcaacctgtgaggaaaacacaggatgccaagttcttcatcaaggcagacgatgacacgtggacgccaagtccaacatggtctgagttcactgtcaatggcctcatgtcatgggctccctcttcaccacatgctccctccaccttcctcgccgtcttgcatgtcaggcacctatgtgggttgaacgccgcaatgggatag

SEQ ID NO: 2391 - DNA, 359 bp, Oryza sativa
  Clone ID: PAT_MRT4530_102167C.1
gcgtccggtcgccttgtccgcgcgtgcgccaccgtttccacccagattcgcgcccgccacttccgactagctcttcgcggcaaaagagatcgcacgtctcgccgcacgaaccggatcacgcaggatcagacatgatccttgccttctgcaaccaacagaagcagagaaatgaccacaatacgatggactcggtgggggggagaaaacttcgctgcctttgctaccaaaaggaacgtaaaggaaactcacccgcaagctctctttgaacgcaccctcgaacaatcaagatgcatggaaggcatgacgagcatgccaacggcataacactgcataggctatgatcgccccccagcttactg

SEQ ID NO: 2392 - DNA, 192 bp, Oryza sativa
  Clone ID: PAT_MRT4530_102168C.1
atgattcagctgctccaaaatgtcaatgagaaagggccaacaaaccatatcaaaggcctccatgatgtccactttgagaagaagccacgaacaccgacgacagtggagtgccttggtcgccaattgaaggtagcaggagttgtcatggatgcaacgatctttgacaaaggcactttggttgaccttgactag

SEQ ID NO: 2393 - DNA, 276 bp, Oryza sativa
  Clone ID: PAT_MRT4530_102169C.1
gacgaaggtaatattcagtagtttccgatgtgatgctaatattcgcctaatacatgacgccgtgcagagagttcccatgagatcaggaaacaaaagatgagctcttgccgcaaacacttctagatattgcttaaccccggaaaagttcagcataatctttcataatagaacactggctctaaccagtaataaaggaaatctgaacgttaagcgtccatctgttactacttcaacccccgcttaaggctcacgcccttgcttactgaggcggctcca

SEQ ID NO: 2394 - DNA, 963 bp, Oryza sativa
  Clone ID: PAT_MRT4530_10216C.1
atggggggagaggtggtgcgtcactggaacgctgacgtgaacggcatctccctccacgtcgccgagcagggccccgccgacggcccgccggtgctcctcatccatggcttcccggagctctggctgtcgtggcgccaccagatggccgccctcgccgcccgcggcttccgcgccctcgcccccgacctccgcggctacggcgactccaccgtccccgacgaccccgccgcctacaccgtcttccacatcgtcggagacctcgtcgccctcctcgatcacctcgccctccccaaggtgatggtggtggggcacgacttgggagctcaggtggcgtggcatctctgcctcttccgcccggacatgctgctcgccgtcgtcaacctcggcgtccccttcttcccccgggggcctagctcgctctcggaggcattcgcagggcgcgatggcctctacatcatgcagttccaggaaccagggagagctgaaagagcatttgcccgttatgatgttgcaactgtcctgaaaaagttcttctccattgaaatcgatgacctcaccgcaccccctggagtggagatcatagactttcttgaggcacgttcgacaccgcttccatggatctccgaggaagaacttggccagtacgcggaaaagtttcagaagtctgggttcacaggacccatcaactactaccgcatgatggacacgaattggaggcttactgcaccctggcaaaacgcgaaaattatggtgcctacaaagttcatttgtggtgacaaggacactggtctcaagtcctttggaactgagcactttgtcaagagcggtgctttcaagtccgtcgttccaaatcttgaggttgtcatcattgaaggtcaccatttcatccagcaagagcaggccgagagagtgaattcggagatattgtcctacttcgataagttcactggtgagaaggcatga

SEQ ID NO: 2395 - DNA, 538 bp, Oryza sativa
  Clone ID: PAT_MRT4530_102170C.1
gcacgaggatggatgtcaaccagctctggttactgtgggcaacactcgccgtgtcactgctctactacatcagcaaccggagacgccgcgtgggcggccggcgacgatgtccacctggtcccatgccgctcccgctcgtcggcaacctgctcaacctgcgcggccacctcccacccgcgctcgcgaggctagcgcgcacgtacggccccgtgatgatgctaaagatgggcctcaccaccaccgtcgtcatctcctccggcgacgcggcgagggaggccttcacgaagcacgaccggcacctcgccgcgcgcaccgtcctggacgtcactcgttctctcgacttcgccgaccggtccatgatatggctgccgagctccgataccgtctggaagacgctccgcggcgtcacggcggcgagcatcttctcgccgcgtggcctcgccgccctgcgcggcgtccgcgagagcaaggtgcgggacctggtgggctacttccgtgggcgcgccggggaggtcgtggacgtccgccacgccgtgta

SEQ ID NO: 2396 - DNA, 1161 bp, Oryza sativa
  Clone ID: PAT_MRT4530_102171C.1
atggccgccgccgcagcggctaaacccttcccgttcctcgccgccgccgccgccgccgcctcacggtccccacttcccctctcacccgcggcacggccggccccagcctcgtcccgcttcggcgaccgtcgcgctcccgcggtggtcgctgccactgcccgccgccgcggcgcccatggggttcgagctctccggccccttctccttccccgcgcctccgcttctccctccgcgaagaccgcggcaggaggcatgtctgacccggagctaaggatggtgctcgagctcgccaccgacgaggagctgatggagttcgaggagatcctatacggtaccagttatgagccacagatggccaaacccaagcctgcaaatttatctaagattaagagctattttagcccactgctaaaatcaattgcaaaaagacccaattcagattatgtcgatgctttggatgatattgaggagagagatattttcatctcaaaattagagtcgaggttcctgtatcttgctgccgatgcccgctcaatcataaggggatctcgaccatcatacaggaatgtcttacttggagtgagaagagaacttggtgttcgctgctctagtaaattatgcacggcagaccttgaggcagaaatatttcttcacctgctagatgaatattcgagccgtcagaaaggctcagatttatttccgtggaataaacagaaatctccaaaagacaactctagccttggagttaacaagtggatggtgcttactgattctgcttggaagattggagcaaaaggactagaaagtgcattcttgaagggtggtagtgcattgactctgaaaatgatctatgaatcgttagccaagagactatctggaaagctgctcatggaggctggtaaatatgagataaagaaagaacttctaaagcagggtggacgattagctgctgttaatctggagtctcgagctggtttgcttgcagctaggcagggtttggcacgtgcagcatctagatatgttggtcttaggagtgtcatgacgtttcttggaccaataatgtgggggacactcttggctgacattgtgatccaaatgcttgggacagactatgctagaattgtgcaggcaatctatgcttttgctcaggtgagcttctga

SEQ ID NO: 2397 - DNA, 522 bp, Oryza sativa
  Clone ID: PAT_MRT4530_102172C.1
atgcggtctccaagagcctgctcacgagttgtcgatgtcgatcggctgtacggcacctatggcaaggagcagcggccgctgctccgcacggcacgccgatgctctcctcctccgcctcgacgactgccggtccgtgctgtgcactcttacgggaaagggaatggggtgaactgctggacaatgggtgctctagcgccgtgtgacctagcgccgtcgttgccgccgtcgctccagccgtgcgctgccgccgttccggtcatcgccgttgctcgggaagaccgccgtcatggtcgccaagtcgccgccgtccttgtctgccgcttcgccgtcgccgaagatcgtcggagcaccgccgtcaccgtcgacccgaagaccgccgccgcttcaacctcgtcgccgtcgccgtccgttggtcttccgccgctcctttggtcaccgcatggttcattgcggggcaccagactgagaagtggcggagataagcccacgggggtcgctggggagtccataccttgtttataa

SEQ ID NO: 2398 - DNA, 319 bp, Oryza sativa
  Clone ID: PAT_MRT4530_102173C.1
gtgaacttgtacgtgacctgcgattaatatgacaatccgttctgctaagattttgtagcgatgcaggtctgatacacaaaggatgccttgcgtggcatcttggtttagctctgaagcaccagagctggcacctagaggctcagcattgcgatagctatagagtactgccaatgtacactggtacttacattccatgatctcctgtacatgcgttatgggggagacagcacttatattccacaagatgaagcgtactgcgaccactcatggcatgaaatccatggacaccaggggcacaatcttggcagctagagctgga

SEQ ID NO: 2399 - DNA, 930 bp, Oryza sativa
  Clone ID: PAT_MRT4530_102174C.1
atggcagcctgcgtcgataagtggccggcggcgtacccgtgccgcctgccggataagttctactgcgccttgccggactgcaccaccacggaccgtccggtggcgccggcgccggcggctagcgggagcagcggcgactacgtgtgggacgcgctgcgcgccgaggcgcaggacgacgcggacgacgagccgctcctccgcaagttctaccacgacctcgtcctgtcgcggccgtcgctggagtccgcgctcgcctcgctgctggcggccaagctctgcatccccggcgcgctgccgcaggaccagctccgggacctcctcgccggcgcgctcgccgcgcacccggaggccgggcgcgccgcgcgcgccgacctcgccgcggcgcgcgaccgcgacccggcctgcgccaagatggtccactgcttcctctactacaggggcttcctggcactgcaggcccaccgcgcggcgcacgcgctctggtccgacaaccgcagggcgccggccctccttctccagagccgcgcctccgaggtgttcggcgtcgacatccaccccggggcgcgcattggcggcggcatcctgctcgaccacgccacgggcgtcgtcatcggcgagacggccgtcgtcggctacggcgtgtccatcctgcacgccgtgacgctgggcggcacggggaaggagtccggcgaccggcaccccaaggtcggggacggtgtgctgatcggcgccggggcgagcgtgctcggcaatgtgcacattggcgacggagcggagatcggagccggtgcaatcgtgctacgggacgtggcggacggaaccacggccgtcgggaacccagcgaagccgatcatcggcaagaaggcggcgccgcaacggcggccggaagagcttcccggggtaaccatggagcagagatggtcggattga

SEQ ID NO: 2400 - DNA, 225 bp, Oryza sativa
  Clone ID: PAT_MRT4530_102175C.1
atggacgacgaggtgaaattcaactatcctgaagtttccactaccattgttggccaaactgacatggcatggttattggtgctgcacgtgaggatgtatatgattgaaatgcacaattttcacatgtatcatttttcacggtatctaaagcgtggaatagagatatttgaaccatttcctcaggcctccgttactttaataaatggattctatatcaagctatag

SEQ ID NO: 2401 - DNA, 423 bp, Oryza sativa
  Clone ID: PAT_MRT4530_102176C.1
gtgttttttgataatagaggacaattgaataactaatgaatattcgcaaataataaattattacagaggtggatagttcctctcaatcaaaaataacattctacgcagcggaaaacaaaactaaaacaaactacggaacagctatggcgactcaactccacaggcatcttaaccgagaacaagcctaatcctccagatcatcaccttcactgaagtactcctcttcttgggcttccgcaaacgcttcggaaccttcctcaacggaaacgctctcctccggaacgtcggaaacacgacgagaaacgatgcacgacggcggccggcgacgaataggaaggcggcggcggttcgggtcgacggcgacgagggggctccggtgatcggcggcgaaaacggaggggcggtcgatctttctcgcaccac

SEQ ID NO: 2402 - DNA, 1032 bp, Oryza sativa
  Clone ID: PAT_MRT4530_102177C.1
atggcggtcgggagcggagaaggaggcggcggcagtggtggttgggatggcggtcgagagcggagacctcccggcgcctggcgagcacctcccccaccgccgccgcccacggggagaggatctcgccggcctgctgccaccgccgcgtttccccctccgatccgccaccaccgtcgccggccgatgcctcccccgccaccgccgccgcccacggggagaggatgtcgtcgggaggtcgcgcgctgggaagggagctcgccgatcggtccgcgcacaggaccgcgccgccagccgacgggtggggaggagaccgacggggcgaggcgggagaggaggttcggcggccggcgatgttgtggcgacgacgacgacgacgacgcgggagcaggagagcaaggcggcggcgacggcgaccacgtgacggcgtcggagattgcccacacctgcagcgcccgccgcatccgtatctccctccgtgtcgccgacccgccggccgccggccgtctcccacctctacatccaccgcctcgacgccgacgaccaacatggccgaacgcctacgacctccgccacgccgaggtcgtcgccgcccaccacggctctatcctcttccggacccgcgtccccttcgccgacccggacttcgtcgcgcccggacacttccccgtcgactacttcgtctacaccaccgacgccgccgccgcctctccgccgtcgctcacgcggcttcccccttgcttcatcgacggcttctccgacccagtcgaggacgaatactacaagccgtaccaactccagcggcggcagatcatgctagacgagaacatcggcttcctgtcctactccagcaacgacggcgacgagttcgtggtggcggacatcaggaactaccactgtgattccctcgagctctgcatcttcaaccaccatgccaactcgccgtcatcgtcgctgtcgccagagcaatggaggatccaacatcttgagatgcaccatgcctcggcacgcaagatcggccgcagcaagaagtag

SEQ ID NO: 2403 - DNA, 285 bp, Oryza sativa
  Clone ID: PAT_MRT4530_102178C.1
aacactacaacccagcagaccaattccacgctctaccatgcaacgatccgggaacgaaatgaaccaccaatcaagcttctcagcaacaaacgcaagcaggaggcggaggagattattaccacactgttgcaattgatgcacttgcgattgggcggcagcttcatgagcccacggatgatcttctcgttcctctcctcctccctccggctccccatcccccaccgtgagagaaagaaatcaaaatccccccgaaaatttcaccccacaaatcgcagcgaaaactga

SEQ ID NO: 2404 - DNA, 256 bp, Oryza sativa
  Clone ID: PAT_MRT4530_102179C.1
cgccgcgcgcctcgacgtgcttgctgcagtactcgattaccttggagaggatcttggcggagacgttggggagcgggatgccggtgtcggcgcacttgtcctcgatcatgtggcggatggtctgggactccatggccacggcctccgcgacctcgaacacctggccctcgcagctgcggagggtgatcatcgccttcgtctccgcctcggccgccatcggatcgacgagagaacaaaccctagaaagcgatggaat

SEQ ID NO: 2405 - DNA, 263 bp, Oryza sativa
  Clone ID: PAT_MRT4530_10217C.1
tggaggggatacgctcctatgggcgattgggaccctcgagggcgggcgggaatggagcctcctccttcgtcggtcgattcggccgattacgaatcagaaatctgtggtcacttttccgagtcctcccaacagcttgaagccggagagggagcgtcctctcccatttgcccagaggaagccaggaccaaaagggggacgccgccgccgtacagaaggcagagaggcagagattgtcagatcaacacccgccgccgccactatgt

SEQ ID NO: 2406 - DNA, 447 bp, Oryza sativa
  Clone ID: PAT_MRT4530_102180C.1
ggcaattcaagttattagaaaaaaacacttgtatttttgtgaattatgttgcaactaattcaaggatttttggaataatgtatacaccagatgctcaaaatttagcgcattacgcgctcccggccggctggctcttaggcagacaagctaacccaagtaacagttgcacaaagaaactgtaaagaagcatatcatatttgaacccgagtaacagttgcaccaggaagctgtaaagaaatatatcacatttggtaatctctcagaatggaagtactgcaatttatagacagttgctacttgctagccaggcaaaaaaactaactgtgggctgctgggattcgagcctaggtcgccacgggccacaacggggaattctcaccaattctcaccactaaactacgtggaattcctattttcttcttacagaggttgcagatgaacctcctg

SEQ ID NO: 2407 - DNA, 221 bp, Oryza sativa
  Clone ID: PAT_MRT4530_102181C.1
atgaaaaatgttttttttaaaaacggtggttacaaaatatgggggcccaaattgtggcccctggttttggcgtctcccaattccggccttccttggtcaggccatcttgggcgatgggattttcctatttccgaacatccgattttgccaattgggctggcggccttatggatcgggctccctttacaaagcacttccctccaaaagcccttggccccaca

SEQ ID NO: 2408 - DNA, 2961 bp, Oryza sativa
  Clone ID: PAT_MRT4530_102182C.1
atggcagaggatgcgaaccccacggcaacgggtagaaggacccacagcaggtgcccactgcgtgcgccaggtctagtgcaccagctcacacaactgcaaaatccaacctgccgcggcttgtcagagctccacccaccacgcctcttcggcttctccttcgctggcaagccgactactcccaaaatgcagcggctcccgctccggcgcgccctctccgccgccgcgtccgtggccggccggcgcgccctctccaccgcggccgcctcgccctcgcgcacgccgccgtgggcgatgatctaccacatcccggcggtcagatccaccgcgccgcgcgccttcttcatcctcgccgaccccccgggcgcctccaacctctacgtgcccgaccacctcttcgaccgccggcccggccccggccccgacaacggcgacgtcatggccctcctcggcggcatggtgtgcaccaccagcggcgacggcctcctcctcctctgctactcggatgcccacgcccccgtcgtctccacgcacagcggcactcgggagcctaagctgatcggcgtcgacatggacccggacatcacgcgcttcgtctgcaaccccatcaccggcgagctgttccgcctcccggacatcgacggcaccaagaagaccttgtcctacggccccaacgccggcctcctcacccggtccgcctccgccgccgggcacggcccgcctgacaggtacgccgtcgctctgctcaacgaggaccgcagccgcaacggggatgaacgagccttcgtcatgcggcgtttcctctcgcaaaccgggaagtgggagaagctggtgggcttgccgttgccgtccccgctcccgctcccgcggcggatggagctatacctcgaggcggtggcgttcgccggacagttgttgtgggtcgatccgacttggggcgccatctccgccgacccgttcagccaccggccggagctccgcttcgtcgagctcccgaggggcagtgtgtggccaatgcccagcacccatccagtacaagcgttgggtatgttccggcgcctaggagtcagcgaggggaggctgcgctacgtcgagttgtccaaccaggatcctttcgtgctcagctcatttgccctcgacgaccacggcggcagctggacgatggagcaccaggtggagcttgctccactctgcagggaccatgttaatggaggaggcctcccctcaaaggattacacttccaccccgcggattggcgttattgacccactaaactcaagctgcatttgtgtcctaattggcaaacatgttcttgcggtcgacatggatatgggcaaggtgctagggtgttcgctcactgatgaaagtgaaggctcgccatgggctatcaccacttgccttaagccgtgcgtgctcccaccatggcttggatcaagccaaatccctaatgcagaacaccgggcgctcggtggaacaggtccacgctcgcgcggctcccctctgccgctgtcagagtctgagctcacctccgtgaacctggtccaccgtgaaccagcacctcctcctcggcttctcctcgacgccacgcgggtccctttctctctcgctttcgcagttcgccggcctcctccacggctccaccggcgcaggatgcaactcccgctccgccgcgcgctctccgccgctgcttccgcgtccgcgcctgtccggcgcgccctctctgccgcggccgccgccgccgcgcccgttcggcgcgccctttccgccgccgcggccgacgccgacgcctcgcgccatcctgggtgggtgatgatccacagcatccaccacgcgacggaggccagaactccgtcgccgcgcgcgtcccttcttctcgccgagccaccgtgttcctcctacctcctcctgcctgaccacctcgtcgaccggcggcccggccccaaacccggcaccggcatcgacgtcgtggggttgctgagcgccgtgatctacgccacgagcggcgacggcctcctcctcttcgcctacgtggactcccacgccccgctctccgtcgtctccaaggccttcgccgccggcgctacccctactcgggaaggcgagctcgacctcgacggcctcaacccgcaggatcaggacctcacgcgcttcgtctgcaaccccatcaccggcgagctgttccgcctcccggacatcgacggcaccaagaagaccttcttctggcgccacaccggcctcctcacccgctccgccgccggccatgggccgcccgacagctacgccgtcgccatgctccgggagcacagcaacagcgggaccttccacatgtggcggttcctctcgcgaaccgggaagtgggacaagattgacggcttgccgtccccgctcccgcttgtgcggcggctggacatcgacaccgaggcggtggcgttcgccggacggctgtggtgggtcgatctgacatggggcgtcatctccgccgacccgttcagcgaccggccggagctccacttcgtcgagctcccgaggggcagtgtgtggccaatgcccagcgaagatctactagtagaagtgcagagtattcatcggcgcgtgggggtcagtgaggggaggctgcgctatgtcgaggtgtccgacaaggatcctttcgtgctcagctccttcgcgcttgacgacgatggcggcagctggacgctggagcaccgtgtggcgcttggtcgaatctgcgaggtgaagggaggaggaccagaggacaccccgcgaattgccgtcattgacccactaaactcgagcgtcatttgtgtcatcgttggcaaacatgttctttctgtagacatggagatggggaaggtgcttgggtcttcgccgatagaagaaggaacatctgcgagcaacaagggtgatgccaaaagcaagaccttatcagacatattggttcgtgtagacagggacaagaagaattga

SEQ ID NO: 2409 - DNA, 314 bp, Oryza sativa
  Clone ID: PAT_MRT4530_102183C.1
gccggcaccggccgggactgactggctggacccacccacgctttcgtatgggacagaggagagactctcatgggggggtatcctaaagcataccatgcgaccccgcaccccaaaatgaagtcctcgcccgctgcttgtgcatgtcagaatacagcgagcataggatgtatcaggcgatccgctgttcacactgaataggcattcgagcaggtccatcccttcctccatagacacactttatcaggaatcttacgagaccctttcaataaaaggtcgtaggttaaaccggaaaacgagccctggaccgaatcagg

SEQ ID NO: 2410 - DNA, 759 bp, Oryza sativa
  Clone ID: PAT_MRT4530_102184C.1
gaatgtaaattgcaccaatgtaaatgcgacaaataaatgagacaaggagacaagagatttttcaccgagtttcagaaactcgccggtttcctactcccgttgaggcgagcccaacaccaccgctcaaccacgaaggcaccgcacgcccccttcgtcaagggatgggcaaggcgggagccagcccacagagaggactacccaagcctcgatcacttagggtagttcttccttcactccgaagaccgtgctactgtgcaacggctagttttctagccgttgcagggctgacattgggccctactgtcttggccggtcagaccgacatggggtggccggtcagaccggcctaggctcgatcagaccgccgccagctcggtctgaccgacttcggctctggcggctctgtatcggccaccctagagcatgccccccggccactaggggggcggtcagaccagcattgagccgacggtcagaccggccactacccgccggtcagaccggcgcatgtgtcgtggtcagaccggccttgccgaagccgtcgccgcagctgctcgccgccggcctcgcgagctcactgccgccgcctgtcgccgcccgccacgtggcgcgctgctcgagcctgctgccgctccccggccgccgctgctgcccgtcgccgcctgccgccaccgcccgtcgccgcccaccgaagccgtcgtcgcagccactccctaggtcgcgcagtcgagcccgctgccgccgcctgtcgccggccgc

SEQ ID NO: 2411 - DNA, 1132 bp, Oryza sativa
  Clone ID: PAT_MRT4530_102185C.1
taaattttgaaaactttcaagggttcatgtaccacatcgccagggaccagcacgggtgccggttcctgcagcagcggctcgacgacggcaagcgcgaggtcgacttcatcttcgccggcgtcgcgcgccacgccgtcgagctgatggtgaacccgttcggcaactacctcatgcagaagctgctcgccgtctgcgacgacgagcagcggatggccatcgtcctcaccctcaccaaggaccccttcgtcctcgtcaggatctccctcaatgtccacgggacaagggcagtgcagaagctgatcgagagcctgaggacaagggaggagatccagctcgtcgtccaggcgctgcgccccgggttcttggagctcatcaaggaccctaatggcaatcatgtcgtgcagaggtgcttgcaatcctttgatgccaatgacaacaagccgatctttgaggccgctgccgttcactgcctcgacattgggatgcaatgccatggttgctgcgtcctgcagcgatgcattgctcgttcagggggtgagcagagggagaagctggttgctgcgatcgcttcgaatggattcgaacttgcacaagatgcctacgggaactatgttgttcagtatgtgatagacctgaaggtacccactgcaaatgctagcctgacaaagcagtttcagggcaggtatattcacctctccatgcagaagttcagcagcaatgtggttgagaaatgcctgaaagtgttcaaggaagctgacaaggctaccatcattctggagctccttgctgtgccacactttgagcagctgcttcagcacccctttgcaaactatgtcatctactcagctatccagaactccaagggttcactccactccgcgctgacgaatgcgatacggcctcatgtggaactgctcaggactagtccatactgcaagaggatctactctcgagctttgctgaagaagtgatgagctgacgggcgcttttttcggcatgtaacaacaaagcctgctgtcttgtgctatttcttcagattcaaaatgataaaaaaggtggtcgggaagactgttgttttgtgttattattcagattcaaatcggataaaggtgatcgcatcatgtagatttgt

SEQ ID NO: 2412 - DNA, 437 bp, Oryza sativa
  Clone ID: PAT_MRT4530_102186C.1
aactattggtgacttatgacagacgctccatccatctaagcatcactatcgatcggagagaatgagagcaacacgccgcctggcttacgggaccggcactatgagggcaatgacgtgcgccgtggatcgctatattgcctcgaccaacaagagaggaaaggctgaggatgcaggtactccaaggctggagttcctcatggccgagcatggtgcttgcgaatgacagcgccaatcaacagagagggagcatgccatcaggtattcagaatggtgctcttgagttcctgaatgagcaaaaccgtgggccacgtgctagcaataccaaagaaacaagacacagagaactcttcaatagatgacaaaaatgagatagatgctcctccggtggatagtgaactgtataatcgccctgattttgccactgaatacaaggatgc

SEQ ID NO: 2413 - DNA, 1170 bp, Oryza sativa
  Clone ID: PAT_MRT4530_102187C.1
atggcggacgagaagctcgccaagctgcgtgaagccgtcgccggcctctcgcagatcagtgacaacgagaagtccgggttcatcagcctcgtcgcccgctacctcagtggcgaggaggagcatgtggaatgggcaaagatccacacgccgacggacgaggtggtggtgccgtacgacaccctggcggcgccgccggaggacttggaggagaccaagaagctgctcaacaagctcgccgtgctcaagctcaacggcggcctcggcaccaccatgggatgcaccggaccaaaatcggtcatcgaagtgcgcaacggattcacattcctcgacttgattgtgatccagatcgagagccagtatcctcgtgtggtagccgatgagttcttgccatggccttccaaggggaagacctgcaaggatggctggtaccctcctggccatggtgatatcttcccatccctgatgaacagtggcaagcttgatttgttactttcacaggttaccccgaaaactctggctgatgttaaaggtggcacactgatctcatatgaagacaaggttcagctcctggagattgcacaagttcctgatgcacatgtgaatgaattcaaatccatcgagaaattcaagatcttcaacacgaacaatctatgggtgaacttgaaggctatcaagcgccttgttgaggctgatgcactaaagatggagatcattccaaaccctaaggaagtggatggagttaaagttcttcagttggaaacagcagctggtgcagcaatcaggttctttgatcacgcaattggtatcaatgttccaaggtcccggttcctaccagtgaaggcaacatcagatttgcagctagtacagtctgatctatataccttggttgatggctttgttacacgcaacccggccagaacaaacccatcgaatccctcaattgaactgggtccagagttcaagaaggtcgggtgtttccttggtcgcttcaagtcaatccccagcattgttgagcttgacaccttgaaggtttccggtgatgtttggtttggctctagcatcacattgaagggcaaggtgaccatcacagcccaacctggtgtcaaactggaaatcccagatggagcagtgatcgagaacaaggatatcaatggccccgaggacctttga

SEQ ID NO: 2414 - DNA, 386 bp, Oryza sativa
  Clone ID: PAT_MRT4530_102189C.1
acactccccacaagattgaacacgggatggatccagcacaagtagagagcgatggggaaggcgtggaagaagaaagggatcaactagaccatgaatcaattgagacgctttcagagctagaattgctggactcacaaaacctggaggcgaacgacataggggaagagtagtacacaaggggcatgaagaccaaagaactatggcaaggggaggaggagatattggatgaacacaacatggcggagcctctggagcgactagagacactattaaacactgagtggaagaaataacagaagatcgacagagggccagactggaatccaagccctcagctactagagacaaagaacctgagaagacaaactaacaagaatcggctgaaa

SEQ ID NO: 2415 - DNA, 684 bp, Oryza sativa
  Clone ID: PAT_MRT4530_10218C.1
atgcagaaggacgcgccttccccgctgccgccgccggtgcgatactgcggcgttctggaagactacgagcaacagaagctgtccgccgcataccgcgcggagctccggcgacaaaacgccctcataaacaacggcccacgctacaggtttcgccgccccggcgaaaagaggaggaggaagaagaagaagaaacacaacaagtccaagcaccaccacacgccgccgccgccttctccaacgccgaggccgagcccgccttcgccgatctgcccctacgaggaatatccgaccttcgaacccgacgacccagtctggatgcggcagagcacgatgtacgcggaggcggtgctggagcactacaacgccgccgtcgacgtcggcggtggcggcgtcaagtacgagctcgtcagggccatcttcagcggcgccatcttcacctgcaaggccgcctacggccaccggctcttcttcgccgaggtgcgcaaggacaagaaacggtatatcccgacgtgcctctggtccctggacgacgaggccgaccgagtcggcggcgccggcgccgacccgcaggtggacctgccggagatcacctcgccgtcgcggaggaactactggttcagctgtgacgacgagatgaagcatcccaaggacggaacatcctaccatgccggacacttcctgtag

SEQ ID NO: 2416 - DNA, 129 bp, Oryza sativa
  Clone ID: PAT_MRT4530_102190C.1
ggcggctctcggtgcaaccgcggcctctgcggggttgctctcgcggtgcgcgcagcccgcaggtcgggaatgaggctgcttcgagctgtggtcggtgccacgagccttgcctgcggggccggaggaggg

SEQ ID NO: 2417 - DNA, 336 bp, Oryza sativa
  Clone ID: PAT_MRT4530_102191C.1
atgggaggaggatgtggtgttggcggcaggggcggggaccgcaaggcgtgggtggatcaggagaagggcaatgacatccaccatgagttctccaacgacatcttccatgtgctcactttcaacaaccccttcctgcccaccaaaaccatgttcgttcgggaccagcactccgttcacctcgacctgttcgccatcttcgccaaccaccttcgcatttggcgcatcccgtccctaaacaacaccgccgtagctgtcatagccatcaactccaactcacgctctgatgcaacaataccaccccggctaacgtcaagttgttcaatgagagctcaatga

SEQ ID NO: 2418 - DNA, 1122 bp, Oryza sativa
  Clone ID: PAT_MRT4530_102192C.1
atgggcgccagttctcttctgtatacgctggacatcatgttcacggtgatcgctattgggattgtggtcatcatgggagctttcgtacctcgtcggtgtcgggactatattcttgtgttcaatgttcttgcggcactttcggcgttgggtttgatcaaagcaaagatggtctacggcgcacaaatgtttttggcagcaatattgcacttggtcgagatagtgacaattctgtatacgtttcgtaaagagttggttcttctaagatctaataaagccagtttgcgagagctggttcctcgaagatctgatgaagccagtttacaaggtgaagccagattgcaagaggtggttcttcaaatatctgatgaagccagtttgcaagatgaagccagtttgcaagatgtactcttgaaggtgattgaacgggcgagaccatgggcgccgttcttcttggccggactagtcagcacggcctacggcatggttattgtgttcttcgccgggggccagccggcaagtgccttcttccttggtgatttcggtgtctgcttcattctcgtcggcttgattgtgatcatcgccagaagccagcatgaacgaacacaggatgacaagggcctttgggctgacctgtcagatactagaaacaccctgctcagctctagcggtataacaacatcggcctgctacaatctcatcacctaccgtggtatgctttggccccctgcaagcttcgtttggaacaaagcaataccaaacacttgcaaagttttcttgtggcttgcctttgggggaagactcaacaccaatgacagcaggatcaccaagatgtgggattccaaccctcattgcggcgtctgcccggctattgaaacatcatgccacatcattcttcgttgcaagttggcagatggaatctggaggaaactgaacctcctgaatcaagcccgacagagtgccaacttgctgcaatttgtcgaacaagtcatgacatcttcgccgccccattctcagccgggctggccagtttgtttcgcggcatgcacacatggcttatggaaggcgcgaaacctgagaacgtttcaggaaaaactcctcactgaggccaccctgttgtattag

SEQ ID NO: 2419 - DNA, 288 bp, Oryza sativa
  Clone ID: PAT_MRT4530_102193C.1
atgcggcggcggcggtggctggccggcggcgaggaggaggtggcggtggcggtggagctcggaggcggcgaggagtggggattaaataggcggagagagtgccggcttccgtcggctgtagcactggccgtgaagatcttgtccttcactgcagtctgcagggaggctgccatacaaaacatcacagtagaaaatcttagacgtacaaactatcttgattacttggatgatttaattcgcgacagaaacaccgggatcttcgaaggagccagtaagatcgccatcgag

SEQ ID NO: 2420 - DNA, 282 bp, Oryza sativa
  Clone ID: PAT_MRT4530_102194C.1
atggcgcggacggcggacccacgggcgtcggcgctgtggtgtggctcggcactgggctgcgccggcgctaacagcggacgcggcgtggcgccggcgcggacagcggtcagtggcggcgtggaagcgggcatcgggcacgaagggaatagatgctggaggtggaagcgctccaggctccctcaactcaaccctagctgtttgtgggctgttagagatgcctctaacggagtggttatttttgactctctaaatatctatattgccaggctgataaaaatttag

SEQ ID NO: 2421 - DNA, 179 bp, Oryza sativa
  unsure (1)..(179): unsure at all n locations
  Clone ID: PAT_MRT4530_102195C.1
cagcagcagcagggaatcatggactcggagcactggatctcgagcctcgccgccgccaagcggttctacgcggcgcactnggtnacgtcgacggtatggcgggcgattgtgaatggaggaggtggagatggagattagagccntgattgcgaggncatggagctcggagctgaaanatt

SEQ ID NO: 2422 - DNA, 2333 bp, Oryza sativa
  Clone ID: PAT_MRT4530_102196C.1
tcgatatcgccggcgaaatggacgccttcctggggggaatcccgcagctccgcaggccggcggcgctgatcgcgtggtgctgagcgctggtcctcctcgccaccgtgctcctcctcccgcgcgctcctcccgccgccccggagcagcttgcctccgccgccggcgccgccgccgtccgcctggacgcgagggtcgagcggaggagcggcaacgaggtgctgcggcagaatgtccacgactacccttttttttttttttttttttttttttttttttttttttttttttttttttttttttttttttttttttttcagtggcaaccaacacacactactaaatgatctcaatcaacagcatcctttctgttcacaaaatcatacagaacattattatggagtctatacatgtactacaagaagggaagtcatataattcaattgaatttctggttgctataacatacaaaaggtgcaactgtaattatctagtttgcagtaactaagttcaccaaaatgctgtggccagtatatataccaaaaaagaaatacattttggccttcttttaacatacaacacacacacacatatcagctttcctcagcgtgacatcttctcttctatgcaaccgtggaactgaatgaacaaatgatctgttgcagtgcacaccatggaacctgacaacttgaagctcaccgaatttcttggtttcactcatcatgcataagccagcaaagtagccaacacaatcgaaaataccaaaaccgagagtgtcaatggttgttttgtcagaggacttgcattaggcaaccatggatatgcatccggaggtggcatgacacaattatcaccattgaagtacacgcggtgtgggaaggcccatcccttgtcaaaggtgaagtccttggaatccttacgcagaagaagttctgactgtgcatttccaagtggaccagcttgcatgagcaaatcgttatagaacttaactccccagaacatcgcagtatcatttatcttgcttccatatggagtaagtggcttgtagttgaagctaaacagctgggtgatattattgaagttaggatgttgagcgaccaaattccactgtgtgtaattcatgcggtagttgaagttcgtaatcgtgatcttcactctccaatattccttatagttgagtttcacatgccagtggattctgatcgggcacatgtgagaagtacattggacaagaggctgaccggtccatttgccagggccatcaatggcagattgtaaataaggtgaattctcatttacacagcttccaggacttgtcccattgttttggcagccacaagagcatgttgggcagttcacaattgtgtcattataaaatgatgagagagatacacagcaggaaggagtcttctgagcaagaaattgggagtatgtgcaggtcacattccatgtcattagagcttgggttgctctgcgcccatccccggtgaaaaacttagtaggcctgacaatcatagcacgcccgcacgtgtacccaggacctggggccttaagagtgaagttcttaggcaacttaactgtcttgttggtagtcccagcaagacctacactgatctggaaggaagaagcagcatttgatgggtcctggttaaatgtatttataactccagctttgcagcaattagcgatttgcatgttgtatggggtgcccggaagcagatcaacaactgtgggatccttcttgcagcagtggggcgtgccacccttgaactttgagcaatcgccctgctcagtggtctgtgctccaaccatcgaccaaatgacctccttctttgcccatgtccaccccagctgccacccaggtgcctggatgtgccggaattgttgatagttgaacatcgtgaccacagcaacatagccatcaggagtccacgacataacgtcccattttatcgtgatgtttccatttggatccagcgcatcataagcctctgtggtggccggcgcggagaagagcagcgccgccgcgagcagcacggcgcagcagcagcacggcgccacggatctggagctcccggctccccccaccgccatatccccgcccgatcgagctcgcgctccccgctccggaatgcgagcgcccgcccgcccggcgtccccctcctccgccccaccggaagacgaggagcggcaggcaaattgagctggtccgccgcgccgcgtgcgtcagctcgtcactctcctccgctctgcgccagcgcggccgcaagggtattgcggcattttctcgccgcgagaagtggtactactagtccccgggccggatgcctcgcccc

SEQ ID NO: 2423 - DNA, 1372 bp, Oryza sativa
  Clone ID: PAT_MRT4530_102197C.1
tcgtgaattcagagcagaagtagtatgaagcttcttgacacatgcatgccaaaacatggctccgtttggagaaggcttagcaattagcatgtttgaggatgtgcaagaggaggtttatccaggacaatctataaagtgcacaccatggaacctgacaacttgaagctcaccgaatttcttggtttcactcatcatgcataagccagcaaagtagccaacacaatcgaaaataccaaaaccgagagtgtcaatggttgttttgtcagaggacttgcattaggcaaccatggatatgcatccggaggtggcatgacacaattatcaccattgaagtacacgcggtgtgggaaggcccatcccttgtcaaaggtgaagtccttggaatccttacgcagaagtagttctgactgtgcatttccaagtggaccagcttgcatgagcaaatcgttatagaacttaactccccagaacatcgcagtatcatctaaaatagaaggaataaacttcatcagagaaagagagagagagagagagataaaggaacgtattacaagtgcactccaattttcttaaataaaggagaacagtttgtaaattgacttacttatcttgcttccatatggagtaagtggcttgtagttgaagctaaacagctgggtgatattattgaagttaggatgttgagcgaccaaattccactgtgtgtaattcatgcggtagttgaagttcgtaatcgtgatcttcactctccaatattccttatagttgagtttcacatgccagtggattctgatcgggcacatgtgagaagtacattggacaagaggctgaccggtccatttgccagggccatcaatggcagattgtaaataaggtgaattctcactgtggaaatgcatggaacttgttagcaattttgcagaaaagttgggcctcaacaagaagcgaagtaagagtttttggttttattaactcactttacacagcttccaggacttgtcccattgttttggcagccacaagagcatgttgggcagttcacaattgtgtcattataaaatgatgagagagatacacagcaggaaggagtcttctgagcaagaaattgggagtatgtgcaggtcacattccatgtcactgcaaacagattttatttttgttaagaaacaaaaaacaaaaatgaactttatggtataagattttgacaaatttaacttctatatggagccactatgatgcatgtctgcatttgacgaatattatttgctagagaataatattaactgaattagctgtattctattaggccaacatgccaagtaatataacctattatcaactattattcacagctggactcatcaaaaaacaa

SEQ ID NO: 2424 - DNA, 440 bp, Oryza sativa
  Clone ID: PAT_MRT4530_102198C.1
attcaattaaataatcatagtataacttagattaaataagtgcttattaattgatttagtgagctataaactcaaatcgttttccactgcaacatacgggctctagactagtaatgaaaaataatataaccaagtgttcgaatgaaaatagtataactacgtgtttcgaatgaaaagtgcatatcccttgctcaccacttaggaacctcacacatcgacaaggtcatctccctgcgaaaattccctatgatggctcgcctttttctccttctccgctctctgccaggaagagtgcttgtgtcatcgggaggttgcgctcaatccgccatcctcattgccaaccccaccccgccctgccgtcggagtcgcaccggtagcattgctaaggagcacggcgaggcgggaatggccctcttgatcggacgctgctgctactcaac

SEQ ID NO: 2425 - DNA, 258 bp, Oryza sativa
  Clone ID: PAT_MRT4530_102199C.1
atgggaaaaggaaaaccggctgaaaaccaccggtacacaactaacaactacggcggagcccaaacgcaggatgtcgccgccaagctaaacacaaaagcgactaaacagctcccatatcacataagaggtgttattgttgccgagctagccgcccaagcgacccagcagcgccgacttcacaaccacagtgacactgaagccacgaaagtcaccaaagcgaaaagcagctccggcatccaacaatggacatcagcctga

SEQ ID NO: 2426 - DNA, 753 bp, Oryza sativa
  Clone ID: PAT_MRT4530_10219C.1
atgcagtcaaggagaatgtggttcgccaactcaaagctcctaagtgcaaaagggacaggccgagtggctatcaataccacgcttctggaggaaatcggccatctagcagtgctgctaaaatgcaaactagaggaagaacttgcatttagcaggatcattcgcgtgccagtgaagaacaacacaggcaaaagtgtgctggccatagaaaaacgcctggtatgccgaacgtgtcgagtagcgctggtcactcatccaacgccaaataagacgattcccgacacccggcgagagctgaatgtgaagcaccacatcccaaacaagaagaaactgggagatgaccaggatagtgagggcaccgcggatatcagaaacccaggaattgtttgccaagccagaagcaaccgggcacgaacctcggaggcgctgatcaggcacaacgaagaggagatctggagccaaggaggccaccgagcagacgccgatccattggtcagaccagaagagcatcgactcactatcgccctatacgaagtaggtggatgcctcgaacatgttagagacggtgcgacgcttcttgtcaatggccttaatgacctagactggaagaccgatcgtcatagacacatggactggaatagaggagagaacatactaaaccaacatagagtggccagccagagtggcctgaggtcaagcgtgcctgagctcaaaacacaaccattgaatgacgtttattatgtgaacaaagcgtaa

SEQ ID NO: 2427 - DNA, 250 bp, Oryza sativa
  Clone ID: PAT_MRT4530_1021C.1
gggggagaagtagaccacggccctcgccccaatcagcggcttagaagcggggattggtacaagccgctagcttgcacctctagtcactccacacactgggaggcaataacatacaagtctacaacagtggattgccgagcccctgaccagcgatgaatattgtggccttcaggggcatcaaaagacacaaaggaggcggaaagactaagaatcaggcatgcgaatcttcgctgtgaaggcagtttcttga

SEQ ID NO: 2428 - DNA, 260 bp, Oryza sativa
  Clone ID: PAT_MRT4530_102200C.1
tgcaggtttaatcagttcagaagctgcgaaatggcaaggagagctctttgatgttttttccataagaatagaagagccctccttgccctgtgaatagtggggcagaaaagaggttagtaagtattgctggaaagggaggatccctagggacatgtgaagatattgttattcagtgcctgaaatacctagcaaccctcaacatccagcatttcacgccctaacaaacatgaaggccaatctgtcctcccgtcctgttggaa

SEQ ID NO: 2429 - DNA, 164 bp, Oryza sativa
  Clone ID: PAT_MRT4530_102201C.1
gcacgagggttgattcaagcaacagtgacatgaaaatggaagatattggcagggattacttcaatgagttggtatccgggtctttctttcaacaagtttctaagagctggaatggaatatggtatattatgcacgatctcttccatgatttggcagagtctcta

SEQ ID NO: 2430 - DNA, 969 bp, Oryza sativa
  Clone ID: PAT_MRT4530_102202C.1
ttaactttttgttacatctctcctccacataagctcctcgtcatcgtcgcgggcccaaggtggcgtcatcttcttcttcttcttgtcctttttcttcttcttgcgcttgccggtgaggtcgatggagcagtcgatgtcctcgatgacgatgatcgactttccggtggtctcgatgaacagcctccgtagctcggtgttgctcttgactgccgtcagctcgaggtcgtagacgccgtagtctaggaagtttgccatggcggcgatcatggtggacttgcctgtgccgggtggcccgaacagcaggtagccgcgtttccacgccttgccgacggaggcgtagtattccttgccgtcgcggaacatgtcgaggtcgtcgatgatctcctgcttccggacggggtccatggcgagcgtggcgaaggtggaggggtgctccagcttgacgtggctccagacgcgggcgtcgtcgtaggcagaccagtcggcgctggggttgttggtgaagaggcggcgctggcggttgcggacggtgacggcgcggccctcggcgaggacgtggggaaggtaggcgttctcgacgagcgcgcggtggcggcggtggaaggtgaggcggtagctgcggcgctcggcgttgcgcggggaccaggtgatgacgttggcgctggggagcgccttggtcttgcgccaccacatggtggcgccgcggaagtcgtcggcgacagcctcgtggtcgtcgacggcgagggccatgcgatcggcgccctcggcgaggtcggcgcggaggcggcgggcgttggcggcgcagggggaggcgccgaggtaggcctcgacggcgaagaaggcctcgcagcgggagaagtagtgggaggacttgtcgtcgatggtgatggtggcgtagggggagaggagggcgtggaggcgggcggcgaggtggtcctgcagctggaaggggatgtgctcctgcaccat

SEQ ID NO: 2431 - DNA, 753 bp, Oryza sativa
  unsure (1)..(753): unsure at all n locations
  Clone ID: PAT_MRT4530_102203C.1
ggccggccgggnaaaaaaagcgccaccgcacaccatctccttgccaccaccatccctacctctgtcgcatccacctactgccactggcccccgtcacgtggccacgcctcctcagcctcatcgccgccttcctcctccctctccctcttggtccagaggcagcagcggcgcaggggcgggttagcggctcccggcccagcggctgcattgcggctcctcgacgcagcggctgcccagcggcgcggcggctcaggacctccacgacggcgaggagcggcagcggcctccctctcacccctccctctccctcttggtccagaggcagcagtggcgcaggggctggtcagcgtctcccggcccagcggctgagctgcggcttctcgacgcagaggcgcggcacggctcaggatctccatggcggcgaggagcggcggcggcctccctctcacccttctctctcctctcatatcctatgtgatgtgatttattttgtgatttccacctcttctctcatcttatgtgtgatttattttgtgatgtgattattgaaataaaaacataaactcggatgggggcccggatgattttgaaatgattcccgattggattgggatttaagtttttggggtaggatttgtgatgatttgggattgggtgggggaatggttaaaagcggacgcctcgttgacagatgaagcggaagaaggggccttctgctttagttttaagggattgggatttggttggggattt

SEQ ID NO: 2432 - DNA, 479 bp, Oryza sativa
  unsure (1)..(479): unsure at all n locations
  Clone ID: PAT_MRT4530_102204C.1
ttttaatggagtgttcttgaaggtcaacaaagccaccattaacatgctgcgcagggttgagccatatgttgcatatgggtaagctaccataattacattcgagcctaatatattatatatatgcaccatcttgctattttattttgaattaccatctgttgttttactagaaatgtgatcttggcatttactagaataactggaacatttcacaattaaaggcttctaaaattgcttacactgaatttgtgttattaagtagcaactgtttgcatcattgtgttctgcatcaaaatcataacaaattgtagtcaatcaattttatattttaatttgaattgtctagggtctgaaatagttcaagcccctaatgactagagttgattattgatcttcttactagattagtgattcttatgttntaggtacccaaatttgaagagtgtccgtgaattgatctacaagaggngctatggaaa

SEQ ID NO: 2433 - DNA, 464 bp, Oryza sativa
  Clone ID: PAT_MRT4530_102205C.1
accttcctctccaactgcatgcaggccaccgatggagacgtaccgcagcgtgtgtgcaccgccgctgagatgaagttctactttgaaagcttcctcgacagcaatggaagaaagaactacgtgaggcccaacaagaactgcaacctcacatcatggatggatggctgtgaggctggctgggcatgcagtgcaggcccggaccagaatatcaacttgcaggatgccgtcaacttcccttccagaacacttgattgccgaggctgctgtgctggattcttctgccctcacggcctcacttgcatgataccttgccctttgggagcatactgtccagaatctaccttaaacaaaaccaccgggatctgtgacccatacaactatcagccacctcctggggaagccgaatcatactgtggtggtgctggataagatggggcagatgttgttaagcaccgatgatgttt

SEQ ID NO: 2434 - DNA, 375 bp, Oryza sativa
  Clone ID: PAT_MRT4530_102206C.1
atgtcacgggcaaggtacaccggcggaggcacggtggccgagggcaccaagcttgaacgtattgagaagcaccctcctggcggcagtctcatcagttttgggcaaaatcgtggcggcattggtgacgatagccacggtgtggtgacggtgccggcggcggcagttggcaacggcgacggcgcgcagcggcagtttgcggaggcggtggttggtgtcggtgacagcggcgacggcggctgcgactctggaggcggtggcgacgtcggcggcggggaaggagtcgggtgcgaggtggctgggtgttcggcagcagcggctgcggtggtggtgaccgtgtttgcggtcaccggaggcatggcggcctcggttgactag

SEQ ID NO: 2435 - DNA, 120 bp, Oryza sativa
  Clone ID: PAT_MRT4530_102207C.1
atggtgctccgagaagactgtgcggttggtgccaacgccgacgcggaacggggtgcgtccaacaggagcgaggtggagccgaggagtgtgaggttgctcgtccacgagatgtgctggtag

SEQ ID NO: 2436 - DNA, 1084 bp, Oryza sativa
  Clone ID: PAT_MRT4530_102209C.1
gtcggcggatagtagtcgtgttgccgaacatggcgatgccaatgagggggatgtagatgtcgaagacattctgaagtcgatacatgtggtgaccgatgtcatggagacccttgtgaagagagtgattgttgctgaatcggaagccgctaacgagaaagagaaggtgaggatgggtctggaagagattaggaggaagaccatacaggttgagtccatgtcggccaaagttgaggaaatggagaaatttgcagtgggtacgaatggtatgctgaatgagatgaggcagagggttgaagacatggtgttggagaccactcgacaaaggcaacgtgcggctgaaaatgagcaggagcttagtcgtgtgaagcatgacttcgagtctctcagaacctatgtcggcactctcgttaatgtcagagaaactcttctttcatcagagaagcagtttgaaacaatggagaaactcttcgacaggctagttgcaagaaccaaccaacttgagagtgagaaagcacaaaaagaagccgaagtccagaaggtggtggaggagaatgtgaggctgcgtgcgatgattgataagaaggaagcgcagcttcaggcgatgagtgagcagtgcaagttcatggcgctgagccgtcccaactagctggatacttcctccgtcccaaaaaaaaaggcaaaccctgggttttcgtgtccaactttaacgatggacggtcaaacgttggacacggaaaccagggtttgtttttttttggaacggagggagtacatatgacaagctgttacgcttgttcaatgatgccacttacgaattaccgtcactgcattgttgcaacaagaagaagagctccagatagatgtggcgaaacaacggatggtgccaactgctggcgagtccgttccaggcactctgattgctgctgctgcaaacaaattgtttaccttaatgtaggtgtgatgtgttgggactgtaaacctgacatctttgtattcttgtaacttggaatttgtgtaaaaaaaaaaaccagggcacatttgtccgaatccataaatcctctgaaaaatgagctgcaattcatcg

SEQ ID NO: 2437 - DNA, 1329 bp, Oryza sativa
  Clone ID: PAT_MRT4530_10220C.1
atggacagacaatgaatctatcatatgccgaggtatttgtcgtcatatacggatgaagtatctaaatttattgatattgccacaacacacgcttacaacaacaatgtaacggagatacattgtccatttactgattgtaagaatgaaaaagtatggatagacggttcgagaataagggatcagttggtgacgtgtggatttatgaagggttacacaatatggacttatcatgacaaagatgatcacattgaggctgctgatggtgatagttgtggtgataatatcattgatttagaggaaatgttacgccatacagaacctgatgtgctaatggggtcggttaggggtttagataattttgaatctttagagaaggcagagaaggatcttttgtatgatgagtcaaaggattgtgacagggggttctcaacactacgattagtgcttgaactaatgcgcttgaaggccaggtatggttggtttgctagtatttttaatggcttactacaaattttgaaaaacatgctaccgaagcctaactcattaccttgcaacacatatcaagcgaaaaaactaatttatcacctttttcttggtgttaaaaagatccatgcgtgcatgaaccactgcatcctatacaggaaggagtacgcttagttggataaattcccaacatgcagtgctaacaggtacaaatcaactaaaaacacttctccatgtgtaagttttgagaaagaagaggctaactcattcgaggaaaataagaaaaaaaatcccccagctggtaatgtggtatatttctgttaaagaccgcatattgcgtttgtactaaaaccccagagatgcggaattaatgcgctggcatcaagaagggagcaagaaagatgagatactccggcacccaacggatgctcatcagtggaaaaactttgatgcaaagtaactagaatttgctaaagacccacaaaatattatgtttgctttgagtacagatggagtgaactcatctggagacataagcaactcacatagcacttggccaatgcttctgaccatgtacaatctttctatctggctttgtcaaaagaaaaagtccgttctactctgtgtcctaatataaggtcctgacggcttggattgatattgacgtatttcttgagccactgacggaacatatgtagaatttatggaaggctgggataaatgtgtgggatgagtatgaaatgtcacaagaaaacctaaaagcagtgtcctttgtggatattacacatatgagtgacatatggtgacttaatggtgacttaagtgtgatctaaaggctgtttaatt

SEQ ID NO: 2438 - DNA, 306 bp, Oryza sativa
  Clone ID: PAT_MRT4530_102210C.1
atgagagcagtagaaacaggttggcacgccggcacgattcacgtgaagaagccaaaacagttgatcaaagacagttattgggctagagtgaaagctgaagctgaagctcggatgagcgcattgaatgcagtccccaaccgcatttgctcgcgccaatcaattcgccactgtcaacactgtgtcactaatctgttgcagcatatgtaccgtatactggtgtaccagtataaagtagtgtatggtcgtatggatgtatacaggagccacgccgtgttggttgctaaaacagagcggtacattagcgcg

SEQ ID NO: 2439 - DNA, 718 bp, Oryza sativa
  Clone ID: PAT_MRT4530_102211C.1
cgaggccggccgggaatgtttatctgtgtttgtgtttgaggaaaaaaaaaaaaaaaaaaaaatcacagaaaccataaacacacaggcatctgattagagaaatctaatggcttcttcttccttttccttcctgcttgttgctgctctgcttggattggcctcatggaaagccattgcctcagaccctagccctctccaagacttttgtgtcgctgatctgaattcgccagtgcgagtaaatggatttgtttgcaagaacccaatgaacgcgagtgccgacgacttcttcaaggcagccatgctcgataagcctagagacacaaacaataaggttgggtccaatgtcactttggtcaatgtcttgcagcttcctggtctcaatacccttggcatctcgatagcacgtcttgactttgcacccttgggtttgaacccaccacacacgcaccctcgtgcaaccgagatcttcacggtgcttgaaggaacactctacgttggctttgttacgtccaacccagataacaggctattgtccaaggtgctcaacaagggtgatgtgtttgtgttccctgaggggctcatccacttccagttcaatcctaacccacacaagccggcagttgccattgctgcactgagtagccaaaatcccggggttattactattgccaatgcggtgtttggatcgaacccacctatctcagatgatattttgatg

SEQ ID NO: 2440 - DNA, 474 bp, Oryza sativa
  Clone ID: PAT_MRT4530_102212C.1
atgtggaaggcaactaggccgccgtcgcccgcctctccctccctcgtcctccggccgccggcaaagccacgtggccgcaaggacgacggtggtggggcttcgtttctctcaccacgtaggggcaggggggctgctcggaaccgtccagatctgtgccgtctggctggatctagtgaggaggaagtcggtggtggggcggtgcccggtggcgtgacggcgggcgaggtccgactccgcgacggttggatctggccggacgatgacagggggtggtgggagcatccatggatacggcggccggtgctgtgggcgacggaagcagcggttggcggggatggtgcgacagcgaggaggccagcggaggcacatgcgaccggcgcggaggcacatgcgaccgacgcgaaggcctcggagaccgcaatggcgatggaggtgatgtcggtggaggcggagacgtgccagcgaaggttttga

SEQ ID NO: 2441 - DNA, 329 bp, Oryza sativa
  Clone ID: PAT_MRT4530_102213C.1
ataccccccaaggtttcacagggcaaaaaggggggggggggggcttttttttttttcccgacccacttttcgggaaaaaccaattaaaagacccccccagggggggaaaggggccggggggccccatagccccggggggggaacccatttttaggggggccgttaaaagccaaaaaagttggggcttggcccaaattccgaccaagggggaaacccccaaactccgggggttgaacctgttgcccttgggccggaaaaaggtaaaggccccgaaagggaaattgtgggccccccaagggaagttgttcccaaactggggggtttcaaaa

SEQ ID NO: 2442 - DNA, 1053 bp, Oryza sativa
  Clone ID: PAT_MRT4530_102214C.1
tttgcttgatggactattagtatatattttcagtagagtaacacggaaagcgccgtcatttatggagcatcctcggccgatcggatggatctttgtgcgtcggtcgccctccctctcgggcgacacgagggtgatgtggaaggcaactaggccgccgtcgcccgcctctccctccctcgtcctccggccgccggcaaagccacgtggccgcaaggacgacggtggtggggcttcgtttctctcaccacgtaggggcaggggggctgctcggaaccgtccagatctgtgccgtctggctggatctagtgaggaggaagtcggtggtggggtagtgcagtggggcggcggcgtttgacgggggtggcggtggtggaagtggctggcgatggggtctgctgctggtgacggaaggcggtgcccggtggcgtgacggcgggcgaggtccgactccgcgacggttggatctggccggacgatgacagggggtggtgggagcatccatggatacggcggccggtgctgtgggcgacggaagcagcggttggcggggatggtgcgacagcgaggaggccagcggaggcacatgcgaccggcgcggaggcacatgcgaccgacgcgaaggcccctcaagggtggttgctgggcgaaagcccagtctcggctctcttgagaccttaacggacgatggcggttgtgtttccatcgcttctctccttggagacgtcgtctaggcatccccttgccaaaaccacccaaacttttggcacaagcacgctctagatttcttcctcttgtagcggtgtctagtttatacaagttggccacgacagagggcactttgtgttgtttgtaagggtcaggttttaggtgatatcggttgttctgttgttggcttagcggtggtcggtctggtgctagtcttctccaggacttgtggtttggcgctatcaatgtatgggtagcggtatattttttcgttttttcttggttacgagctttcagagtcgtaatcttgtcattttttccttctctatcaatagaacttcgcaccat

SEQ ID NO: 2443 - DNA, 735 bp, Oryza sativa
  Clone ID: PAT_MRT4530_102215C.1
atggctgcaacaaagcttgtagctcttagctttgtagtcctcatgagcattgggctagccaatgctgccagggtggttagatacgctagtgcagagggacaaggtcaaggtggtgggaacggtggtggatacgtgaacggtggtggcgtaggaaatggtaatggttatgggtctagtgagagcggaagcggagtcaccgcaactgctgggggaggaggttggggaggtggtggctcacagtacaatggtactggatttggcagtggatccggggcgggctcaagctctggccagatggccgaaggttattaccctggctatggaggacatgcaagtgctggtggaggtggaggtggcaatggcggtggacaagctggaggagttgatgggtccggtggttatgggactggcggtgggaatggatccggatctagtgtggcaaacaatggtacccctaacacgccaccgccttatgcaaatgcaaatgcaagtggcaatggcaatgggaacggtggtggtcaaagtggtggcagtggtagtggtggtggcggtggatctggatatggtgacgcaaacccttaaaatttttctttttatgtagttaatcaaagatatattggagcccacactatctttgatttttttttatcctgatattgtagtatttgatttggttagattttatccttgatgtatcagagagcaactaattaataaaaagggctccattattct

SEQ ID NO: 2444 - DNA, 3219 bp, Oryza sativa
  Clone ID: PAT_MRT4530_102216C.1
atggagatccccaagcaggggcagccgccgcgggtggcggggacgccgccgacattgcctggggcgattacccacactacgcaggttgggtacccggccgtgttctacaatggcaactggggcgcgcaggtgccggccagcagctacctgatcgtgcccatgagcgagccgccggcgcaggttggtgtgcccaggcccaacgcgctgggcctctccgggtccggggccaggccgttgagtagggtgtcgcttaggccgccgcaacaggtgctgagtgtccagacagctttgcctggtatggccgcgatgatgccatcgccgtctatgatagcaggtaagaagatggcagcgtcgccgaaggttcagatgctgaagtctgtgccctttcggtctgctggtagcaagcgtcctgcgcaggaactgctgcccaaggcacagccgcaattatttgagtccgtgagatcaaagttcagagagactctggctgctgccctgaatatggattctgaccaacagtgtgccccgcaatccgttgaaaccgtgtcacatgttggatctgctagcgagaacaagcaagccgatggtgctggtattgattctgtcacagagactagtgctttgaaaagcgggcaacataacatgttaagtagcaattcggcatcaaacatgtcgatcaaggtgagtgatgatatgcagcagcaatcaatacatgttcctttggaaaataaagtactggataacaattcttgcactttagatgagcttctgcaaggccatggactttgctggtcttctgacgttgttggagcttctgaaactatttctcaatccgatccagacagagtcagaaaatctgatattgatgaaggtgttgatgtatctctgattgagcatgagtctaaaagaataaagactgatgatggggcagcagaagaaaagaagagtgtaacccaaaaggcccaaattttagcatttgaaattgaaggtgagctgttcactttattgggaggagttaacaagaaatacaaggagaagggtcgatcacttctgttcaacttaaaagataaaagtaatcctgtactgaggggacgtgtcttgtctggagatataacacccaaacgcctatgttcaatgactactgaagaactcgcttcaaaggaactttcagactggcggttggctaaggctgaagagcttgcaaagatggtggttcttcctagtaaagaagtggatgttagacgcttggtgaggaaaacacacaaaggagaatttcaagttgaggtggaagaaactgacggtatctctgtggaggttggaattgggggtgatttgctttcgcatgttccatcaagacctactgaaggtcaaaccaaaaccgatgataaaagtgtacacacggaagaaaaagaatcagacaatagtgagcaagatggagttatcgtgacaggcggcaataacatgccaagcaatttagaacatacagaaaatgagaaaactgatctgatgcaggaactgatggtagatgacctgaaagatacagagaatcttccaccaattatgtcactggacgaattcatggagacccttgattctgaaccacctttcgaagatgattccactcaaactgtgaaagatgatcctaattctattgagaaaactgacatttcattgaaatcggaagattcttccaaaaatgtggatagtgcttctgcatcagattctcaacttgatccgcaaacattatctcctcaagataagtttgagtccaagttacagtcacccaaaaaagacgcaggctcaattttgtttccagttgaacaaataaaggaagatctgttagtcaaatcctcccctgaaaaggccaatgctgaaaacattgatactggcagtcagtcgatccctgaatctatcacggattgtaaatcagctcctgatgctttgctgacacatgacagtgtatgggagggaacaattcaactttccttgtcatcactcacaaatgttgttgcgatcttcaaaagcggtgaaaagacatccacaaacgagtggcgccatttccttgatatcaagggaagagtcaggctcagtgcttttcaagaatttcttgaacaacttcctaaatccaggagccgtgctataatggtaactgagttgcgttggaaggagggctctcttgagagtgggcgccagcatctcttgcggaccattgactcatatattgcagacgagagagtaggactagtgaagcctgcagatggagtggagctttacctctgcccttctcaagggaaggcagcacagatacttgcagagcacctacccaaggagcagtcgagcagcttaaccgtgacaggaacatcagctattggagtcgtcgtgtggcggaggccccatgtttcacctaggatacccgccaggaacgatggctccagaaaccaatccatctcgaggaagcagcatgccgtgattgccagtgcagtgcccttgtcttccaagcctaccaatgagcgtcagcaccacggtcaggatgttgtaactgatgatgttcctccgggctttggccctggtgttgttagggaagacgatgacctacctgaatacgattttgttaccgtcccaaacgcagctgccaacgtagtaccatcacgacaagcacacaggagccagcagcagcattctcaggccgcgtcccgccgcccggtagaccatgtgagggagatggttcgcaagtatggtagcagatccgctgccgcagcccaaccctgggaggatgatgacgatgatgacataccagaatgggatccaaaccaaagcaatctgaatctccagcaaacacggcatgctattccacagccaccgttgcctccacccggacctgttcatcagcaaatgcacgcgtatcatcagcagcatcagcaacagcagcagcattaccaatccattcagcagtatcacgcaacacaggaatcgcagaacaccttgtcccaggcttactacgtccagtcccactcacagcagcattccgtgcccgtgcagcagctgactcatttgcagcctggctggcagaccaccgcccagtggctggccgccggcgccgcgcattccggcttgccggcgaacaacgtcgtgcagcagtactgcacttccgcgacgcctgacggtagtggccaaggctacgctactgggaaccaaggctccatgccttggaacctacagtag

SEQ ID NO: 2445 - DNA, 404 bp, Oryza sativa
  Clone ID: PAT_MRT4530_102217C.1
cctgaccttgttatttccttgccaaacgtttacttgacaccaaacaaacgggtgctactggtacaacgacagacgacgctttacactatactcttgcgacgggcttgctgtcactgggccggcctcaccaccttttgtcgcccccaccacgacagacgaacttcagtctgacacgcccacggacggactgacagcaggaggggtttggtgggtgatgagggcacagtgggctgaggaggccggcgaagtacgagaggcccgacgcgctcacgccaatgctcaggtagtcgaggaggctcttcacgtagatccaactccgtaccacgtgtgccttgcccatggacagcaagcgcgatgcaccccagcgacgccgccgacagcgacaccatcttctactccctcac

SEQ ID NO: 2446 - DNA, 345 bp, Oryza sativa
  Clone ID: PAT_MRT4530_102218C.1
gggggacaacccaaaggggaagaaaaaaaggaaattggattggaaaaaaaaaaaaataggcgggggggttttttcctttggggaaaaaaaaaaaaggggaggccaaatttttgggacaaacaaaaggggggcccgggaaaccttgaaaaattgcaatttgaatggggaaaccgaaaaaattggggggtgccggggttgcgcttttttttttgaagctggtgcgggtgcggactagcgcgccggggggcctggaccaaaaccctggggaagtgaacccttgggggagaatgtgaaaccccccgggggcggttcccgggaaaaaaaaggaaaaacctctgggcctaa

SEQ ID NO: 2447 - DNA, 489 bp, Oryza sativa
  Clone ID: PAT_MRT4530_102219C.1
gtaagttgttttttttgggactttttttgtattttttgttgtttattcatcttggagaaacaaatgcccccttcctaatcacttcgttaggcgcaccaaaagtaaagagtcccggggaaagcaacaagcgttgctttcaattgagaaccttatggccccccctcctacaattacataacccactgtttcatttaaaagaaatccccgggctctgaaaaggccaccctctggatcaaattctaggacggggggacaccattggccggcctcctccgatctagcaaacaaacgaacacggttttatttcggctggaaatccatccattttttataccaaacctaagctgaacagacccccctgccatgccattgctttgcctctccccctccccagaacctaccgggggaggatctttcagggttggttgtaaccctcttaccaatctcaaagaaagaattgggctccttgtgggactccgccacgaacct

SEQ ID NO: 2448 - DNA, 1118 bp, Oryza sativa
  Clone ID: PAT_MRT4530_10221C.1
cgccaccaacaccaccgccatttccactcgctcgagagcaccagattagcggaggagataggggtccgcgactcgcgagggagaggaaagcaagcggagttgaggatgcagatcttcgtgaagacgctgacggggaagaccatcaccctcgaggtggagaacagcgacgccgtcgccaacgtcaaggccaagatccaggacaaggaaggtatcccgccggaccagcagcgcctcatcttcgccgggaagcagctggaggatggccgcacgctggccgactacaacatccagaaggagtccacgcttcacctggtgcttcgcctacgcggcggccacatctggatcgagccctcgctcagggtcctcgcctacaagcacaacatcaacaagatggtctgcaggaagtgctatgcaactctgcctcccagggctacaaactgccgcaagaagaagtgtggccacagcaatcagctgaggccaaagaaggtgaggtggtgcaggtacttcaacttctgaagagtcatctcatccatcattccatcagtatcatcagagtcaccagcgttcaagcgttatcaaagctaaagttcctactggatgccgaatctagactattactttgactacttgttactgccttgagtaataagcacttgttacctagtactttatgtgctagctgtttctttttcagccatgtcaagtttgctggatgttgaatcttgactaaaccttttggggacggttaatagcaagcatgcatagtaggtggaagtaacatggaggcataaccatcccttaatttccataaaaaaaaaaaaaaatgcgattggtcttcctcgccggtctgaattgtgattggtcttcaatagctcaatgttctttggtggacctgcatatgacatagcagtgataagccaagccgtttccctacaagcacgcatgtttctattaacaccctacaaggaaagcactttctgcggttcagcctccgaactagaatacttgctacccactgatttgtgttacttatttatagttctgccaatgaattggccgacttaatgattcttctatggagttttggctcctgcttattttaaaaaaaaaaaaaaaaa

SEQ ID NO: 2449 - DNA, 625 bp, Oryza sativa
  Clone ID: PAT_MRT4530_102220C.1
cggccctagccgatctcccctctcctaggactcggcctgctccacccccacggagaggactactcgcgacttcacccgccgcctacgcgccgatctcatctacatccccccgtgagcaggggtggcgccggtgccggcgtactgctgtttccgccgacagtcgacctgtggtgcggtgcggtgcggcgaggatggcggagccgtctaaggcgatccacatacggaacgtcggccacgaaatcgctgatgctgatctgctgacactattgcagccgtttggcaatgtttgcatgatcgtcatgctgcgagccaagaatcaggcacgttgttcaacatgcaagacttgcatattgcatggagtgcgctgcaatactacagaactgcagaacctatcgtaaggggaaggaatggctccatgctattttcatgccaacaagaacttaccacctgaccagagctctcatggactaaagtcagatcacgagtcttaacccaaccgaatcctcttacttactatacaccagatgatgtatcactatagctgaggaggctctaatcaagttgtcaaggtttatggatatgagcagaagattgtcacattgtacgaaccagctgtgagttcaag

SEQ ID NO: 2450 - DNA, 405 bp, Oryza sativa
  Clone ID: PAT_MRT4530_102221C.1
atgggggaggtggctttttttcgcccgtggcgggggtggcagcggcgaggtttccggcttgtcggggacagatccggcaccgccgtcgctggatctggatggagcgtctgtggcggtgttgttggacggtgcggctggcggcggccgctgtggcatcaggcgacggggtcacggcagcgcaaggcgctcgagtggcgacaggcatgcgcggcgccggccaagcctccttcactccttggtgatcctcccttctttttggccgtctgcttccagacctggccgtggagcctttcggtggttgaggtgttctgtttgtctgtgttggaggttcagtttgtctgtagtcagggctctttggccacgccgttgcttcaagtgccctgtgtcggtgcgaacctgttgtag

SEQ ID NO: 2451 - DNA, 430 bp, Oryza sativa
  Clone ID: PAT_MRT4530_102222C.1
tttttggttttttttttttttttttttttttttttttttttttttttttttttttttttttttttttttcccaaaaaaaaaatttaatttttttcccaaaggggtcaaaggaatcctagaaaaaggccccccgggggattccagataattccccaaacttaaaaacccggttccctttaactaaaacaaaataatcccttaaaaaagagggtccaaaaggggctaaaaacttggccaaaaaaacccgggggaacatttcccaggaaggaaaccttcccgggggacaaccaaccaaaaatttccggggggggtaaacccaaaaaactggtttaccaaaataccaaacagtttacgggggggggggaaccacaacaggtttacggggggtggaaaatgggggggggaacaaccccccttggggcccccccct

SEQ ID NO: 2452 - DNA, 268 bp, Oryza sativa
  Clone ID: PAT_MRT4530_102223C.1
tttagtcggccgccggaggtggcccaggtggaggcgtcccagacggtggcgtagatggacatgggcttggacgggaagtcgccggtcatcgccggcgtgcggcggacctcgcggatggggacgtcgtctacgaataagacgatggcggtgcccgttccagaggaatggagtagccggtgggaactcccgtgggtcggggtcgaaggggaagcaaggtaagcgcttcctcccctcccccggtctcacgccttgccattttgccgtaaca

SEQ ID NO: 2453 - DNA, 655 bp, Oryza sativa
  Clone ID: PAT_MRT4530_102224C.1
ctccgatggccgccgccgccgccgcgccgctccgcaggctgctcctccgcctcggcaagccgccgccgctgcccattccgctgctgccccatatcacgccgcaaaccgcacaggccgccggggaccccgccgcgcctccttgcccaggcgcgatcccgagccaagccccggcgaggaatctccgtgacgtcatctcctccttccaccccgggctccagatttacccgtccctcgatccgagattcggggaggtggaggagggcgtggacggcgaggggggtggcgcggaggtgtgggcggacagcgtgaagaagaagcggaagcgcaagatgaacaagcacaagctccgcaagctacggaagcgcctccgccgccagacatagagcgggccgccgccgccgccgccgcacgtgggcccaaggattttacttgcaagcaagcactcgacaccgctccctcactggatacaagctgattatttctagcagtttttatttgattatgggaggggctggtttaataccagccttcgattgttggcacggggtatccatctaggaaccctgtcaagactaaatgaaaatgagcaccaggaagcagtggtttatgcatgaatttctgtctaataaaacttttaatgattaactctggtggt

SEQ ID NO: 2454 - DNA, 2268 bp, Oryza sativa
  Clone ID: PAT_MRT4530_102225C.1
acttgaaacttgctgtcccagttgatggcttatcatgtcaggaaaatggcaccatatcatgtactaggaaacaatggtatgtaggattctttatacttttgccaataactaaactgcccagttggtggcttcagaaaaaaagaaggggcaaatttactttgcaggagggttgctcaatgaaaagcaactcctgtttacatgaattacaacaaattgagctatagacttgcttgtcagaaaacaagcaaaaataaattacagaaaaaaatggtaagagaacaagcggctgtgatgtgagtgagggggagaccatgttacatgttgaatgaagttggtcaaattaattacaagctaacaaatcttgacatcatatatgcatcttcaagttcacccgccaaaccctcgttagcttccatggaattcttcatgttagtgtttgttatgtactgctccaatgcaccgtcaccccgaagaattttggctccacatcctggcctatcaattgaacctattgcctcctcatccaccacaacagcgcatactcgttggcttgctgatctctcgtctcggacctcatacacggcctccgatagaaggcgcgccaagattgctctgagaccacatgcaccagtctttctggctatagccttcgtgcctattgttctcagtccaccatcactacagtgtaacctaactcagttcctgctaaccattttcccgtattgtctggaaagagaatcctttggtcttgtaggaacctgagaacattgatcttagttgagagcagtaaaactaactgggacgggcatgcatcttaaaaaatatagtctcaaactatttcttgcaagatcgccactctcaacagattccaacaatgatgaagtgaccattggatcagtcacttcagaacttctcatgtttatccgaatgggtgccccaaaacctatagatgaatcttggcgcctttcagaaatagtcttctccaagtcgacaaaagcgccaccacatatgaaaagaatatcttttgtgtctatctgtatgctctcattgcgggaattcttgcgagatcccttctcaggaatgctaacaacagttccttctaggatttttaacagtgcttgttgaacaccttccccagatacatctctgctaacatttgcactctctgccttctttgttatcttatctacttcgtctatgtacactatcccttgttgggcagcttgaacattatattcagcagccactagtaacttctgcagtatcgactctacatcttcacctacatatccagcattgtccactattcctgagccagttggacccattagaagcacattgcttttatctatttctatgttattttgatcatcacttgcagcgtctagccacccagaattggtggaacaccctttctgtacagtcgcgttatatattctcttgtagtgattgtatacagctaccgacaagacccaattttgacaagcaccttcaagaacctttttagctttcccctgcccgatgacgaactcgtcgagcctccggcacatctcccgcggcgtgggaagctcttctcccagggtggcccctccccaccactccctcttcggtgcagcgctcgtaccctcccctcccgaggaatccccgctgcttccgccaccgcctcctcctccgtcctccctcagtctcctccggggcgttctccgctgtcgcggcgggacgtgctgcatcggcggcaacggcggaggaggaggaggcggcatcgggaaatcgtcgggcgggcgctccgatatcatcctcctgatccgatcggcgaacccctccctagcggcgtcctcgtcctcgcccccgacgccaggagggatctcgaggaacgcgccgcgcaggggctcgatccggtgcgctcggaacaggaacgccgcgctgcacgcggggcacacgctcgctccgtcatggtgatggctctgcgacccatctccgccgccgccaccagccgcggcggccggcgggggcgtcgagagtggctggagggagaattggaccgacatgtgggccgcgcagcgcgggcaattggcctccgcgcggatccgcccgccgccgcctccggagcagcacctccgcaccgccgcggcggtgagtggcgccgccgcctcccgaagcttcgagaaggttcggaacatggcgatgaggtgaggggaggaggaatccccgatgcggtggtggaagttgagagagagagacgaacccacgcgtccgcggacgcgtggg

SEQ ID NO: 2455 - DNA, 2408 bp, Oryza sativa
  Clone ID: PAT_MRT4530_102226C.1
atggcgtgcgagaacggtcaggttgctgccgatggcatcaacggcctctgcatggcggcgccccgcgccgacccgctgaactgggggaaggcggcggaggagatgtcggggagccacctcgacgaggtgaagcgcatggtggccgagtaccgccagccgctggtaaagatcgagggcgccagcctgaggatcgcgcaggtcgccgcggtggccgcggccggcgaggccagggtcgagctcgacgagtcggcccgcgagcgcgtcaaggccagcagcgactgggtgatgaacagcatgatgaacggcacggacagctacggtgtcaccaccggcttcggcgccacgtcccacaggaggaccaaggaaggtggtgccctgcaaagagagctcatcaggttcctcaatgccggcgccttcggcacgggcacggacggccacgtcctgtccgccgaggccacgcgcgcggcgatgctcgtccgcatcaacactctcctccagggctactcaggcatccgcttcgagatcctcgaggcgattaccaagctgctcaatgccaacgtcacgccatgcctgccactcaggggcacggttaccgcgtccggcgacctggtcccgctctcctacattgccggcttggtcaccggccgcgagaactctgtcgcggtcgctcctgatggcagcaaggtgaacgccgctgaggcgtttaagattgctggcatccaaggtggcttcttcgagttgcagcccaaggaaggtctcgccatggtgaatggcactgccgtcggctctggacttgcctccacggtgctctttgaggcgaacattcttgctgtccttgccgaggtcctgtccgccgtgttctgcgaggtgatgaacggcaagccggagtacaccgaccacctgacacacaagctgaagcaccaccctggacagatcgaggctgctgccatcatggagcacatcttggaaggcagctcgtacatgaagctggcgaagaagctcggtgagctcgacccgttgatgaagccgaagcaagaccggtacgcgctccgcacgtcgccgcaatggcttggccctcagatcgaagttattcgtgcggccaccaagtccattgagcgcgagatcaactctgtcaatgacaacccactcattgatgtctcccgcgacaaggcgcttcatggtggtaacttccagggcactcccatcggtgtgtccatggacaacactcgcctcgcaattgctgccatcggcaagctcatgttcgcgcagttctcagagcttgtgaacgactactacaacaacggccttccctccaacctgtccggcgggcgcaacccgagcttggattacggcttcaagggcgccgagatcgccatggcttcgtactgctccgagttgcagttcttgggcaacccagtgaccaaccacgtccagagcgcggagcagcacaaccaggacgtcaactccctcggcctcatctcctccaggaagacagccgaggccgtcgaaatcctgaagctcatgtcctccacgttcttggtcgccctgtgccaggccatcgacctgcggcaaatcgaggagaacgtcaagagcgccgtcaagagctgcgtcatgacagtggccaggaagactctgagcacgagcgccaccggcggtctccacgccgctcgcttctgcgagaaggatcttctccaggagatcgaccgcgaagccgtgttcgcgtacgccgacgacccgtgcagcgccaactacccgctgatgaagaagctccggaacgtgcttgtggagcgcgccctcgccaacggcgcggccgagttcaacgccgagacctcggtgttcgccaaggtcgcccagttcgaggaggagctccgcgcggcgctgccagcggcggtgttggccgcacgggcagctgtggagaacggcacggcggcaacgcccaacagaatcaccgagtgccgctcctacccactgtaccggtttgtgcgcgaggagctcggaaccgcgtacctcaccggcgagaagacgcggtcgcccggcgaggagctgaacaaggtgctcgtcgccatcaaccaaggcaagcacattgatccgctgcttgagtgtctcaaggagtggaacggcgcgcccctgcccatctgctaaacccctgtatcagaacctcacaggagatgatgagatgagtacagaggtggtggtttgtttcgagtagtgtggattataccagtacaagtagctgatcaaactttttttatacatttgttgtgttaaggattcttcaatgtacacctgcaataccacaacctggtagggaataacctggcaagcggctaaagtaattgttttgtaagttttgaagtataatttacgattctttttgtgtttggacttaaaaaaaaaaaaaaaaaaaa

SEQ ID NO: 2456 - DNA, 3699 bp, Oryza sativa
  Clone ID: PAT_MRT4530_102227C.1
tcaacgtcggcgcgtcccggcgcacgactcctcattgtggtcgaatagcacgtcgtagccgacgctgctcacgttcctcgagtagcagccgccgtcgctgccgccgtactcgtacacctggtgcatccgccacgacgcgccgaccacctggtcgtcccggagcaccacctccgccgccgccgtctgttcgttgtggagcgtgctcgctgccgacgaactcccgcccgcgcccgccgcgcgcgtctcgtcgaagccgatcgccacgcgccgcatcagccgctgcgaggacgtgccgctgccgtcgccgcccaggaagatgtagagcgggaagctctggtggagctgcagcgcgtgcgcgccgtcgccggtgaccacctcggtgcgcgcctccgtcgtctggttgatcgcctgcgagcttccctggctggtcaccacgttcgtgtgcacgaacgtgagccgctgggtgaacgtggtggtgatgttgccgcgcgacgagcggacccaccccgtggccgtgatgttgcggctcgccgtcgcgtcgtactgcccgtcgatgccgtcggaggagttggagacgatcttgccggtcaatttcggggcgtcgtaggcgacgaggccaccggaggtcgccacgctcttggggtcgagccagagatggaggttggcgtccacgtaccatgacttctgcgcgttggtcaccgcgaacccgagctcgtgctccttgccgtcgagcagcttgcccaagaacggcgtgagctcgacgtcgtagctggggaagttgaacgagccaatgctggtgatggggcgccagatgagggggttgattccgccggtgtagatcaccgggaacggccacacggcgcccacgacgtcgccgtcgagatggacggtgacctcgcggaacggcccgttctggtccggcgtgttcatgtaccagaactcgtcgaagttgtgggacgagacatacacctcgagcaccgcgcggtacgcgttgggcggcacggtgagccgcgccgactcgacgtcggtggtgttgtcgaccacgaaccacagcccgtcgttgagaggaaggcttctcgagacggggacgacgacgtcggccggagccgacgccgccgtcggcgaccgcgcggcgcgccggaagtagaggtggagcgtgaggtcggcgttgtacacgccgttgtacgtctcgtcgatgaggttgccgaggtacacggcgagcgtggagttgccggcggcgaggagtgacgcgtacttggtgacgtccttgtgcaccgaccaagtgacgccgccggggcgcggctcggcggtgctcccccgcatgagctccgccccgccgagccagacgccgaagatgcggtcatactgcgtgccgcggcagtcggcgcgccactcgagcaccgcgagggagacggcgcgcgcgccgccggcggcgtcagcgaggcacggcggcggcgagtaggccgcggtcgcaggcggcttggtgaaggtgaacgcgaaggagtgggagaggagcagcgtcgagcacgggccggagctcccccgcggcggccgcagcggccgttcgacctcgaagaaggtgttcctggctcgccgcagcgacggcagcaccgcctcgacggcggcgatgtcggcggcggagaagcggaggtcacgaggcgacgcggcgcacgagcggaagtggaggacgagcagagtgaagcagagacacagcagcaggagaggagcagaggaagttgtcatggtttcagtgtggaggaaggcaacgcaacgcttgtgtggtgtcttgcagaaggcagctggaaatacacttccaatgttccgatctccactaaaatggatcaatgactcgatgtcgcgtaggttcctgacgagctcgtcggcgcttgctgtcaccgccgccgccgcctccgccggcggcagcgccccgatgacggcgccaccggctggatattcctgggaatccgagcaaacctcgtcggactcgtcggacgctacgctgtacccgctgctcgtcacgttcctgaagtagcagccgtcggtggcctcgagcctgtacgtctgccgcgtgccccacgtcgccgacaccgcgttcccgtcgcgcatctcgacgtcgacggcgccgctctgcgtgtcgcggagagagtaccgccgcggcggggtaccggaggacagccacctcccggcggcgatcgccgtctcgcggtactccctcgccaccgtgtacgtgacgtccgcggcgtggggcgacgtcttcgcttcgatgtccacgtagagcgggaagtcgtggtgcgcctgccgcgagtagaggacggcgccggcgaggtcggtggccgagacggccgcgtcggcgacggtggtctggttcaccgtctcggcgctgccgtcgccggcgaacgcgtaggtgttctcgaaggcgaacgtctgcgtcgcgttcgtcgtgatcctcccgtgcgacggcgactccacccacccggcggcggagatgcgcctgctcgccgtcgtgtggtagtagtaccgctcgctgaggccgtcgaaccgcgacgccgtcgtgtggctcgtgtttaccgcggctagccgcggcgcgtcgtagctgacgaggctccccgtcgtcgccgtggtcatcgggtccagccagaggtggaggttgccgtcgacgtaccacacgtcgacggcgttggtcaccgcgaacgcgagctcgtgcgccttgccgtccagcagcttggcaaggaaaggcgtcagctcgatgtcgtacgtcggcaggttgaacgagccgatgccggtgatcggccgccagaggagggggttaatgccgccggtgaagatcacggggaacggccacacggcgccgacgaggtcgccgtcgaccaggacggtgacctcgcggaacgggccgttgccgtccggcgtgtgggtgtaccagaactcgtcgtcgccgtggaacgagacgtacacctcgagaaccgcgcggtaggtgttcgacggcagcacgatgctcgccgactcgacgtcggtggcgttctggatctggaaccacagcccgtcgttcaaaggcaagcttctcgagacggggacgatgatgtcggcgggagccgtggccggcgccggttgcctcgccggcgttgggccgaagtaaagatgcagtgtgatgttggcatggtacacgccggtgtactggtcgtcgatgaggttgccgaggtagacggcgagggtggagttgccggcggcgaggagggacgcgtacctggtgacgtctttggagacggaccacacaatgccattgggcctcggctccgccgtgcagctgcggaggagctcgacgccgccgagccaaactccaaagatgcggtcgaactggacgccgcggcaggtggcgcgccactcgagaacagcaagcgagatggccggcgcgccgccgcccgccgcggcgaggcaatcgggcggggagtacgcggcggtgaccggtggcttggtgtaggtgaagccgaaggagctggacaggagcagggtggagcatgggccggagctccccggaggcggccggagcggccggtccacctcgaagtaggtagtcggcgtgtcggccgcagccgcgtcggggacggcgatgtcggcgggggacagccggagatttcgacgagaagcaatggcggctgggatgtaaaatacgaggaggaggaggaggtgaacacgggacat

SEQ ID NO: 2457 - DNA, 721 bp, Oryza sativa
  Clone ID: PAT_MRT4530_102228C.1
ggatttgggggatgcagacatctcagggcctctgattcctcaattgggtggactgaaaaatctccagtaccttgagttgtacgggaatcgcctgaatggatcaattccagcagcactgggcaagatggaacatctagtcagccttgatctttatagcaacctgctcactggcacgataccaacttcgcttggtgccatgagccgtttgcgatatctgaggttatctcaaaacaaactgagaggggcaatacccccatcactgggcaatctgatgagccttgaggatttggagcttcacaagaatgcattgagtggctctattccggcttctctgggcaatgtcaaaacattgaattacttgtatatgctcattcctaaatttgccaacagagaaattacgagatattttttcaccaaattgggaacctccaagatacttttaacttataatagtagtttttgtttacataaactacatcctccaccccaaaagcggttgaatggtaatatgctgactggcactgtgccgttggaaatcctctctcttcttgtctccaacctagttgaattaaatgttgcgaataataatctggatggcacagacagagaatctggaacgagagctgcagctcgaatctgtggcccacctgtccaagaaagggagaaacatatccatgtagaggaaaacatggatatacggtgtaaaccccaacttaggtga

SEQ ID NO: 2458 - DNA, 412 bp, Oryza sativa
  unsure (1)..(412): unsure at all n locations
  Clone ID: PAT_MRT4530_102229C.1
cccacgcgtgcggattcggtggaagataggctatgatacaactgatcccactctgtatacaacccagaacggcacacagcattattcggtttatcagacggacatgatacaatataccgagaagaaactgaactgcctatgtaacttcctaccaaactttcagcagaactacgtgccaaattactagaaaaaaaaaaaaaaaaaaaaaaaaaaaaaaaaaaaaaaaaaaaaaaaaaaaaataattttgggggttttaaatgatagatntttaattaaatnaagaatgcaaattaataaataattttatattggggggtnnttttgggggggggccctcttaaggtaccaaaggttttgcccgggagaacccatgtttttggcccccttaatgggaccccatagacaattttt

SEQ ID NO: 2459 - DNA, 1344 bp, Oryza sativa
  Clone ID: PAT_MRT4530_10222C.1
atgttggagtattattctgtgaggggaggcgggcaatcatggatatccacagtttgtccttttatttggattgtttatcctataggcttccttttgccttccttggccgaagaccttgactcaagtacagggtggccaaactcttcctccatgtcctacttccggaacgtatctaaggactgcatttgttctgttccacttaaaatggactgcaaggactctctgaagaatcgcatccggatattcactgaagcagtagtggtcatggtatgcccagtccttctctcgttcgcgctaaagaaggtggacctgacggccaatcgaagcaaacaaatcgtggacagcatttccccgattggagcgttaactctggaagctggcatactccctttcctcggcctctgcctctccacggtgctcggagagaggctcgcgtggctcgtattggcctcgaagctgctcatccacctatgtgtcattctcctcatggctctagcctttgtgattctgctgctcatcagcaagagtaacattgtctgcctaagcatctggatccccttcgtccccttcatcctatggctaggctacaactccgtgaaggatgaggagcatgagaacgccgacgacgccacgaaatcagcccaccacgggaagctggaaatctcggttgatttctctgctagtatcacctcccttctgttcctgggattaaaaggtcttgcgttggagggacaggccagcgccatcaaggggctggatgctcacctttccgactccctcatcgtcagtttcgtgacctgcgtcctgggtgtagtcttcatgcttgttggaacggctccaccggtgtacggcatgggccgcttggtggattccttgaggatcttggatacctctctggcaatagcgttcggggtgatcgtcgtgctaatcacaattgcacctctgaaggaggcggcgtggttagtatccatcccgtggatcctttcctttttcgtgtggttgttcatccgtttgttcgaccacgacgagggagaggacagggatgtgaagccggtgtctctagagctgaccaaggccgcgttcacagggttcttggccgtctccataccgagcttcagcaatagctccaccagcggcggctacacccacgctttcatagtgcttactgggtcagctgtcctcgctggcctcgcgtggaggctgatcacgcacgtgaagaagccgtcgcgagccatggtctgggctgaaaatgtagcttcttcgtgtgcgcacatctgtgttgcggcggctgttgttccatttgcaagcatatccatgacggtgctcaggtctctcgaaagttag

SEQ ID NO: 2460 - DNA, 346 bp, Oryza sativa
  unsure (1)..(346): unsure at all n locations
  Clone ID: PAT_MRT4530_102230C.1
atttgatgtcatttcaagtnatcttgtatatnanctgctatcagtnctgagcaagcncttganaganctggatgtntcgactgtnttgaccatcctacagtgctgtggaatgaagctacgtggagatgaccccagtgcaatgaaagantttttnctcagtattcagaactctgtaaaccagttgaaactgaaagcgcacccagctggtcaagataatggacaagcagagatgcatagcaaaagattggaatttatgctcganacaatatgtgacattaagaacancaaaaaaaggcccaaagaggatcctgcacancacactcgcataaaanagtggcttcaaaag

SEQ ID NO: 2461 - DNA, 760 bp, Oryza sativa
  Clone ID: PAT_MRT4530_102231C.1
cacgcgtccgccattcttgatgggaatagactgatgctgattaaacactgcaggggaggaggttgcttcaaggctgttgaacagacaacagagcattcaccctcctcctgcctttggttcatctacaaatcttgaggcccttgctcttgaggctagcaagtcccaaggacaagaccatgatagcacctcagataatgtcaattacagacccatgcatgaaatcaccttctccaccattgacaaaccaaagcttcttagcgagctcacatcgctgcttggcgaacttggtctaaacattcaagaagcacatgcgttttcaacaaatgatggctactcactcgatgtctttgttgttgttggttggcatgatgaggtatttgaacattttactggaactatgctggctacgcatttgatgatgatgtccttgcatcgctgtgcacttgttacctgcagcagtagaaaaaagaaccacacttttctatgattttaattggtggacattttccatcaccagatttttacatgtcatacaaatgacgtgggcatttgactatcagagaatatggaaaccataacatgcttcatataatttttctttcttctctgtacaaatctatctgatatctaactaggcatgtggaactacattagtttgcacaattgagtagcatatgtacttgaacggaaacatgtaatcagaatgcactttatggtctgatattgatgaagaatgcgttttgtgctttcatgagagcct

SEQ ID NO: 2462 - DNA, 246 bp, Oryza sativa
  Clone ID: PAT_MRT4530_102232C.1
aagctttggtcagagaagctatccaaaagaataaggaaatccaattgtcttaaatgaagttctaataacaatccacgatcaccacacaagagagagaaaaacaaaaattaaaaaaagctatgttttgatttgtaatttttaccttgtttactgcgacagcgaagcaacattcatagccctggtatgtgcacgaaaaaaactgaattgacaatagagagagctaccatatgattaaaaaaaaagctt

SEQ ID NO: 2463 - DNA, 515 bp, Oryza sativa
  Clone ID: PAT_MRT4530_102233C.1
acaacaaagagaatggccaaagatggtatatacatgttaatgtaaataaatgtccaacacaacatgaggcaattgagccaacacaattcaagaggaaaactcctgtaagcatctatatctttctctagtttactcaacaacccattgcagcaagtgctacctgggatagaacggtggatgacggtagaagggataattaggctgttggggattaaacatacccataaattgagaaactccaacattttgtgcaaatgcagcgctctgatttccaggccagcctagttgggcagcataagtgtgagatataggcattgcagcatatggtgaatgcccaacagaatcaacctgcacaatatgcggaaccataggtgatatggaagcagggatagatggtgttggcagcttggtggcgcatggccttgggcgtttctcttgtggcttactttgctgtagttgttgctgctgctgctgttttttctgtggcttcttatgctgtggttcttgaggcctat

SEQ ID NO: 2464 - DNA, 512 bp, Oryza sativa
  Clone ID: PAT_MRT4530_102234C.1
aaaaggattggaccagcttaccaataaattgaaccaaccaatatgaaaatttgcgttacaaaaaaaatttaagcggcacccaggggaaaacacatccccacgttataggggggggctacccaaagggggacacagcatcaaagatacatttcactcctatccctaccaactttaaatattttggttaaccttgcactgaaccagggataaccgatcagcaactaacagggggaccacctctccctaacgtatccccttttttttcttgatctggccgactaatgcaaaaaggcaggccttgttacaaaaccggggctggcattcggtctatggtgggctcccaccaaaccttggccctgtcctcaccaaacctttggggggtgaaccgagggcgggggacctcgggggggccgtccccgagctcccggatagggaggcaaacgcccggctaggcctgctagatccattgggacccctccatgacgttcgcgccgtgaaaggacacgaaggcc

SEQ ID NO: 2465 - DNA, 519 bp, Oryza sativa
  Clone ID: PAT_MRT4530_102235C.1
gcacgaggatcacattctgtcgacttggtagaaggaacaatacttatgtgatggatatcttttatgacggtctaactgaattatgatgaacacactcgatgttctcttcaaggcaatctactaattttcctgcgattaaaagtgtgaaggctattgggttccattctgttgctgtatacattcaccaaattataaattagagtaccagttgcaataggggggtctgatccgacattttgggagacactgctgcatgatattcagacagccatttttttcctcctttttggctggcaatatgaagcaactcaacacaaacttatgcgctgtaaaaagtaaaaaaaaaaaatctcccttagagttgcagcttgcagtctacaagtgagatcctccatcacatagaagctagaacatgctcatggtcgtttgatactcagaagtaatggtccgatgatttcttctcacctattcgaacagtaggaccaccatgctctgaaatttcatgctgtagggaattat

SEQ ID NO: 2466 - DNA, 733 bp, Oryza sativa
  unsure (1)..(733): unsure at all n locations
  Clone ID: PAT_MRT4530_102236C.1
ttcggccgagctcgtgccgaattcggcacgagccgaattgtggcttatattgggagaaaaccttagctttgggttttttagcctggctttaggtttttgtgcattgaaggtgagtttctctcacttactttccctcctttagtgtaggtctctgacgtattggatcatctgggcccgcccagcatatcagtgatccatgtcagaaagaagtaatcgagtgaaggtacctggacttatcagcgggagatatcagttatcactatcggtntcactatggtaggtaactcgtggaatatggactcaaactttcaaagctttgcattttggatatctcaggtccaacngtnccagacganatggaagaaaattaggttggacctaggtccttcccaanattanaaagactttgcttctctatatgacacgtgtttaaccacaaagcancccaacctccgactcccttttcngtcctcaaaactcccaagggctnaaaatttccccccctcctttgggcttgccttaaaccccaaggggnaaacangccggggcnaaancccccnggccnttttctncttgggccccngggggggcaaanatncccnccanggggccaaanccccccaaaannnccncccccccggccaaanttccgggggttttnaaaaaattnaancccccccnttttggcccnccntttttgggcnttnntttnggaaaaattttncccggtttg

SEQ ID NO: 2467 - DNA, 537 bp, Oryza sativa
  Clone ID: PAT_MRT4530_102237C.1
atgcaggcgaggacaccagtcggtagcgacgaaggcgagccggtcggtgaagacgtagacgcccagcaacggcgacataataggccagccgtgcaggtgaggacaccagttggcggcgacgaaggcgagccggtcggtgaagacgtggacgcccaacaacgacgaggacaccagtcggcggcgacgaaggcaagccggtcggtgaagatgtggacgcccatcaacggcgacataataggccagccgtgcagacggaaacaccagtcagcggcggacgaggcggccagtcggcgaggacaccagtcggcggcggccaagtccagctggtcggtgaagacgtggacgcccaagaacggtggtgtgaccaaccaaccgcgaaaacaccagtcggcggtggcgaaggctagccgatcggtgaagacgtggacgcccatgaacggtggcaaggacaccagtcggcggcgatggaggcaggccggcggtgaagtcgttgttgctatcagcaatggcggtggtgaggacaagccggcggagtag

SEQ ID NO: 2468 - DNA, 676 bp, Oryza sativa
  unsure (1)..(676): unsure at all n locations
  Clone ID: PAT_MRT4530_102238C.1
ccccgcgtccganagggggggcgtgccatctcgccgcggcgagagagaggggctcgccggcgggagagagggggctcgccgacgggagagatctggcttgccggcgagcacgagagagaggtaacgagatcctggaactgaaaaagaaagcataattaattagtcaaaatcagtatgtaatttttgacaaatatcagagatggtgcataataatagcaactggagaaaattgaagttttcatgagaaactacagtgttatgtttggtgctgttcaggaagaagctgagtttcatggtgtcatttcaagctcaacatatgagatgtgctcctcatttgatcaaattggttgttaaaggttttatagcaaatatcactgattgaatgagcttgtaaacttgttttttttgccaatttttgtgagattccattttgttctctctgtgcacacatggcttccctctgcacacatggcacaatacaaaatttttaatgaagttctgagttagtaatggcctagttttgtactgtgcatatgcactgaagaaatagtgctgagttagtgacttgagactgaagtgtgcagtctgtgttcttcagatatgatgcggtttttctgaagaatgtaattcttttacttctgggtttactgctcgaatgtgaacttatgattcatct

SEQ ID NO: 2469 - DNA, 385 bp, Oryza sativa
  unsure (1)..(385): unsure at all n locations
  Clone ID: PAT_MRT4530_102239C.1
tcctcggacacgatcgacaatgtgaagccaagatccaggcaaggagggtatccccccggaccagcagcgtctcatctttccggcnnnagcttgaggattgccgtaacttgcttactacaacatccagaaggagtccacccttcacctggttctcaggctannnnnggatgcagatcttcgtgaagaccctgactggcaagaccattacccttgaggttgagtcgtccgacactattgacaacgtgaaggcgaagatccaggacaaggagggcatctcctcggaccagcagcgtctgatctttcctggtaagagccttgaggatggcccaccgttgcgaattacaacatccagaggggtccacactccacctggtcttcgctcgtg

SEQ ID NO: 2470 - DNA, 656 bp, Oryza sativa
  Clone ID: PAT_MRT4530_10223C.1
aaatcacaaaatacatcacaaaacttcacaaaaatatacatcaaaaagaagaagccgcaggatccgccctcggccatcgccaccacggccctcggccgttgccaccgccaccctcaaccttcgccaccgccgccggattcatccgcggccgttgccgacgctacaaccaccgccgaagggagaagagatggtgttaacaatgaaatttggtaagcccggagtagtcgtcggctcagagtcagcatcggcttcgaagtcctgagattagccgatgagacttgtcaagtcgttagttgtcggattcttgctatattcgcctgctttttgactgccaataagggtttcatcggggtttcagccgatgaggtaactggacgttgcatcgacttacaaggattgcatccgattggtttctattggattgtattgttgctttcttgcattatcatcagtcgattgcctttatattgttatttacatcaagcgtcagaatctacatcagaattatagccaatagctcaaaaccctatcgctatcggctgggtcaaactatctggcacgcccgcatctcaccaagctttggacctgcactggagctaagcaaatctcctagaccagtgtgtgtttttcgcatcaacaatctcccaagccaaatt

SEQ ID NO: 2471 - DNA, 872 bp, Oryza sativa
  Clone ID: PAT_MRT4530_102240C.1
cgtccgcccacgcgtccgggaatgggtgcttatcttgctcggttaggcatgaggtgtatacagcgtcttgatcagccaattattttgacaggattttctgcgctgaataagcttctggggcgggaggtatacagctctcacatgcaactaggtggccccaaaatcatggctacaaatggtgtcgtccatctgactgtgtcagatgaccttgaaggtgtttctgcaatcttgaaatggctcagctatgttcctccttatgttggtggtcctcttcctatcatgaagcctcttgacccaccggatagacctgtaacatacttccctgagaattcatgtgatgctcgtgcagctatctgcggtgtgcaggacagtcaaggcaagtggatgggtggtatgtttgacagagaaagcttcgtggagacattagaaggctgggcaaaaactgttgtcaccggaagagcaaagcttggtggaattccagttggtgtcatagctgtggaaacccagactatgatgcaagtcatccctgctgatccaggtcagcttgattctgccgagcgtgtggttcctcaagcagggcaggtgtggtttcctgattctgccaccaaaacagcccaggcattgctggatttcaaccgtgaagagcttccgctgttcatcctcgctaactggagaggcttttctggtgggcaaagggatctgtttgaaggaatccttcacgctggttctaatattgctgagaatctgaggacatataaccagcctgcttttgtgtatattccaatgggcggagagcctatgcgaggtgcatggggttggtggtaagtaacttaatccatacacatcacatgtatgctaagctactagactgc

SEQ ID NO: 2472 - DNA, 526 bp, Oryza sativa
  Clone ID: PAT_MRT4530_102241C.1
cgtattcgtgggctccgccaaccacgagctagggtgacgagccatcgcacgaccgaggaacgctaccttccctggtcctccatccgagcgaaggctccccatggaagaagccggcgccggccgcacgagatcccggccggacacgggcaatggaggagcagacggagggaagcgctcgagagaaacggagtcatgtcaaactggactataaagcaaattgaggcctcgcaccaagtaattgagaactatcggatgcggttgaggcgaaggtcgccatgactcgcactagagacctggagggcatcaagcagactcaaaaacactcaatgataggcaacccatttgtgcatgcaacggcaagagctggtagggatcatgctgctggaggagagactcatccagcatcatcgggcaagactcgcatgcgcaccaagtataacactgcagaaagctgcaaaaatggtgacaagcgccataccgaccatggtgagaggggacttgggaagacagctaacatgttctatga

SEQ ID NO: 2473 - DNA, 462 bp, Oryza sativa
  Clone ID: PAT_MRT4530_102242C.1
ctggactgctctgtccaccgccgccactaataaggacacaactagctcagatataaccatgactaccttatgtattaatcaaccaaagcatcaacttcaaacggacctagccgctcatctagaaggaatttcgatcgtggcccatgagtacttgttggaaagcttatggagtccactttcatatggttttggtcccacgtcaaaattcctaccgagctgttgggaatctgcaaaataagtcatggattagccttctcggcgaggtcaactgggtttcggcacggttgataaacagaggagacgtggtgttgcgattgtggggctcaagagcgtgttcgttcaaaagccgaatcgagttgtgtctcgactccgcccaaatcgactatttatcaatacctatcggaagatcgggacctaacatcctcatcagccactccacccgtttgccggctttgcccgcac

SEQ ID NO: 2474 - DNA, 321 bp, Oryza sativa
  Clone ID: PAT_MRT4530_102243C.1
gaaaaaactgctttaattgaagaattccgagaacaggtccagcctccgggattgcaggaatcccgactagaagttgggaactcccaggggcaagtttttaagggcctccaaaaaaaaataacagtaacatgggaacaggtttatattttcctgggggcgcgggaaagtggcaatgggggaggccctttttaggaaggctttggggcctttaaaaaagttttcgggacctgttagggggacgcttttttcttttcccggggtggcccgaacacccccgggtctttcttgggggggttcgagaggggcccctcggaatccacg

SEQ ID NO: 2475 - DNA, 594 bp, Oryza sativa
  unsure (1)..(594): unsure at all n locations
  Clone ID: PAT_MRT4530_102244C.1
ccctagcaacccattgcagtacctgatgattgatgccacaagtggtgtgaactgtaatgttggtgcagccaatggaactggagacacaggtgatgctgtatgccacgctgatcaagagaagtcacttaaaaggcgctcaggccaaagatcaagggtcagaaaacttcaatacattgctgatcttgagagaactgttgactcacttcagaacataggggctgatttggctgtgagggtggcatctcttttccagcttcgtaatgctctatcaatggaaaacaagcaactgaggaggcagatcactagtcttcagcaggcaaaactaattaaggatggccaaacgcagatgctgaagaaggaaaccgagaggctgaagcagctctcagtgcgccaccgcaggagcaggagcgtcacctcttgctttgaggccaactcatttggaggaggagacccatctgcgatcaactggcagatgctcgacatgtcaaagctcagcttgaacggggncgctttgttgttcctcctagaggcggctacggcatgtgaaaatttgacagcaacaaccaacattgcctgcactgatcttcacctgtg

SEQ ID NO: 2476 - DNA, 1578 bp, Oryza sativa
  Clone ID: PAT_MRT4530_102245C.1
aaacacagcaatttaagcaatgcaaagattgcttcatctcatatgtgttcgatggaagtcattgcaaaattctacaaaaaagataaaacttgcatgataacctcagcaaatcttccgcgataacgactgatgttctctcaactctctccctctcttaatctccctctcctaaaagatggacccataataataaacctatggttggtcaggttagtgaactgttaaccacaaactaatgatattgcaagcaattctgtcacaggtgaagatcagtgcaggcaatgttggttgttgctgtcaaattttcacatgccgtagccgcctctaggaggaacaacagcgccgccgttcaagctgagctttgacatgtcgagcatctgccagttgatcgcagatgggtctcctcctccaaatgagttggcctcaaagcaagaggtgacgctcctgctcctgcggtggcgcactgagagctgcttcagcctctcggtttccttcttcagcatctgcgtttggccatccttaattagttttgcctgctgaagactagtgatctgcctcctcagttgcttgttttccattgatagagcattacgaagctggaaaagagatgccaccctcacagccaaatcagcccctatgttctgaagtgagtcaacagttctctcaagatcagcaatgtattgaagttttctgacccttgatctttggcctgagcgcctccaccccatgctccttccagtaacagcccaccatccagcctcactcacgacttcaggtataggtgtcaagctctcatccccatttctttgcttcacctcctgcagtacagcaccaccctcaccatcctcccactgcctcttagccccacccaacctaactccatgagattcccttcgtgccactttcttccttttaagtgacttctcttgatcagcgtggcatacagcatcacctgtgtctccagttccattggctgcaccaacattacagttcacaccacttgtggcatcaatcatcaggtactgcaatgggttgctagggacattctccaagacagcgttaaccatggaactctctgaactggtcagcctagtcttctgtctcggcgaatttggtccataaacacagctaccttcgatgccagcaccacttccacccccttcagccgcagcattgaacgactccccagcttcgccaaccggctgcggatccccttcatcgatagggtagattgggctctggaacgacgtcagcacatccaagatagcatcagaatcgctgcaggctctcctgagaggaggaagggtgtggctcttcccggagtccgcgaggagatcatcgagccagcacggcggctcaccgacgaatggatcctccgacggaaacctgcagctctgcgtgaacaagctgtcgtccctccttgtgatctgaggacccagcggcgggcagcggggagggaggtgcggcgaccgagacatggccgagagaacacgctcccgacgtccgctcgcctcgcgtgtgccggcaccggggggggggcgtgggggggacgcggcggcggaggagggagaggagggg

SEQ ID NO: 2477 - DNA, 428 bp, Oryza sativa
  Clone ID: PAT_MRT4530_102246C.1
gtggcgcccgggcgtgccccgccgcggtttcccgggggcgccaccacgcgcgtcttttcttagcggccgacctacactgttttggtagatactaaaacattccaggaactggcaggtagctagggctctgcggcgcaatgtgtatcacacattgcttacacccttgctgggctttaccaagctgagcatggaagtaaatgccctttgatcctaatgttcaggcatcttcccatgctgagagcacgtcatgcatgacatacttaccgacaccctagatgacttgagaggtctctgctttacaccctgaaatagatcgctgttatgttcacataagacaggatcgatgggcactggttggcgttgcaagacatgaactagacagcctacttatgcttggatgacttggaccgctagcagatcttgacagg

SEQ ID NO: 2478 - DNA, 327 bp, Oryza sativa
  Clone ID: PAT_MRT4530_102247C.1
atgccgcttcatctcccagtcagcgcgctgcttcgcctcccaatccactgtgccgcatttgccgaccactatgccccgccacagtcagttgttggcgatgaaactctagagtggactggtgcagctcctacccaggtataccccgtccaggaagacaagggcgaggggagaaagaaaaagggcaaggcggcgagaggagttgctagaacctcacgctacagtgctccgtcgacctcggctccggcggagagctcaaactcgttgattgagatgtggaccaaacctagcgtccaagttgtgattgacatcgacggtgtaccggtctga

SEQ ID NO: 2479 - DNA, 3610 bp, Oryza sativa
  Clone ID: PAT_MRT4530_102248C.1
atgccgtttattttgtgttcttttctgctactttgtattctagttgaggctatcaccgcccttaagaaaggagcttacttattgaagtatggacgtaggggaaaaccaaagttctgtccatttaggttatccaatgacgaatctgtactgatatggttctcagggaaagaggagaaacatctaaggttgagccaagtgtccaggatagttcctgggcaacggactgcaatttttcagaggtatccacgacctgagaaggaatgtcagtcgttttctctgatttcacatgatagatcattggacatcatttgtaaagataaagatgaggcagaagtgtggtttgctgggctgaaaacattgatttcacatagccatcaaagaaaatggagaacagaatcgagaagtgatatcatatcctctggtgcaactagtccaaggacttatacacgtcggagttctccattgagttctcccttcagtagcaatgacagtgtccataaggatggcagtgatcattaccgactccggagtccatttgggagtccaccaaagaatgcattggataaggccttttctgacgttgtgttatatgcagttcctcccaagggcttcttcccatcagattctaatgccggatcagtccactctatgtcgtctggacactcagataacacaaatggtcacccaagaggcatcccaatggatgcttttcgggtcagttattcaagtgctatcagttcgtcaagtcatggttcaggtcatgatgatggggatgctttaggtgacgttttcatatggggagaaggaactggggaaggaattctcggtggtggtagttcaagggttggaagctcttctagtgcaaagatggattatcttgtaccaaaaccattagagttcgctgtgcgacttgatgtgcagaatatatcttgtggaggaaggcatgctgcattggtcactaaacaaggggagatctactcttggggtgaggaatcaggtggccggcttgggcatggtgtagattgtgatgtggcacaaccaaaactcattgattctcttgctcacatgaacatagagctggtagcatgcggtgaataccatacctgtgctgttacactatctggagatctgtatacatggggggatggcacctttaaatttgggcttttgggtcatggaaatgatgtcagtcactgggtaccaaaaagggttgatgggccattagagggtatacatgtatcatcaatttcttgtggcccttggcatacggccctagtaacttctgctggccagctgttcacatttggagatggatcttttggtgttctagggcatggagatcgtgcaagtctttcagtccccagggaagtagaatccctaaaaggtctacgaacggttcgggcagcttgtggtgtttggcacactgctgctgttgtagaagtcatggttgggaattcaagttctagcaattgttcatctggcaagatatttacttggggtgatggagataaaggccgtttaggacatggtgacaaggactcaagatttgtcccaacatgtgtggctgctttggtggagcccaatttttgtcaagttgcttgtgggcattgcttgacagtggctcttacaacctcagggcatgtatatacaatgggtagtgctgtctatggtcagcttggaaatccacaagcagatggtttgcttcctgtacgtgttgaagggaagctgcacaaaaactttgtagaagaaatttcttgtggtgcttatcatgtggctgtattgacatccaggactgaggtgtacacgtggggtaaaggtgcaaatggtcggttaggtcatggtggtactgatgataagaatactcctacattggttgaagcattgaaagataagcaagtcagaagtgttgtgtgtggaattaacttcactgcagcaatatgcattcataaatgggtatctggaagtgatcagtcaatgtgctctggatgccgtcagccgtttaacttgaggagaaaacgtcataattgctacaattgtgctctagtattttgtcattcatgcagcagtaaaaaatctttgaaggcttcattggcgccaaacccgaacaagccttaccgcgtctgtgatagttgctacagcaaactcactaaggggcttgaaacagacacaaactcctcaactaagcgaggcactgttgtacagggattcagtgaaactaatgaggaggagctggaaacacggtcaaatacccaactgtcgagattgtcttctatggaatcttttaagaacatggacagtagatattcgaagaaaaacaaaaagtttgaattcaacagcactcgtgtttcccctgttccaaatggcagttcacactggagcgggctcaatatttcaagatccttcaatcctgtatttggatcctcaaagaagtttttttcagcatctgttcctggatcaagaattgtttctagggcaacatcacctgtctcaagaagaacaagccctcctagatcgacaaccccaacgcctactttgggtggtctaacttctcctagagttattgccaatgatgccaagcctacaaatgatagtctaagccacgaggtcttgaatttgaggtcccaggtggagaatcttactaggaagtctcatcttctggaagttgagctggagagaactacgaaacaattgaaggaagcaattgtaattgctggggaggaaactgccaagtgcaaggctgcaaaagaagtaatcaaatcactcacggcacaattgaagggaatggcagagagattgcctggaggagtaaccaagaatagcaaactgccgcccctatctggatttcctatgccaagtgagctatcatccatggctacagaaagtttgggtagcccaagcagtgtaggagaacaaatttcaaatggtcctaatgggctgcttgcttctaatggaccaagttctgttagaatcaaggcaggtcatccagaagttggcaaaaatggtagtagactgcctgaagcagaatcatgccatgaggctgaatgggtggagcaagacgaaccaggcgtttacatcactctaaccgccttgcctggaggtgcgagagatctcaagcgggttcggttcagccggaagagattcagcgagacccaggcagaacaatggtggcaggagaacaggacaagggtataccagcattacaatgttcggatggttgaaaaatcagcctccagtatcgataatgagattgcatctcggtgacattagatttgacatttggacaaaaggagagctgagatcctttacgatgtgaaggcgctctctgttcggttgctaacctggcccccataaaagaggagattctcgctatgtaagaaagagaaaaagaaagagagaaagaaaggcggcatctcagttttacggtttctccctcgctccccctccttttcccccccttgtgtgcaaagtagagtgcttaagaagtaatgtaaatgcttagtggaagaaagctaatttgtcaaatgtaaatgcatacgcaagcgcatcgattttagattatgcattttaactaattttcccccaaactcgagggggggcccgaaaaaaaaaa

SEQ ID NO: 2480 - DNA, 542 bp, Oryza sativa
  Clone ID: PAT_MRT4530_102249C.1
tcggttaaaaagttcttccggcatatatagatgcaaatccgcagtggagaaaatggatcactcactgagacatatctgaaatgcattctccctccatttgcatcactaatttttaaagttgtttcataatataagacgtgcatgcaaacatgtcattaactagcacatcttttcattgaaatattattatttaaatcctccatcattaagatctctaattttattaggtgcatgtattctattaaaatattattatttaaatctttcatcatcaagatctctaattttattgggtgcatacattctatttatcagggtaatctaaactatgagaagataattattttttggtctttgagttaatgattgatgtgccttatattattttggaatggagggagtaattctgtagcagtattactaggagcattgctacacgtattaaatttcttttacaaaactcttacaaacaatgatctcaaccattttatttaaatagatggaatttatagaaaatttatatgtccttaccgcgtgacaca

SEQ ID NO: 2481 - DNA, 558 bp, Oryza sativa
  Clone ID: PAT_MRT4530_10224C.1
atggctgacccaaacacgcttgatacgcgtgttactgctgctgtgatgaaacactgggcaccgccccccgcagggaagattaaactcaatgttgatgctgcataccaagcaaatcgcaagacgggtggttgggggtttgtgctgcgggatgaagaagggcatgcattactggcaggagctggacggctggaattcgttcatgatgttgtttcggcggaagcaagggcatgcttatctgccctcctggccatctcggtgcaaggtgtgactgaggtggagatcgagtctgactcagctattctggtctcagcagtaacgtcatcctcccatagccaagctgttggggctacaattttcgctgaaatcaagatgctgctgcaacttcattttgctaattcgaaggtttcctttgcccctcgatcctgtaataatgttgctcataatctagccaagattggtgtgagttgggacccggatcagtctgtggtctgggttgaccccctcccgtattttgtacgtactctggtgattcgtgatcgtactgaatctccccagtaa

SEQ ID NO: 2482 - DNA, 293 bp, Oryza sativa
  Clone ID: PAT_MRT4530_102250C.1
ggttcaatagactacattgattacagaccatcatacataggcaatggccaggaaatagaagacaaagacagaccctttttatttgggtgcggggccgaacgggagcagccgaggggatgggtcgttcgatgcggtcgtcccacccgagcaatgcagccaactgcttgaccccggcatcgcaggtaccttgttcgaaaacgtcgcgcgagttgtccggtatgtggaaccggagtccgagacgcgcgtcagcccggatatcggcgaggagctggagggtctctgggtcgctctcg

SEQ ID NO: 2483 - DNA, 2982 bp, Oryza sativa
  Clone ID: PAT_MRT4530_102251C.1
atgcatgacccggtccagtactgcctgcacgcggagagtgcaacgaacctcactacccacctaataggactagtaaacgagaagtcaaggtattttattgttgctcatggctttgtggaccgaattgggatattggattggtcagtctttggcgaaggtgaagaatccattcaatcgatggcggagacggtgctgagcatggcgaggtcgctggtgggcagtgccatcagcaaggccacctctgcggcggcccatgaggcgagcctcctactcggcgtccagaaggacatctggtatatcaaagatgagctgaaaacaatgcaagcgttcctacgagctgctgaagttatgaagaagaaagatgagctcttaaaggtttgggcagaacagatacgtgacttgtcctatgacattgaagattgccttgacgaattcaaggtccatattgagagccaaaatctgttttatcagatggtgaagctcagaaagcgccatctgatagctacccaaatccgtaacctcaaatcaagagttgaagaagtgagtagcagaaactcacgctacaatttagtcaaacctatttcatccagcaatgaggatgacatggattgttacgcagaagacattcgtaatcagtcaactagcaatgtagatgaaactgagcttgtggggttctctgactctaagataaggattgagctactcaaagatatgatacggcaatttctaggttccaattcactggatcaagtcttgcaagaattgcaggggaaaatggtggtgcaaatacctcatctttctgactacttgagaaaaaagctcaaggaaaagaggtattttgttgttcttgatgatctatggtctttagatgcatggaactggattaatgatattgcatttcctaagaataacaataagggcagtcggattgtagtaaccacacgagatgttggtctagccgagaagtgtaccacaacttccctagtctaccatcttgaacacttgcagatgaatgatgccataactttgctactgagaaaaacaaatagaacacatgaggacatgggaacaaacaaaaatatgcaaaaaatagttgaacaaattgtaaataagtgtggccgtctaccattagcgatacttacaataggagctgtgttggcaactaaacaagttttagaatgggagaaattttataaacagcttccttcagaacttgaaagcaacccaagccttcaagctttgaggagaatggtgacccttggctacaaccacctgccatctcatctgaaatcatgctttttgtacctaagtatcttccctgaggattttgagatcaaaaggagtcgcttggtagacagatggattgcagaggggtttgttagagccaaggttgggatgacgaccaaggatgttggggacagttactttaatgagctaatcaaccgaagtatgattcaaagatcaagagtgggcatagaaggaaaaattaagagttgccgagtccatgatatcatgcgtgatatcacagtttcaatctctagagaggagaactttgtattcttaccagtgcatgatggctccaatctagcacaggaaaacactcgccacatagcattgcatgggagcatgtcctgcaaaacaggattggattggagcattattcgatccttagctatttttggtgacagacccaataatctagcacacactatttgttcaaataaattcaggatgttacgggtgttggatcttgaagatgtgaagtttttaatcacacaaaaagatttcaacaatatagcattgttgcgtcacttgaagtacttgagctttggaagaatattctcatcatgcatatatactcttcccagatctattggtaaattacatggcttacagaccttgaatatgtcaagtacatacattgcaacactaccaactgagatcagtaaactccaatgtctgcgcactcttcgttgtacaagggtatctaataataacaattttagtataaatcacccggtgaagtgcttaactaacacaatgtgtctgcctaatatattcacaccttcagttagtagcgacaatcgtgccaaacaaattgctgaattgcacatggccaccaaaagttgttggtctgaatcatacagtgtgaaggtacccaaaggtataggcaagttgggagaattacagatactagagcatgtggatatcaggaggactagtactagtgcaatccaagaattggcgcaactaagcaagctgactaaattaagtgtgacaacaaagggatccacagaggaaaaatgtaagatactctatagagccatccaaaggctctgttccctgcaatctctccgtgtggatgctgaggggtcctcaggaaatggaacacttaaatgtctagattctatttcctatcctcctctgttactaaagacactcaagttgtatggagatcttgaagagatgcccaactggattgagcagctctcgcacctcatgaagttctacttattagggagtaaactaaaggaaggaaaaaccatgctgatacttggggcattgcccaacctcatgctgctttgtctttcacttgatgcttacctcggggagaatctagtattcagaacaggagcattccaaaagctcaggacactttggtttgacaagctggatcagctaagagagattaggtttgagaacgacagctcgcccctattggaaaagataggaatccgatactgcaggttggaaatagggattattggtatctctaaccttatgaggctaaaggaaattacacttggatacagagttaaagttggttatcttggtcagttggaaagagaagttggcacacacccaaatcgccccgtgctacgtatggaggaggaccgaagctgtcacgacctgagaagggatggcaaaggatcagctgtagaaatggaagcaacggagcccctccctgagcccgagagctag

SEQ ID NO: 2484 - DNA, 1936 bp, Oryza sativa
  Clone ID: PAT_MRT4530_102252C.1
ggcagctcccacctccatggcgaacgcggatggcgagagcacgcgcaccggctactgcgccgcgaccaagtcgttccgcagcctccggccgccggtgccgctgcctccgccggacgtcccgctctccttcccggagttcgcgttctcgctgctgccgcggtcgtcgtcgtcgtcgtcgtcgtctcttctcccggcgaacccggcgctcgtcgacgcggccactggcgaggccgtctcgttccaggcgttcctgtcgcgggtgcgcgcgctcgccggagccctccgctcgcgcgtcgggctgcgcggcggcgacgtcgcgttcgtgctcgcgcccgcagggctcgacgtgcccgtgctgtacttcgcgctcctctccatcggcgccgtcgtgtcccccgccaacccggccctcacccccgccgaggtttcccgcctcgtctccctctccggcgcatccgtcgccttcgccgtctcgtccacagccaccaagctccccgctggcctcaccaccgtcgtcctcctcgactcgccacacttccgctccctcttgatggattgcggccaagcccaaggacaggagccgctgccggtggtggtggtgcggcagtcggagacggcggcgatccagtactcctcggggacgacggggcgggtgaaggcggcggcgctgcctcaccggagcttcatcgccatggtggcagggttccacgcgctgcgggccaaggctcgggaggtcaggacgctgctcggtgccccgatgttccactccatggggttcttgttcgtgctgcagggcgtcgcgctgggggcgacgacggtggtggtgacggacgcggtggcgcgggccgggatacgggggctcgtggaggcggcggagcgttgggcggtcatggacatgacggcctcgccgccggtggtgctggggatgaccaagcagaggtgccggctgccggcgctggagcggataacctgcggcggcgccccgctgccggcgccggcgatcgaacggttccgccggcgattcccccacgtcgatttgtgcatgggttatggatcaaccgaggcaggtggcatatcaaggatgatcagccaggaagagtgcaaccacataggctctgctggccgtgtcactgagaatgtcgaggtaaagattgttgaccatgtaacaggcaagccattgcctgccgggcagcaaggggagctttgggtgagagggcctgccgtcatgacaggttacgtgggtgacaacgaggccaatgcaaccacctttaattctgaaggatggctgaaaactggtgacctttgctatattgatcaggacgggtttctttttgtagttgacaggctaaaggaactgattaaatacaaggcctaccaggtaccacctgcagagctggagcttgtcctgcattctttgccacaaattgttgatgctgcagttatgccgtatcctcacgaagaagcagggcagataccagtagcacttgtcgtaaagcaaccaggaagcaagcttactgaagcagaagtcatgtacaatgtcgccaagcaggtagctccatacaagaagatccggaaagtgctgtttgttgactccatacccaaatcgccatctgggaagatcttgagaagggaattggtaaatcatctgcggttgtgtgaattgtcgagattgtgactgtgcgagtgttgtaccctatagttcaattcttgtcccccaaaggaaaaagtaaaaaagaaaatgtgctgcaattgtaccggaagaagaatattggataaacggaaggctcataacatatgtttatgaggggctgcactatactgtcgaacatgatgctggtgtacaaagaaaagtaagtttgttgagattgtttagtgggattagctacttgtataagaagcaataaacaagtctgtctcaaaaaaaaaaaaaaaaaaa

SEQ ID NO: 2485 - DNA, 444 bp, Oryza sativa
  unsure (1)..(444): unsure at all n locations
  Clone ID: PAT_MRT4530_102253C.1
gctccgagccgggatccggcggatncagtcggagcgcgggaggtggcgcggcggcaggcgtgaccacgcccggttcagcttccactacgacgcgctcagctacgccctcaacttcgacgacggccgcgccgccgcggacttcgtcctagtatgagtccgacgcgacatggccggcgtttagccgcgcagtatgcaggtggtgtgtgtgtttgtctgcgtgttagtgcgtttctgcttanaggcccgtgtaattaacggaagctggcggtgtgtttgggtggttagtgtggccgcgtactctgctcttcttggtttaactaggagctagtactactatttttggtgaatgggaaggcagattctgtactattatttctaacaccacgatttgcaagggggaaagagtgcttctttgccgttttaaaaaaaaaaaaaaaaaaaaaa

SEQ ID NO: 2486 - DNA, 273 bp, Oryza sativa
  Clone ID: PAT_MRT4530_102254C.1
atgtcgaaggcggccacgagaggccgtgacgaggccgacgccgtcccaaaagccaacgacggagatcatggatcgcgaccgcaacgagacgaacgacacggccgcggcccgcggcgcatgaggaagccggctgctcctccgagctttcgtcgccgagccctggtgcactcgttgttcgactggtggcggttccccgacggcaaggagaagctggacatgtcggagacgttcacggacaggtgtcacggaaagaagcacggtccttcggatgag

SEQ ID NO: 2487 - DNA, 1490 bp, Oryza sativa
  Clone ID: PAT_MRT4530_102255C.1
atggtggaggatgaggactatggcggaggccgtcgaaggctaggtcagcgaggccaacggatgagctctctgttgcaagcggtgtgcgagcatctcggtgtcgatctctgcgaaggggacgactccccacgccggctcggcaccttctcctcctcgccgactccccacgccgccgcctccacctcctcccctccgctctccttccccaatgccgaccttgtcctccgcctcgacccctgccccgactacgaggtggatttcgacgtcagcgaggatcaccactcctccatcgacctccacgtctcctccgcgcccctgcttcactcccactacttcggcgctctcctatctgaccgctggagccctgctcccacctccatcgcgcggagggaggagaggcggcggcagcgagaaaactcaatacggagtattgccaagtcctcgaagactctccaacggggtaatcactcaatacatagtattgcccagccctcgaagactctccgacggagagattacctagtcgttggagaagatgaagaggccacactcccgtgcacatcatgggcgccgccagccgtccgtccgtccgggacgccgcaggttctccaaggcgtcgccggccctccgtccagggcgccgccggcagcccatctaggtcgctgccgcccctccgtccagggcgtcgccggcagcccatctaggtcgctgccgcccctccgtccagagcgctagcggcctccgtccaagtcaccatcgactgtcaatccagggaccgtcggcagtctgtgccccttcgtccacctcgcctctcaacgactttgagtacgatgcctgtggaggatgatatgagtaaccagcttgatgagaatggcatgagtagcgagcctgtcacgcaacagttccccactattgagaggactaccgtggctagaccaaatcaaaaaagatcgaagaattttagtgaacaagaagataagatacttgtgtcggcgtggttgcatgtaagtttggatccagtgctaggcacaaatcaaactcgtgctgcatattggactagaatatacgagcacttatacaaaacaagtaaatccacaccagatcgcagccagaattcacttatgcatcgttggaaaactatacaagagaatgtcaacaagttttgtggatatctgagccagattgagggtagaagacaaagcggggttagtatacacgacaagattgctcaggccattgctgtatttaaggagttggaagataagcccttccaattcctgcactgttggactctcttgaggtcacaatccaagtggcatgataagatgaagcaaataacatcccaaaaaccctgtgccaccaaaaaacagaaggcaagcacagatggtttgggaaaagctatacccacaaatgatgatactaccaatcatgttgatgaagataatgaacctacagagaccgaagagccgaagatcaaataccttgctgca

SEQ ID NO: 2488 - DNA, 3184 bp, Oryza sativa
  unsure (1)..(3184): unsure at all n locations
  Clone ID: PAT_MRT4530_102256C.1
atgggactgcacatatggtgttggttggttgtcttgttcagcttggccccattgtgttgtagtttgagcgcagatggcctggctcttctggatctagccaagactctgatactgcccagctccataagctcgaattggagtgctgatgatgcaactccgtgtacatggaaaggagttgattgtgatgaaatgagcaatgtggtttctcttaacttatcatattctggattgtctggttctctaggtcctcagataggactcatgaagcacctgaaagtcattgatttatcaggtaatggtatatcaggaccaatgcccagttccattggcaactgcaccaaactggaggtgctccatctactacgtaatcgattgagtgggatccttccagatacattgagcaatattgaagcattaagggtttttgatctctcccgcaatagcttcacaggcaaggtcaatttcagatttgagaactgcaagcttgaggagttcatcttgtcattcaattatctcagaggcgaaatcccggtgtggatagggaattgcagcagcttgacacagcttgcatttgtcaacaatagtatcaccggtcaaataccaagttcaatcggtttattgagaaacctttcttaccttgtactttcccagaactccttgtctggcacaatccctcctgagattggtaactgccaattgctgatatggctgcatctagatgcaaaccagctcgagggcactataccaaaagaactagcaaacctgaggaacttgcagaagctctatctttttgagaattgcctcactggggagtttcctgaagatatatggggaatccaaagcctactatctgtcgacatctataaaaacaatttcactgggcagctgcctatagtgttggctgagatgaagcagctccagcaaattacgctattcaataattcattcactggtgtcataccacaggggttgggtgtaaatagcagtttgtccgtaattgatttcataaacaatagttttgttggcacaatccctccaaaaatttgttcagggggaagattggaagttttgaacttgggttcaaatcttctcaatggtagcatcccctctggtatcgctgactgcccaactttgagacgagtaattctcaaccaaaataatctcattggatcaattccacaatttgtaaattgtagcagtcttaattatattgatctcagctataatttattaagtggggacattcctgctagcttgagcaaatgtatcaatgttacatttgtgaactggtcatggaacaagcttgctggtctaataccatcagaaattgggaacttagggaacttaagtagtcttaacctctcaggaaacagactatatggtgaactccctgtggaaatttctggatgctccaagttatataagcttgatttgagctacaactctttgaacggttcggcactcacaactgtaagtagccttaaatttctgtcacagctacggttgcaggagaataaattcagtggaggtatacctgattctttatctcagttggatatgcttattgaactgcaacttggtggcaacattcttgggggtagtatcccttcatcgttaggaaagttagttaaactgggcattgcattaaacctcagtagaaatggactagttggtgacattccaccactaggcaatttggtggagctgcagagtttagatttgtcatttaataacctcaccggaggtcttgcttcattaggaaacctacagtttttgtatttcttgaatgtttcctacaacatgtttagtggaccagtaccaaaaaatcttgtgaggtttctgaattccactccaagttcatttagtggaaatgcagatctatgtatctcttgccatgaaaatgattcatcttgcacaggttctaatgttttgagaccttgtggttcaatgagtaaaaaaagtgcactcacaccactcaaggttgctatgatagttcttggttcggtttttgctggtgcatttctgatactctgtgtccttctaaaatataatttcaagcctaagattaacagtgatttaggtatattatttcaaggatcttcttctaaattaaatgaggctgtagaagtgactgaaaacttcaataacaagtacattatcggttccggggcccatggaattgtctacaaggcagtactgaggtcaggagaagtatatgctgtaaagaagcttgtacatgctgctcacaagggctcaaatgcaagcatgatccgcgagctgcagacgcttggtcaaattaggcacaggaacctgataagacttaatgaattcttgtttaagcatgagtatggtttgatcctatatgattttatggagaatggtagcctgtatgatgtgttgcatgggactgagcccactccaactttggactggagcatccgctacagcatagctcttggaacagcccatggtctagcatatctccataatgactgtcaccctgctatcatacatcgagatattaaaccaaaaaatatattgctggacaacgacatggtaccgcatatctcagattttggcattgcaaagctcatggatcaatatcctgctgctttacagaccacaggaatcgttggtactattggatatatggccccagaaatggccttttcaaccaaggctaccacagaattcgatgtgtacagttacggtgtggtattacttgagttgatcaccagaaagatggctgtggattcctcattccctggcaacatggacatagttagctgggtatcctccaagttgaatgagactaatcagatcgaaactatttgcgacccagctctcattactgaagtatatggaacacatgaaatggaagaagtgcgcaagctgttgtcattagctcttagatgcacagcaaaggaggcaagccaaaggccttccatggccgttgttgtcaaagagctgacagatgcaagacatgttgctggctcatactcgaagcagaattcaggccccagcaattcttgatggctgaacaggatacaaaagcacaaagcttgtaccatgaactctcgtaggtactaagaaatgaaaaccaagccaatggtctaatagtgttggctcaggtgatctccntcggtgactgacnaatctcctggctgaacagattaattaagtc

SEQ ID NO: 2489 - DNA, 759 bp, Oryza sativa
  Clone ID: PAT_MRT4530_102257C.1
atggcagcggctgctcggtcgccgccttgcatgactgcgcaggtccggggatgtcgcatggacggccatccgcacggcgtcgatgacctccgcggcgccgctcgggccgggggacttcaagcttggttaacccggggataccatggttggagcaccaaggcttataagcaggccctcacccacctaaacttccaaggtggtactaaaccaccactatacaaccacttctgggccacatgggccaaatacacactactaggcttcaaacgggctggggtgttacatcgggacggtgtacctgtgccgcctccggagctcaccggcatccgcggcagtgagggagagctgtgcctgtacgcgatgaaggtggtggaccggtgggcggtggcgaggaagcagaagctagagcgtgcggcggcaaagaagcggatcttgcggcagctcgaccaccccttcttcctccaccctcttcgccgacttcgacgccacgactcacttctcctgtgtcgtcatggagttttgcgccggcggcgacctccactctctcatccaccgcatgccatcccgccgcttcccgctccctccgcccacttctacgcagccgaggtgctcctcgccatcaagtacctccacatgataggcgacatcgacgacgagcaggatgacacggctggcggtggcgcgtcctgcttcccagaccacctcctccagttcaagcggcggcggcggcgcctctgcggttcgtggccgagccggtga

SEQ ID NO: 2490 - DNA, 1473 bp, Oryza sativa
  Clone ID: PAT_MRT4530_102258C.1
atgaccacgacgagggtgggagctcgggaaggcaacggtgacaatgaccgctcaggggttgcagattggtggcgcgaccccagaccacctatgggaaggttagatctaggtggcatcggcagtgttgcaggagaaaggcgatggcgatgggaggcggatccagtggcgggatgggaggagatcggcgacgacggaagcagtagagggggcaccaacaatggctccccaactctcctctcctcctctacctcttccagatatggccagtggggaggaggccgcttgcagcggcaacaatggaggaggcagtgggtccccactaccctcccctctctctcccagatttggtcggaggtaaggcagtcggtgagtagcagcagcagctcgtccacggcggcttcagcggcgcctccgctggtccgtcctcgacttccatcacgccggcgctgcctccaccctctgcctccatcgcgccgcctccgccagtccatcctcaacctccatcgcgcccgggccgtctccaccctccgcctccatcacgctgcctccgcgagcctgcctctgcctcaacgccgccatcgcgccgcctccatctctagccagtccccagtctgtcaaaattcggtcctactgataatggaagaagaaggattctatactaatttgatgaatgagggcaacgattccttagattgggatagtttgagtagtatgcctgtggaggatgatatgagtaaccagcttgatgagaatggcatgagtagcgagcctgtcacgcagcagttcccaactgctgagaggactaccgtggctagaccaaatcaaaaaagatcgaagaattttagcgaacaagaagataagatacttgtgtcggcgtggttgcatattgctcaggcaattgctgtatttaaggagttggaaggaaagccctttcaattccttcactgttggtctctcttgcggtcacaatctaagtggcatgataagatgaagcaaataacatcccagaaaccctgtgccaccaacagacagaagccaagcacagatggttcagcaaaagctacacccacaaatgatgaaactaccaatcatgttggtgaagataatgaacctacagagaccgaagagccaaagagaccgatgggtaagaagagagctaaagagcagttgaggcgtggtgaaacatgcacagatgcttttgatcatttgtgggagaaaaaaaaagaagctgatgcagagaagaagaaggagagagatgagaggcaccaaaagtcatatgaactagataagcagaggcttgagttagataaaaaaaaggtcgcgaatgagacggatgagatacagttgaagaggatgttagaagaagagagaattatgaaaatggacatttcttccaagcctctctcacagcagcagttctacaagagtgtacaagatgagatcatcgctcgtcgcatgaacagttccggttga

SEQ ID NO: 2491 - DNA, 4179 bp, Oryza sativa
  Clone ID: PAT_MRT4530_102259C.1
atggcggggccgacgccgacgtactcgtcggtggtggcgcacacagcggcgttcctcgcggagctcatcgccgacccgctcctccggcgacacctgctctccgccgccgcggcggcgggcggcgtggggcggaagcagcggcagcacccggcggcgacgctgcaggcgctgtcgctcgtgtcggacgcgctcgacaccgccgcgtccgcgccgccgtcgctgtcctccctccgcgccgccgagcggctgctgctgtcgctccccgtcgcgacccctttgtcgtgcctcctcctcgcgctcgcgtccgcctcgcgccgccgcggcggggcggcggcggcggcggcggccgcggtgctggacctcttcgcgctcgacccggcgctcgcgcggcacgagctcgcgccggcggccttcgaggcgctcttcgcgccgcgcctcctccccgtcatgcgccacttcgccgcgcgccgcgcgtccaccgccgccgccgcggcggaggcggcgtcccatcgcggcgaggacgggtccgtggagaccgccgcgatgtcggcgatgagggttctctccctgatgagcggcgcccaggcgcaggagatgagggacctggagcgcgagtacgagaaggtgctcgacgcgaactgcatagcgtacgcgctctacctaaagaagatccttgaaaccggcgacgcggcgaaggagacgtactccccgccgccaccgcctccagagctcgtattcggcgtcggagacgacgaccaggacggcgacgtcgacgacgagaccacggcggagaccgacgagaccgtcagctcgcagaacgacgtacggtacaacccgatctgggcggacgccgacgaggcggccgacctgtacccgcggcagggcagcggcaaggggtggagggagctgatgcggccgccgagcctgtacccgcagcgcgtgccgccgcacctcatagtgcagcagcagcagtcgtcgccgtcgccgaccggcagaggaagcccggtggcgaggctgcgcgccgggcactcgccggcgacgccttcttccgacgtcagcatggaggactccccctcctcctccgagctcctcgccggcagagaggaaaagcacacggcctcgccgctgtcacggcctgcaggcagagcgcgtccacgcggcgaggaagacgacgacgacgacgtcgccgccatgctctctccggagcacgcgagttctgtgatgggcggcgacggcggcggcgacgtggcgcggcggccggtggtggcgacgcccaaggacttcgtgtgcccgatcacgagccaggtgttcgacgaccccgtcacgctcgagaccgggcagacgtacgagcgccgcgccatccaggagtggctcgaccgcggcaacgccacctgccccatcacgcgccaccgcctccacggcgcccacctccccagcaccaactacgtcctcaagcgcctcatcgccgcctggcgcgaccagaaccccgccgcctcctcctccgcgcccacgccgccgccgccggcgacgacgacgatggatagccccgccgccgcggccccgttcaagatcagctcgccgtcgccggacgccaccgtgagccaggccagcgcgccgtcgccgaccagcgtcatcgcgcaggcgtccctcgacagcgcagtcggcgagctccgcgccgcggtgtcctgcctctgcacgtcggaggagctcgccgactcggagaggtcggtgctccggatcgagcggctatggcgcgaggccgccggtgccgagcacgtcgtcctcgccgcgctcgccaagcccgccgtcgtcaacggcttcgtggagatcctcttcaactccgtgagcgcgcaggtgctccaggtggccgtcttcctcctcgccgagctcgcctcccgcgacgacgccgtcgtgcagacgctgacgagggtggactccgacgtggactgcctcgtcgcgctcttcaagaagggcctcgtcgaggccgtctcgctcatccacctcctctccccctcgccggagcagcttgtcgagatggacatggccgacgcgctggtcgccaccatccggcgaggcggcggcgacgacgacggcggcgcggtggtcaagatgtgcgtcaagccgaaggccgcgtcggtgatcctcctgagtcagatcctcgtcgaaggcggccgggacagctcgtcgccggcggtggccaagtccgccctggtctccgagaggttcatcaggagcgtggcggcgagcttggaagccgagcaggtggaggagagggtcgccgccgtgaggatcctactgcggtgcgtcgccgaggacggccattgccggagcagcatcgtcgagaactcggccctcgccgccgtcctcgacgcgttccacgtcgtcggcgacgccgacaagttcgacatcgtgcggctcctctccgaactgctcaagctcaaacggcgatcagctgctgatcgtcttcttcggacgatcaaggaggcgagctccttcagcatgatgcacacgcttctcgtgtacctgcaatccacgacaccggagcagagccctgtcgttgcagggctacttcttcagctagatctcctagtggagccgaggaagatcagcatgtacagggaggaagcagtggacagcctcatccagtgcctcaagaactcggattacccgagaagccagctgctcgccgccgagactatcatgaatctctccggcaagttctcctcgtcgggccggccactctcacgctcatcgctgcttaagcttgccagggtgaaagagaggcaccggccgtcgcacgatctcagcatttctcgcggcgccggcgaggacgaaatggaggaagagaaggcggcggcggagtgggagaggaaggcggcgtacgcgctggtcagccatgagttcgggctggtgttcgaggcgctgtcggggtgcctcgcggcggccaagaacggcgagctgttcacggcgagcctcgtgtcggcggcatggctggtccgcatgctccccctcctccccgacaccggcgtgctcggcgccgccagggtgtgcctgctccggcagctcgtgctcgtcctccggtcaggcaagcacggcagcgacagggccctcgccatggtggccctcaggagcttcatgaacgatcgcgaggggatgcacgagatcacgacgtacatcaaggacgtgctcaggacgctcagggagctgaagaaatcgtccggcctcgcgttcgagatgctcaagctgctgtcagatggacaagaatccagcattgatatgtggaatcacaaggagctcaatcacgcagactgcagctcgaatggtgaggtcacatcgatcgcctacttcaagggctacatcttctccggccactctgatggaacactaaaggtctgggagggaagtgagaatatccttcgcctagtccatgaatcccaagaacacacgaaagcaatcaccagcttagcagtgctacactcagaggagaaactgttcagtggatcactggatagaactatcagagtgtggcagctccgagacgccctccggtgcgtcgaggtccacgacgccaaggacccggttcagagcctcgccgtcgccgccgccatggcctgcttcgcgccgcagggctccggcgtcaaggtgctaagctggaacaatggtggcggcgccaaggtcctgaacgcgagcaaggtggtgagatccatggcgctggtgcacgggaagctcttctgcggctgcaacgacggcggcgtgcaggagatcgacctggcgagcgggacgatcggcgtgatccagcaagggagcaagaggatcatcggcaaggccagcccgatctactctctgcatcttcacggcgacctcctctacaccggcagcacctcgctcgacggcgcatcagtcaagatatggagcagctcgaactacagcctggtcgggacgataccgtcgtcggtggaggtgaggtcgctggtggtgagctcggacctggtgtacctcggctccaggaatggcgtcgtggagatctggtcgagggagaagctgaccaggatcggcgctctccaggccggcggcggcggcggcagcggccgggtccagtgcatggccgtcgacgccgacggcgatgtcatcgtcgtcgggacatcggacggcagaattcaggcttggggattgacttga

SEQ ID NO: 2492 - DNA, 487 bp, Oryza sativa
  unsure (1)..(487): unsure at all n locations
  Clone ID: PAT_MRT4530_10225C.1
cttcgtatcaactcgttgtctcgctgtgctgattgaatcatcctgacccttttcggtttagttgtagctttgttcagcgcaatgggaatatgtcgttccggttagattttaggaggaatttgctgttcctgtttgattttaggaggttttggtttgtgccggtagaatgtcctcgttgggagtcgtgtgagatcttgctgttgacgctttttcgtggccaacacangatcacctaacgatttcgtggtacaaacacttgcgtgatgcttccgttgtatttcgcccttgtagttcttgatacgaattctatcactgtgagatcccccgctgtattattacctgatgaactggtgttgccgtcttcctgttgttaaagtgacaatttctgccttccaaattattagttggagtgggttgattaataaagtgcattatcattaacctaaattatgcaccatttaacactttagcttgttaagctttcttt

SEQ ID NO: 2493 - DNA, 4272 bp, Oryza sativa
  Clone ID: PAT_MRT4530_102260C.1
atggccttcatggcggcgctggaggccgatctgcgcgcgctctccgccgaggctcgccgccgccacccctccgtcaaggacgccgccgagcacgccatactcaaggaactcatgggctcatgctcgagccaggtgcaatgcacttgcttagaatgcttctgtaagaagcctaagctccgttctctatctagtccgatggaaatagctcaaaatgaggatatattgcggatgtttctggtggcatgcagtgttaaatcagtgaagctgagtgtaataggactatcctgtttgcaaaagcttatatctcatgatgctgtagcttcttctgcattgaaggatatactgactactttgaaggatcatgcagagatgacagatgagattgttcaacttaagactttgcaaacaattttgattatttttcagtcgcacctacaacctgaaagcgaggtgaacatgtctcaagcatttgacatatgccttcacctacttgaaagcaaccgttcttctgacagtgtccgcaagtcattagggaggaactctgtggagcctaccgtgagggaaaaactgagcaatgttggcaagcttggtctccgtttacttgaagacctgacagctcttgctgcaggtggatctgctacgtggcttcgtgtttattcattgcataggacatttgcccttgacattcttgagtttgtgctatcaacatatgtttctgtattccgggcattgttaccttaccagcaggtcttgcggcatcagatatgctcgcttcttatgacttcactccgtacaaatgtggaacttgaaggtgaagcaggggaacctgccttccgtcgtttagtcctacgtttggtagctcatgtcatcagactgtacagctcttcacttgttactgaaagcgaggttttccttaatatgctcgtaaaggttactcgtctggacttaccattatggcatcagatactcgttcttgaaattctaaggggtttttgtatagaagcccacacactgcgattgctatttcaaacatttgacatgaatcctacaaatactaatgtggtggagaatatagtcagagcacttgctttggtggtagccactattcaggcttcagacttaagtgaggagactctagcagctgttgctggaatgttcagcagtaaagctaaagggattgagtggagcatggataacgatgcatcaaacgctgctgttctggtggctagtgaagcacataccataactctggctcttgaaggcctcttaggtgtagttttcactattgccactttgactgatgaggctttagatgtcggcgagcttgaatcgccaaaatgtgaattgggtagtacagaatgctgtggacaattggctctactttgtgcggctatggtcaactcatcatggctaaccatccttgactctctttcacttattttgatgaggtcaatcttcaaaactacctttcctattattgcctgtggagttctccgtgctatagaacccttaaactcttttctagcatcactttgcaagtttaccatcaataacccaaatgaaggggagaagagaagcattgtactctctcctggatcaaagaaggtagagatgttagtggatcagcgtgatagtatcattctaacaccgaaaaatgtgcaggccctgaggacacttttcaatgtggcacatcggttacacaatgtgcttggtccttcctgggttttggtcttggagactcttgcagcacttgatagagctatccattcaccacatgcttcaacccaggaagtgtctgcttctgtttcaagactctcaagagatacatctggacagtacagtgacttccatattctctcatctttaaattctcagccttttacaggagttgaaccaatttgggaccaaattgctgctcatcatcttgagggcatcagttcagctcctcatcattttcaagaggaaaaattgctcaaagaaagcgaaactgtatcatttgagtatgctgttttatctccattggtgatcctctattcctccaacaagaatattgatgttcaaatgggtgcacttaaaatactactgcatgttcttgagagacatggagaaaaactgtcctatagctggcctagcattcttcatatgttgagggctgttactgacgcatcagaaaaagatcttatctccttgggttttcagagtatacgtgtgataatgaatgaaggattggcaaccattcctgtgcaatgccttgatgaatgcattttggtaaccggagcttatggcacccagaaaactgacataaacataagtttaacagcagttggccttttgtggactgctactgactttgttgtgaagggattaataagcaaatctgctgagaaagcaaatggcatggatgaagaagctgagtctggtggaacagtgaaagaggaagcgctatcttccagtgagaaagacatcaaacaaagtcctctaaaaagtgtggttgattataataaacttttcttctcagtgttttctgtgcttcaaaaactgggcgcggatgatcgtcctgagtttgctattcatcatgtgtatttgaatatcatcaattttgcaaaagtttgcaatattgctcatgagtggataatagtgtgcattcacaagtttgtgttgcatctacttcgtctagagatgagtggcaaggaaaggaacttggaactcgagcagggaaagctgttcatatgcttatccaccacaggtggcatagcacgacttttgcgttcctttttccctttcctccagcaattgagcaaattttcttctggttgggtgcttttgcttgattttgtcaaaaatggtatcctaaatggtagcaaggaggtcgctcttgcagctataaattgtttgcagacgtttgttggctcaaactgttcaaagggcaatctagaatcctcctatgtcaaatctgttcttgatatttatgaacttgttcttcaaacttcgccaaattataagaatgactctgctgataaagtgaagcaagaggttcttcgtggtcttggagatctctatgttcaagcacaatctctgtttaatgatgaaatgtatctaaggctcatggccgttatgcatctgatgattaagagttccatgaatcctacagattacgataatgaattgggtagtatccctgctctgcaacgaggtatcttggaaattattcctatgctacgtccaacaactatgttatcttcaatgtggtcacctctcctcctcgaactactgtgctaccttaatagccatgatactcccctgcagaaacagggtaaagagatgcatgaacagaaatctgatgcagcaaatggtgcaacacatggttttcttgaacggagtcatctcaataacagcagcacaaaaatggataatgcagtgggctgtggctggggtattatgttcatagaaaagcttgtgccgattgttgtcaacctatttctggaggctccacagaatgaaaggtttaattcctctccggaagttattcgatgtcttggaaggtgcatgaacacaaggagagacaatccaaagggtacactttggagagtttctgctgaatgcttcaatcgtgttttggtagatgaagtgacacatgacagcgctgattgtaaaagcggcatgagttcatataaattttctagagctcgtttctggaaggaggttgcagatgtgtatgaaacctttcttgttggatcttgtggacgtgtgctgtcgtcagatgttccttcggttgactctgttactgctgatgagactcttgagatggctgtactcactgtttttggagacaacgttctgaaattgcagaaggatgctcctgttgagcagattttcactgagctgcttgcagatgatgttttctttatgctggtactaccacactgcagtttctctgattcgttttctccacaagtatcagaaaccagcaaagtatcgatctcagttcttacgaagcggtgtgagattatactgggtcagtttttagctgatgaaaatgatctaggagaaggaccattgcctagtgtaaggattgatgagacaatttgtgttctacaagaactcgctagactaataataaacatggaaacagctaatgccctcagcatgccattatatctaaaagaagctttagagaagaatgagtcccatggacgggctcatttattggctttgctaccaaccttttctgagcttgttgtctcaagatggacatgccctgaagctctatag

SEQ ID NO: 2494 - DNA, 249 bp, Oryza sativa
  Clone ID: PAT_MRT4530_102261C.1
cgagcgcgagagaaggccatggcgccaaccagaggaggcgtccaagcttacggtccacgccggcacaggaagccgaagcaggaaaggaaaaggctacctcgatgcctcctctcttctgctcaacatccagcacgttcagtgtcctcctcgcctgtcgcctactcggaggctgatggtgacgctgatgttgctccactttagtacaccggacgcgccgcggtttactagcgccgagcaccaccaccaccc

SEQ ID NO: 2495 - DNA, 989 bp, Oryza sativa
  Clone ID: PAT_MRT4530_102262C.1
tcttcctccacagtgaagtgtcaacacagtgcgcgcgtagcatgggcaccctcgtcggccatgtcgcgccgggcgccggcttcctcctcgtcggcctgtggcacctctacaaccacatcaggctcttcctgctcaggccaaccgcctacgtcgcgcccgtctggttccccgtccggcgagcccgctacctcgagctcgccctcgtcatcgccggcgccgtcgcgtccatcctcatggagctcgtcgtcggcccggcgaggcaccagccgttcgacgccgacggcaccgtgccgtccgaccacctccacaacttcgagcacgcgtccatctccctcgcgctgctcgtctacgccgccgccgccgccgccctcgacgtggcccgggtgccgcacggccgcgccgtgtcgcagctcgtcgccgccgtggcgttcgcgcagcagctgatgctgttccacctccactcggcggaccacgcgggcgtggaggggcagtaccacctgctgctgcagggcgtcgtggccgtcacgctcgccgcgacggtgctcggcgtggccgcgcccaggagcttcgcggtgagcctcgtgcggtcggcgagcctggtgctccagggggtgtggttcctggccatgggcgtcatgatgtggactccggcgctcctgcccaagggctgcttcctgagccgcgaggacgggcacgacgtcgcgcggtgccgcgccgacgacggcggcgacgcgctcgcgcgcgccaaggcgctcgtcaacctggagttcagctggtacctgtccggcaccgtcgtgctcgtcgtcgcgctctacctccggctgtgcaggctgtacccggaggagccgcgttacatgccgctggtcaggggagattgccgcgacgacgatgaggacggcggcggcgacggcgacgacaacgacgtggaggctgggaaaggtggcgccggtcacgtcttacgtgagcctttggagatcgcgcggccataa

SEQ ID NO: 2496 - DNA, 303 bp, Oryza sativa
  Clone ID: PAT_MRT4530_102263C.1
atgcgtagcaattatcatgaagcacatcaacctaaaccgacaacatatgttgtgtcatattgtcggattcggctcaatcggctaacctcgtccgacttgaactctgccgatcttagtcgtagccgattcgaacttcagccgatcctcactctgtttccgggacgatttccatctcgaattccatctcggtttcttcttcatctccgatccttggattaccaaatttggtcgttaacagctgtgttgctgtctgtgtcgccagaacacccgtcacgccgtctgtcgtggacgcaccaccgtgcc

SEQ ID NO: 2497 - DNA, 204 bp, Oryza sativa
  Clone ID: PAT_MRT4530_102264C.1
cagagatatgataccttggatcaggttaaggtagctcttggaaaggacgacctcgagtcgctcaatattatcattgaaagcgattacaccaaaagcaaagattggacaaggaaacattgtttcaacgagtgaagaccgcatgacattttagatgacctcctgcacccgctcgaacaaaccattaagctcatctgcaagacctta

SEQ ID NO: 2498 - DNA, 415 bp, Oryza sativa
  Clone ID: PAT_MRT4530_102265C.1
caggcactcggaccaccaccaccattggcaccacctcgcatcacactctctcgctcgccatgagctcccgcgacgccgccgccacgttccatgtctaccagcccgtgcagatcccgacggccacggtggcgcccgctgtggcagtgtcggcgggcgggcctggcgccggggacgccgtcgagtggggcgtgccggagaaccttttcttttactcccccttccacctcgtccgcctcccgggcgacgagcgcctcgccgcgccgctcgccaaccggagcttgctggtgaaggggatctacgagctgtgggggcccggcaccacctacgaggagctggggagggtggtcatggcgtaccccgaggagaggaagctgccgtacctgacgccggagagccccttcaagatccgtcgcga

SEQ ID NO: 2499 - DNA, 178 bp, Oryza sativa
  Clone ID: PAT_MRT4530_102266C.1
atgggttatgtcatggcttctatccgtgccatggtggcatgtggcacatggcaacatgtgaggaagacgtgcctggtggtggttgtgaccagcgggtgtgacgggtgctgcggcggcggtgatgacaaccggctgccgcatacgtcggctgcgacgggcgcgtgcagcggcggagacg

SEQ ID NO: 2500 - DNA, 2891 bp, Oryza sativa
  Clone ID: PAT_MRT4530_102267C.1
atggcctccgcctccgccgccgccgaaaccctcgcggcggcgtcgctccccgtcgcgtcgccttcgcggtcgctgctgcggccgctccccaggagagcgtccgcgggaggcggctgctccgcgtccgtacgaatctccgccgtgccgccgcgggggctcgggttcgcggtcgtccagcgccgcgtcctccgccgcccgccggcggcgcgcgccaacgtcgagcgcgaaggggacggggccgaagcgtccgggccaggagaggcgtcgtcctcctcctctggagatggggaccgcgacggggcggcggcgggggcggaggcgggaggtgatggctccttcgcttgcatcactagcgcggccgcgacgcctccgcagccgccctcatcgaagaggggggagaacaagtggcggcggaagctgattaagggcggaggcgttgggcggtggctttgggagcccatagttcaggggagggaaatggggttcctcctgctccagcttgggttcgccatattcgcgctccgaatgctgcggcccgagatcgcgctgcctggctcagagccccggccacagacaacgtacgtcagcgtcccatacagcgacttcctggcgagcatagacaagaaccaggtgaagaaggtcgaggtggacggggtgcacatcatgttcaggctccgtcctgaggttgaggcccgtgcaatggagcagccacaggtgcagcgtggaacagattctgttgctgataatgctggagttccaaggcgaattgtcttcacaacaacacgtccagtggacattaagacaccatatgaaaaaatggtggagaatagtgttgagtttgggtcgccggacaaaaggtctggtggcttgctcaattcggctttggtggctcttatttatgttgtattaattgctgtagttctgcagcgattgccaataagcttttctcagcattcagcaggccagctgaggaatcggaagaattcaaactctggtggggccaaagtttcagaaagtaccgatatagttacatttgctgatgtggctggagtagatgaggccaaagaagagctggaagagattgtggagttcctaaggaacccagaaagatatattcgtcttggtgcgcgacctccacgaggtgtcttgttggtgggccttccaggaactggaaagacgcttcttgcaaaagctgtcgcaggggaagctgaagtcccattcataagttgctctgcaagtgaatttgtggagttgtatgtaggcatgggagcagctcgagtgcgtgacctatttgctagagctaaaaaggaatctccttcgattatttttattgatgagattgatgctgtggcaaaaagccgtgatggccgttatcgtatcgtcagtaatgatgagcgagagcagacactaaatcaattactcacggaaatggatggatttgacaccaactcagctgtcattgtacttggagcaacaaaccgagcagatgttttagatcctgccctccgacgccctgggagatttgaccgtgtagttatggttgaagctcccgacagatttggaagagaatctattctgaaagttcatgtgagcagaaaggagcttccgcttggtaaagatgtagatcttagtgacattgctgcaatgacaactggttttactggggcagaccttgcaaatttagtaaatgaagctgctttgttggctgggagatcaaataaagaaatagtggaaaaaattgacttcatctgtgcagtggagcgctctattgctggcattgagaaaaagcatgcaaagctgaagggtaatgaaaaggctgttgttgcacggcatgaagttggtcatgccgttgtgggaactgctgtagcaaacctattgccagggcagccacgtgtggagaaattgagtatattgccaaggtcaggtggtgcattgggctttacatacacccctcccacaacagaagatagatatttgctctttgttgatgaactgcgtggacgtctagtaacacttttgggtggaagggcagcagaggaagtagtactgtcagggcgtgtttctactggagcacttgatgacataaggcgtgccactgacatggcatacaaggctgtagcagagtatggtcttaatcagcgcataggtccgatatcggtggcaacattgtcaaatggtgggctagatgaatccggaggctctccatggggaagggatcagggccatctagttgaccttgtccagcgggaagtaaaagcccttcttcaatcagcccttgatgtcgctctttcagttgtccgtgctaatcctacagttttggaaggccttggagcatatttagaagagaatgaaaaggttgagggcgaggagcttcaagagtggctcaagtcggttgttgcaccaaaagaattgacctcatttataagaggaaagcaagagcaggttcttcagctggaagcaggctcctagcactatacattggtctcgtagaatcaattaattaatttaacacaagtagctccaacagtttaaactgtacaagttctgaggtacgcaactcacgcccaagccaagacccttgtgatgctgtatatatctatgtgccgctccacgacccttgactacaggtctaccaggaatgattcatagcgagttgtaaaccccggagtattgtaagttccttcggtttcctcgtttgccgttggatgttgtttatagattaggcgggtggtacacatgtaaaagaatattcgtttttcttctgtgttctttctctttctgttcatcctgcggaaggaattttttgttacattgtcatcttggcaaatattaataggaataattcatataaaaaaaaaaaaaaaaaaaaaaaaaaaaaaagggcctcgtgc

SEQ ID NO: 2501 - DNA, 970 bp, Oryza sativa
  Clone ID: PAT_MRT4530_102268C.1
tttattttttttgaaatattttttgttgggttttttgctcggcggcgccgcggcggcggtggcggaggcggggatgatggagacggcggcggcggcgatgctggaggccggggtggggaggttccgggggccgagcgtggcggcgctgctggcggagatgtgggcgccgctggccgtcgcgctcgcggcgctggcgacgctgcccagccttctccggcggctgcaggtgctcatcctccgcctccgctcacgcggcaaggaggtcatctcctcccacatctccacctactactcctccggcgacgactccgactcggacggcaccgatgaggacgaggaggaggaggacgaggaggagagctcctccggcgaggaggagaaggggcggcggcgcgagaggaggatcgggtattacgagggcgttgccgacgacgacgaggacggctgcttcccgtggggcggcaccgtggtgcggacgtggcaggatctaccccgccgcatctcaggcggggcgaggctgctcgcgccggggacctcctccgccgcagccgtccgcctgtgggactcgatcacggcgagtggcggcggtggggcgtggtgggacgccgatgaaggcggccgtgccccggccgcggaggcgccgccggtgtctttccagtccattttgtcatatgccccctacacattcttcgattttaacttaattcgtggaatcggagctccgtggttacacgcaactaatggtacaattttgtatgatgctcgtgctcatgaggaagagggccaacagggacaaggtgtgagacaacatttttggagcccatatcagaatgttaaggcagaacagaaagtgcaatggtgggtcccatgctgtgacagcagaagctggtatagcgcatcatccagcacctttgacggcaacctctccacagagatgcctaatttaagttgcaatcatgcgattggttaa

SEQ ID NO: 2502 - DNA, 213 bp, Oryza sativa
  unsure (1)..(213): unsure at all n locations
  Clone ID: PAT_MRT4530_102269C.1
gctcgattgctttgctctgatctggttgatcgatctcgtcgtcggcgatggagaagttgctttcctcctccggngccgccccgccgtggcgtcgcagggccagctcccggactgcttcgtgttcccggccgaccgncgcccaccggcctccaccgngnccgtgtcgntccccgtnatcgacctctccggcccncacnacgtcgtacgacgtgc

SEQ ID NO: 2503 - DNA, 399 bp, Oryza sativa
  Clone ID: PAT_MRT4530_10226C.1
tttttgtttttttatttttctgtgtttacaactttctttatttttttttttattttttttattttaacaatacaaatcttttaaccaaggccaaacaaaccttaaaaaaaccacccccccaaaagacaaagaaaaaaacaaagccaaaacataccccacacagagctaaaaagatacaagcaccccacaagaatcaccacaggccccaaatcaacggtccagactttatttaccttgccagattaaggttgctacctaaaaacaacttttcaaaaaaccccacccttcaaaaaaaatgtaccaaacaaaagcttaatattctaaacccttgaccactaattaatacccacgaaagatcccaaaaaccaccggtggagcaacaaacacaagcccgggttg

SEQ ID NO: 2504 - DNA, 520 bp, Oryza sativa
  Clone ID: PAT_MRT4530_102270C.1
cggacgacgccggcggcgagtaggcttccagcaaataccgcggctaaaccctagggcactccggcgatgaccaggtctcgccccaccccacccgctcgatgggggcgcccgctggatagaggagcagcggccgaccagccgccagtggcgaagctgtcgccgccaccgattcgcgcgccgcggcactgttcccacctagagagtcgcgctgttcgacctcgtcaaccacgacggcgctgccccggcctcccggtacaccctctccgtggctttcggtgacgagggattaagaaaaagatgggagcatgcttttaggttcctgtgatctgctttcttcataaattcagtttatggttcatgttgaagacatcctgatgatgtaaatgagatattagttcactggtgggagggacatcatcgcaagtatttaattgggttttgaaggctgatagaatggaactaagatctggagctcatgcaatgctacaactgtgctgattgagatccaaatgctcgtgat

SEQ ID NO: 2505 - DNA, 335 bp, Oryza sativa
  Clone ID: PAT_MRT4530_102271C.1
tttcccggggcattggtgaagcaccagtgcgtcagccagtggcacagccacacacacagcacggagcaggtccaggcgagacatgcatgccaggcaatgcttcacacacacagtctgacagacagcttggtgcagggtgcgaggcagatcaccacatctgggaggcatctacagggagctcggcagcccccagatggtcggcaccccatgtccgaggtgttcacacgctgccaggagaggggacttggagcgcacaggcggcgacactccacggcgttctgcaacgtggacatccccaacgcggagtggtgtctgctactggctggcgagatctg

SEQ ID NO: 2506 - DNA, 1400 bp, Oryza sativa
  Clone ID: PAT_MRT4530_102272C.1
ttttccgtttacttgtaaactcccaaaaagcaatcgcgcactcggtgaaccctagcccggcgatggggtgcgcgcaggggaagtgctgcgtgccgcggcggtagaggggacgcggtggcggcggagcggtgggtgggcgcggcggcgcgacgctggggcgggtggcggtgccgggggcggcgctggtgctggagtacgcgacgctggcggtggcggggctgtacccggactcgcccgggagggagtcgcaggacgcgcacctggtggcgacgcggttcgcggggcaccccgacctccacctgttcgcggtgttcgacgggcacggcgcgtgcggcgccgcgtgcgccgggttcgcgcgcgacgcgctcccgcggctgctcgcgggggtgggggtgggggcgggggaggagggaggggggaggatggtggtggtggaggaccccgcggcggcgttccgggaggcgctcccggcggcgaacgcggagatgcacgcggcggacgaggtggacgactcgatgagcgggaccaccgccgtggcggcgctggtggcggggggtgcgctccacgtggccaacgtgggggactcacgcgccgtggccggggtttggcgcgaggggcgcgtggcggcggaggagctctcgtgggaccagacgccgttccgcgccgacgagcgcgcccgcgtgaaggcgtgcggcgcgcgggtgatgtcggtcgagcaggtggagggcgtgcgcgacccggaggcggagagctgggtcgccgacgagggggacccacctcgcgtgtgggcgcgcgacgggctctaccccggcacggccttcacgcgcagcctcggcgaccaagccgccgaggctgttggtgtcatcgccgaacctgaggtgaaaagtgtagagatcactccagcccacctattcttcgtcgtcgcaagcgatggcgtgtttgagtttctctccagccaggatgtcgtggacatgtgtgtcaacttgtcagcctttggcttatatgaagcatccgatgttccaagaactggtgttgcagctaagcttatgaaatgtttgaatgaaaatgggataagcccagcctctacatccaaactagatgtacacagccaaaaacccaaccagagtatgactttggcatatgttctgttcaggggaagcatgaaattgctccagtgggacacagaagtaagcttaatgcttaatgcttttgttaagatcaccaatacaaagacaaagtggtatatgttagttccaattaggattttgatgagcatagtgttgcatgctagggtgcgcaaaacctctatgtaccgtgatgtttattccctgtggattacggaacatcatcaacgtttcacggattacagtgaaggggaggttatctgtggagtcatctag

SEQ ID NO: 2507 - DNA, 1389 bp, Oryza sativa
  Clone ID: PAT_MRT4530_102273C.1
tcagcccgccgccgccgccgccgccgccgccgcctcctcccctgcccccgcctccgccccagccttcggctcctccctcttctcctcctcctcctccgccgccgctcccacttttggctcctccctattcgggtccgcccccgccgcctccgccgccgcccctgccacctcctcatccccatctccgtttggcttcggatccaccggcttctcgttcggccaatccaccgccgccgccgcgtccgccccatccatcttcggcgcgtcctccacccccgccaccgcgaccacccctagcgtattcggcgccgcatcatccgcggcatccacccccaacatcttcggcggcgccacctcctccccggcgaccaccccgagcttattcggcggtgcttcctccgcggctaccgcacccagtcctttcggcgccacctccgccgccgccgccgcacccggtctgttcggggccgccgcgtccgctgcttccgcgccaagccttttctctggcgccgccacgggctttggctttggctcagctgcgtcgggcaccaccactgccgcgaccgctgctgcctcgacaccgtctttcggcttcgggttgaacaccggggccgctgcatcgagtaccaccactacttcggcttcctctccggctctagggtttggagcaggcaccggctcggcgctgtttggatccactacctctgcaccactcttcagcaccaccaccgcctcgtccccagcgaccacggccacgaccacggcgtcctttggcttctcatcgtcgccagcgaccgccgcctctgctccgtcgttcggcttcacaccgtcatcggcaaccaccacgaccgcgagcaccgcccctgccttgttctcttctgcatcttccgctcccgccttctccttcacgaagagtagctctgctgctcccaccacgccagcgtctgctccatctactggcttctccttggccacttcgccggcagcacctgctccctcattgttctctaacaccagtgcagcagcaagctcgtctgccacttctctcagctttccgtttggctcatcttctgcttctgcaccggcatttgcttctgcttctgcaacgagcgcatccacaccgtcagcagctactgcttcccccgcgacatcagggtcattgttctcagtgccagcacctgcttcttctgctggtggtttcagtttcacagtagtaccatcgtcatcatcagctgcggctactacagctactaccacaacagtcacaagtgcatcgacatctgcagccatgacaacgccggctccttcagcaacaacaactgctacactatttagccagcagagaactacaccagcttctgcctcagctccatcaacacagacacagtc

SEQ ID NO: 2508 - DNA, 2368 bp, Oryza sativa
  unsure (1)..(2368): unsure at all n locations
  Clone ID: PAT_MRT4530_102274C.1
ggctgtttagcatctttctggtctttgagcagacaccccttactcacaattccaccacaggttccgggaacttggtctggagaagggttggggtgactgtgccaagcgttcccaggagaccattcacctccttttggaccttcttgaggcccctgatccgtccaccctcgagaagttccttggaacagtgccaatggttgnncgtgaggagaccattcacctcctttggaccttcttgaggcccctgatccgtccaccctcgagaagttccttggaacaatcccaatggtgttcaatgttgtcattatgtccccacacggttacttcgcgcaagccaatgtcttgggttaccctgacactggagggcaggttgtctacattttggaccaagtccgtgctatggagaatgagatgcttctgaggatcaagcagcaaggtctcaacattacaccacgcatccttattgtcaccaggttgctccctgatgcaactggcaccacctgcggtcagcgtcttgagaaggtccttggcaccgagcacacccacatcctacgtgtgcctttcagaactgaaaatggaattgttcgcaagtggatctcacgttttgaagtctggccgtacctggaaacattcactgatgatgtcgcgcacgaaattgctggagagctccaggccaatcctgacttgatcatcggaaactacagtgacggaaaccttgttgcatgcttgcttgcacacaagatgggtgttacccattgtaccattgcccatgcgcttgagaaaaccaagtaccccaactctgacctctactggaagaagtttgaggatcactaccacttctcatgccagttcacaactgacttgattgcgatgaaccacgctgacttcatcatcaccagtaccttccaagagattgccggaaacaaggacactgttggtcagtatgagtctcacatggcattcaccatgcctggtctgtaccgtgttgtccacggtattgatgtttttgacccgaagtttaacattgtctcgcctggtgcggacatgtccatctacttcccttactctgagtctcgtaagaggctcacctccctccacccagagattgaggagttgctctacagcgaagttgacaacaacgagcacaagtttatgctgaaggacaggaacaagccaatcatcttctccatggctcgtcttgaccgtgtcaagaacttgactggtctggttgagctgtatggtcgcaaccctcgcctgcaagagctggttaaccttgtggttgtctgtggtgaccatggcaacccatctaaggacaaggaggagcaggctgagttcaagaagatgtttgaccttattgagcaatacaacttgaatggccacatccgctggatctccgcgcagatgaaccgtgtccgcaacggtgagctctaccgttacatctgcgacaccaagggtgcttttgtgcagcccgctttctacgaggcattcggtctcactgttgttgagtccatgacctgtggtctcccgacattcgcaaccgcctatggtggtccagctgagatcatcgtgaacggagtgtctggcttccacattgacccataccagggtgacaaggcctcggcgctgctcgttgagttctttgagaagtgccaggaagaccccagccactggaccaagatctcgcagggcggtcttcagcgtatcgaggagaaatacacctggaagctctactctgagaggctgatgaccctcaccggcgtctacggattctggaagtacgtctcgaacctggagaggcgtgaaacccgccgctaccttgagatgctgtatgccctcaagtaccgcaccatggctagcaccgtcccgttggccgtcgagggcgagccgtcgaacaagtgagctggccaacatctcaggctgagactctgaaagaggagagcattggagtttctttgctttgtttccattctctggtttcagagatgaaaagagaagagagatatttcaggatgctttgcattcctaggcactgctctttttccttaagaaagtaaggtcgattgaatttgggagttttctagtttgatttagttgggggtgagttcagtggaatgtggtgtgtggttggtgctctgtctcctcttgttattgggatgttacctatgaataatagaaacggccttggtgccgtttctgcaataatatattgtagcatccttgtttccaagaaaaaattgtcactgaaatgctcacttctccttggggttatcttactgtttatttatgtttcaccaatcgaaaaaaaaaaaaaaaaaaaaaaaaaaaaaaaataatgattataaaaaattaatataaattatattattat

SEQ ID NO: 2509 - DNA, 648 bp, Oryza sativa
  Clone ID: PAT_MRT4530_102275C.1
gtggatcccccgggctgaggaatcggcacgagcggccgtcggtccttcatcctctttcctcgtcctcatcgccgctcgtcattcctctcagctcgccgccccgattcatttgcttgccgccggatctgacgcctttggactcgtggccaacgaatcccgcggcgggaggaaggagagtgtgctgaatcccgttggattcggccgcctagaggccggcggacactggatccaaccgccttgaagccaaaggccgcccgatccacagcgcagcagtggcggcggcgacggcctcagcctagagctagcagtggtggtggtgacggcctcatcctccgacgagcagcggcggcctcccccttctccttgatggccgcatggtaggtgtggatcgaaggtgaccacggctgagagggagattgatgatggtgttggcggtgagtcagtttggttctcctgttattttgttgaatgtctaatatggcagaagaattttgatccgtgatttggttctgctgttgttgatgacgttgacggataattgaatcaatgtaaatttcctcttcttgatttctaaggtgcttctcatctttgacctgtggatgtggaatttttttccctaacttataaatgtggatgggggatttgggc

SEQ ID NO: 2510 - DNA, 270 bp, Oryza sativa
  Clone ID: PAT_MRT4530_102276C.1
atggaggtgtggatgtgtagcgtggacggcagccagggagaagtggaggcaagccgcaagcaggccgaggtcggcggcgcggcgtggcgcgaaggaggcaggcggcgccacggcggcgcgtcgcacgtggcgcgaaggaggcaggcggcggcgcgacgcggaggaagggctggcccctccggtggccgggacgaggtcccgtgcgagtcgaggctggggagcatgtgccgtcgtcgtcgaggagttgccgagttgaggataactgaataa

SEQ ID NO: 2511 - DNA, 287 bp, Oryza sativa
  Clone ID: PAT_MRT4530_102277C.1
agctggcacgcgtgcaggtgccggtacgctatagagcggtcgacctacgcgttcgtccacgcatacgagacaaggcattgtgagtgagttatgagcaccatggagaggcgagagcacctcctgctagacccggggtagctggacatttctcgggatgaccacgctgcgggagagataccgtccgagctcctaagcgagctggctgagtacctgtccagaaggcgtaacaacagagaggccgaagcccacgccacacgtacaggctgatgatggagttatgatgatac

SEQ ID NO: 2512 - DNA, 395 bp, Oryza sativa
  Clone ID: PAT_MRT4530_102278C.1
tttgtgttttttttttttttggggttttttttttttttttttttttttttttttttttttagggaaaagctcaaggaatcccttttttttttagggggtaaaaggaaacaggggcccccccggctggggttttggtttagcaaaaagaaagttcccgcattgccccagggggtgggaaaaaaaatcagcccattttggttccccagggggccagggggctcgaagcaaactggtaaactcggtcaatccaacggaaaaaggggggagggcaaaggggatcttattttttccacccccgagcttggttttttggggccacaacagggcccttaggaagcccaaacaggggtcccagagcgggagaattttgggggctttcggggcccggggttttt

SEQ ID NO: 2513 - DNA, 147 bp, Oryza sativa
  Clone ID: PAT_MRT4530_102279C.1
accttgtgattccgaatcaacagcctcctaacccaggggagggggtaatttaaaggtagcgtggcggcaagcaccacggttacggccgccactcaaggcgccacggtgcacgaacatcaccaaacgctacagccactagtgtctgaa

SEQ ID NO: 2514 - DNA, 465 bp, Oryza sativa
  Clone ID: PAT_MRT4530_10227C.1
atggaggacagaattgtgatcaccttgttggctagccattttagggttcccaccaacaccgcctgcctggagtgtgtcgacctcatccgtgctgcgccgcgaagaactctgccttttccgcccctcgccgccgggaagtactcatcctcctcgatcggccccgtgacgccggcaaagagtcctccaccactcgtcggcgtccggaaggactcctcctccgctcgtcggcaccgggaaggactcctccttctccgcccgccagtgttgggaatgaggacttcaactcttccaccctgctcacacgccgtcggcgccgggattgagcgcacccttgctcattttctctcccaatcctacccatcccggattgaacggtcggatgagttttggtaccgcccggcagtgcacaagggcgcgcaggtcacagaggatggcgaccacctcgtgcttctcatgcccgtgtaa

SEQ ID NO: 2515 - DNA, 489 bp, Oryza sativa
  Clone ID: PAT_MRT4530_102280C.1
gtcgagtaccgctgcttcgtcggcggcctcgcctgggccaccgacgaccgctccctcgaggccgccttctccacctacggcgagatcctcgactccaagatcatcaacgacagggagacggggaggtcacgtgggtttggcttcgtcaccttctcctccgagcagtcgatgcgcgacgccatcgagggcatgaacggcgactccggcgggaactggaggaactgattggtggggcccatcgtggccagttatccttagctatccgtgtcagaatcatcttatcatcgagtcgagtcgttatcgtgtccagtggctctctcgagtcgagaagccctctatccatccatccagtgttaggtgttcttcgtccgtgatgttaccatgaattgagttcgctttggttatggtgtttgaactgcttgttgctatctatcggaatgaaatgaaatagaaaacaaggagaaaaaaaaaaaaaaaaaaggggcggcc

SEQ ID NO: 2516 - DNA, 356 bp, Oryza sativa
  Clone ID: PAT_MRT4530_102281C.1
aaaaggcggagcttccatatatttaattcaaatatgcctaacccaaaaaaatatagtggtaggaaataccatttttacattaagtcagagagggatcaggtgaaaaaaaaacaaaagcagagcacgggcggtaaaattaaaagacgatgaacaaactgggaacacacgaaaaaaggggggagacattattgaattagagatgaacaattaaacaagggtttttatgacgatgacggtttatttgccaccagatttcttgaaacccgggggcttgtaggcgatgaaactgatgagctgcacctgcctgacgttgtcgaagccgatgatacggacaaatgcataagggtacgcctttt

SEQ ID NO: 2517 - DNA, 223 bp, Oryza sativa
  Clone ID: PAT_MRT4530_102282C.1
ggtgaggcaaggtcgatgggctcggcggcggacgaggcagaaatcaccgggttgctcgtaggcgccggcggcggcggcaggggagacagtcccgcggaagactgatgtggagaggtgtgccgtatggagggagcaggtgacggttcagggaaacgtggagagcgcggagctggaagcgctgttctgtctcaacacgcacaagctgaacctcacagtgtgggtg

SEQ ID NO: 2518 - DNA, 718 bp, Oryza sativa
  Clone ID: PAT_MRT4530_102283C.1
ccttggagccgccttctccacttgacggccggagatcctcgactccaagatcttcacgcgaccagggagaccggggagtcacgtgggtttggcttcgtcaccttctcctccgagcagtcgatgcgcgacgccatcgagggcatgaacggcaaggagctcgacggccgcaacatcaccgtcaacgaggcccagtcccgccgctccggcggcggcggcggaggcgggggctacggcggcgcgcgcgtggcggctacggcggcggtcgtggaggcggcggctacggaggaggtggcggcggcggctacgggcgccgtgagggcggctacggtggcggcggcggctacggcggcggccgtggcggcggcggcggctacggtggcagccgtggcggcggctacggcggcgactccggcgggaactggaggaactgattggtggggcccactcgtggccagttatccttagctatccgtgtcagaatcatcttatcatcgagtcgagtcgttatcgtgtccagtggttctctcgagtcgagaagccctctatccatccatccagtgttaggtgttcttcgtccgtgatgttaccatgaattgagttcgctttggttatggtgtttgaactgcttgttgctatctatcggaatgaaatgaaatagaaaacaaggagaaaaaaaaagagttcgaaagttttgttcgcataccaaaaaaaaaaaaaa

SEQ ID NO: 2519 - DNA, 381 bp, Oryza sativa
  Clone ID: PAT_MRT4530_102284C.1
atgcgccgcggtgtccatgtcggctgccacacggcgaggttctgcgccgatgggagctgtggcggaggcgagaagtggtgggcgtcgctgctggggtggtcgggacaggcggactacatcaacgcgcagccgacgtcgaggaaggaggcgcggccgtcgatagggaacccggcggcggagcagcagggtggtgggaagaggttcagtgtgctgatggaggagaaggcgtggcagccgcaccgacttgctggcatttctccccatgcgccatcatcgaatctgctggcgaatcaccgctcgacgacatggaagtgggggcagcgacgaatggtgttacctgggaggcgctgccggcgaggttcgacatcagctatgagctag

SEQ ID NO: 2520 - DNA, 611 bp, Oryza sativa
  unsure (1)..(611): unsure at all n locations
  Clone ID: PAT_MRT4530_102285C.1
accgctccctcgaggccgccttctccacctacngcgagatcctcgactccaagatcatcaacgacagggagacggggaggtcacgtgggnttggcttcgtcaccttctcctccgagcagtcgatgcgcgacncatcgagggcatgaactgcaaggagctcgacggccgcaacatcaccgtcaatgaggcccagtcccgccgctccggcggcggaggcgggggcttacggtggcggcggcggctacggcggcggccgtggcggcggcggcggcggctacggtggcagccgtggcggcggctacggcggcgactccggcgggaactggaggaactgattggtggggcccatcgtggccagttatccttagctatccgtgtcagaatcatcttatcatcgagtcgagtcgttatcgtgtccagtggctctctcgagtcgagaagccctctatccatccatccagtgttaggtgttcttcgtccgtgatgttaccatgaattgagttcgctttggttatggtgtttgaactgcttgttgctatctatcggaatgaaatgaaatagaaaacaaggagaaaaaaaagagttcgaaaaaaaaaaaaaaaaaagcggcc

SEQ ID NO: 2521 - DNA, 282 bp, Oryza sativa
  Clone ID: PAT_MRT4530_102286C.1
atgaccgtcaacaatagccctagtccagtttatatgagattgatgatgatgagaatagattacaaagagagtaaagaaacaggcgataccgacgagatcgtggtcgaggggttcgacaagatctcccggcgagttggctccgtgtactccggcttcgtaaactttggtgggggtcccttttatatcgtggaataccttaacctccaagcggactacttaacggagccacctgcaaaaatcttattttcgcaggcgaacaagctaactacgcgctgtgagtaa

SEQ ID NO: 2522 - DNA, 833 bp, Oryza sativa
  Clone ID: PAT_MRT4530_102287C.1
gttggcttttcctccccctctttaccttttcctcctcggttcggttccgtggttcgtctagggtttagtgggttgagatggcggcgccggatgtcgagtaccgctgcttcgtcggcggcctcgcctgggccaccgacgaccgctccctcgaggccgccttctccacctacggcgagatcctcgactccaagatcatcaacgacagggagacggggaggtcacgtgggtttggcttcgtcaccttctcctccgagcagtcgatgcgcgacgccatcgagggcatgaacggcaaggagctcgacggccgcaacatcaccgtcaatgaggcccagtcccgccgctccggcggcggaggcgggggctacggcggcggcggtggcggctacggcggcggtcgtggaggcggcggctacggaggaggtggcggcggcggctacgggcgccgtgagggcggctacggtggcggcggcggctacggtggcagccgtggcggcggctacggcggcgactccggcgggaactggaggaactgattggtggggcccatcgtggccagttatccttagctatccgtgtcagaatcatcttatcatcgagtcgagtcgttatcgtgtccagtggctctctcgagtcgagaagccctctatccatccatccagtgttaggtgttcttcgtccgtgatgttaccatgaattgagttcgctttggttatggtgtttgaactgcttgttgctatctatcggaatgaaatgaaatagaaaacaaggagaaaaagaaaaaaaaaaaaaaaaaaaaaaaaaaaaaaaagaaaaaaaaaaaaaaaaaagcggcc

SEQ ID NO: 2523 - DNA, 2450 bp, Oryza sativa
  Clone ID: PAT_MRT4530_102288C.1
tcatcctggtcctgaatttgaaggatgagcatacacactgccttgaacagcaggcttctgctgctgttgctgccgagcctgcagctgctgcctctgcccttcaataccaagcccaggtataggagcttgatctaatatttttttttttattttacgtgaacaatggcttttgcattcaccaactcgtgagataaatatacaggcttatacaaaaggacggctgccaacaacgtggacctcgcggacaaaatatacaaccgggcccacactggggtaacattttgacaacaaaagaaatttgccgttacaagaaccactccctcagcaatctagaatctaaccaagctgagaggtggagccaaaatggcgcggaaataattatctacctggcattgagactacaattagctcaaagtttggggaaatgaagaaaccgctacccgcgccgcttccacagcacgaacacctgtacagtaactttacaaaggggtaagaattttctgcaaaagctaccagcctaatttcaacatcatcctggtcctgaatttgaaggatgagcatacacactgccttgaacagcaggcttctgctgctgttgctgccgagattgcagctgctgcctctgcccaccaataccatgcccatgtataggcacgccacctgacattttcgcctttgcaacatgccttggatagacactgacaacagcatttcatgccatacaaaggtctctagcggcggcatcgcctgcactatggtctatcatgttctggccaggtcaaagcatctgcattgtatcgcgtggcctaaacataatacttccatggccaggtatggtaccaggatgaacattcaccgtgttttgcatgccttgcccattgttgggaagcatgtttccaggtgaaaccatatttagcattcctgaggaaccaagccttggaaagggcggcctggtcactggagtaccacgatttagtccagtcatcacccccataccatgagcaccaggcatcatccgaacaccacgatcaactccagcaggcgcaccaggaacaggcaccccaggttgctgaagacttctgctgttgagcatctgattgtactggatttctttgttgctcatcaccctgcagagaggtaggtctaggcattccgtacctctgagaatccctaggagtatttggtgttgaaggtgatggcaaagtattgcctaaaaccataccaggagaccatggtagcctatcatctgcctatgttcttccatgttctggccaggccgaagcatctgcattggatcgcgtggcctcaacatagtatttccatggccaggtatggtaccaggatgaacattcaccgtgttttgcatgccttgcccattgttgggaagcatgtttccaggtgaaaccatatttagcattcctgaggaaccaagccttggaaagggcggcctggtcactggagtaccacgatttagtccagtcatcacccccataccatgagcaccaggcatcatccgaacaccacgatcaactccagcaggcgcaccaggaacaggcaccccaggttgctgaagacttctgctgttgagcatctgattgtactggattctttgttgctcatcaccctgcagagaggtaggtctaggcattccgtacctctgagaatccctaggagtatttggtgttgaaggtgatggcaaagtattgcctaaaaccataccaggagaccctggtagcctagtattcatattaccagtaggaagggtggggccaatggaactgggatggtttggaagcattaaaccacttgcatgagatcccgagtaaccaatagaaagtgcatccgggtttggagtcattgcatcacaaagatcaagcggcatcaaaatgactccaggtgcacatgcttgagaaagtgcatgaagatgagaagaatggagtgggtttatctgcttgagctcttggctctcaccctttctacgatttggatgcaacttttgaccaaggaatattattttctcgaagtgtgccttaagagtctcttcctcgaacggtccttgaaggcgctggaacaggtgtctagcactaccctttgggatgccaggcaatgtggactgatagtgttgtgatgagcccgagtcatctgcgctatccgcaccatcacctgaacctttttctgtgagaagtttatggcgatctttacactcgttaggccttctatatatacacttcaattgaacaatgctgttcagtgcgtcactaaccagttcccagttttgacccatatcatgtacaagcacaacaagagcctgatcctcaaagctcgaccatggacttccagggcctgagtgactagcagccatctcggcgccggactcattggcgaggtccactgccacggcaccactgtgtccccctcgctcagagcagcggcggccgctcgcaccgccg

SEQ ID NO: 2524 - DNA, 855 bp, Oryza sativa
  Clone ID: PAT_MRT4530_102289C.1
actcctataggggattgggtatttctgagggcggccgggctcgtgctctctttgaggtgggttggcttctcctccccctctttaccttttcctcctcggttcggttccgtggttcgtctagggtttagtgggttgagatggcggcgccggatgtcgagtaccgctgcttcgtcggcggcctcgcctgggccaccgacgaccgctccctcgaggccgccttctccacctacggcgagatcctcgactccaagatcatcaacgacagggagacggggaggtcacgtgggtttggcttcgtcaccttctcctccgagcagtcgatgcgcgacgccatcgagggcatgaacggcaaggagctcgacggccgcaacatcaccgtcaatgaggcccagtcccgccgctccggcggcggaggcgggggctacggcggcggcggtggcggctacggcggcggtcgtggaggcggcggctacggaggaggtggcggcggcggctacgggccccgtgagggcggctacggtggcggcggcggctacggcggcgactccggcgggaactggaggaactgattggtggggcccatcgtggccagttatccttagctatccgtgtcagaatcatcttatcatcgagtcgagtcgttatcgtgtccagtggctctctcgagtcgagaagccctctatccatccatccagtgttaggtgttcttcgtccgtgatgttaccatgaattgagttcgctttggttatggtgtttgaactgcttgttgctatctatcggaatgaaatgaaatagaaaacaaggagaaaaaaaagagttcgaaagttttgttcgcataccaaaaaaaaaaaaaaa

SEQ ID NO: 2525 - DNA, 414 bp, Oryza sativa
  Clone ID: PAT_MRT4530_10228C.1
atggaggttcgtagtccttctagcaggagtcgcaatgcgagagtgactgaaaagccgggctgtgacaaagcccatgtgttgggtgcgttacggagtgcgagattgaaagcatattccactgcagtattaggaaaggacgtgtgtgagatcttgcccgatgggtggagagatcattatgattttggaaatatggacaatttggatgcgagggtaacacgtaccaagcgagacttgggccacattgacttagtcgatgtggagataccacatgagaacattcccgaggagggagaacccgaggagatgccttatgaactgatccccagtcgatacctgtggagtatagttggaccgtcgcagcttcgctttcgctaccatatcacgtcctttagttttcatattgtatcggactag

SEQ ID NO: 2526 - DNA, 591 bp, Oryza sativa
  Clone ID: PAT_MRT4530_102290C.1
atgtccgcatcaagcccatgtgaaccagtggggcgacagttgggaagaacgctgctgggttttggcgtgtgtatatgtggcatgtgctggaaggttgtgcccgcgattgggtcaatgtgcaacattggatggtccttctacccatgtgtcgcagtcgagggttgtggtcttggtcgcgccggcgaccagacatcttgcagtggtcggccgatgaaggggcatcggttctctggttgtctcgtgcttgcgaaagctcagccagttcttttggccggcagcggcgacgtctttggacgccgcaaacctcttgagggcgctgtcgaggccgcgcgggagcttggtagtcagcagggactccacgcttcgtgcgctggaggagatggcccgtcgccatccgaggacgccggctgcctcgcccgcgccgttgcggtcatggcgatcgccggcgacttgtttgccggagtcgtcggtggaatcaccttgtatggtgctggtgcatcttggtgtctgtgtccatcccacgggtgcaagcactacaacctgctcttaaagaaggtgttggtctctgggaggaaggaggagacggcgtga

SEQ ID NO: 2527 - DNA, 879 bp, Oryza sativa
  Clone ID: PAT_MRT4530_102291C.1
ccacgcgtccgctttgaggtgggttggcttctcctccccctctttaccttttcctcctcggttcggttccgtggttcgtctagggtttagtgggttgagatggcggcgccggatgtcgagtaccgctgcttcgtcggcggcctcgcctgggccaccgacgaccgctccctcgaggccgccttctccacctacggcgagatcctcgactccaagatcatcaacgacagggagacggggaggtcacgtgggtttggcttcgtcaccttctcctccgagcagtcgatgcgcgacgccatcgagggcatgaacggcaaggagctcgacggccgcaacatcaccgtcaatgaggcccagtcccgccgctccggcggcggaggcgggggctacggcggcggcggtggcggctacggcggcggtcgtggaggcggcggctacggaggaggtggcggcggcggctacgggcgccgtgagggcggctacggtggcggcggcggctacggcggcggccgtggcggcggcggcggcggctacggtggcagccgtggcggcggctacggcggcgactccggcgggaactggaggaactgattggtggggcccatcgtggccagttatccttagctatccgtgtcagaatcatcttatcatcgagtcgagtcgttatcgtgtccagtggctctctcgagtcgagaagccctctatccatccatccagtgttaggtgttcttcgtccgtgatgttaccatgaattgagttcgctttggttatggtgtttgaactgcttgttgctatctatcggaatgaaatgaaatagaaaacaaggagaaaaaaaagagttcgaaagttttgttcgcaaaaaaaaaaaaaaaacccccccac

SEQ ID NO: 2528 - DNA, 956 bp, Oryza sativa
  Clone ID: PAT_MRT4530_102292C.1
tttgtcatgactgaaaagttttcgaccaagccttattttttttatggagttgattttccttattggtgcaaaaaaatgaatcttttattatctcaaagttatgatatttggcaaaaagttgataacccctacgagatttagtgttgttctcaaagttgattttgaaaataattgtaaagcttgcaatattcttgttaatggaatttcttgttcgaatttcgatcgggtttcgcgtcttgacactgcgcttgagatttggatgtctttatttgattttcattaaggtacttccaataccaaggaattacgcaaagaagtttttaaaaagaattacataaaatttgagatgaaatctggagaagctttagatgactattttgcaccttttaacaaagttttgagcaatcttcgatttattgatgagtcttttgatattaacaattcttaatttgaaattgctcaatatcttttgaaaagtgttgatatgtaaatttgggagatgaaagtcactttgattcaaaagtctggtgatatgtcttatttgagttttgaattctctttacactaaactgaaaactcataaaatgaatattagttacctcaagactgatttgaaatctactcctttggttccttcttcgagcttccattgatgcttcttcttcatcggtttttacgagttttgagtgccatgtatgatgatcaatttgagcaactaggtgaggaaaccttggttttgattactaacaagttctcttgagctttgaaaaattcgaagaacatgaagcgaggttgactagttcggtgctttgagtgtggagttcaaccacatcaagtacaattgtcgtaaacacaagaagacgatcaaggaggaggaagttgacaagaagcataaacaagaaagaaaaaatatccattttgctcttgcggaagatcaggggaaaaaattactagct

SEQ ID NO: 2529 - DNA, 1721 bp, Oryza sativa
  Clone ID: PAT_MRT4530_102293C.1
cgcgcacgcgtcctctcccgcgtcctccgcctcctcccgcgcgctgcgtacgtgagagcgccatctcctgcttgcagcagctagcaagcagcaggcgcaacagtattactgcagatagagctctcgaccgattgatcgattgctcactgccatatacatgatacttacataccgacgtactacacacagagatagagatcggagggatagctattgctattgctagccatagtatagtagttccctttgctcctgctgctgctttgttgcttgcttccctacacttctctctctcagctgctagctgcgcatataattattccctcgccaagctatatatatttgcctcctgccttcttcccgagctcacacaatcgccaacctatacagatatatgtgctagctacttccaagttcctacctatcaatttctctcctcctcttcttctctgcatcaatctgcagcttaattcttagctatgtacatatagctagctaccacttccaaaatactccacaggcaccaggcacatatagatatagctagattgctatagacagagagatcatcaaagaaatttagcaggtgatagccacatggggttgagggacatcgagctgacgctgcctccggggttccggttctacccgagcgacgaggagcttgtctgccactaccttcataacaaggtggtgaaccagcatcgcttcgccggagttggaggagccgccgccgccggcggcggcaccatggtcgaggtggacctccacacccacgagccgtgggagctaccagatgtggcgaagctgagcacgaacgagtggtacttcttcagcttccgcgaccgcaagtacgcgacggggctccgcacgaaccgcgccaccaagtccggctactggaaggccaccggcaaggaccgcgtcatccacaaccccaagctgcacgccgccgcccaccgccgcgcctccatcgtcggcatgcgcaagacccttgtcttctaccgcggccgcgcccccaacggcgtcaaaaccaactgggtcatgcacgaatttcgcatggaaaaccctcacacccctcccaaggaggattgggtgttgtgcagagtgttctacaagaagaaggcggagacggagacggagtcgtcgtacagcatggagaacgagcaggaggcggtgatcgccatggcacggagcgccgcggccatcaaggcgggtggatgctactccaactcctcctcgtctcacgacccggccgccgccggccatcactcgcccccgccgttcccggcgtcgctcgccgcctgcagcagcagccaccactacagcagccacccaccgccgcctcccgatcaccaccaccaccaccacatgcccgtcaccggcggcggcggcggctccctcaacgagttcatccccaccaccagcatggcgctgtacagcagcatcttcgacttcagccagcatctcgacggcggcgccgtggcggcgtcggcgtcggcggcgggatcgagggtcgacggcggcgagcagtgcggtctgatggagctagggctcgaggagcactacaattacaacggcctgatgccgatgtgacgatccaccataggtgtcggtgctgctagtgctagcttagctagcttacacacactcccagctgctagctagctgcagttctgcagcgcagctagctagcgtttattattaataacctcttttcacct

SEQ ID NO: 2530 - DNA, 136 bp, Oryza sativa
  Clone ID: PAT_MRT4530_102294C.1
atggcctttccttgcagcccgcgctacacactgaccccccttggcttgctggggcctccccgtgctaaccctggctctatatggactatcgccccccgctcgctgacgaagaggacggcgccccttgctgaggatg

SEQ ID NO: 2531 - DNA, 418 bp, Oryza sativa
  Clone ID: PAT_MRT4530_102295C.1
aaaatcaaaaaacgatcaacaaacggggggcactctaaacaaggtagcagacatcatcaaatcaaagattaacaattaaacaagtctatttatgactatgacaccttagtttccaccagactcccttcagtcctaatgcttgtacacaatgaatcttatcacctgcaccttcctgaccttatccaagcccattatacagacaaatgcatcatgctacaccttcttatcctactcgagcttcttgagcacctgagtggcctcattgcacccgaacatggccaactttcacatggtccaccccctgccatcctagtatccaaaagatctgtagctcttacggaagaccaatactacctttctcaactatacgcggtcacccacttctaactgatcaactactcaatctccttcatgaggt

SEQ ID NO: 2532 - DNA, 3171 bp, Oryza sativa
  Clone ID: PAT_MRT4530_102296C.1
atgggttgccaccaggtcgtcgttacgggagttcttgtgctggttttggccgcctccgtcagcgatcgtgcagctgcgtgcgtcgaggccgagagggaggcgttgctgtccttcctcgccgaggccgcgccgccggcaggcgatggcatcgtcggcgagtggcaacggtcgccagactgctgcacgtgggacggcgtggggtgcggcgacgacggcgagatcacgcgtctgtcgctgccggggcgtgggctcggcgggacgatctcgccgtcgatcggcaacctcaccgcgctcgtgtatctcaacctatccggcaacgacctctccggccctttccccgacgtgctgttcttcctgcccaatgtcaccattgttgacgtcagctacaactgcatctccgacgagctacctgacatgctgccgccggcggcggcggacattgtccaaggtggcctctcgcttcaggtgctcgacgtgtcgagcaatctcttggcggggcagttcccgtccgcgatctgggagcacacgccgcgcctcgtgtcgctgaatgccagcaacaacagctttcgtggcacgatcccgtccttgtgcgtgagctgcccggcgctcgccgttcttgacctctccgtcaacatgctcaccggggctatctcccccgggttcggcaactgctcgcagctgcgcgttctcagcgccggccgcaacaacctcaccggcgagctccccggcgacatcttcgacgtgaagtcgctgcaacatctccatctcccgtctaatcagattgaaggccggcttgatcatccggagtgcatcgcgaagctgaccaatcttgttacgcttgatctgagctataatctgctcgccggcgaactgccggagtcgatcagccagatcacgaagctggaagaggtccgactcattcataacaacctcaccggaaaactcccaccggcattgagcaactggaccagcctccggtgcatcgacctccggtcgaacaggttcaccggcgacctcacgggcattgacttctccggcctcgacaacctcaccatcttcgacgtggactccaacaacttcactggcaccatcccgccgagcatctactcctgcacggcgatgaaggcgctgcgcgtcagccacaacctcatcggcgggcaagtcgcgccggagatcagcaacctgaaagagctccaattcttgtcgctgacaatcaactccttcgtcaacatcagcggcatgttctggaatctcaagggctgcacgagcctcaccgcgctgctcgtgtcctacaacttctacggcgaggcgctgccggacgccggctgggtcggcgaccacatcaagagcgtccgggtgattgtgatggagaactgcgcgctgacgggcacgatcccgtcgtggctgtcgaagctgcaagacctcaacattctgaatctctccggcaatcgcctcaccgggccgatcccgagctggctcggcggcatgtcgaagctgtactacctggacctgtccggcaacctcctgtccggggagataccgccgtcgttgaaggagatacggttgctgacgtccgagcaggccatggcagagttcaatccaggccatctcccgctcatgttctccgtgaagccggacaggcgagccgcggatcggcagggccgcgggtactaccagctgtcgggcgttgccgcaacgctcaacttgagcgacaacggcatcaccggcacgatctcgccggaagtcgggaagctgaagacgctccaagtgctcgacgtcagttacaacaacctctccggcggcatcccgccggagctgagcaacctcaccaagctgcagattcttgacttgcgatggaaccacctgaccgggacgatccctccttcgctcaacgagctcaacttcctcgccatcttcaacgtcgcgtacaacgacctcgaggggccgatcccgaccggcggccagttcgacgcgttcccgccaagaagcttcaaggggaatccgaagctctgtggtctggtgatttctgtcccatgtagcaacaaattcgaggctaggtaccatacttcgtccaaggtcgtggggaagaaggtcctgatcgccatcgttcttggagtttcatttggtctggtcattctcatcgtctccctcggatgccttgtgattgccgtcagaagagtcatgtctaatggagcggttcatgatggcgggagaggcgtgggtgcctcactgttcgactccatgtcgtcggagctgtacaatgataatgatagctccaaggacacgatctttttcatgtcggaggtcgccggcgaggcggcgaaggccgtgacgttcgtcgacgttctgaaggcgaccaacaacttcagcccggcgaacatcatcggctcgggcgggtacggcctggtgttcctcgccgagatggaggacggcgcccggctcgccgtgaagaagctgaacggcgacatgtgcctggtggagcgggagttccaggcggaggtggaggcgctgtccgcgacgcgccacgagaacctcgtcccgctcctgggcttctgcatccgcgggcggctgcggctgctgatctacccgtacatggcgaacggcagcctcgaggactggctgcacgagcgccacgccgcccgcggcgtcctccacatccacgagcgctgcaagccccacatcgtgcaccgcgacatcaagtcgagcaacatcctcctcgacgaggccggcgaggcccgcgtcgccgacttcgggctggcgcgcctcatcctccccgaccggacgcacgtcacgacggagctggtcggcacgccggggtacatcccgccggagtacggccaggcgtgggtggcgacgctgcgcggcgacatctacagcttcggcgtcgtgttgctggagctgctcacggggaggcggcccgtggagacattgccgccgccgcaggggcagcagtgggagctcgtccggtgggtgatgcagatgcggtcgcaagggaggcacgccgaggtgctcgacccgcggctgaggggcaatggcgacgaggcacagatgctgaacatgctcgacctcgcatgcctctgcgtcgactcgacgccgttcagccggccggagatacaggatgtggtcagatggctcgacaacgtcgacaccattggcagagcagacgtctga

SEQ ID NO: 2533 - DNA, 609 bp, Oryza sativa
  Clone ID: PAT_MRT4530_102297C.1
atggattccgacagcttgccgtcctttggcaagacgcggagaatagttgccgacgagcgcctccattggtggcggtcgtgctcacgtcaacagctcagggggtggcatgatagtgcaaagggattgctaaaatggaatctagagaagcagcgcgggggcggcggtgctcggcttggtgcagcgagggcggaggatggatggagaggtgtggagtcgatcgtgcacaagggctgggaggaatggatgagctcgggcaccgacatcgccatggatgagctcgagctttggatatggctagggcggcagaggattggcttgaccgcgtgtgaaatcggctggcgacgtgttggcgccaatccgggcgcgacgcacggcggcggcgagggtgcgcacggcgtcgagcggcgattccttgcggcggaggtcgtcctggctttgtcgtcgtcaagattggtgcggcagcgacggtctaagggcgtcggacgggcgacggtgcgccaaggcggttgggcacgcgcaagcggccccgaggccgatgcgcggcagctcggcgcgcggcgaagtcgaacgccagggcaacgcgcgcaaggggagaagaaggccaactaa

SEQ ID NO: 2534 - DNA, 1857 bp, Oryza sativa
  Clone ID: PAT_MRT4530_102298C.1
attcggcacgagggagagaactagtctcgagttttttctcttttttttttttttttttttttttgtgtttttttctaatcatttacagggacgccttttattgacgacgaagaagagtgaacatttacatggacgagtttgatactactattgtacagcattggctagcgctatacagaaacctatatttcaataaatcttcagcatttacagggtcgtcagttcaaggctatctgagacgcagacgtgacgatggaccattcataattggtaatactggaacatatgggggccaggaattggctatttcatatgggatgttggcccctaagctgagaggaaggaagacattgctcttctgaaatccagagagttcagagcagatcctggtaaagggttaccttcgggaacccacaaaccacctctgtggggaagcataatctgtttgttggtactcttatcaccaccacttgactccgcagaaggatcttctttctttttctttacaaattcaaagaactccgcaacttgtcgggcatattgtcgtttggcttcaatatccttgttaaaatcaatgtcatgttcgcagtcgaggaccagagcaggaaccttctggatactagaatgcatatgatctccttctaagtagaatactcgttctcttatatccggaggcaaagagccctccatatggactggaacttgactgaccgataatacaccaggaccttgtcctttggaaggaagcagccagctctcatgtttctcatgcaaacctcgaaggtaatcaagagtaacaccaccctcttcagatcttttccgaaccatcattcttttgtggcaagtgtcgggactagctcttagataaataaaaccatctggaataagtcctgggagtgatgacaccactgggtcaaaccaggagtcatagatgctgatctccatctcgttcatccagttggcttcatggacagcacgaacaaaaaccattctatcactgaaaacacttctttccatcaacctgagaggctttatgccacttgaagattccttctcttgcatgacccttgtaacaaacacataattctggaaagtgtatgcatacctctgtggctcagcatagaaagcatcaagtatgttgaagtgatcagggccaacatcttgccatttagcaataggttcaggcactatctctacaaggtcacgtaattcgatggtctcattggcaattctttgaaggaatgtagtttttccgacactgatgttcccttccacacaaaaggtcagcctcttatttttggaaacatttggtgagtcagttcctttcagctcttcatcaacactttctttaatgaacaaagttatactctcagcatgattcttgtgtatgatgccaacagaactttgcaagaactcaaccattttctcattggacttgccaaagaacttatccctgtacagctgcttgagctgtgccacgccatcgaatcccttgtccacgagcttcctcaggttgcgcggcccgactccaggaatcgcgagcagctcgccgctccccatcgccgcatcgccccgacttctctgcctcctatccaccaccggacggctcccacctcccccggcgacgctctgctcgccatcctcctcggcatcatcatccccgcacctcttcgccgcatcggcggagcaggagagccccctcctcgagcgcagcagccgccacggggagaggcggaggcggaggcggctagggtttggtgggcccgaacgcgcggcgagaagcgggcccgcctgggtggtgagcagcggcggggcgccgaggaaggaggcggcggcgcggggtacgagcctgtgcat

SEQ ID NO: 2535 - DNA, 400 bp, Oryza sativa
  Clone ID: PAT_MRT4530_102299C.1
aggaattaaaatttacttatggttttttttttttttcacaggtcacatggaaatcaaaagggaagtagcaaaaggaaaagctgttttacactcgacagggtaacaaactaagaggagcaacacaaggatacaagagggagagatttaggccttttttctgggggtttggaaataaaacttttccccttttggtacccctaaaccccaacccaagggtagtagtaaggcaccccacttaaaggataccgggccattttttacaaaaaatggggggctcctttggatcaatcgaatcagaacattattatcatcatttacaggttggcatgctcggcggcgaagccgcccttgccggcggggccgccacccggggcgcccccgggcctttggtaaacggggg

SEQ ID NO: 2536 - DNA, 156 bp, Oryza sativa
  unsure (1)..(156): unsure at all n locations
  Clone ID: PAT_MRT4530_10229C.1
aacagcaaatatacaacttgttttaaaatcttttttacaattaggttctcggatgcgcacagctaagncaaacatcacacgtaagaacggtcagctagnattaaatccaagcacacagnaaaggcacttggaaagaacacaggnnagcagccagca

SEQ ID NO: 2537 - DNA, 437 bp, Oryza sativa
  unsure (1)..(437): unsure at all n locations
  Clone ID: PAT_MRT4530_1022C.1
cggccgggnatcgtcaggtcaggcacttcaccaaccctcgggctcccttccgccgccctccgccgccgcatgcgagccatcctcgccgctgccatgggcgcccagaccctcttgttctccggcaccgagcctccctcctgcctttagcagttcccagtatttggccgcgcttttcactcgagacgcctcaacgggggggcgtggacaggaagaaacgcnaggcagtggtagcncacacccctccttatatcgnagaccaggcgctcctgcagcgacaatgttgcatgcagctacaaggaatgaggcctaagtgccactgtggcaccagtttgccagatgatgcagagcaatgcaacaagttnatttgtgcnaggantcggggcagcatacagatgaaggaaggatgggggatcgcagaaagcctatacattgtggca

SEQ ID NO: 2538 - DNA, 852 bp, Oryza sativa
  unsure (1)..(852): unsure at all n locations
  Clone ID: PAT_MRT4530_102300C.1
ccacgcgtccgccatcttcgatcgcagaaacccgcggtgcgtagcgatggcccggccacgcctcctcctcctccctctcctcgccgtcgccgcggcggtgctctcgtcgccgctcggccgcgcgctcgccaagacggccaagaagagcaacgacatcgtcaatggcccactgctcacctccaagatcaacgccaagcgcacgctgatcgtcggccccgaggacgagttcaagaccgtgcagtccgccatcgacgccgtgcccgtcggcaacaccgagtgggtcatcgtccacctccgctccggcatctacagggagaaagttatgatcccggaaaccaagccgttcatcttcgtgaggggcaacggcaagggccggacctcaatcaaccacgagtccgcttcctcccacaacgccgagtctgccgccttcaccgtgcacgcggacaacgtcatcgtcttcggcctcagcatcaggaacagcgcgcgcgccgggctgcccaacgtcccggaggtgcgcacggtggccgccatggtcggcggcgacaagattgcctgctaccactgcgcgttctacagcccccaccacaccctcttcgacgtcgccggccgccactactacgagagctgttacatccagggcaacatcgacttcatcttcggcggcggccagtccatcttccaatgcccggagatcttcgtgaagcctgaccggcggacggagatcaagggctccatcacggcgcagaaccgcaagcaggaggacggcagcggcttcgtcttcatcaagggcaangtgtacggcgtcgggcangtgtacttgggccgcgccaacgaaggctactcgcgcgtaat

SEQ ID NO: 2539 - DNA, 591 bp, Oryza sativa
  Clone ID: PAT_MRT4530_102301C.1
ttttttttttttttttttttttttttttttttttttattttttttttttacttttgggttttactctgtgttttaccttttaataccggaccgggaccggcaggggcacaaggggggccgaaagcgagccaaatcaaagcacgccgaaaggggggggagaactgccaccagggggaaatgggaaaacacggagaagcccaaaaaacagacaagcctgagcagaaaggggaaagccgggggggcccaaagagaaaaaaaacggaaagaaaaaaagggaaaaaaacgggcggggaaaaagggggaaaaaaaaaaaaaaaagggggaggaaagaaacggccaaagcacgaaaaaaggaggaaagcgcacggggagcaaaaaaggacaaaccccccaccagggggagggggaacaactgagagccccccaagggctggtactaacagagagggagaaagggggcaaaagtggtttccccaaacaggcgaaaaaaggggaaaaaggggggaaaccgcgggatatgaccagaacagaaaaaaaaaaaataggggggggggggggacggggaaataaaaaaaaaaaaaagcaagcggg

SEQ ID NO: 2540 - DNA, 407 bp, Oryza sativa
  Clone ID: PAT_MRT4530_102302C.1
gggaattaaaatttacttatggttttttttttttttcacaggtcacatggaaatcaaaagggagtagcaaaaggaaaagctggtttacactcgacaggggaacaaactaagagagcaacacaaggaacaagagggggagatttagagcttttttcggggggtctgcaaataaaactttccccttttggtacccctaaaccccaacccaagggagtagtaaggttaccccacttaaaggaaccgggcattttttacaaaaattggcgggctcctttgaatcaatcgaattagatcattatcatcatcatttacaggttggcatgctcggcgttgaagccgcccttgccgtgggggccgacacccggggggcccccgggcctttgggaaacgggggaaatgatggggtt

SEQ ID NO: 2541 - DNA, 210 bp, Oryza sativa
  Clone ID: PAT_MRT4530_102303C.1
atgacttacattgtgaaacggaggaagtaccattttcaagttgcgcatatctcacgaacgcgagggcttcgtttttacgagagcacgcggctggtcaagataaacagtactccagctcgattggcacaaaaaaccggcaacattgtgtcgtttgcaagagcacagcaaatcagcaatggggtcctcctctttggacccctgttactactg

SEQ ID NO: 2542 - DNA, 451 bp, Oryza sativa
  Clone ID: PAT_MRT4530_102304C.1
actcttacttttcattttcctcccctcatcttctgatacttttcggtcttccttttttctttttactttttcctctattttttcgcggaaaaacacccaacaattcaactctttcttttttcccacccccccccccccttaaaaaacatacaaacccccccctttttttttccccccctctttttcgctcccccacaacatcaaaaggaaaacccgcgttaacccctattaaaccccaacaggggggccccccccttagggggcgcccccccctggaaaccccccgggggggtacccctcgcgggcagaaaaacccccccggttctccatcccaccgccggccccccccaccgcaccgggccgtcacacatccccgccggggtgggggggcacaaaccccacaaccccggggccggagggggtcacgactacacaaaaaacttctcccccc

SEQ ID NO: 2543 - DNA, 186 bp, Oryza sativa
  Clone ID: PAT_MRT4530_102305C.1
atggcgaggcatcgtctccgatggccgcacggcggcttcgacaatggagcaagtattgaggaggaggtgctggacctcgctggtagccacacggcggtggggtgtagacaacgtaggattgggcaggaggcgctgaacctcaccggcggccacacagcagcggcaacaatgtggcagaggtgctag

SEQ ID NO: 2544 - DNA, 1252 bp, Oryza sativa
  Clone ID: PAT_MRT4530_102306C.1
atggtgctgcgcttccgtgctgtgcagcggttcaacgacaaaatggggcagaactcggtgctgcagcctcgtcggttccacaatcctccaatagtgttgccaaagaagatggttcatcgtgcaagccttcacaaatccgccaatgtcccaacacaagtgaaggctgctgtcttagcggcactaaagagaagtaatggacggctcagcaatggcgtggcagccattcagcgtagcacactgcgtgatactgtcatctggtcttgccaaggagatcacatcgtcactgccaatgtcatcctcgtgtggcacatcggcacaagcctttttgagatgaagtacctgcggatcaaatcttctccacggactgctgatatgatcaccgccacccatttgtcgcagtattgcgcatacctagtggccgccgtccccgagcttcttccgaacgacgctacatggaccaaggcgcactgcaaggaggtggcgagagacatcaagaaagctctcgatggagaaggaaatgactttaatcattttgtcgatgctcttggtgcgagctgcaggcacaaagttttgcagcaagggtcaaagctggcgaaacaactggtaggagaagttggaaggctcgaagacggagaaggagagaccaaaggcgtaggcgaggcagcgttgtggaagctcctggcagagttctggtcagagatggtgctctacctcgcaccgtcagacaacgtcagaggccatgccgaggctctagctcgcggtggtgagttcatcacactcctgtgggcgctgctgctgcatgccggcatcacttcacggcccggcagtgtcgccgagccttgagcccggcaatgtcgacgaggcagccgcaggtgatatgtaccgctgcgttagttgtacgtttttcaagttctatgtattcgcagcaaacattcgctcttttgagctaactgtagctgttagtgtcattgagaagattaccatgagttactatgcttgtatttttagggaaatttaactatttgccactcttgtgacatggcaattaacgatttgccacaccgtatctatgacatgtggatcctcatgtgtctattacatgtgggcctagtggcaaatcgttagacaccatttgtaagagtggcaaatagttaaaagccccgtatttttatgttaatttgagatagtagtagaaattgtaaaggtacatcatgtagagggaataagctcttctgattagattatttttgtc

SEQ ID NO: 2545 - DNA, 1368 bp, Oryza sativa
  Clone ID: PAT_MRT4530_102307C.1
atggaggaggccgaggggaggcgggtcaccagcccggccatgctgcggcagcgcaggcagctgaggtgggagatgtgccgcgccgcgtacgcgctcgacgcgctgaggatacggaacgccgcggcggcggcggcgagccgccgtcgtcgtcgccggtgccagccgctgctgctcagcttgggcggcgacggcgacgccacggtcatggagagcctggaggccgcgctgggcggcgccaaggagctcgtcgtgctcctggccggctgccctcgcctgagccggcagccgtacagcgcctacctgttcatggagcggtgcatgtttgggcggcagatggagaaggagcagatcgtcgacttcctgctgcgcccggcgtgctcgtcggccggtgacccgaatcccggcgtcctccccgtcgtcggtggtccggaggtcgggaagcggacgctggtcgaacacgtctgcatcgacgagcggattaggcagtacttcgccaagatccaccgtctcagcagcgatgatctgatggcggccggcgacgacgacgagcaccggagattcggcatcgatcctagcgcaaggtcccttgtcgtggtcgacgtcgtcggcgacgtggaagaggagccatggaggaggttgtgctcgtccgttcgccgggagaacggggacggcaaggtggtcatcatctgcaggacggcggagcacgcggcgcgcctgggcacggcgccgcggccggtcacactggacaacctgcgccggcctgagctctggtacatgttccgcgtcctcgcgttcggcggcgccgacccggaggatcggccggagctggtcgccatcgccgcggagctcttcgagggcgtcaagcacttcgcgatgatcgccgccgtgaacgcgcacgccgcggcgctgcgcgccgacatgaccgcgcgttcgtggcgccggatcgcgcgggcggccatcgacgcccacggcggccgcggcgagcacggcccggtcagggacgaggacgactcgtactacttgtacaggccgtccatggacggtccgcactgcctgttctacggcaggcgcaagctgacgacgtggacgccggcggcgagcacgacaccgacggtgacgatgcaggacctgctcagcggccgcgtggtgcccggcgtggacacgccgcgcttcgacgtgctggtgtggcgatctcccataccaccgcactgcagctacgtagcaacgtgcgacatgggaagagcgcagcagttcgtcgtggcttctggcggcaggaggccattcgagaggagaaagccgagcgggaatttggatcatggtgagtgccttaacaagaagaggcggccaatgtatagtggggatggctaa

SEQ ID NO: 2546 - DNA, 282 bp, Oryza sativa
  Clone ID: PAT_MRT4530_102308C.1
atggtgcacaccgcctcggcccgcccaccaaccatcgggacttcaaccgcccctgacctaccggtattggccccgtcgtcggatgctggcttgggcggctatggctgtgcccactccttgaagtcgcgccggcaggcgaggcaactaatgaggcaccgtgcggtggcgtggaggcagaaggcgaggttggagacgcaggcgaggatgatgaggatggtagccttgttggagaagaatgcacacgtcgatggtgaactacgagggaaaaaatcaaatcaataa

SEQ ID NO: 2547 - DNA, 717 bp, Oryza sativa
  Clone ID: PAT_MRT4530_102309C.1
atggacctgccccagccaatgggaatgacgcagggagcccaagcccagtggggagtgaaaggctctcctgtcgggctcatcgccgcatccatgtcgatcacggaggctagcctccacttctgctacctccactcgctctccgtcgtgttcctctacttcttctactttctctttgtgctctgtgatacattcaagatgtcagttgcgccggcgacggaagggtccgcacgccgctcggcggcggcggcggcggcggaggaggaggagcggcagcgcaaccggaagaggtcgaaccggctgtcggcgcagaggtcccgcataaagaagcagcagtacgtggacgggctggccgtggaggcggagcagctccggcgggagaacgacgccatgcgcgccggcgccggcgccgtgctgcagcggtgccgcctggtcgagcaggagaaccgggtgctcgccgcgcacgcgcgcgagctgtgcagcgcgctccagctccgcgcctcgcagctccgcctgctcggggaggtggcaggcgtgcccctcgacgtgcccgacgtcgccgaccacctcgtgcagctctacggcggcgacctggggatgacgccgctctcgccaccgccgctgctgccgccgctgccgccacagatcgagatgctgtacttccagccagactcggtcatggatccggtcagtatgctgcagggctacgaaaacatatga

SEQ ID NO: 2548 - DNA, 396 bp, Oryza sativa
  Clone ID: PAT_MRT4530_10230C.1
aagcttgaggtggaacgtcaagaccccatggagaggatgagattcgccttgtatgcgtgggaagatcattttcagccgtaaatcttaagaaggtaacatctgttgcgccggaaggtgatgccaaggcccgccatgttgggaaatatgttccgtgcgaatgcaacatctctcaaggaaatgcatatcaacacctattagatgctgtaacaacgcttcccttgtatctgttggatttgatttccacgtggagacctaaaaatttagggacattactcatttgatcctgttttgaagtctaactaccaatgacactactttaggtttgctcatttgaatatcaaaatggaccttatattgtgaaaaccaaatgatagtgttaactaaggggcgaattgt

SEQ ID NO: 2549 - DNA, 992 bp, Oryza sativa
  Clone ID: PAT_MRT4530_102310C.1
cccgggcggcgggcctgtgcccatcaattaaatcattaatcataagcttttctaagaagaattggcagacctacgatttactgggcagaacttgttcaaagcatgatctcttacaaccttatacttaagagtgaaaagaaacaaacaaatgaacatgatgaacatatatcatatatatggatcatagctcacagcaacacaaccaaactagacaagacaagtacgtagtaaagtatgctttgcaaagccctgtttggagcgcgatccaaacaaaaattcttgcgtccaaatacaggagcctagcctagttgtactccataggactcatgggaatccctcgctgatcaccgccgccgacaccccggaatcccggcagagcctccccacagcctttaccgcccctgccattccgggcccccgccgccggggcccgggctgctcccggtcgtcgtgccggtggacaacggcttgcccaagggcaagggcgtcgaggcctgcggtccggcccccgccgccccaccgctccccgtcgccggtatggcagcgtcgtccgtgggccgggtcgccgatccctacatgttgatgcttttgtttgcctccagctctaggtttctgtctaggactgttggctttgctgaattttttccaggttcttttgcttgtgttgtgcgcggtacgatggcccccttcctgggcttcgcttccgagcgccccgcgcgttggaaatcttacctgcttgcacgttgcctgatacgatcagaagcaggggaatcccccgctgatgaccgccgccgacatgccggactccctgcagaggcagtccagcttccaccctggcagctcgccgccgccgccggagcccggcctcttctcgctcgacgcgggggtggacaacggcaagccaccggacgaatggcgtcctgcccgcctcgcaggaggccgcagcgccgccgctcgccgacgccgggacgacggcgtcgtggggtgggctg

SEQ ID NO: 2550 - DNA, 243 bp, Oryza sativa
  Clone ID: PAT_MRT4530_102311C.1
gcaggcgcacactggcatccagtgctggcgcaagtaccaagtggatctcagttgctcatatcaatgtgacacaatgttatgatgctgactagtagctggtgtcaccagttcatgtgagagttcacattcgctactatgagttgatgggggaataaaattgtaccgtgttagaatggtatcattttgggaaatgcttaattatgaataaaacaagagttctctcaaaaaaaaaaaaaaaaaaaa

SEQ ID NO: 2551 - DNA, 457 bp, Oryza sativa
  unsure (1)..(457): unsure at all n locations
  Clone ID: PAT_MRT4530_102312C.1
gtnctttttctctcctgtcctgcccccgcggtggcggcggggtggctgtttcgccggcgcggtcggtgctggccgtgcgccctcatgtgttggtccgggcctactccgtccacctcaagcgctccggcgtgctggcgctccctgcgtgggttgtcatttttttactgcgacgttctcggcgttggggtcgttatgntccggcctggtgctgctcgcgggctgccttgcttgcgtgggtgatctacctgacgcggggctttggtgttggtggcttccatgcgatctctggtggccgcctgaggtgcggctcacgccccccgcccttctgcgcgcgctgcggtgctgtctcacgctgcattcttccgccggtgctgcagctggtcgtcctcgatgccgacccgccgggtggntgcctccgtccctcccagggggggcgcgctctggccccagtggccgg

SEQ ID NO: 2552 - DNA, 1707 bp, Oryza sativa
  Clone ID: PAT_MRT4530_102313C.1
atgccgctcttccgcgcggcggcgctccgccggctgctctccaccgcggcggcttcgtcggcacccccgaagctatggaaccttccctaccgcctccggcgcgccgccgtccccgccgcgcgcgccgccgtctccgagtacctccacgccacgcgctgccttccctcctcccacgccgacaccatcgccgcgcgctccccgcgctccctgcacgccttcctcgccggcctccccgctgtgcccagctccctccgcacctccgctttcccctccctcctccgccgccacctcgccttccacccgctcaacgagctccccttcttcctcgagtccatcggcctgcccccgaccacgcgctccgacctcatgttcctcgccgaccacccgtccctcctcccagccgtcgccgcgctcgcgcatttcggcttcccctggtcccgcctcggcctcctcttccccaccgtcctcctccgcctcccgcccgacctcatcacctcccgccttgcctctctcgaggcttgcctcggcccgctcccccgtgccgccatcatcgccgcctgcctcgccttcccctcgcttcttgagaacgatctctccagcagtgaccgtctcgtcgacgatcttggcaaggtgtttggaaggctgggccctggtttggggacctccaatgacattgatgctttcttgggggtttgccgcaggacatggatgttctatgatgctggttcagaggtcgggggcattggggaccttgtcggctgcaacaaccagagggtgtttcttgagcttgaggaggagaggattggtaaaatgttgaagtttttcaaggggttggggatggcgggagaggaggtggggagattcttgcttaccaatcccatggttttttatcttgaatttggtgatgttgtcatttcggtgccggagtacctgaggagagttggtttggcagtgaatgaggttaatgcagcggtggagaagcacccgtacgttgttgggaagaacctgctgcagaacctccctggtgtgctgcgggcaatggaactggatcattggttcctggagaagatttctgatggtggggagagtttgcggtatttatttccagattttgtgttggaggatgttagttatgacgttgagattgagcgagcattcttgggagggatgattaagatgaaggctgataaaagagctcagcatattgacggcaagctggaattcttgaagagcattggatatggtgagaataagatagccacaaagataatagccgtactgcacagcaatcgggatactctgcaagagagatttgattgcctcctggaaagagggttggagtacaagatgctgtgtcagatcgtgagtgtattcccaaagattctcaaccagggaaagaagatgcttaatgacaagttgaactatatgactaaggagctaggatactcagtggagtacctcgagttatttccagcatttctgtgctttgatttggagaaccggataatccatgccccaaggatgacaagtgagttgaggccctgctgcatctggccattaacagcatcactgggcatgctccaccactcatcaaagcctgtcgagggtcaccctaatgtgacagggtgttgcagcggcgagcaaaagcaatggccacatcagaagagcgtgcctgttggcccattccgtgattttccattggactga

SEQ ID NO: 2553 - DNA, 416 bp, Oryza sativa
  Clone ID: PAT_MRT4530_102314C.1
tttttgtgtttttatggtttcttctttttttttttgtattatcttttcctaggtttttttttttatttataggtaacattccaataacaagaggagacagagaaccaaccacacaccacaggccattgaactcacccccaccaaaaaaaaagagaaaactcccaaactcaatcgaccttactcccttaaggaaaaagagcagagcctaggaatgcaaagcaaccagaaatatcgcacaaaaaaatacatgggtgaaaccagagaaaggaaacaaagcaaagaaactccaaggcgctcctgtatcagaggctcagccggagatgaaggccaggccactgggtcgacggctcgccctcgacggccaacgggacggagctagccacggagcggaacttgagggcacacagcatcacaag

SEQ ID NO: 2554 - DNA, 180 bp, Oryza sativa
  unsure (1)..(180): unsure at all n locations
  Clone ID: PAT_MRT4530_102315C.1
cacgaaattacagagggagttgagtacttgtgttctggaacaataccttgtacttaggcccaggaactaacatacactagggcccttgaagcacgggacagcttgggggcttctgcgcttactctcctctgcccgggcctctngntgggggggcgggggccgtgggcgggggggggcggt

SEQ ID NO: 2555 - DNA, 306 bp, Oryza sativa
  Clone ID: PAT_MRT4530_102316C.1
ggtcaaacaagaactatctatattaagcccttattgaagttcattcacactctcctgagggacaaagaaacaacaggaatcgggacaataaccctactaagctatttcgtgatcgaggcttaaccattatcagcaggcaaagacatacacatgttcacttaaagtaaaccccgccacagtattaaccgaggtcaaccggaccctcactcaagtacgtatgcggtcactggagacagtggatgcctcctgtcgagcggttcgcatgcagcatgcagagcgaccacattggtaaaggagaagatgcga

SEQ ID NO: 2556 - DNA, 1620 bp, Oryza sativa
  Clone ID: PAT_MRT4530_102317C.1
atggctatatatagagccccctccctctcctctttcggccgccacctcctccttcttctgccgccgcccgaaaccttctccccgcgctctccttctctctccaagcgccggcgccgctccagccgcatatcgccatcgccccggccgtcgccgatcagcgccgccacctccatcggctccgcaacgtcgagctctaccccggccgctgttgttttgcgccaaatccaatcggaggtagcccgtcgtcgtgaaccggagcgccgccgtcgccgccgtgtctccagccgccccgcgccgtcgctgtggtcgccgctgctgctcgccgttgcctccgtcaggttcgcaagaaggagctgcaccccgtccgccccttcgtcgccaccaaaatccaccggagctccatcgtcgccgtcaacccgaagttcgccgtcgcgttttgatctccggcgaagccctgctgctcctcccgtcatcgccaagcttcgccgtcgcctccattggattcgcagctgcgaagtgaagcctgtccacccctcggttgtcgtctctcatcgccggaaagtcgtcaccgccgtgtacagtacctcgccgcccttccaagctggtcaccggctatcttctgtcgccgtccgtcgtcgcgtaagtgttggtaaggaccgtcgcctcgcgctctttctcctggtgccctccgtttgcatatttgtgccgtggttcaccggcaaccgccgctcccataccgttcaccggtggggtgattatgatccaggaacggtgcactgctttaggttgagttatgcgaggggtcttgtcacaatcactcatcatggtgacgtgtctgcgcggacacggtgccatgacgcgcagcgttataatgtcaagggtctgtttgatgagatgagcacagcttggggtttgcaaaaccttagaactgcaagggatctaggtgaaaatagattcctaattgattttgatcatgaggttgatttttatcgtgtcatgaatggaggcccctggaaacacaaggctccccaaaaggttgctagagttttaaacttctgtggtgctcagaaagacaaggttttatcggctgggagcgcctctaaccttgcaagcccaagacgacaatctttagacccagaagttactaaagttgggcatgcaaatgaagagaagatggcccaggaaactcttgcaccaatggccagaggaccttgtagtagagaatatgtgtctttaagctctaattatgagcttagtgaagaaaactcaatcaagatcagtactgctgagactaatctcaatgtagccagcaaaaagtctccagattggcttcagaagaagaagaaaggattagccattaaagaaggagggaagatatcaaggccaaaggtggccaattgggggcgtgatattgggaaatcaaagaagggctccatcaaactttcaccaagagccatgatagcgctcaagtctaccgttgtggattttaatcatcaacaggaacacccaagtttgaacacctcctactatgaggctagttgccgtgataaggtagagaattcttgcaaggcgaaggaagatctggtgggagctcatggcgagccccaccaggagcaatga

SEQ ID NO: 2557 - DNA, 3222 bp, Oryza sativa
  Clone ID: PAT_MRT4530_102318C.1
atggttttcacggtctcggtcgaagctcctatctcacccttgcccgtgtggggcttgttagtggtatgtcatgaaacccttcgaccagacctgccgaaaccatgcaaccagcgaggattcgagctcaaggtgtcaagttcatctgggcgaagcccccatggcaaagactgtgaagaaaggcggcgaagggcgaaggatcgcgctggtatcccacaaggccaaaggaatcttgggcaaagactaaatggcgaagggtgcatgctgaaggagggtgacttcgccataacgagtccagcttcaaggaggcgcccattattggcccttgtatcacaattacgctgtgtacccattggtcgcttcgacaacaccaagaaattggagaagaccccttctggtctaggacctggacgaacttgtcacaaacggttcgatttcttgtcaaatgtcactattcgaccagtcaacgagttgaacccctctccgaggcctggctacacactcatgtttgaagattttttcgatgacggcttcatgtttccttgcagtcctttccttgtggatgtgctcaagctgtatgggctcgagttcccacaacttactccaaacgctgtcgtgaggctaggggttttcgaatggatcattcacagttgtggtggagttcctcatgctcaagattttgcgtactttcaccacaccagacactacaccaagcagaattcgaagtttggctgcatcaacttctccccccactcgaaccgcggctatcccgggcctattgtttctgcgagtcgaaccaagtggggaaacaagtggcaatcaaagtggttctacctccaaattcctgccgagttgtatgctgagaaagactgccctttcactttttcttgtaagaccccgaaagttgtcttcgaaccatcggtagcgctttcctctgattttaccgccattcgatctctagttgaagaactcgtttcgaaatttagtgttcgagacttggtcgaggagttcatctgtcttggtattcgacctctctcaactagttgggcccttagccttggtgaacttccggatggggccacctcactacttcatcccctcatcgtttcttctgaacttgtcatcccagaggacattgtccgtccctgtcggaagcttattggtccgtttaccaaggatgagtacttgaaccttgccgtttcagtgaacgaaactgctcctttggatgtacttgcatccactgccacagtagtggagaagagtgttcgagcacatgctgtcgagactaccagcttgagtagcccgactcgagctaacaaagacttagaaactcagacagctcagtctccagtcaacatcagccaacggcacgaaattggaaaaaacactataactggcgatgttcgagttggtgatagttcgaaaactgtttggactccttctcccccatttatattaactccatctcctcaactggtaaaagaagttcttggcagctttagcgagcgttgcgctcaagatgggcattggttgatgggtttgcccaatttcagcgatatgggggaaagtagccatcacagggccaacctatgcatggacgacttgaagcaccacaaccccctcggcccagttggcgatgagctcgagaggattttaatccctttggagttggaaaaagagttcatcaaggaaaatgatcttatgtcctcttgggccacgctcgatgtgtctgccgcaaagactgctagccttgctcgacttcaacgggatgttgctaagaaagcacttgaggcaatttgcgctcaatggaaaaaatccgtcgaacatatagctaaactcaagaaagaccaagaattccttcatcgtgagctcaatcgagtttctaacgagaagaacgccttcactgatcttgttcgaaaaatcagcggcgtgataaaagggcttattgaggagaaaaaggtgctcgttgaagagaacaaaaaattacatgctcgagaaaaagctctcgagcggtctgtccttgaacatcaagaggtttctcgccaactagctgatgctgaagataagttgaaagaacaaatcaccgttttggaaaaaagtaatgaagagctcgagcttatccgcaaagaacaaaatgaaagtaatgctgaagatatgcatgtttttttagctaaggcaaaaattgctcgaaaaccaccgtcatcctcatctttcaaaggagtgacgaggcccaaccatcctgaacaaccatacccggctgtacagatctattctccaaaccaggagctaagcaaattattaccaggtataacatccataattatttcttcttgaacactcccgacgcactcgcgaaccttcgcaacgacggaaacgacaagctatcacgcaaaacgaggaaaaagactaataaaaaccaaataaacaatacataaaaagatcacctaaatgatcaaccgaaaccggcgaacggaaccggcggctctgaactaaaggacgactcaacacggacgaacgaacgaagcacggggaacacctcattcgaacgaacgagcgaacgactcaacaacggctgcggctaatccggtggactagaaacgattcacagaaaagccccggtacgacaaacgatagaccgcggacaacagcgggtacggtgcacggcaatgaccggctcgacgctaggaccaaacaagattagattagatggaattaagaccctagggataaagtacaccggtgaacgacaaaggcgacgacggacagcgacggaagatggccggcgacgagcttcaaagggcggcgaggtactgtccacggcggcgacaactttccggcgatgtgcggcgacaacggaggggtggccgggcttcacttcgcagctgcgaatccaatggagtcgatggcgacagagggcgatgacgggaggagcagcagggcttcgccggagatcaaaacgcgacggcgaacttcgggtttgtcgaatctagatttcggcaataataaaagggggtggctatcaagctaggaaagtgtatgggtttggagacaaaggatttatacaggttcaggccggagatgaagctgcccaagccttagaactgatggaacgcatgctgaaactcaaagagcaaggcttacagggagagcaaatcactcggcatttcattaagtgccgattagctccaatcaaagaaagatcccgcacagcatttgaatttgacg

SEQ ID NO: 2558 - DNA, 210 bp, Oryza sativa
  Clone ID: PAT_MRT4530_102319C.1
atggcgatggggtttgagtgggtggtgatggcgacagcggctgctggcagcggtgggagcgaggtcggctggagctgcaccgacgtacgggaggagatgggatgtggccggtgcacgggaggagatgggacgcggtggaccggcgcgtcgacgatggtgacaactagagaggaggcggggaacgagactggcaacggggaaggaggatag

SEQ ID NO: 2559 - DNA, 246 bp, Oryza sativa
  Clone ID: PAT_MRT4530_10231C.1
atgtgggcgtcatggtccaccgacgagtgtgcaaagaggaggacgaggcggggaggccagcgagggaggggggaaaccatgtctgtcgtcgccgccaccatcatcgggatctggatgcgccacccgtcggccaggttgccacgtcacatcttccacccctactccaaccgggtcaccgctggcatcgtcctccacagctttggcccccccaactacgccgctccactaccacgctgtcctctctag

SEQ ID NO: 2560 - DNA, 949 bp, Oryza sativa
  Clone ID: PAT_MRT4530_102320C.1
atgaccggctcgacgctaggaccaaacaagattagattagatggaattaagaccctagggataaagtacaccggtgaacgacaaaggagcggcgattgccgacgaaataatgcaatcggagggcaccgggagaaagaggaggcaacggcgattcttaccaacacttacgcgacgacggacagcgacggaagatggccggcgacgagcttcaaagggcggcgaggtactgtccacggcggcgacaactttccggcgatgtgcggcgacaacggaggggtggccgggcttcacttcgcagctgcgaatccaatggagtcgatggcgacagagggcgatgacgggaggagcagcagggcttcgccggagatcaaaacgcgacggcgaacttcgggttgacggcgacgatggagctccggtggattttggtggcgacgaaggggcggacggggtgcagctccttcttgcgaacctgacggaggcaacggcgagcagcagcggcgaccacagcgacggcgcggggcggctggagacacggcggcgacggcggcgctccggttcacgacgacgggctacctccgattggatttggcgcaaaacaacagcggccggggtagggctcgacgttgcggagccgagggaggaggcggcgctgaccggcgacggccggggcgacggcgaatggcggctggagtggcggccggagatccggcgcggcatggctgcgggcgaggctgtgatgggcgacggcgagcgggaggcgaggatgcggcgcatctggccgctgctccacaccccacgcgcgcggatccagccgcggtggggcatagccggcgcggctgtgacgggcgactggggcgggaggcgaggcggtgatggatccggcctccacgccgcctccatgcgcacggcggcgacctccgtggtggcgagctcggactccgatggatag

SEQ ID NO: 2561 - DNA, 2028 bp, Oryza sativa
  Clone ID: PAT_MRT4530_102321C.1
tcatacgtctcgaatgaaagcactttcagttggggaaatgatatcatttagaatgggtcgaagcctattgaccagacacttagataccactttataaatgacactacataaactgattggactgaaatttttcaactcaaccggctgatttatctttggaatcagaacaatgtatgtattattcacccctccaggcagaagtccatatgagaaaaacgtcctaacaccagcagcaatctcctccttcagcacaccccaagttcgctgaaaaaaccgggccaggaacccatctggtccaggtgccttcaacggtccaatctgaaaaagcacatctgaaatttcgtcatctgaaaactctttgcagaggacctcattcatggcgtcatctactgctggatttatgagatcaattagttcatccgataccactgaatcatctttggtatgtaacttttggcaaaaagaggtagccatcttttccatttcccccttattctccacatatctatcatcccaatcttttaatttcttgatcttgttcttcctcggacgccaagctgcttgccggtggaaatatttggtattgcgatccccatcctttaaccaggaaactcgtgatcgcattgatttcctctgcattgcccaatggatcaccgactgaaagtccttccactttcttcctaattccatccagttccttagtggcagagccaaacgatttgcggctccattctctaagtgttccaaaactgagttaagcttttttgcaacctctcccagatcatgcgctttgattctctgctcccatgcaagttgtatcacctcaggcagagtttcctccctttcccacatgatctcgtacctcaaacaacgattgcttgaaggagtttgctctttctctaccattatctcattgaaatcacccatcatcaaccatggtgcattcgaggatggttggatttgcagaatcagttcccacattaaatgtcggtcttgtgcttttggttcaccatagatgaaggttcccctccactgaactgcatctcctgattccttgattaagacatcaacatgtgcgtggctcatggacaggagatctaccagcaagccttcttcccagagaagagcaataccacctcctgacccatcactcatcatagccaaacagttccttaaacctagtctccacctcaacttactaatccttggttcatcttgtctagtttcagataagaacacaagcttaggcctatacttcttatcacggcaactagcctcatagtaggaggtgttcaaacttgggtgttcctgttgatgattaaaatccacaacggtagacttgagcgctatcatggctcttggtgaaagtttgatggagcccttctttgatttcccaatatcacgcccccaattggccacctttggccttgatatcttccctccttctttaatggctaatcctttcttcttcttctgaagccaatctggagactttttgctggctacattgagattagtctcagcagtactgatcttgattgagttttcttcactaagctcataattagagcttaaagacacatattctctactacaaggtcctctggcctgcatatgctgcgcccctttttcaagggccaaagaaaccattggtgcaagagtttcctgggccatcttctcttcatttgcatgcccaactttagtaacttctgggtctaaagattgtcgtcttgggcttgcaaggttagaggcgctcccagccgataaaaccttgtctttctgagcaccacagaagtttaaaactctagcaaccttttggggagccttgtgtttccaggggcctccattcatgacacgataaaaatcaacctcatgatcaaaatcaattaggaatctattttcacctagatcccttgcagttctaaggttttgcaaaccccaagctgtgctcatctcatcaaacagacccttgacattataacgctgcgctgaataaaatcttgcaagagccaggaatttacatttcat

SEQ ID NO: 2562 - DNA, 550 bp, Oryza sativa
  Clone ID: PAT_MRT4530_102322C.1
gacgtacgcccacgcgtccgcttacgttttcgcggacgcgtggtcggacgctacgatgggtgcgaaactgaatacactttccttactctctccataccaatactttgttccaccctatcacaatatatagagcgccagactctcccaaaaagatgatctgaacctgaaggggtccaaatccagaggcgccaccaatccccacgccaagttgcctgaaaaaaataagggcgcggataagcccgactataaggacaagatatggaaggccgcacaggaccaaaacaaccccaagagggctttttacgctttcttcgcttatatggaggagtttcgctaggatttgatggagaagagctctcagaataaatcagccggtacatgaagaatagcacgcggctataggtcgaaatacatgaccaagacggacaaggctctttaagtacccaatgtcaacatgctcaaggccgactacaacacagacattgcgtgcctacaacacgggccaaagcactgccaataaagcatcctccacggaagaatactaggacta

SEQ ID NO: 2563 - DNA, 1351 bp, Oryza sativa
  Clone ID: PAT_MRT4530_102323C.1
ctagggcggcgacgcggtggtagcaagcggctgcggcaaagcgacggcaacgctgcacggcgtgcaggcgcagcagcggtgacgcagcaaaggcgacgcagcagcagcggcaacagcaagcgacacggccgacgtggcagcatgcagcagcgacacggcacgcggtatagcagcagcttggcagagccagcgcagcaagcagcggcacgatggcagcaagcggcggcgcaaggcggcggcttggacagcagcggcgatgcaactagggcagcgacggcgcatgggtcggcggtgaacggtatgggagcggcggttgccggtgaaccacggcacaaatatgcaaacggagggcaccaggagaaagagcgcgaggcgacggtccttaccaacacttacgcgacgacggacggcgacagaagatagccggtgaccagcttggaagggcggcgaggtactgtacacggcggtgacgactttccggcgatgagagacgacaaccgaggggtggacaggcttcacttcgcagctgcgaatccaatggaggcgacggcgaagcttggcgatgacgggaggagcagcagggcttcgccggagatcaaaacgcgacggcgaacttcgggttgacggcgacgatggagctccggtggattttggtggcgacgaaggggcggacggggtgcagctccttcttgcgaacctgacggaggcaacggcgagcagcagcggcgaccacagcgacggcgcggggcggctggagacacggcggcgacggcggcgctccggttcacgacgacgggctacctccgattggatttggcgcaaaacaacagcggccggggtagagctcgacgttgcggagccgatggaggtggcggcgctgatcggcgacggccggggcgatggcgagatgcggctggagcggcgccggcgcttggagagagaaggagagcgcggggagaaggtttcgggcggcggcagaagaaggaggaggtggcggccgaaagaggagagggagggggctctatatatagccatgggagagagagatcgggcttggaacgcaaggaatcgcgccggaaaaaccgagggttagttggagagataaactcgaaaacgaatccaatttcgcgtcgaattcaaagggataaagtcggatttttgggggaagagatagaggaggataagaggaatatttcccctcaactaattttgcaaacggagcacgggatgcggcggatttggtggaggaagcggcgggtgcacaggtacaggacggctggctcgggctctgtccaagcttgaagacgacattgtagcagggagacgaattagacttttcgtcttgggctgg

SEQ ID NO: 2564 - DNA, 402 bp, Oryza sativa
  unsure (1)..(402): unsure at all n locations
  Clone ID: PAT_MRT4530_102324C.1
aaagaaaatcttcacttgggagggggatagctaatanactgcagaaagtcagtcttagcagaagaatacaaaaaactcccatgtctttctggtcaaagaaagtatagccatgtccagatcatttccttcaaaaaaaatcaactacacatttaaaaatgacgtacgaggattggaagaaagtctgcgcatggtcagtctccgttaagctgataccccacaactctacataatgcatgttatggtgaaggacctgattggcattgcgttgttgacgccttgaggcacctcctttcagtcactgctcctcagctcttgctgatggccattatggtggccatggcgacatatgccgcagggtttaacctgcatgagatatgatgactagatccataaaagtcttta

SEQ ID NO: 2565 - DNA, 1065 bp, Oryza sativa
  Clone ID: PAT_MRT4530_102325C.1
tagtggatcccccgggctgaggattttctttctgaacacaaaccaaaccaagttgaaacctccggggatgccccacgaagcacaaagcacccaccaaatccaccctcgaccaagaaactgaggcaagaagaagaagaagaagaagccgccgcggcgagatgcagcagcagatggccatgccggcgggggccgccgccgccgcggtgccgccggcggccggcatcaccaccgagcagatccaaaagtatttggatgaaaataaacagctaattttggccatcctggaaaatcaaaacctagggaagttggctgaatgtgctcagtaccaagctcagcttcaaaagaatctcttgtatctggctgccattgcagatgcccaaccacctcagaatccaggaagtcgccctcagatgatgcagcctggtgctaccccaggtgctgggcattacatgtcccaagtaccgatgttccctccaagaactcccttaaccccacaacagatgcaagagcagcagcagcagcaactccagcaacagcaagctcaggctctagccttccccggccagatgctaatgagaccaggtactgtcaatggcatgcaatctatcccagttgctgaccctgctcgcgcagccgatcttcagacggcagcaccgggctcggtagatggccgaggaaacaagcaggatgcaacctcggagccttccgggaccgagagccacaagagtgcgggagcagataacgacgcaggcggtgacatagcggagaagtcctgagctagcacaagtgttaggatgaataatgccatgtatactagcaatgaaaaagaaagaaagccccctgcctcgtggatcacaagtagtccttactcatcaccccctgtgttttagaaggctcgtcttatcggtgttgtagaacaaaacttttagattgatgatgatgtaacctatcagagattcttatctcatcctacaattgttgtagctattatggaataattttaccagcctgagagagtttttacttctgtttgcctgctaatataatggttagtgtgatgaactt

SEQ ID NO: 2566 - DNA, 711 bp, Oryza sativa
  Clone ID: PAT_MRT4530_102326C.1
atggagtgggtgccgaagcacgaaaacaacctcgattccgtgtttccccggcaaactcgccgccgatggatgctcttgcaagatcttgataagaaggacagtactacatttcgcaaggaacatgacgaagagatcgatttcgaatggagctccgacggcgacgatgacagcgatcatcgcggtaatgttcctgagtacaggctcccagcaacgatcttccagggataccatggaaacgttgataataatgccctcggatttggtaattttccacaaccgccgatcccaatgttctatcatggataccatgggaacatcgatgttctcggattccatccgtacaaggagattgttttcttatgtgaagcgatgcagactggactagcctaccatttgaagacctcaaagatggagatcttgggcaagttacctctggtcagcagctgcgaggaaattttatccaacaaaagtttcaccggaagaagaataccgagtgagataataacagcggacagccagaagtgcctgaagtacaacgtcatctgctcaaccagcttcgaccgggttatcatcgcagataccccagccgccgcggccgccgccgacgccgacgacttcgccacggccgccgacgccgccgccgcctcctcctcctctttacgccggcggcaactccggttgttctgggtgctttcccggatctcccggtga

SEQ ID NO: 2567 - DNA, 187 bp, Oryza sativa
  Clone ID: PAT_MRT4530_102327C.1
ggttttaagcaaaaccctttcctttttttattacaccaaaatgtccctgttgtccaaaacgcatgcaaattaattgggcccgcaccttttacacccctcttgttgcatgcagcaatttggccctcccatgaccttgatttacacacatgcctttggactcctatgacattgggaccaacctcgttcc

SEQ ID NO: 2568 - DNA, 653 bp, Oryza sativa
  Clone ID: PAT_MRT4530_102328C.1
ttaaaccaacccgagcaccgtcaagcaactctagcgaagggcctagtacaaagcaaagctctgcggacttcagattctgagatacacgcatcgatcatctcgcatctcttcagttctgaatttctgcgtgtatggggaactgcttcaagtcgcagcgcgccgccgcatcgtgggccgacgacggcgagtgggaggatgaggaggagcagcagcagcagcagcatctacatgagatggcggcggtcgagaagatggagcgggtggaggtgaagatcagggtgacgaggaggcagctccaggagctgctggagaaggccgccggcgagggcaaggggcggccggtcgagaaggtgctggcagagatgatcagctccggcaaggtttgctacgagcaggaggcagcgggctggcggccgtcgctgcaaagcataccggaggccgacgagtcatagattattcagtggatcttttgattccataggactgttttatgttccttgattgattctccacatgtgtatagttgctctagctaggaagatattgtagtttgatcgtcattctttcggagatgtacaggctacgagactgattgagagagattgctggaactttttttacttgagcagatttctgataaaaaaaaaaaaaaa

SEQ ID NO: 2569 - DNA, 498 bp, Oryza sativa
  Clone ID: PAT_MRT4530_102329C.1
atggtgaggagcgggtggcgcggccttgcaaccggcaccggagggggcgaagaggggggcagcgcacttcgttgggcggcggcgtggggaggcgtcggtgagctcaacgcgagcggggagagtgcgagctcattggcggcagcgagcttgatggcaacaatggggcggcaaggcccgacaatgagctccgcaaaagaggaggcgagctcgtcgaacttgagcagctgccgcagccgtttgccgcacgcgcctgcggccggccggagcggggcccttccccttcctctcctccttctccttcctatcgatgacgtcgctgccaccgtcggcctccgcgccccctcgccagccttgccggggcagaagggagaggaaggaggcaaagtggagaaaaaaagggagaagaagggagaaaaaataaaaaaattccatgtcatcgttcacgtagcatgccacgtaggcaacaccacggtcaaacgatgctttggaccaggatga

SEQ ID NO: 2570 - DNA, 675 bp, Oryza sativa
  Clone ID: PAT_MRT4530_10232C.1
atgggcctcatgtcctccccctcatcctctctcttctctatctctcccattctccttttccctcttccccttctccttccccggatgcagccggcacaccaacgagcgagagtggaggcacggcggaggcgtggggatgccaaatcgacggggaagaggtgggcactacctccactgttgagcatgtgggcgtcatggtccaccgacgagtgtgcaaagaggaggacgaggcggggaggccagcgagggaggggggtaggtgggcagggaggtggcggcgaggccggcaagctcctcctaagtccaaatccgtcatcgctgacaccacctccaacgcgcgaagagggaggaggcggggaggctggagtgggggcggggatggagcatcatctggcctgcacggcctaccgcaccccggccatggtaggaaaccatgtctgtcgtcgccgccaccatcatcgggatctggatgcgccacccatcggccaggttgccacgtcacatcttccacccctactccaactgggtcaccgctggcatcgtcctccactaccacgctccactaccacgccgtcccaactacgccgtcccaactacgccgctccactaccaactacgccgctccactacccacgtcccaactacgccgctccactaccacgccgtcctctctag

SEQ ID NO: 2571 - DNA, 466 bp, Oryza sativa
  Clone ID: PAT_MRT4530_102330C.1
aaaaaaaaaaatggaagtcaaaaatttatcccccaaaggaaaaaagccccccggaaaaaaaaaacccctattttttaaccacccccaaaaagcaaaccccccagttggtttaaaaacccaaagaaccaattttgggggcccaaggaaacccaacccagaaaaaaacccccccggcccaatgggggaggcccacgtgaaaaaaccccggggggttcccccccgccccctaaaagccccttttcggggaggggggaaaaacccgggccaggggggcccaaaaatggggggccccaacccccctgaaaagccccccaaccatgggggggagccccaaacacctgccccatttgttttaaaccgggggaagctgccgaaaaaaaccctgccggagtttttctccaacggccccccggggggccccgggccccaccaactgggttttaaccaccccccggaaagggggaaa

SEQ ID NO: 2572 - DNA, 1550 bp, Oryza sativa
  Clone ID: PAT_MRT4530_102331C.1
ccccacaagaacaaatcttgtaatagatctaacaattcaaaattacgtgaaacttacatacaagttacactgtagttacatgcaagttacagtgtaattacatgcaagttacagtgtaattacactacgattgtactataattacatctgtcaaatttttggagaaaaatttgtcgacaaatatatagcaaattcagttgcgaattgtagccccaagaacgaagcagatgcaattggcaaccgtttcatgccagcgcgcagacatatatgatctactgggaaaccataacaggttgagagatgcccagttcctagtcaacactaatgttgacaatttaaggtacatctacatagcaagcttctttacactccatggatgtacacgaaactaaatctaggaaaaattcatcgcatgtagcgtgccctccaaaattcacttaggcaaaatttgcagttcaaatgctcctttggtcaggtccgtgaatccgtcaggaaattgttcactctgacctttgcagccatccaagcttccaagcatacatcacaaagaacgcaaccgtatctgctgaccagacaacagcgaaggatttcacgaagaacgggataatgacgttgattagagggaccagtagaaacaagtagttgagagcctctttctccttacttgagcagtcacgggcccgaagagaaggtatagtgaacatccagatggaccacattcccatcagcctccaaatgtccggctcattcgacgggaacacgagattgaaggaaagggctccacccaacagcatggaggcatatccctggacctcaaagatagtgtacagagctgttccaggcactgcagggttctttgtggcagtggacgcccttggtgcaaacgttgctgcggtcttctgaactgccttcttgagctccttctcaatcttgggatcaacaggagccggcttcttctccgccgacgactcagcggaagaacctccgccactggccacctccccttctttgctctctcccacagcggaagcctcggccgccactgcaccagcggcggcaccaccaccgtccgagccatccgagctcgcccacgcaagaaccagcctcgccggcctcctcctcctcctccccgcgaatatcccgccggggacggtggccggcgggaacgcggagctggccgcggccgcgaacgcgcagccgctgccgagagggctgtacattgttcgcgcgaggtttttcttcttgagctccttctcaatcttgggatcaacaggagccggcttcttctccgccgacgactcagcggaagaacctccgccactggccacctccccttctttgctctctcccacagcggaagcctcggccgccactgcaccagcggcggcaccaccaccgtccgagccatccgagctcgcccacgcaagaaccagcctcgccggcctcctcctcctcctccccgcgaatatcccgccggggacggtggccggcgggaacgcggagctggccgcggccgcgaacgcgcagccgctgccgagagggctgtacat

SEQ ID NO: 2573 - DNA, 518 bp, Oryza sativa
  Clone ID: PAT_MRT4530_102332C.1
catccagctagcgtgctcacgcctgcaccccatggcctcccgcgccgggcgatcccgcttgcagtgccctggtggctgctgatgcccccctgtcccctggttgcatcgcgcgccccgctcccgcgtcgcttcttctcccgtgcctgctcgcctcttcgcatcgcggtgccgcgaggaactgaaactgccgacgactgtcatctagtacatccatcaattaatggcttgctttttcttctcctcctatccctcttttatttctttcactataccaaatttatccctcttgcgtatccatcgatctaccaagcaactggagctggcagtcttgctcctgttcctggatttatactagcttgattcatatgcatctcacactattatctctccaatcactccaatgatctaacacaggtgatcacacaccaatttcccttttccttttgtttgctcgatcggatttcgttcatcaaaatagaacctcacttatacatgcacaccatttcgatttctcctat

SEQ ID NO: 2574 - DNA, 1613 bp, Oryza sativa
  Clone ID: PAT_MRT4530_102333C.1
acgtaatactccctccttccatttgaactaaccaataataacaataactaacagataatatatagtgtcaactccaaaagttattcagatcatacattatgatgggtagaacagggtgttgaaagattattcagaagatatcagcgatgacggtgccattagacacgtggcatagcgacttgttctttttcattcgaagcttaagtttggtatttccactgccatcgccgtcgtgtccaaccggcaacacctccacaccggtgaagacttcaatcctgtcaattatttcaccgtcgtccatagacacaatgcggaagaatcttgcaatgcagaacctgcccgagcccaggttgacaagctgcggatcatgtgattccagccaacccttaggtgggtcaaattccttccaatcgccaataagttgtggctgggagtgggagtccatggtggagagatcagcagcagccaacggcgacatggtcctggcctcagtcgagaagccaaaccagagcttgagctcagggacatacacaaccttgccatacaagggtagattcccattaccgacttcccatgtgtttctcgctgtgtccaagcagtaggttgcgttgcagctgttgtgggatatgcagatgttagagccgaccactgcataggatgtgatcttggggtaggtgaagcagcaggtacgatcagagacgaatggcggtggccggaggaggtggcagttccatgggccctcaaagatgttgctgcacacaaaggcctcaaactgatcactcagcttcacatcgcccttctctggctcaggaaccctctccatgacatagaggctgccaccgccaacgctgggatggtcattggcatcagcagtacttgggatgaatagagagatgggccgtgacttgggcttgtggaggtttgggatactcaccacggcgcgcgtgtcggcgtcacaaaggaacatacgcctggtgtggtccgctattaccaccttgcgatctacaagggggaagcagtcgagagaaatctggtcggatccatgtgtagaacaaaacttgaggatgggtctgggaagccgaatcctctccatctttaagcctgctgccttcttcttgggattacaggagtcggacaccagtgtctgagaggtgtagtcttcttgcacagctgctgactctgatccatgtgcgattgttgttggtggtggtggtgtagcggtgttaccgaacagctggcctgccagatcgacgcagcgtagccatttggcgccttggaaggggacgtcgacgatgagattcttagcccgacgcgacaggcccatcttcagagtcgatcagcaactcccaagttccagctccaataagcagcagcagcaaacagaagatgtagccagccgagccgagataaagcttccttgaggcgcgcggtcggagcaggaagtcagactgggatggagtctcgacgcctaaaagtttgggtctccagcaaacagatgcgaccgcagtggattgcgcgtcctgccctgccctgcgatggatctatcaaagagtgttcagacctgaggagcgcggtccggtcggagaaggggaaaggggccagcggcggccggc

SEQ ID NO: 2575 - DNA, 289 bp, Oryza sativa
  Clone ID: PAT_MRT4530_102334C.1
ccctcgggtcctgcataagcaagatacgtgtccgcatacacatccgggacagggctcaactaaatgagctcgggcagaccccgtggccccctatgactgcatccaaagtcgagatgacgaccacctccgctcactggctggactcggtgaggtcatcagcgaggctccccaagggcatagagaaatctgccagtcagctctgcaggcttgccaattacggagaccatactgattatgtcaacgttgatcagcgcactctgctctgagcacaatgaccaccccgcctacc

SEQ ID NO: 2576 - DNA, 642 bp, Oryza sativa
  Clone ID: PAT_MRT4530_102335C.1
ttctgttatctacatattagcaccgctgaagtatgctactgtgtatggttgttctgatgctacaatgttcttggtgctgttggcaaggtagtaaaggtggagcattgtgaaagagtgcatatcattgcagcttcaaaacgaatttgtattgccaactgtcatgagtgcatcttctacttgggggttaatcaccaacctcttgtattgggtgacaaccataacttgcaagttgccccgttcaatacttgctacccacagctgcaggatcatttgatgcaagttggtgtcgatcccagtgtcaacaaatgggaccaaccttttgtgttgggagttgttgatccacacgattcattatcccatcctgctggggtttctgatgttaaagctgaatctgctacatgtctggatcctgatctatttaccaactttttggttcctagttggtttggggatgaaacgcaagagcctacaaactgcaatccgttcccattgcctgaaatttatgggacattccaaagcaaaaagcattctgctctggaagatattcaaaagacgatttgggagctgcagcttgatgagaatcggaaaagggacttggcgactgctcttcatgctcagttcaagggttggttatatgcttcg

SEQ ID NO: 2577 - DNA, 708 bp, Oryza sativa
  Clone ID: PAT_MRT4530_102336C.1
atggcgggggacccggcggcggcggcagcggcggttggggcgatgaggccgtggaactacgtggtgacggcgcacaagctgacggtcgtcgcccgctcctgcgtcggcaacttcaccgcgcccgatcacctcgacctctccttgaccgtacaacaactttcaggaaatttacccgtattgagattggagtatctgcttactcatcagggtcttcagcctatgcttgatgcacctgtgtatggtagaattgcaacaattgagctcttccgtccatgtgtattggcatctatcaagttctcaccagacagcagagcaaagtcatcttgcaaatttgtgaacgcttttgtctatttgaatcaggaaaatcggtatgtaatatgcaggtcagggagagatgcttctgaccacattggacgccctacaaacaagggacagacagatgaactcagcagggactataacataacctggatgactgcggttgagatgctcgacgactacgtttatattggcgcggacaattgctataacctgtttaccgtgctcaagcgccgtgttgggaggcttttagtcattgggcagtaccatctgggggacctggtgaacagattccatcaaggcccccttgtgatgcaagatccaggctcagaagtagaccagattcctgccttcatcttcggtgaaagcagaatagactcaacgcaatag

SEQ ID NO: 2578 - DNA, 551 bp, Oryza sativa
  Clone ID: PAT_MRT4530_102337C.1
ctgcaggaattcggcacgaggctctgctgctacatctcgtcgcctcgccggcgccatccgctatctcccccggcggcgggcagaggcttcctcttctctgctactcgtcggcggcagcggccgccgtctcgagtgcgacccacggcgggtggccgcggccgtcgtctcgacgacgaacggcgagttcgtcgccgccgtcgggcagtgctcgggcctcgtcgcgggccgggcccgcttcgggaaggagcacgatgggcccgtgccagcccggcccgacccggcccaagtccagcctctactccccttaacatggtctatttacataaaagcccctttcatcaccgcggtaatacaactatttctcctagtacaacgctttcacgaagttgggtgaggcctccacaaatccgaggtcttccctgcataatcctccctcctccgcggcaaagccctagaagcgccgccgacgcccacatggcggcgccctccggctccggcgaagccgcccccgcctcctccacgtactacgacgtctacggacccgacgctaa

SEQ ID NO: 2579 - DNA, 103 bp, Oryza sativa
  Clone ID: PAT_MRT4530_102338C.1
atgtcacaaagagatgaagctaaggagaatatgctccttggatgcttggagcatatccactctcccaaggcaactcatgtcacactgttaacgaccaaatttg

SEQ ID NO: 2580 - DNA, 1624 bp, Oryza sativa
  Clone ID: PAT_MRT4530_102339C.1
cgacatgtcgccctcaacgcgtgggccgcgtcgtgccttttgactcctcccacctcaaaaccgcgggccgcatcccgcgccgccgccgcccaccggcggcaaccacccgccaccgcgagcgaacacccctatataaaccgccacgccacgccacggccaccaactccgaacacgacatggcgccctctctcctcaccaccccgtcccaggccctggccctcgcccccggcgccgccgccagccgcgtcggcggcggcggcggcgggtcggcgcgggtgagcttcccgtccggccgcgtccagcgccgaggcgcgctggggatgcgggtgcgggcgtcggtggcgatcgagaaggagacgcccgagagcgagccgccgccgacgttcctgcgggaggacgggtccggggcggggtccgggtcggtgcgggagcggttcgaggccatgatccgccgcgtgcagggggaggtgtgcgcggcgctggaggaggccgacgggagcggcgcccggttcgtggaggacgtgtggtcgcgccccggcggcggcgggggcatcagccgggtgctccaggacggccgcgtgttcgagaaggccggggtcaacgtctccgtcgtgtacggcgtcatgccccccgacgcgtaccgcgccgccaagggggaggccggcaagaacggcgcggcggcagatggccccaaggctgggcccgtgcccttctttgccgctggcattagctcggttcttcaccccaagaacccatttgctccaacattgcattttaactaccgctattttgagacagatgcaccgaaagatgctcctggtgcaccaaggcaatggtggtttggaggtggtactgatttgactccttcatatatcattgaagaggatgtgaagcatttccattctgttcaaaaacaagcgtgtgataagtttgacccaagtttttacccgagattcaaaaaatggtgtgatgattatttctatattaagcaccgtaatgagcgtcgggggcttggtggaatattttttgatgatcttaatgactatgatcaagaaatgcttctcaactttgctacagaatgtgcggattctgttgttcctgcatacataccaatcattgaacgccggaaggacactccatttactgaggaacacaaggcatggcaacaactgaggagaggtcgctatgtggagttcaaccttgtatatgatcgcggtaccacatttggcctcaagactggggggaggattgagagtattctggtttctcttccactgactgcacgatggcagtatgatcatacacctgaagagggaactgaagaacggaaacttcttgacgcgtgcataaacccaaaggaatggctcgatctctgaacagcttgatttcgttcgttcgtccaatcgtttgttagctttcctcgcactctgtagccttacgatctccaaacatgtgtagttcttttacttgtagaatcctgaataagtgtatgatgcaatgcgggtgttttgtttcatctgtcgatgctgttgagctttgtaactgtggtatcagtttctctctttttttcgagtgaatgaaatatagccggtgagccttttcccaaaaaaaaaaaaaaaaaaaa

SEQ ID NO: 2581 - DNA, 1317 bp, Oryza sativa
  Clone ID: PAT_MRT4530_10233C.1
atggcggcgaagcggcttcacgacggctacggacaggaggaccagcccgacgacaagcgtgtgcgccgcatgccgtccttctcgacggtgatccgtgaggccttgatggtgaagcagatgcagactctgttcgtcgcactggagccacttctccgtagagtggtgcaggaggagctccaggcaggtctcgtgcgcagcccgcgttacatcgagaggatgtcgcctgagacgccgccggctcagccgccgatgtggaagctggcgttccggttcaagccgcagctcccgatcttcaccgggagcaagatcgaggacgtgaacggcaacccactggagatcatcctcgtcgacgtcgacaccggcgcgccggcgacgatctcgcagcctctgcgcgtcgaggtcgtcccggtcctgggcgacttcccgccggacgaccgcgagcactggacggcggaggagttccagcagaggggcatcgtgaaggagcgctccggcaagcgcccgctcctcaccggcgacgtcagcctcaccatgcgcgacggctgcgtcgtcgtgaacgagctccagttcacggacaactcctcctgggttcgctgccgcaggttccgcatcggcgtccgcgtcgtgccgggcagctacgacggcccaagaataggcgaggccatgaccgagcccttcgtcgtcagagaccaccgcggcgaactgtacaggaagcactaccctcccgttcttggcgacgatgtctggaggcttgagaagattggcaaggagggtgccttccacaggaagctgacgcagcacaacgtcaggaacgtgcaggagttcttgcggctgctcacggttaagccggacgagctgcgcgctatcatgggcgacggcatgaccgatcgcatgtgggaggtgacgacgagccacgccaagaagtgcgtccccggcgacaaggtgtacatgtacagcacgcagcacggcaccgtctacgtcaactccatcttcgagctcgtgaaggtcgagctcgccggcgtggagtaccagctgcaccagctgaacaggggtcagaaggcgttcgtgcatcagctgctgctggcggcgtacgagcagcgaaacaacctccaagaggccgacgccatggcgctccactgcaacgacgttcctctgctgcagaatgcagcggagataactatcccggcgcttggagacacgcagctgtggattcagaacagtctcaacagccaagaaatcgacttccaggtcgacgagatcccccaagctaactttgcgcttcagtggactggccaaatgtacaacatttcaggctaa

SEQ ID NO: 2582 - DNA, 811 bp, Oryza sativa
  Clone ID: PAT_MRT4530_102340C.1
tcagggggcgtcgggcccgagggtgatgtgttcgccctcctctttaccgggagtatcatgacttagagacttgaggcagacacgatcacccacgtggcctaactcccttgggggggggggggggtcgggcccgagggtgatacggccgcccttctctttgtctccccaaggggtcgggccgctcccgtctcggccccgagggccgaagcgccccgacccaggcgatttgacgcacgcctcgccccgtcccgtcaggacgagggcttctaggcgctcgtccccagctggagctagcgtgttacctcccagagatggcacgttagtcctggtcagatatatgccaggcttcatcacgtggtggacaagaatgaccgacgtgactggtctgacaccggtcatgtcgtcagcggacagccacgattccacgtcgcatctgctcccggcgaaagtggaggtagttgtgggccgtctcatcagaagtttgatgttcccgagctggccaacaagtgagaaccccacggtcgtgcatgctggagtgggcatccttctaggcacgtcgacgccgccatgcaccaccattgccgacccggactttgatgcgccggtcatgacgttcactggtggaaaaaccatttttgcggcggggcgcggagggccggccggcgcgagggcggcggggtgcggagggccggtcggcgcggcggtggctggcggcctcgcggcggcgcggggcgcggagggccggccggcgtggcggctgcggcatgcggtggcgttttttttttttggagaacttgtgattcgtatttga

SEQ ID NO: 2583 - DNA, 686 bp, Oryza sativa
  Clone ID: PAT_MRT4530_102341C.1
atgacctcatcaatggtggccggctcggatggcaagcttgcgggagctagagcggccggctgcggatttggaaggcatgcacacgtagaggacgacgagacgaacccaacggtactcaccctcgaaccaaacgacgaacgacgacggccggcgacaaagtgggtggcggcggcggctcggtcggcggtggcggcggaagctccggtgaccggcgatagcggggagggagcggccaggcttctcctcgctctcgcgcacctaacagtggtggcggcgaccggcggcgacgacggaggcgacggcgcggcgcggatggagtcagccggcggcaacggcgagctaaacggcggcggcgcggcagctacgaggcacgggaaagctcgggagatggggcaaacgaaagaggaggactaggggggtcctttatatagccatgggagctcgggtccgggcccaaatcgacgggaaaaactcgggaaagtttagggttctcgccggaaaaggaaggatttgatccgcgaaattggaaagaatttccatagaaaattttgaggatttcttagggaaaaggaagaggagattgataggattccattcccgcaaccaatttggaaataggagcaacggggaggtcggattttggaagggaatcggcggcactgtgcacggcacgggagacagtcggc

SEQ ID NO: 2584 - DNA, 1543 bp, Oryza sativa
  Clone ID: PAT_MRT4530_102342C.1
tcagggggcgtcaggcccgagggtgatgtgttcgccctcctctttaccgggagtatcatgacttagagacttgaggcagacacgatcacccacgtggcctaactcccttggggggggtcgggcccgagggtgatacggccgcccttctctttgtctccccaaggggtcgggccgctcccgtctcggccccgagggccgaagcgccccgaccccttgtgggctttgcgccacgtatatggggtaggtgagcatggcagggctcacaggcgatttgaagcacgcctcgccccgtcccgtcaggacgagggcttctaggcgctcgtccccagctggagctagcgtgttacctcccagagatggcacgttagtcctggtcagatatatgccaggcttcatcacgtggtggacaagaatgaccgacgtgactggtctgacaccggtcatgtcgtcagcagacagccacgattccacgtcgcatctgctcccggcgaaagtggagcctaaaggatgtgaccacttccagttggttaatggggtaattcgatacaaaggaagaatatggcttgggcatcataaggaagcacaacaggcagttttgcttgcattacacaacagtggggttggtgggcattctggtgttacagctacctatcagagaatcaaaaatctgtttgcatggacagggttgcaaaaggatgtgcagcaatatgttgctcagtgtactacttgtcagcaggccaaagttgaacactgcaagtctccaggtctgttgcaaccattgccagtccctatgcaagcttggatgactgtcagtatggacttcatagagggactgcctaagtcaggcaaatatgacacaatcatggctcaacactggtataacacctcctaccacaatgtgctgaataaatctccatatgaggtcttgtttgccagaaagcctacacattttggccttgtggatgtgggtgcaagtacagtgccggatgtgcagctttggctccaagagagagctcatatgaatgaacttttacatcaacaattactaagggctcaacagaggatgaaaagtcaggctgataagaagcgttctgagaggcaatttgctgttggagatcgagtttatctgaaattgcaaccatttgtacagatgtctgttgcccgaagatcttgtcagaaactgagctttcggtattttggaccgtatacagtgttggaaagggttggcgctgttgcttaccgcttggatttacctgctactagtcagatacatccggtggtgcatgtttccttactcaaggcggcaatcaaaccaggcacccaggtcagttctgatctccctctcaactattctgacgaacaatctaccattcagcctgaagcggttcttcgtcgaagtctgattaaacgtggcaagagtgttgttccctgtgggctgatcaagtggattggcatgcctgaggagctggctacttgggagaacctgcgccaactccggacacgttttcctgatgctactgcttggggtcaagcaggttcttaa

SEQ ID NO: 2585 - DNA, 392 bp, Oryza sativa
  unsure (1)..(392): unsure at all n locations
  Clone ID: PAT_MRT4530_102343C.1
gggtaccctccgnaggcccggccggggaagccaaacaatgaaacccaccgccttttctctcaggaactcgcgggaatcaatcaatcgccgtccgcgtcgcgccatgagatattttcccccaagaaaagttggagtgaggtatgagcgctatggctatgccgtggctgaacccgaacgcggcgccggtcatccagggggccctcagtagggtggaggacttgtcgccgaagtggcgagagctcgtcaagaccacggcgtgtgtctgtcaccactggttcagtcagcaccacatgtaccaggacgctcccagaggaggaggaccaccaccgccaggtgttcgacgacgatctcttaccagctctgccagccgactcgttcgacctccttcccat

SEQ ID NO: 2586 - DNA, 1842 bp, Oryza sativa
  Clone ID: PAT_MRT4530_102344C.1
cgtggcccccactaccgcaaccctaatttttttccccatcctctctattcttcccctcccgcaaccctaattttttttccccatccgcgaaaccctagccgccacgcgaaaccaaatcccgccgcgcgggatccttttccgccggattccacccgcgaatcggggttccccttacgattcgcgggcggattagcgcgaggcgcgcctccccctacctctgtgtgatccgggggtgaggttaggccggacgccggggcatcagccatgtcgaggtgcttcccctacccgccgccggggtacgtgcgaaacccagtggtggccgtggccgcggccgaagcgcaggcgaccactaaggtttgttgaaccatcggatttacacacgcacgtgccggatcatttgctcttgcctgttggttttgatcggatctgttggttgtgcgtgtgtgatttggggatcgcacgtgcgctgcatgtaacctttgcatggattacttgagagttgtgaggccgcgcttcgaccagatccgtcccctactctgacggggcatggctctccagagagttcacaggacagcagcaagagaagaaaggttgtgttacccagtcctagccaagctaagaatggtaacatccttcgaataaagataagaagagatcaagattcttcagcttccctttcggagaaatctaatgttgtacaaacaccagttcatcaaatgggatcagtttcatctctgccaagtaagaaaaactcaatgcaaccacacaacaccgaaatgatggtgagaacagcatcaacccagcagcaaagcatcaaaggtgattttcaagcagtaccgaaacaaggtatgccaaccccagcaaaagtcatgccaagagtcgatgttcctccatctatgagggcatcaaaggaaaggattggccttcgtcctgcagagatgttggccaatgttggtccttcaccctccaaggcaaaacagattgtcaatcctgcagctgctaaggttacacaaagagttgatcctccacctgccaaggcatctcagagaattgatcctctgttgccatccaaggttcatatagatgctactcgatcttttacgaaggtctcccagacagagatcaagccggaagtacagcccccaattctgaaggtgcctgtggctatgcctaccatcaatcgtcagcagattgacacctcgcagcccaaagaagagccttgctcctctggcaggaatgctgaagctgcttcagtatcagtagagaagcagtccaagtcagatcgcaaaaagagccgcaaggctgagaagaaagagaagaagttcaaagatttatttgttacctgggatcctccgtctatggaaatggatgatatggatcttggggaccaggattggctgcttgatagtacgaggaaacctgatgctggcattggcaactgcagagaaattgttgatccacttacttctcaatcagcagagcagttctcattgcagcctagggcgattcatttaccagaccttcatgtctatcagttgccatatgtggttccattctaggtttgtgtagtgagatggagtaggtgagaagtagagagatgttgggagagagctgtgtgggtctgggagattatggttccctgccacagttttccagctttgttccagagcgtttcttgtttcaggttgctgagcctgtcaaacttcatgtaatgttgtatttttgcttcgtttattgcagcaattgaacttcaaatgatcatgttgttgaggataatgtgatgccatgctggatgattataatccatacattatttattcctgtaaaaaaaaaaaaaaaaaa

SEQ ID NO: 2587 - DNA, 3507 bp, Oryza sativa
  Clone ID: PAT_MRT4530_102345C.1
atgtctcgcctcttccgcgagtcccgccgcgactcctcctcctccaacggctcctccgccgccgccgccgccacggcctccaccggcggcctcccctccccgttccccgacctcggcgtccccctctccgccgccgacctccgcgaggccgcctacgaggtgctcgtcgcctcgtcccgcaccacgggagggaagccgctcacctacatcccccaggcggcggcatcggcgggtggtggtggtgggccggcgtccccggcctccgcctcgtctctctcctccgcgaacgcctcctcctccccgtcgctccagcgctcgctcacctccgccgcggcgagcaagatgaagaaggcgctcgggctgaggtcgtcggcgtcgtccaagggtgggagccccgggagcggcggcggcgggaagtcggtgccgccgcggcggccggcgaccgtcggggagctgatgcgcgtgcagatgcgggtctcggagcccgccgacgccaggatccggaggggcctcctccgcatcgccgcgagtcagcttggcaggcgtgctgaatctatggtcttgcccttagaattcctacagcagttcaaggcatcagatatccctgatcctcaagagtacgaggcatggcagagtaggaacttgaagcttcttgaggctggtttgcttgttcacccacttgttccattgaacaaatcagatgtttctgcacaacgactgcggcaaattatacgtggagcatacgatagaccacttgaaactgggaaaaactctgagtcaatgcaggtcctacgtagtgctgtcatgtcccttgctggtaggtctgatgatgggacttctgacggatgccactgggctgatggtttccccttgaatctccatctataccagatgttggtagaagcttgctttgataatgatgatggcactgttgttgatgagattgatgaggtgatggagctcttaaagaagacctggggtattctgggaattaaccagatgcttcacaacctttgctttgcttgggcattgttcaaccattttgttatgtccgggcaagtagatattgagttgctctctgctgcggagaatcagttggccgaagttgcaaaggatgccaaaaccacaaaagatccaaattacagcaaagtgttgagttcaactttaagctcaataatgggttggacagagaaaagacttctggcttaccatgagaccttcaatacaagtaacattgagtccatgcaaggtattgtgtcaattggagtgtcagctgcaagggttcttgttgaagatatatcccatgaataccgtcggaggaggaaagaagagactgacgtagctcgcagcaggatagagacctacataaggtcttcactccgtacagcttttgctcaaagaatggaagaagcagattccaagcggtcatcaagaaaccctacccctgttctgtctatccttgcaaaggacattggtgacctagcaattaaggagaaaaatttgtacagcccaattttaaagacatggcatccccttgcttcaggcgttgctgttgccacccttcattcttgctttggaaatgagctgaaacagttcatagctggacttacagagctgaccccagatacggttcaagtgcttaaggctgctgataaattagagaaggatcttgttaatattgcagttgaagattctgtggatagtgatgatggaggcaagtcattaatcagagagatgccaccatatgaagctgaaaatgcaattgctaacctggtgaaagtttggattaaagaaaggatagacaggctcaagggatgggttgatcggactttgaaacaagagacttggaatccagctgccaacagagagaatattgctccctcttgtgtggagatgcttcggatggttggtgaaacattagatgcatttttccaattgcccattccaatgcatccagttcttcttcctgacctgatgtttggacttgatagaagcctacagctttttgtgtctaaagcaaaatctggctgtggaacaaggaattcttttatgccccaactacctccgttgacacgatgcgaggtaggatcgaatatattgttcaagaaaaaggaaaagccacagaatccacagtaccgaggatcacaaaatggaacaaccaatggcgctgatcccttagcccttcctcaactctgtgtacgcttgaatacgcttcaattcgtgcgaggtgaactcgagaacttagagaagaagataaaaacaggcttgcggaatgtcgagtcagctcaggcagatgttaccgatggattggacatcaaatttgagctttgtcagacagcctgtcaagagggcattcagcagttatgtgagacaactgcatataaggtgacattctatgatttggggcacgttctctgggatatcctttatattggtgacattgcatcaagtaggatcgagatattgttgagagaactcgaccctatactagagaccatatctggtatggtgcataacaaagtgcggaaccgtgctataaccgcattgatgaaagccacttttgatgggttcttgctggtgcttcttgctggtgggcctttgcgtgctttcacccgtcaagactcccagataatagaggatgacttcaaggcccttaaagacctgtttttagcagatggtgatggtttgccagaggaattggtcgataaggcatcctcccaggtcaagaatgtcctacccctcctacgaacagactccgagagccttattgaccgattcaaacgcatgatggctgagtctaatcgatctggagccaagaataggttaccattgccaccaacaacagggcactggagcccgaacgaacccaacacagtcctgcgagttctgtgctaccgttatgatgagacggctaccaagttcctaaagaaaacctataatcttcccaagaagatctgatgaactcgatgtacattttctggaaacaaaatcatgaaacccactgaggaagtcaggatttggaatgattttgtcacatcctcctttgaggaacactaccattgtaaagctaccactgcggagtttgccttatctgaggcgattgatttgaacgggggagttcaattcagcaacttggcccttctatcatatgctgttcagtggcgccaagaaatatgctggtactcttttctttttcttttttctttttttttttggggggggggattacttacaggtcgatttgtttattattatgattatatgttttaccctaatccagttcttttgctgacctttgccgctgcatgtgtgtatttttccagtagctgtagtttgcaacagatatacccatcttgtgaataagttttgtactggtgtgacttgctgcgttggacttgagtatatcattatgcaaggcatctggttcctgcaaaaaaaaaaaaaaaaaaaaaaacaagaaaaaaaataacccaagggcctgtgccgaatgccggcggccccgggccg

SEQ ID NO: 2588 - DNA, 686 bp, Oryza sativa
  Clone ID: PAT_MRT4530_102346C.1
actactaaaataccaatgcgtttatatatatatgcttgacgaatcaagtgccacttccacttacatcaactaacaaatactcttttctttgcttttccactaactaacctaactaaaacatagtagaaaactaatccaaaggaaaaaaaaacaagaaatgataagaattaacagcaagagtacttgatagaattaatcatggcgaattgagaattgaacaaacagcacatgtacactaagaaaaacatgatgacatctcacggtgcaaatgcatgcatgtacacatggacgcatatggccggacagacaactaagccttgtgtgacctgtacgtaataaaccatcctcacttgacgcggttatctctcgccggcgtggcgccgccgccgccgccggcgttgctgttgctgcccttgatgaactcgaggcactccgcgacggcgcgcgcgtagaacgagttggaccgcatgcacggcggcctccgcgccgccgccttgttgttcccgccgcccgccgtgccgtccgcgtgcagctttccaccaccactcgccggcgcgaccacgtccttgccgccgccgagcactgccagggccctcctgcctttgcctctcgctgacggcgacgtgctaccaccgccggcgcttgggacgacgagccccccttgtgagcaggcgcacgctgcgcac

SEQ ID NO: 2589 - DNA, 489 bp, Oryza sativa
  Clone ID: PAT_MRT4530_102347C.1
atgaggcgtagatcccccccaggtggaggtggtgaacgattgaccgtcgacgatagaccggcgatgcgccgaggcgcggccgagcggagccacaaggcagcagagacgacatcagggccactgtctagtgtcgaaggctccaagtccaagggggaaattaatttcaagacttcaaggcacagcaaacccaaatcgggcaaaccactgaggacgtgcgcggtgcggcggcggcgtctgggcggcggcgactgcaccggctgcggcggcggctgccggctgcgtcggcggcaggcggcaccgaggcgagtaggtagcgcgtcggtccagtctgcagcgtgctcgtcggcggctgcggcgtgcgtggcggcgtcggcggcaggaggcgccgaggcgtgcaggcggcgcgtcggcgcctcccccccggccgcgccgccggtccgcccgtcaggcgtcggcgcgtcgccggcgtgcaggccgccagtccgctag

SEQ ID NO: 2590 - DNA, 175 bp, Oryza sativa
  unsure (1)..(175): unsure at all n locations
  Clone ID: PAT_MRT4530_102348C.1
gggcagccaagattgaagcgcacgatagtacgaacgcgcacaaatcccgcccnnnctctcctcctncncgaaccgcagnacgcgatttnaatcgatcgatcgatcgatcnnatctccccnntttcgnctganatctncagnaaacggctnaattttntccccnntgaatgggagg

SEQ ID NO: 2591 - DNA, 333 bp, Oryza sativa
  Clone ID: PAT_MRT4530_102349C.1
tcggcacgagggacgccgcacttcccctcgcgccgcgccgctgttctcttctccggccgcgcttctgcggcgcggagaggttcgccgcctcgatcgacatccgtcccccctccagattgcgtcccggggccgcgggagaggccgggggaggcggggaggagggtacggattcgagcacccggccaagcacaccccccacgaggatttcccggtgagggtcctctcctctccactccattccccgctccgccatccccacacttacctgcacccattctttccctctcctctcgttgttgctgctgaatgcgattttcgccatgctcgtggtgt

SEQ ID NO: 2592 - DNA, 141 bp, Oryza sativa
  Clone ID: PAT_MRT4530_10234C.1
atgtctcggaggccggcgcgtttgatggtggccttgtgccgtcatgtcgggaacgggtgccctgcctgtgtgctcgtcttcaccagcgaccttcgctcactaggattgctcgtggaggttcaacctggtaggacgtcctga

SEQ ID NO: 2593 - DNA, 1128 bp, Oryza sativa
  Clone ID: PAT_MRT4530_102350C.1
atgggggaggaggtgcatctgggcttgccggggccctgggcggaggactaccgggagaaggccgaccactacaccaccaagatcggtggagtccccgttcatgctcctgtggcaaagttcaacattgagaacaggactatctatgtgcttgtttgtccgaagccaaaatgtgggacgaacccgcaaagttggaaggtcctaagagtccaaaagtgccacaccagtgcacaaacagatggcaaggttgacgaaacagatcaaataaacggaaatgtttgctcaagtgagccttcttcttcaagtttactgaacaagagccatgaggtcagtgatgatgatttcgatctagatgccttagccaatgcacttgaggaagcagcgacgttagcatctaactcaaagaagcaaaacaaaccaaagcgtagtaatgcccctataaaatgccctgtaggaaagcagaaagtggatgatccaagcttaccagttcttccttgcttctacatctattatggtaaggagcaatttagagacaaaggcagtgtaggttcaaatagcagcgagtcagttttagcgaaagaaattgcagatgtagcaaatgacgaagaagagaaatgggaaggagaaaactatgaatatgacagagctattggtgctgacagaacgttcttaaaattcaagaaacggttggatgcatatccgcagcaatgctttaggtattcttatggtggtaagccactgttggctgcaacaaaccttcaagattctggcacatgccagctttgtggttcaccacgccaatatgagctacaattgatgtctccattgtcatatttcctccatgaagctggtgatggttcctcagattatgcacctgatggctggacctggctgactcttatcatatacacctgctcaaagtttccagtttctacaccgaattcgcttgatattcttactgcgtttctgaatccattcgttccaaacatactcatgtgcatgcaaaagcagaagcttgcgcgttttggccgctctttccacgtcggtgtagtggtggaaccggtggttggatggtggtggaatggaatgtggatgcctttcggtgttcttgctccatatggcgctgagtaa

SEQ ID NO: 2594 - DNA, 366 bp, Oryza sativa
  Clone ID: PAT_MRT4530_102351C.1
ccggccgggagctgtccggccactctgactaaggacacgatgagtcgtagtgaccacctccgagcccgagacagtctacgacatctagtactacacggccagagcgtgcgtcgagaccgtccgcccgtccggcggatcctcctccgcaagaccgacctcgagcgctacatggccgtctaggagttcgaccccgcctaggaattccacgtgccttacgtgaacaccgccatggaggaggactacgacgccctctgtggcgtctaccagaagtgatggtcgaggaatctacctttcttgtgcttgcacttcgtcagaagttgcattggcttcatttgtgcccttgaaatccattttgtatttcagagg

SEQ ID NO: 2595 - DNA, 628 bp, Oryza sativa
  Clone ID: PAT_MRT4530_102352C.1
agaactccttctggtcccacacaagatgcttaactcttttggaggcactaaagttttcacagctaattgttgcatgctcattgggagatacagatattgctaggtcatgaacaaagctatgcattttacaatgtgagatggtgccatcatgactaaaaacatagtcttggaaaagagatctccctgcaagctcactaaaatatctctctcccattcttattgcctccttacttccactagctgtattcaacagacccattgccatccaatacattattaaaagttctctgaaaatctcatagtcctttgggaaagtggataagctggcaaaacatgctcttaaatcagatggaagtgcatcataactcagttttaaaactgataagatatccgtgttcgggatatttgtttccttaacttcttgccacttagagatatcttccatagacaatagggatcccagagtcctaactgctaaaggaagaccatcacatttctgtacaatggattctccaatttttagtaactcagtatcctttgccttctgtcctttgaatgcatatcgagcaaatactttcatgcattcttcatgtggaagttttggcacttcatatggctctatggtctt

SEQ ID NO: 2596 - DNA, 1405 bp, Oryza sativa
  Clone ID: PAT_MRT4530_102353C.1
ttactcagcgccatatggagcaagaacaccgaaaggcatccacattccattccaccaccatccaaccaccggttccaccactacaccgacgtggaaagagcggccaaaacgcgcaagcttttgcttttgcatgcacatgagtatgtttggaacgaatggattcagaaacgcagtaagaatatcaagcgaattcggtgtagaaactggaaactttgagcaggtgtatatgataagagtcagccaggtccagccatcaggtgcataatctgaggaaccatcaccagcttcatggaggaaatatgacaatggagacatcaattgtagctcatattggcgtggtgaaccacaaagctggcatgtgccagaatcttgaaggtttgttgcagccaacagtggcttaccaccataagaataccgtttcttgaattttaagaacgttctgtcagcaccaatagctctgtcatattcatagttttccccttttttttttttttttttgtcatttgctacatctgcaatttctttcgctaaaactgacttgctgctatttgaacctacactgcctttgtctctaaattgctccttaccataatagatgtagaagcaaggaagaactggtaagcttggatcatccactttctgctttcctacagggcattttataggggcattactacgctttggtttgttttgcttctttgagttagatgctaaagtcgctgcttcctcaagtgcattggctaaggcatctagatcgaaatcatcatcactgacctcatggctcttgttcagtaaacttgaagaagaaggctcacttgagcaaacatttccgtttatttgatctgtttcgtcaaccttgccatctgtttgtgcactggtgtggcacttttggactcttaggaccttccaactttgcgggttcgtcccacattttggcttcggacaaacaagcacatagatagtcctgttctcaatgttgaactttgccacaggagcatgaacctgagcaacaaggcacaacttggttccacataaaccgcattggagcaagtgaggtttaatgcccatatcctcggttggccagtcggggactccaccgatcttggtggtgtagtgatcggccttctcccggtagtcctccgcccagggccccggcaagcccagatgcacctcctcccccatcccctccctgcctccctctactcttcccttggaagagaggttcttccacacaacgagcaggtagcagcgaggcaggcaagatggccgagccaagaatccggccggtactcgccggcgtccggcggcggaaagagaagggggttaggcacttaggctagtggcggaggtttaggaattgagaaggcggcggcggcggcgtatccctgcagcccggggatccact

SEQ ID NO: 2597 - DNA, 459 bp, Oryza sativa
  Clone ID: PAT_MRT4530_102354C.1
aaccgcccatcgtttgacactggggcggcacgatgactggcgccggctgccatgatcggcctcggctccagatgactggaggacatggtcatgatcacgcagcgtatccagggtgtcgatgacagctgcgcacagtcgtgacggcgtgctgatgtgccggtgagagagtcgaacctcttcatcagcggtctggaggacatgcgctacctctaacgccaaccgctatgaccgcaggctgtgcgacagatgaagccgtcctagacgtgccgcgctcacatggcagggactgagcctgtcgagggaggggaaccgctcgccgctggtgctgctcctgcactgtcatgactggtgatcgggggcttgactgattctaccgcctccatcgttgtggatgctgatcttgccgagatcctggatgacagagtttcccattctgcagtagagatcgctgttgtcggc

SEQ ID NO: 2598 - DNA, 1239 bp, Oryza sativa
  Clone ID: PAT_MRT4530_102355C.1
atggaggcgaagctgtcggcggcgtcgaggcgggtggcgccgtcgcccatccagcagctctcccacctggcgcagcgcgccggcgccgtcaacctcgccgagggcttccccgacttcccggcccccgcccacgtcaaggccgccgccgccgccgccatcgccgccgacctcaaccagtacaggcatgtgcaggggatctgcgacgccctcgcggagacgatgaagcgggaccatggcctccgcgtcgaccctctcaccgacttcgccgtttgctgcggccagtctgaggcgtttgctgcagcgatatttgcaataattgaccaaggggatgaagttttgctctttgatccagcttttgaaacctatcaaacgtgcattgaactagcccgaggtgtccctgtgtatgtgccgttggatccaccttcttggactttgaatgaagataaatttttgaaatcatttacaaaccggacaaaggcagtggtcttgaatatcccgcacaatccaacaggaaaggtttttagcagagaggaattgcttatcattgctcaagcttgtcagaaaatggactgctttgcaataactgatgaggtttatgagtacattacttacgatgagaacaagcatatctcattggcttcgcttccaggaatgcaagaaaggaccatcattacttcctcactgtcaaaaacttacagcgtaactggttggagaattggatgggcttgtgctccagctaatatcgcctcagcaataagaaacatccatgtcaagctaactgattcagcccctgcaccattccaagaagctgcgttggttgcgttaacaagcccaccagacttctattcatccttgaaacaggactacacggcgagaagagacttcatccttcaggtgcttactgattttggcttccgcattagcttcaagccacaaggctcgatctttgtatttgttgagcttccaaggtcatggcaactttcagatatggatttcgtgacgaacttgataaaaaatgctggtgtggcggccgtgcctggtcggggattcttccactcaagtaccgacgacccaagctaccatcaccggtatgtcaggtttgcgttttgcaagagcaatgacaccctaaacgctgctgccgagaagatgaggaagctagcagtcagtcatgatgcaaggttattgaggcctactgatgatggagaagcaggtcagactgcatcagccacctctccttga

SEQ ID NO: 2599 - DNA, 446 bp, Oryza sativa
  unsure (1)..(446): unsure at all n locations
  Clone ID: PAT_MRT4530_102356C.1
ancctgtggtgtanggtgtggttgtttcaatttgaaagaagattaaaatcaacagtcaatgaggtattaaagcattaatgattggcagcgctcatactttgngagacagtagggagtntcantctntgnnccganatcgaangnntatcngattggacctgngatacaactgtagtnggtggagaaacgagcaacgggttcngtnaagaccaaggattctggntttctggtncngacangtgantaatgtcgttggaatacatgcaggttccccatgttncgtagatggaccatccccatagttcctttnatgatcatctgcagttcttccttgtaaatacatttcaccttcctgatcaccttgcatcggttatcagatgtacatcgggatcgtaatcggcgtatgtacctaatcgagcgtattgacatacctaagagattcatgt

SEQ ID NO: 2600 - DNA, 322 bp, Oryza sativa
  unsure (1)..(322): unsure at all n locations
  Clone ID: PAT_MRT4530_102357C.1
gtgtaaatgtcatgtctcctcccgttaaaccctagcttaagcccccttcctcttctccgcgcctccgcctccgcctccgcctccggtctcccctctcctcacacgctccggctccgacggacgattcccacccagtaatggcgatggatttggacgagccgctcgacgcggagaagggcgaggcggcgntgcggcggctgcgcgacgcccacccggtcctctacctgtacatctcggccgacctcgacgtcgccgtcggtgaggcctacaagcacctctacgactagctcgtccccttctccaccgcgcagccggccccgct

SEQ ID NO: 2601 - DNA, 297 bp, Oryza sativa
  Clone ID: PAT_MRT4530_102358C.1
gcgttcgaaagaatgttttttgaggctccttgaaattgactggtaggatgtttcatagaattcctttgatggtagcagttttctgatggtgtcatttagactaattaaccatccaatgaatggtctactgttgtgtcattttggggatgttgggagaagtttggattttgttgtgcatttggactaattaatcatcgaagtcgtcggcagaggattcaacttgctgagtgtaagggaatggaatcagaacaatcttcttattatactgtataaacatctcctgtacttttggctggc

SEQ ID NO: 2602 - DNA, 316 bp, Oryza sativa
  unsure (1)..(316): unsure at all n locations
  Clone ID: PAT_MRT4530_102359C.1
cccacgcgtccgcggacggtgggnncnggncggcgtntgtctnccttccattttccaacgncctcctccctcccttgttaattcctcctcctcgtcgtcgtcaacctcccgatcgagntcccaccccagccaacgacccaaccccagcttctcctcctcctcctttcaaatcacacccttcgncctcggaattctctgcggtgcagcaccagnatctcgcaagtcaaaccatccttatttattctggttttcttgncttgttgctgctgctgctgcgggntgattttgatcttggaagaggaggaggaggaggggg

SEQ ID NO: 2603 - DNA, 406 bp, Oryza sativa
  Clone ID: PAT_MRT4530_10235C.1
tttgtcggtctgccgtggggcctggggcgtggggggcgggcgcccgctgtgcgtggctgggcgcgttttttcgcctgactggcccttgtggtcttgtgccggtctctttggtcttcgcgggtgctggccggagacaccgcttgtggtctcggttgctgtctttccggcctgctgtgtgggccgggacaggctggttgagctcccttgggtgtgatgcctcgcgggtggaccgactgtgcggctcgccggggcctgtgtgtcttacctggtctattatctgggggtggtgctctcccgggttgccttggccttgcggccgacggtcgtgaaccggacctggggttttctcctgtgcccgtggcgtctgctactctgggcgcctggtgtttgtcgaatcccttacagg

SEQ ID NO: 2604 - DNA, 1479 bp, Oryza sativa
  Clone ID: PAT_MRT4530_102360C.1
atggggagctcgccggcggcggcggcggtggaggagctgacgaggctgtaccgggagctgccgcggaggccgagcgccgaggaggtggaggcggcggcggcggcggtgctggcctcagaggcggaggccgagggcgccgccgcgcgcctcgcccgggcggaggccgcggcggcggagggcggcgtatccggggagctcctcgacttgctgagggaggcgcgggcgaacgccgttcttccggcgatcggcttgctgcggcggaggaaggaggcggagatagtgatggaggtggagaggaggttcaaggtgttcgacggattgctcgcgcgggcgtcgcgggtggcggaggcgggcgaggagagggtcgactccgcgccggctgagtcggtggaggaggacgtgaggaggacgccgcggggattcaccggcggcctcgacgacgagatggtcctgtgcgagatcctcgtgcgcctcccggcgaggtccgtcctccgctgccgcgccgtgtgcaccgcctggcgccgcctcacctccgacccggccttcctccgcgcccaccaccaccgccagcgggacctccccctcatctacttccgccgcggcggcagcgaccgcgtcggcgccatcgacctccatgccgcgcagctccgccccgtcgtcgaccacacctggccgccactcggctacaccgtcatcgcctcctgcgacggcctcctgctcctctcctccggccgcttctacatctgcaacccggccaccaatcactgggccgaaatcccgcagctcgtcgatgccgatttcttggggctttacccgcacaacccctccggtgagtaccgggtgctgtatggtgaattccatggagaagaagagtgtgtctaccacatcctcacattgggctccgatgaaccaaggtgcatcacaatgacaatgggatcagagactgtggagcagccattggcaagggaatttctgatgcatgcccgtggcgatcggtccgtgctggtgcgcggcaacctgcactggtatctgaggcacagagatggaggctgcaagataatggtgttcgatacagcgagcgagtcattccagtggatgcgccacccggcgatacctggttgggtgtctttgttggagatggatagcacccttgtcttctccgcggttgaatgtacgacgaggatcgatctttgggtgctgcaggactatgagaggagcacttgggcatgcaagcaccgcatcgaattgccgatggcgcagattaggcagttcccggagtgtaatcttgagcatcttggctggtctgcgatggttgtttctgtggagggggatgtgctggtcagatgctcgaatcggattttacactgtgataggaagggcaatgtgttggcttctttccagtttgatggtcagctgccaatgaattgcttgcataggctcaaagaaaatcttgttgttcatccattcttccagatgtaa

SEQ ID NO: 2605 - DNA, 689 bp, Oryza sativa
  unsure (1)..(689): unsure at all n locations
  Clone ID: PAT_MRT4530_102361C.1
atatatattatattattattatattattattatatatattattattatttatatattatatatttatatatttatttattattttattatattttatttatttttttttttggtgggaaccctggccaaactaaaaagaaaaaccaaaccgggtaaagaaaccaaacccagggccgggaaaaaaactgggttaaaaaaaacaaaaaatctctgggggaaacgggaaaaaaaaacgggtttaaaggaacaaacaaaaaaagactactacgggccaaaatttaaacttaaaaaaaggggggaaaaaaaaggtaaaaaaaaattctggcaagggggggcacggggagctgttaaaacttccccggggcaaaaaaaaagggaagggggccccctttaaaaaaaacccggcccaaaaattttcaagggcccttttttagggggaccccccaagcttcacccaaaaccaaattcaggttttcgaaaaagccgaggattcggccctaaaacgggaggccctttggctcaaaaaaccaaattgggaggccccctttactttggagaaaacgaaaaaaaagggtgaggggcggggaaaaaaccctcggcacctggggggaccccaggggngggggagtttgttttccctaaacctggggggctttttttcttgcccttgggaaaccgaacgcgggggt

SEQ ID NO: 2606 - DNA, 173 bp, Oryza sativa
  Clone ID: PAT_MRT4530_102362C.1
gagacacatgcgatgagatgagagcccaacgcctcgacctgtatgattattcaagacaagggcgaggcggacaactcatctgtcaaggtccggaattacaacacctgactctgcggaagtagctactttaacaaccacacagggagctgcgccactgactgggtatcctgcaa

SEQ ID NO: 2607 - DNA, 340 bp, Oryza sativa
  Clone ID: PAT_MRT4530_102363C.1
ctaggccgggcgttcatttctctgacctagcatctctctcaatccgggcgccgtcatgtaggagccgatcaagaagcagcagcaactgctgcccgccgctgcggcttgacatccgcctccgacgccggggtagaccaccctggatacactgctggacgcgtccgccgacacatatgaggaagaggacgagaagaaacagcgactgcccacctgctcggtgacggaaccgcggacagggcctccgtgagtggcatcataggtgcggagggccaagataccgaatacgctggtcgacacctacgacgaggactggatacgacgggagctcaagggcctgatc

SEQ ID NO: 2608 - DNA, 267 bp, Oryza sativa
  Clone ID: PAT_MRT4530_102364C.1
gaatccaacttttcttatttatttcttctgattactattatcatcacattcacggagaaagcagcatccaaacatgatagatgctactagcaaatattgataattaattatccagaaacccggatatgtaattaaagaagcaaaaaagcagggcctttttaattaattactaaggaacgcactccttgccacccccaaacatggggcagccaaagaataccagagaactgcaggttgcacagaccgaaggctcgtagcgcgctcgcc

SEQ ID NO: 2609 - DNA, 225 bp, Oryza sativa
  Clone ID: PAT_MRT4530_102365C.1
atgggggttcaattgaaccccaaacctttacttgtattaagagaggctaaggctctgaaattaagagaaaaggctcgttccagatctagaagagaagcaagcaaaatcgagacaaaattaagtgggaggaagacacagatggatgagaaagagaaatgtggaggtctaaaactggacttccaagtaaagcgtatttactcgttcaggaaagatacttttttctaa

SEQ ID NO: 2610 - DNA, 299 bp, Oryza sativa
  Clone ID: PAT_MRT4530_102366C.1
ccatgccatttcgggtctttgggatgagagagtggtgaattttggttgtacgatgcgcttagctgacataagttttatgtcgaaattcactttcatcaaaggttttaagtgtcatgcttgtgttcaaacgaaacaatgtcgcaaggctcacaacacatttgaggcaagaaatttggcaacgctagaacttattcatttcgatatgtgcaaaatgaatggggaaagaaatacttcgtgatacttatagataattgcactagattctgtgaacttgttttgacatggacagtagaaagcaa

SEQ ID NO: 2611 - DNA, 333 bp, Oryza sativa
  Clone ID: PAT_MRT4530_102367C.1
atggctcaccgccgaggacccaccgccaacgacgacgaggcgcagcggccacccggcgcacgacgcgacggcaagcggcggcaccgagcacacaagcacggcggcggcgcaataggcggaacggcgtcggcgcccgattcttggcatctgggatgcgacgttgggagcaagattccggcggcggcgactgcgagggcggtgcagcagagtaaggccgggtcgagctcgaggctgacgaggaagaggaagaacgtcagcgtcgtcgagaactccggcgacggcggtggcaaagtacgccatcaggtgtggaggaggaggtccggtgccgagtag

SEQ ID NO: 2612 - DNA, 348 bp, Oryza sativa
  Clone ID: PAT_MRT4530_102368C.1
gggcaaaaaatttttcaaccattttttttccattttggattccccaaaaaaaccctttgttagggggaaaaagaaggaaaaaaagaccaaaaacgatcacaacacggttggggtactccaaaacgtaaccttccgggcactcccactaaaacccaaaaacctttttaaaaagagggaaaccgggcccaaattttggggggcactttaaaaattggggcttttaaaaacacccagggttttttgggtttttggttttccaaatatttaaggaaaaattcctttaaccaaagccccccttgaaattcccccttcaaagtttttgacaaattttttttaaaagcccagggg

SEQ ID NO: 2613 - DNA, 201 bp, Oryza sativa
  Clone ID: PAT_MRT4530_10236C.1
tgttttttaagacagaagcgaccaccagaagggggcggcgattaaaaatgactggagggttacagaaagaacaaaagaggcgggaactagcgaaggccgtcataagaatatgacgatggttagtgcaataaagcacgctcgttggcgtaaagcaccgtgtccgtgaagaataatcgcaaagactcactgcttttacaagaa

SEQ ID NO: 2614 - DNA, 198 bp, Oryza sativa
  Clone ID: PAT_MRT4530_102370C.1
ttatttttggttttttaaaatttttgggttttttttttttttttttcacatctaattcacacacttcaaccaatacataaaaacatatgcaaaaaaaatttcacccaagatccccaccaaggcaaacaaactgttcacacggataaaccaaccgacacataacaatccccagggatgtcccatcaaacaacggtcact

SEQ ID NO: 2615 - DNA, 2535 bp, Oryza sativa
  Clone ID: PAT_MRT4530_102371C.1
atggggatgtcctcgccggtgacggaggcggagatggcgacggtgaagacgtcgtccaacggcgtgtggcagggggacgacccgctccacttcgccttcccgctcctcatcctccaagctctcctcatcctcctcctcagccgcctcctcgccctcctgctccgcccgctccgccagcccaaggtcatcgccgagatcgtcgccggcatcctcctcggcccctccgcgctcggccgcaacaaggcctacctccgcgcgctcttcccgccctggagcgcgcccgtgctcgagtcagtcgccagcctcggcctcctcttcttcctcttcctcgtcggcctcgagctcgacctccgctccgtgcgccgtagcggccgccgcgccttcgccatcgccgccgcggggatctcgctcccgttcgcgtgcggcgtcggcgtcgccttcgtcctccgcggcgagctcccgggcgccgcgcgggcgggctacgcgccgttcctcgtcttcatgggcgtcgcgctctccatcaccgcgttccccgtcctcgcgcgcatcctcgccgagctgaagctgctcaccacccccatcggcgagacggcgctggcggcggcggcgttcaacgacgtggcggcgtgggtgctgctcgctctggccgtggccatctcgggcagcggcgaccaccggagccccatcgtctccctctgggtgctcctgtcgggcgcggcgttcgtcacaatatggatggtgttcgtcaagccggccatggcgtgggtggcgcggcggtcggacgggcagggcggcggcgaggtgtgggtggcggcgacgctggcgggcgttctggcgtcggggctcgccacggacatgatcgggatccacgccatcttcggggcgttcgtgttcgggctgacggtgcccaaggagggggagttcgcggggagggtgacggagagggtggaggacctggtgtcggagctgctgctgccgctctacttcgcgtcgagcggcctcaagacggacgtcgccaccatccggggcggcggggcgtgggggatgctggcgctcgtcatcgggacggcgtgcgccgggaagatcgtcgggacgttcgcggtggccatggcgtgcgggatgtcggcgcgcgaggcgctggtgctcggcgtcgtcatgaacaccaagggcctcgtcgagctcatcgtcctcaacattggcagagaacgcaaggtgctggacgaggagacgtttgcgatcctggtgctaatggcgctggtcaccaccttcatcaccacccccacagtcatggccatctacaagccggcgcgcaacgccggccgccgccgcctgcaccaccgcaagctgcatggcccctccgcgccgtcctcaccgtccgcggctgccaccgccggcgccaaggagctgcgcgtgctggcctgcatacacggcggccacgacgtgccggcgctgatcaacctcatcgagaccatccgcggccacacccagccgcgccgcctcgtcaagctctacatcctccgcatggtcgagctcaccgagcgcacctcctccatcctcatggcccgcgccgcgcgccgcaacggcgtccccttcctccgccctcgccgcggcggcggcgaccaggtcgacgtcgccttcgacacctacgcgcagctcggccacgtccacgtccgccccatgaccgccgtctccgcgctccacaccatccacgacgacgtcgccgccgtcgccgaggacaagcgcgtctccctcgtcgtgctcccgttccacaagcgccacccgggccacggccatggcgacgacctcggccccgagtggcgcgccgtcaaccggaggatcctgcgcgaggcgccctgctcggtcgccgtcctcgtcgaccgcggcttcggcggcggcgagcaggtcagctcggagcaggtcgcgcacggcgtctgcgtcgtcttcttcggcgggccggacgaccgcgaggcgctcgagctcgccgggaggatggccgagcaccccggcgtgcaggtcaccgtcgtgcggttcgtcgacggcaaggaaggtagcgaggagcacgccgaggtgacgctgcgcccgtcgaacaccaagaacgccgacaagagctacaccttctcaacggccatcgtcgacacccacaaggagaaggagctggacgaggcggcggtggcggaattccggcagaggatgggggccatggtgaggtacgaggagagggtggtggtggggaacgtgatcgaggaggtggtgtcgatcgggaagagccgggagtacggcctggtggtggtcggcaaggggcggctgccgtcggcgatggtggcggagctggccgtccgggcggcggagcacccggagctggggcccatcggcgacgcgctggcgtcggcggggcacggggtgacgtcgtcggtgctggtggtgcagcagcatgacatgagcaacgccgacgagctgccggtgtccatcgtcgtcgacggccacgcccacgacgacggcgagctcggcggcaacaaggacatggccgagccataa

SEQ ID NO: 2616 - DNA, 126 bp, Oryza sativa
  Clone ID: PAT_MRT4530_102372C.1
ctttctttctcgttcttgcctccggcaatatcaactggagggcccagggacaggtaggccatcatcacattgcagacaccaagcacctactgcatcttaccctcgcacacctcatccacaagaagc

SEQ ID NO: 2617 - DNA, 1155 bp, Oryza sativa
  Clone ID: PAT_MRT4530_102373C.1
ttggaatctatgcatgtgacacatatgactttggtgattcattattgattatacttcaattggctaagtgttttgatgccatgatgattattgttttaaaagccatttgaattagtattcatctagacatgttagttggatgttatagtttttcatatgtctatagagaagaaaatttggtccaatagtttgatacaccaagcatctggctattatgtgaagaaaaattatatactaaaggccgatgcttgtgagttagaaatagcttggagaattcctttgattagatatttgaaagatcctacacttaaggttgattggaagattcggcggcaagcattcaaatattatatcgccgaaaaatagatggagtattgttgaagtacttagataatgatcaatctaaagttgctaggagaatagtacatgaagggatttgtggaattcatcaatcggcccgtaagataaattggttgcttaggagagtggggtttcattggccgaaaataattgatgattgtttcaaatactatagagggagtgaagcttgttaacggatcagcaatgttcaattagcgcctaccgctgtgttgaatcctatcattaaactatggctgttccgaggttgggctttggatttcattggtcaaatttatccttcgtcatcaaaggggcatcggttcatgctagatgtaatggattacttcactaagtaggccgaagccgtgccgctcgagaatattacttacacggaggtaattgactttatttttgaagcatattgttcatagattcgttttatgtctaagaaggtgagaagttttgccgaaattttatgatattaagttgttgagttcttctctctactacgctcaggctgatggataagccgagtcgagtaataaaacattgttgaaattgccattttgccagttgaggtaaatcttggctttcttcggtattttaagaaagacgacttatcgattgaagattacaagaccttgatgggaagcaattttgaagacgtcatcgacaagcgtttgaagactttgaaggagatgaagacacttcaagacggtgttttcaaagcatttggtaagatgcttaggaagtcctatggccggtaattggattatcgccctaagacaatatgtt

SEQ ID NO: 2618 - DNA, 646 bp, Oryza sativa
  Clone ID: PAT_MRT4530_102374C.1
ttggaatctatgcatgtgacacatatgactttggtgattcattattgattatacttcaattggctaagtgttttgatgccatgatgattattgttttaaaagccatttgaattagtattcatctagacatgttagttggatgttatagtttttcatatgtctatagagaagaaaatttggtccaatagtttgatacaccaagcatctggctattatgtgaagaaaaattatatactaaaggccgatgcttgtgagttagaaatagcttggagaattcctttgattagatatttgaaagatcctacacttaaggttgattggaagattcggcggcaagcattcaaatattatatcgccgaaaaatagatggagtattgttgaagtacttagataatgatcaatctaaagttgctaggagaatagtacatgaagggatttgtggaattcatcaatcggcccgtaagataaattggttgcttaggagagtggggtttcattggccgaaaataattgatgattgtttcaaatactatagagggagtgaagcttgttaacggatcagcaatgttcaattagcgcctaccgctgtgttgaatcctatcattaaactatggctgttccgaggttgggctttggatttcattgg

SEQ ID NO: 2619 - DNA, 255 bp, Oryza sativa
  Clone ID: PAT_MRT4530_102375C.1
tatgtctgtaggaatgtaaattgcacaaatgtaaatgcaacaagtaaatgagacaaggagacgagagatttttcactgaggttcggaaactcgtcggtttcctacttcccgtcgaggcgagcccaactccaccgctcaaccacgaagccaccgcacgcccccttcgtcaaggggtgggcaaggtgggagccggcctgcggagaggactacccaagccttgatcactcagggtagttcttccttcactccgaaggt

SEQ ID NO: 2620 - DNA, 637 bp, Oryza sativa
  Clone ID: PAT_MRT4530_102376C.1
ttggaattcatgtctgtgaggcatatgactttggtgattcattattgaattggctaagtgttttgatgccatgatgattattgtttcaaaagccatttgaattagtattcaactagacatgttagttggatgttatattttttcatatgtctagagagaaggaatttcggtccaataatttgatacaccaagcatctggctattatgtgaagaaaaattatatactaaaggccgatgcttgtaagtaagaaatagattggagaatcactttgaatagaatatttcaatgatcctagtcttgggattgatcggaagattcggcggcaagcgctcaaatattatatcgccgaaaaataaatgtagtattacttggataatgatcaatctaaagttgctaggagagtagtacatgaagggatttgtgaaattcatcaatcggcccgtaagataaattggttgcttaggagagtggggtttcattggccgaaagtaattgatgattgtttcaaatgttatagagggagtgaagcttgttaacggatcggcaatgttcaattagcgcctatcgctgtattgaatcctattatcaaatcatagccgttcggaggttgggctttagatttcattggtcaatctt

SEQ ID NO: 2621 - DNA, 1945 bp, Oryza sativa
  Clone ID: PAT_MRT4530_102378C.1
cttcaaaaatcaaactcctccgaaacctcccacaaatggctgggctcttcctccccaacctgaaaccccaaaccctaacccccccaatccggcgacccccctccaccgcagcggcctctccagcccctcgccgatggcgccggaggcgaggcaactcaaggtgcacctccgggagaacgaggcggtcgcgcaatgcgtcctggagaagtggcgctcgatggaggagaagccgggcggcctcaaggagaacctggctcacacgctctacaaatcctaccgcaacgtctgcgccgccaaggagcccatccgatccctcaaggacctgtatcagatcaagggcgttgggaaatgggtcataaggcaactgaaaggatcctttccagagtctagtccagatttatctcccccggaaagtaatgcagcaggagaaaaggggaagaaagcaggagggtcaaagcgttatgtgccacagaagaattctgctgcttacgcgatactgatcacgctccatagtccagacaaaagtaaagcaaaaccaggggcttttgcaagttctcagaaggactggtacactggatggagctgcatgaaaacattgacatctaaaggactggttgcaaagtccggtaaccctgcaaagtatatgataactgaagaagggaaatcgactgctcttgaatgtctctcaaggtctgggttagatgatcatgcagcacctttggtgataaacagtgctcccgacacatctaatgcaagtcataagttgaataatatttgcatgacttcttttgttgagacatcatccggaccttctagggcaattggtagacccaaaacatctattgccaaccctgccactaagacatcaccagaagtgacatatttgacaagtcaagaatcactcaattacaactctgatgttagaactgctgagaactgtgctgaagaaatcattcttagtgactcagattctgaagaattatatacagagaactatcctctaataggcaagactactacaaattacagattctcagactgttcagcttctatttctcctcgttcgtctgaaggaacatttgagatgcagtcttctagtacaatgggtattgctgaattcaatatgctggacaatgatactgtatgtatggacaattctatactagccatgccacctcggcgatccagtaaaaattttcttgaagattatgaagttgtgttgatattggatgatcgtgaaaattttgggggtcgttcaagaaaaactgttgataacatacattcacaatttcgtgtacctgtagagataaagcatttgcctgttggggatggtatttggattgctcgtgatagaaagcttcacacagagtatgttcttgatttcattgttgaaaggaagaatgttgcagatttgtgtagttcaatcacagacaaccgatacaaagatcagaagttaaggctcaagttttgttacttgtacgaaattcagtttgtttcttattataatcctatcagcagctgcttcaccactgaaattcttgaaggatttgatgtccagagaacccctgggtatgctgagactgtaaggacatatggcaaccttactcattcaataaccgaatactacagcacacacttttctactggtgctaatacttctcaagtttgcctgacctatgatgagtttacgaagaagtgtgatgaccttaagaagataactgtgagtgatgtattcgcccttcaacttatgcaggtgccacaagtgacagaagaagctgcacttgctgtgatagggctctatccaactcttttctcacttgctaaggcgtactctatgcttgatggtgatacccatgcccaagagaagatgttgaagaacaagagcacgctgataaatgcaggggctagcagaaacatattcaagcttgtctgggctgaaggataa

SEQ ID NO: 2622 - DNA, 1485 bp, Oryza sativa
  Clone ID: PAT_MRT4530_102379C.1
ttagtctccacgacgcgccgcctccgtcgccgacgagttcgacgaatcatccccgttgccggcgagttcatctgctgcctcgacgcaccgccccatctgacggagcgtggggctcctcaccgggagaccgcgctggcccccctttgccggttcggccggggaccctggaccggaagcacactagacgccggcgatgtatacaggttcgggccgctgagaagcgtaataccctactcctgtgtttttggtggattcgcgtatgaagaagctacaaagtatgagatgaagcctggcatatatctgaccaggactaacgtgccatctctgggaggtaacacgctacctccagctggggacgagcgcctagaagccctcgtcctgacgggatgttattgtttcaaaagccaattaaattagtattcatctagacatattagttggatattatgattttcatatgtctagagagaaggaattttggttcaataatttgatataccaagcatctggctattatgtgaagaaaaatttatatactaaaagccgatgcttggagttagaaatagcttgaagaatttctttgattagatatttgaaagatactacacttaaggttgatcggaagattcggcggcaagcgctcaaatattatatcgccgaaaaatagatggagtattacttagataatgatcaatctaaagttgctagaagagtagtacatgaagggatttgtggaattcatcaatcggcccgtaagataaattggttgcttacgagagtggggtttcattggccgaaaataattgatgattgtttcaaatgctatagagggagtggagcttgttagcggatcgacaatgttcaattagcgcctaccgctgtgttgaatcctatcattaaaatatggccgttctgaagttgggctttggatttcattggtcaaaattatccttcgtcatcaaaggggcatcggttcatgctagatataatggattacttcactaagtaggccgaagccgtgccgctcgagaatattacttatgcggaggtaattgacattcggtattcctcaaacattaaaggagcttcttttatgtccaaggaagtgagaagttttgccgaatcttatgatattaacttgttgagttcttctctttagtacgctcaggctaatggatgagccgagtcgagtaataaaacattgttgaaattaccgttttgccagttgaggtaaatcttagctctcttcggtatttcaagcaagacgacttgtcggttgaagattacaagaccttgatgagaagcaattttgaagacgttatcgacaagcgtttgaagatttgaaggagatgaagacacttcaagacggtgttttcagaaagcaattgatgggaaatacttgaagaaatacttcccgagcatttggcaagatgcttaggaagtcctatggccggtaattggattatcgccctgagataacatgtt

SEQ ID NO: 2623 - DNA, 177 bp, Oryza sativa
  Clone ID: PAT_MRT4530_10237C.1
atggcggtgtggtgtgacgtcttccgggatttcgccggcggtggctgggttgggtcacctccgccggctggagcgtcgttcgccggccgtggcggcggcgatgatcgccgggcaaaatggacggagagttacggtctgtttggaacagctccaactcctaaatttagctggagttag

SEQ ID NO: 2624 - DNA, 822 bp, Oryza sativa
  Clone ID: PAT_MRT4530_102381C.1
atggccgctagcctgcgcatgcaacaccacggccgcaccctgcaagggcagcgtgcctgcgtgccatggaggcactggccggagaggacttcaaggatgaagaacagaaccaagaaaagaaggaataaaattgaaaaaaaaaagagaaaaggccacgccggccgcaccgctgaggcttgcgacggcgacggcggtgcccgtagaggtcgcgactgcgccgtctatacaaaaacggccgcacccgcgccgccctcgccgccgacgcacggccgagcatcaccggcccacgactgcactgcgccgcgcctcgccatcgaacggcggcgcgcgcaccatcctcgcatggccgcatcctgtgccaagcccgcgccctgcaaacgcatcgctaggccaccactgccgaccggcctgcgcctcgccgagcccggccgagcccgcaccaaggccatgccgccgccacacggccacccctcgccgaccaccgcgctgtccaccgcgcctgcgccgggccgcgctcggccgtcgcacggcctcgtcgcgcctcatggccgccgcgccacgcatgcgcgaggtcgccaccgagccgccgcgctgcacctgcgcgacgccgccgccgacccagcgcgccgcgcccgcgcgaggctcgctggacagccgccgcgccggccactgcccgcttgccatgcatggcaagggagcaatcaaaggaagaagaaaggaaagagaaaaaaaaaacaaggaagcagcaaacagctatggccgccggcgcagcctggccgcctcgccgccgcgcatggccgcctcggcgccggcaccgcctag

SEQ ID NO: 2625 - DNA, 132 bp, Oryza sativa
  Clone ID: PAT_MRT4530_102382C.1
atgtcacacttggctgatgatggactggagaagatccatggcggctttgatttaacaaaggatgagctgtacaagtgttctaaggtcggctttgccatcgaggatgggaagcaaacaatggtcatcttctaa

SEQ ID NO: 2626 - DNA, 195 bp, Oryza sativa
  Clone ID: PAT_MRT4530_102383C.1
atggactggattgggccagctggtgcccaatacattagcaccagtgaggaggaggacgaaggctacaccggcagctcctccggcgacaccacctcggccctgccgaagaaggactccaacgactcctactctaactccgatgacaatgaagagggcaatgactgtggagggaagcgtgaagaaagaggcagctga

SEQ ID NO: 2627 - DNA, 235 bp, Oryza sativa
  Clone ID: PAT_MRT4530_102384C.1
aagcaaaattttcatttttttaaaaacaacataaacatacacacccaaaaagcaaccacgccaaaaattctgccaaaatcttcaaagaacacaatttcaacttctttggggtaatacaacaaacacaggaagaaacagacatggcacacaggttaaacaactacacttctcatgcacactgataactaaccctccccataggaggcacatctataaaaatgagcaaaccattatt

SEQ ID NO: 2628 - DNA, 1305 bp, Oryza sativa
  Clone ID: PAT_MRT4530_102385C.1
atgggagcttaccagccgctgcagcatcaccatggcggcgccgccgccggctacttcctgccaagaaccgccgtgacatggctcgccgccgcctgcctctcccttgccctcctccacctcctctgctgctcccctcccggcggccaccaagccgtcttctcccctctgctccagtatttcaatggcaatggcacttactcctccaacatctcgtcttctggggtggaggagaggtcgtcggcggcggcgtcgtgcgactactcggtggggaggtgggtgcgggcgccggggcacgcgcggcggtacaacggcacggcgtgcaacgtcaagccggagcaggactgcgtcggcaacgggcgccccgagacggggtacctggactggcggtggcagccggcgtcgtgcgagctcccggcgttcgacgcggcggcgttcctcgccgcggcgcgcgggaggcacgtcgcgttcgtgggcgactcgatggcgcgcaaccaggcggaatccctccactgcctcctcgccgccgcgttcccgcacgagctcgtggcccaggacgccgagcgctacaagcggcagttcacgcggtggtcgttcccgtcgcacggcgtgacgctgtccacctactgggcgccgttcctcgtcaggtccggcggcaagccgttcaactacaccatgccctacaacctcgtctacctcgacgagctcggcaaccggtgggacgccgacgccgggacgatggacgtggtggtcctcaccgccggccactggttctggaacccggccgtgtaccacaggcgcggcgaggtggtcggcgtgcacgcgcacccggagctcaacgcgaccgagatcggcttcacctcgccgtaccgggaggcgttccggagggccctggagcggctgggctccgacgggcggcggcggaccgtggtgctgggcacgttcgcgccgccgcacttcgacgggaagccgatctttgacccgacggcgtgcacgaggacggagccgtacagggacggggagaaggaggtggggagcatcgagagggagatgaggagcatcgtgttcgaggaggcgaccgccgcggcggcggcggcggcgacgatgagggtggaggtggaggacgtgacgaggctggcgacgatgcggccggacgggcacccgggggtgtacatgcaccgcgacccgttcgctggcggcggcgcgcggccggagcggatgcagacggactgcctccactcctgcctccctggcccggtcgacacgttcaatgagatcttgctgcagattctgagcaggcagcggtga

SEQ ID NO: 2629 - DNA, 128 bp, Oryza sativa
  unsure (1)..(128): unsure at all n locations
  Clone ID: PAT_MRT4530_102386C.1
ctattgnataagcttgttggcctcaggccaatccctatattagtcgataaatctgagttgtgtagctgttcgttggaaatgggtccgtcccttcccggcgctacagccggagcgtgggtgtgagcctg

SEQ ID NO: 2630 - DNA, 293 bp, Oryza sativa
  Clone ID: PAT_MRT4530_102387C.1
ctggctcaagctcaagctctgtaggcttttgacgtgcaatttatatatggtgtctaccctgcgtactatggtgcacccagacccagcaccaccattggcggcgtcaggtgatgaggttaaacagtgtagcggctaggaagttaaaaatcagctcagagatcatcagatgcgacatgtgaaactctgtgcgatatagatagaataaaagcagtctgtcatatgcaacgtcacagcgtcgtgtatgttactcaaggccgtgcccgggttcaagaagtaaacagcggtggcgagac

SEQ ID NO: 2631 - DNA, 663 bp, Oryza sativa
  Clone ID: PAT_MRT4530_102388C.1
ccacgcgtccgggcagaacagcgtggaccaggcggcggctggcacgcgcagtactcgccaggccaggcgccgccgagcagcgagatgagcgggtcgcacggggcggggccgctgccgccgccgtcaccgggcatggcgctggggttctcgaagagctcctcctcgtctacgagttcgtccccaacgacacccttgagcaccacctccacgggaagggcgtgccggtgatggcctggacgacgaggctcgccatcgcgctcggctcagccaagggcctcgcgtaccttcacgaagattgccatcctaggatcatccaccgtgacatcaaggcggccaacatcctcttggacgagaatttcgatgctaaggttgcggatttcgggcttgcaaagctaaccacggacaccaacacgcatgtctcaacgcgcgtcatggggactttcgggtatctggctcccgagtacgcgtcgagcggcaagctgacggacaaatcggacgtcttctccttcggcgtcatgctgctcgagctgatcaccggccggcgaccggtcgacccaacgaactacatggaggacagctttggttgacttgggcgagggcccctcctggcgcgcgcctttgtcggagacgggcagtttgacgagctgatcgaccagcgcctgg

SEQ ID NO: 2632 - DNA, 349 bp, Oryza sativa
  unsure (1)..(349): unsure at all n locations
  Clone ID: PAT_MRT4530_102389C.1
gcagcctctaagcggcggtgcggcggcgaggcggtcaggcgggcgcgtcgggccgccgccgggcttgcgggcgggcttagggcgggcaagcgggcgtcccggcttgntgggcgtgggcccgcgntcgnccgggaagcattccccaaaggtttgaagggcgggagggtgggcgaatgaacgaacgggcaagcgaatcccgaacgcccacgaggtccggggaaagaagcagatcggggaggagacacggtngccccagatcccaaaaagagggcccacagatcggggggagaccgtcgccagcgtctgcccctccgccggcaccacaggaacagccgcagcagcagcgcca

SEQ ID NO: 2633 - DNA, 327 bp, Oryza sativa
  Clone ID: PAT_MRT4530_10238C.1
atggcggcggcggcttggcgtggcggcggctctagcggctgcggcgcgcgaccggaggtggcggcaagcggcagcgctagtggcgagcggcgcggcggcgggagggcggcgacgtggggactcggagcgggggcgcggcgtggagcgaagaaggcggcggcgcggacggtttcggcggtggttgccgtcgtggggcgagcggctggaggaaggggacgacctgacagggtcgaccaaggacccctagacgcgtacataatagatttcaacacgatacatgggccgatgacccaaaagatagtgacaacccacctggacaaattctag

SEQ ID NO: 2634 - DNA, 3042 bp, Oryza sativa
  Clone ID: PAT_MRT4530_102390C.1
atggcggcaggatattatgggctaccgcagttcagaatgcgggcatttctctggggagcccttccatcaatggtattaccaaaattcccacttcctacccatgatgctgttgtgcgtggaatagtaccaactacattttcgcatagtgttgctgcatacaatgaggtagacacccgttgcctacgaaaggctcttctccttgcagatgccatatctgatttacccaaggttggaaatgatcaacctaaagatgtaatagagtatagtgttgcccccaaaactgaatttcaacggtatatccggaacaaccgtaaagacattcaggattactcttttcgtggagatgatccttctgaagaaggtaaattgtttgatcatcaacctctaaagctaaacaaagatgattatgagcgtgtgcagcggatacctgtaaaaaagggagcgaactttcgtgatctaaagggcgtcatagttggcccagataatactgtgcggctggatccaaacatttcccgtgaacgactgtcatctgggaagcctttgattattttgcatcctagccaagaccgagttctgactattcgcgagaatgcaaggttgcaaggttttcctgactattacagattgatcggcccactaaaggagaaatatatccaggttggcaatgcggttgcaattccagttgctcgagctttggggtatgctcttgggctggcctaccggggtgaatctgatggagatcgagcagtactcaaattgccagagagttttatttatgctgatcaagagacggttgttaaatcttcggcaggaactcctggaagtgaaatagctgattcggaacagttgtttgaatatttcataaaccccaatttcttttgcatgatgtttgcttttcttaaagtgaatgtggttattcccttgatcctagattctaagatgggtttatcgcgacgaggagccgaggagggggaggcgcgccgcgccgttccattccagaacatcctctcgtgggaggggtggaatcgtcttgatcatcgccggggcgagatccgtctcgacgtccggcgggaaatggacgattccccgctagataatctgtttgatggaaatggattggattcatcggcaggcgcggacagctctagctccacgggatcaccgccgagctccacgtcgtcgtcccctccgtcgtcgcagtcacctcctccggggtcatcgccgcctcctgccagcccgccaccgtccacaccgtcggccccaccgaccaattcctcgggctcagcaccgtcgccaccttccccgtcgcagtcggcgccaccggcgaataccggcggcggcgggtccccaccaccatcgcatggctcgccgccagcgccaaaggccgtccagtctcaacccgctccgaagcgtagcggcgacggtggctcctcctcggacagtgggagctccaaggagggaggcagctcgagtgaccgtggcaagagcgaaagcaacggcaacaggccggggccagaggctgccatcatcgccggcatggtcatcgggttcttcaccttcgccctgctgctggccatcgtcgcctgcgtgtgctgctccaagaagaagaagagacctccccacatgcacatgccgtactacaccgacgagaacgggaaagtgtactacgcgaacagcatgcccaggtggcagaacagcgtggaccaaggcggcggctggcacgcgcagtactcgccaggccaggcgccgccgagcagcgagatgagcgggtcgcacggggcggggccgctgccgccgccgtcaccgggcatggcgctggggttctcgaagagctccttctcgtacgacgagctggcgctggcgacgggcgggttctcgtcggcgaacctgctggggcagggcgggttcgggtacgtgtacaggggcgtcctcgcgggcagcggcaaggaggtggcggtgaagcagctcaaggccgggagcgggcagggcgagcgcgagttccaggccgaggtggagatcatcagccgtgtccaccaccgccacctcgtctccctcgtcggctactgcatcgccggctcatcccagcgcctcctcgtctacgagttcgtccccaacgacacccttgagcaccacctccacggtctccatatctttcctgctcttttcccagccatcgtaacgcgccattcggaagggcgtgccggtgatggcctggacgacgaggctcgccatcgcgctcggctcagccaagggcctcgcgtaccttcacgaagatttctgcagggacaaatcctgtctgtacgtccttctaacgatctgatttgttgcattgtggttgtcacgtacgaaggccatcctaggatcatccaccgtgacatcaaggcggccaacatcctcttggacgagaatttcgatgctaaggttgcggatttcgggcttgcaaagctaaccacggacaccaacacgcatgtctcaacgcgcgtcatggggactttcgggtatctggctcccgagtacgcgtcgagcggcaagctgacggacaaatcggacgtcttctccttcggcgtcatgctgctcgagctgatcaccggccggcgaccggtcgacccaacgaactacatggaggacagcttggttgactgggcgaggcccctcctggcgcgcgccttgtcggaggacggcagtttcgacgagctgatcgaccagcgcctggagaacaagttcgaccggctggagatggagcgcatggccgcatgcgctgccgccgccgtccgccactccgccaagcgccgcccaaagatgaagcagattgtccgtgcgctggagggcgacgcgtcgctggacgacctgaacgaaggggtgaagcccgggcagagcatgatgttcagcacggggtcggagtacgactccggcaactacgcttccgacatcaacaggttgaggaaggtggccttcgagagcagcatcgaggacagcagcgagtacgggacccactccagcgccgactcgggggagccaccccggcggcaacagcatcgctag

SEQ ID NO: 2635 - DNA, 5561 bp, Oryza sativa
  Clone ID: PAT_MRT4530_102391C.1
tttttttttttttttttttatatgcaagataagcgcaatatcgcattactcatcgatcggatacatcattaaatcacacgataatacagccaacaaagcagtcacgtcaaacgatcggcctgcaatatgcacgacagtatcccaattcccacatacacggtacgccccggttcccatcgatgattcgccatctcgcaacaccacacagtttccactttccacactcacgcaccgaagaaatagtcaagtctagctcgacgcctccgatcatacggctagcgatgctgttgccgccggggtggctcccccgagtcggcgctggagtgggtcccgtactcgctgctgtcctcgatgctgctctcgaaggccaccttcctcaacctgttgatgtcggaagcgtagttgccggagtcgtactccgaccccgtgctgaacatcatgctctgcccgggcttcaccccttcgttcaggtcgtccagcgacgcgtcgccctccagcgcacggacaatctgcttcatctttgggcggcgcttggcggagtggcggacggcggcggcagcgcatgcggccatgcgctccatctccagccggtcgaacttgttctccaggcgctggtcgatcagctcgtcgaaactgccgtcctccgacaaggcgcgcgccaggaggggcctcgcccagtcaaccaagctgtcctccatgtagttcgttgggtcgaccggtcgccggccggtgatcagctcgagcagcatgacgccgaaggagaagacgtccgatttgtccgtcagcttgccgctcgacgcgtactcgggagccagatacccgaaagtccccatgacgcgcgttgagacatgcgtgttggtgtccgtggttagctttgcaagcccgaaatccgcaaccttagcatcgaaattctcgtccaagaggatgttggccgccttgatgtcacggcggatgatcctaggatggccttcgtacgtgacaaccacaatgcaacaaatcagatcgttagaaggacgtacagacaggatttgtccctgcagaaatcttcgtgaaggtacgcgaggcccttggctgagccgagcgcgatggcgagcctcgtcgtccaggccatcaccggcacgcccttccgaatggcgcgttacgatggctgggaaaagagcaggaaagatatggagaccgtggaggtggtgctcaagggtgtcgttggggacgaactcgtagacgaggaggcgctgggatgagccggcgatgcagtagccgacgagggagacgaggtggcggtggtggacacggctgatgatctccacctcggcctggaactcgcgctcgccctgcccgctcccggccttgagctgcttcaccgccacctccttgccgctgcccgcgaggacgcccctgtacacgtacccgaacccgccctgccccagcaggttcgccgacgagaacccgcccgtcgccagcgccagctcgtcgtacgagaaggagctcttcgagaaccccagcgccatgcccggtgacggcggcggcagcggccccgccccgtgcgacccgctcatctcgctgctcggcggcgcctggcctggcgagtactgcgcgtgccagccgccgccttggtccacgctgttctgccacctgggcatgctgttcgcgtagtacactttcccgttctcgtcggtgtagtacggcatgtgcatgtggggaggtctcttcttcttcttggagcagcacacgcaggcgcggacggccagcagcagggcgaaggtgaagaacccgatgaccatgccggcgatgatggcagcctctggccccggcctgttgccgttgctttcgctcttgccacggtcactcgagctgcctccctccttggagctcccactgtccgaggaggagccaccgtcgccgctacgcttcggagcgggttgagactggacggcctttggcgctggcggcgagccatgcgatggtggtggggacccgccgccgccggtattcgccggtggcgccgactgcgacggggaaggtggcgacggtgctgagcccgaggaattggtcggtggggccgacggtgtggacggtggcgggctggcaggaggcggcgatgaccccggaggaggtgactgcgacgacggaggggacgacgacgtggagctcggcggtgatcccgtggagctagagctgtccgcgcctgccgatgaatccaatccatttccatcaaacagattatctagcggggaatcgtccatttcccgccggacgtcgagacggatctcgccccggcgatgatcaagacgattccacccctcccacgagaggatgttctggaatggaacggcgcggcgcgcctccccctcctcggctcctcgtcgcgataaaccccttctagaatctaggatcaagggaataaccacattcactttaagaaaagcaaacatcatgcaaaagaaattggggtttatgaaatattcaaacaactgttccgaatcagctatttcacttccaggagttcctgccgaagatttaacaaccgtctcttgatcagcataaataaaactctctggcaatttgagtactgctcgatctccatcagattcaccccggtaggccagcccaagagcataccccaaagctcgagcaactggaattgcaaccgcattgccaacctggatatatttctcctttagtgggccgatcaatctgtaatagtcaggaaaaccttgcaaccttgcattctcgcgaatagtcagaactcggtcttggctaggatgcaaaataatctggttgtgaggctcagctctggtaactacagtgggaacagtttcatcccaccacaggcgtccaaacggtttagttgacttccccttgacgaaagatatggcatagtcaggcaccaaaggcttcccagatgacagtcgttcacgggaaatgtttggatccagccgcacagtattatctgggccaactatgacgccctttagatcacgaaagttcgctcccttttttacaggtatccgctgcacacgctcataatcatctttgtttagctttagaggttgatgatcaaacaatttaccttcttcagaaggatcatctccacgaaaagagtaatcctgaatgtctttacggttgttccggatataccgttgaaattcagttttgggggcaacactatactctattacatctttaggttgatcatttccaaccttgggtaaatcagatatggcatctgcaaggagaagagcctttcgtaggcaacgggtgtctacctcattgtatgcaacaacactttgcgaaaatgtagttggtactattccacgcacaacagcatcatgggtaggaagtgggaattttggtaataccattgatggaagggctccccagagaaatgcccgcattctgaactgcggtagcccataatatcctgccgccatcatcccaagcctagcttgataattcatagccacaaggcaactcattgcatagcgtccaaggaatccatctgcaaatttcaatatgtccacaacattttccatgaggacatatttgggcctcagatacttcactatatccataaaaacaaccaactgtttgttcttttcatcctcaagtggatcattatgctttctgaatcggttgaacccactgatgccttgacatggaggcccaccacatatgacatccacagcaccgggcaagggcaaaatattttccttgtgtcctttctctacaaattctttaatacgctcagggcaatcactgagcccatcaattggctcccatgtatcataacttggatcataccctttccaccgcaccttaaaccacaagccattttttcctgtgttacttggatcaccatagcatatctcaaggagctcctctacatcgaatatatcttctggaagaggctcatttacatcgtcagcatcatttaagggcatatctatactaggttctagtgtatcgtttttgtggacaacatattttctacaaagtgcatcccactgctgaataagggcaagaaaatcctcagttttctcgttccgcacctgcgagtatgggtgattatgtttgagacaagcacaagcatatttgtttatgtcaacagcccacctagtctctaaatttatgccagaaaatgcaaaacccaaacaaagcccagttgacatagcgccacatcctgagtaaagatcaagcagagaagctgtctctgtttgttcactatatggtgccacaatatcagccgacaattttcccttagaagaattgtcagcatcatcgcaggaaatatttgatgttgcctcactccccaatgcaccatcattatctgctggaagatttgcaaacgtggaatatgcaacagagtaagacatgtcatagtacaggtcacaatcagatatagcatgagctcttgcttgaggcgtcatatttggatcaacatgggcaatctttacttttgagactatgcactcaatcaagttgtcattcttctcctttgaaagaaaaacacgcttatggttatgtctatgatcatgcacctttaacaactttgatgagatgaccgtatctgctgtacggaaaaaccactgacaagagaaatatgatccacggtcgactccttcaaaaaattcagtaatccgtccaatgtaattttcctcatcaggaccagccttgacatagacatcatcatcaagatgatagatttcatcatccacattagcagccaggtagtgacatcgagccttcatttcttcatcttcgtcaggctcctgcttaagaagcgaatcagacccctttctactgtacctcacgggccatcgttgtcgcgcttcatcatccggtactggatcgcccacaaagtggtcatctgagtcctccacccttctcgcagtgcttggccgcgccaccctcttcctcgtcgcagccttctcggctgatccttctccgacacacttacccatcctctcctctgcttccagcacgtcggctgcctcctcctcctcctccatggccatctgttcggcgtccggctcatccgcgcacacgtcttcggccagcgcgccacccgcatcgttcaccttcatcttctcgggcgcctgagccgccgacttctcggtcgtctccttcgtcttctccttggccgtcttcttacgggtacgacgcttgaccttctccaccccgcgctgccgcttgccgcgtgactctgcgggcgacaacccactgtcgagctcggtcccctcgggctcctgcgccgccgccttctccacgtcctccggcttccattcggtcgctccctcatgggcactaggcttctccttcgccgtcctgcgctggcgcttgcgcaactcggggcgcggcatctcgcggtcgatctcgtcgagctcggccaccccctccgccgccgccgccttctccacgtcctccggcttccattcggtcgctcccttacgggcaccaggcttctccttcgccgtcctgcgctggcgcttgcgcgactcggcgcgcgacatctcgcggtcgatctcgtcgaggtcggccaccgcctccgcctcggcctccat

SEQ ID NO: 2636 - DNA, 507 bp, Oryza sativa
  Clone ID: PAT_MRT4530_102392C.1
atggtgacaaacaagctgaaggtgccgatgatggccatggtaggagccttcatggatcggagaatgaaacgcaaggattgtatcgtcgcgtcctctgcggcttgcgtgccttctgtcgtcgtcgcggcggcgcccgacagccgcgccgccgccggccactccaaccaaacacaaggatgcgaggtctgcggcttgtgtcgccgtcgagccgaagccgcggagccgtcgctggcactccagcatgaggatgcgaggcccgcgctgccgtgtggcttgtgttgtcgtcgtcacaccggagagccgcggagccaccgccagccactccagccacccgtctgcctctggttcgagcaaccgccgctggtgctgctcgcttgtgctggaatgatgggaggagctgttgggggaggacggcggataaagcttgtgctggcaatgaggtgctgggcagcacggtgcaggcccctaggcggagcaggggccttgagctgcggcagcatggtgtag

SEQ ID NO: 2637 - DNA, 210 bp, Oryza sativa
  Clone ID: PAT_MRT4530_102393C.1
atggtggtgctcgggctccccatggcgggtggcgtccactcggcgcacgtgcacggcggcgtggcgtggcactcgttcaagcagctactcgacgcgcggcgcgggagccatgtcccggggcttgccgagctgaagcgggctcgtccagctcgtcgccgctgccggggagcagcaactggcttgctggatcagccaggttgctttgtataa

SEQ ID NO: 2638 - DNA, 376 bp, Oryza sativa
  Clone ID: PAT_MRT4530_102394C.1
gtgtgaacttactctggccccttttgccatagaactggcagagtgttaggtgcctttacttgacgagcaccatggcgaaaccaatcacggggttgtaagttggtgtgtcccacctagaattgtattggatcagttgaaaccaaacttctgctgttcaaatagacccttcactatgcaaccggattttgcgtttcagctcgtgataatatttaagagaagtatgcggaccttattttagactctggcctatttgagcgtcactcattatgcggaagcttctgatgccgtcgacaatgtcaaggccaagatccaagacaaggagggcattcccccggacccgcaacgccttatctttgctgggaagcagctggaggat

SEQ ID NO: 2639 - DNA, 654 bp, Oryza sativa
  Clone ID: PAT_MRT4530_102395C.1
atggaccccgagctcaacaccagacctgatggcgctgagattgaacacctcagtgctgatcgcctcggcgctgaggtcctaacggccaggcgcaccctaacgacagacatggcaacctcagcgccaaccgcctcggcgctgagagatgatactttagacctcgaccacacactattttatgatgaaccaaactacaaagcatttgataatggaatcgtgaaaagtcagtcggttaggtctttgatagttgaggaagtcatagaatctcaaggggtggaggttgatgtgaagatgcaaaagatggaagcagttgaggcgaatgaggcaaggagtcatgagtatgaaggggtgaagaaggaggaagcaactaaggcgcatgaggcaagcagtcaggcagttccgacaattggaaatcatgtcgaagatgataatcaagagggagatggatcgatggggagaggtggagaagagactttaacatatgctcaattagcatccggggtgcgatacttgcttcaagaaaaagcatatactcgagcggagggtgaggagactttgttgaacaatggattgagtgttgatttgttggaccaatattcagagggggatgatgacacacccgaggaggagcatatgaggatgagtatgtggtag

SEQ ID NO: 2640 - DNA, 521 bp, Oryza sativa
  Clone ID: PAT_MRT4530_102396C.1
aatgaaagagaaattgcttttgcaaaacgacgttggcaaaaatcgggttttaattcgaggaccactgttggaccgacactaaccagtcggtcagaccggacagcggtccggctcatgtgtagcggtcagaccggccggctcgcggtctgaccggccgacgctgtgtcggtttcggtttcgggttgtttctttggatatccgtgattgtttcatggttatggcttctagatggatactatacagagaagcaataaagttgtcatctactttgagagttcttcgatttgtgtttcatcgggtttcggcggtctaaccggcatctcagcggcggtcagaccggcggcatcggggcgatccgaccggcggcgtaagggcgatcagaccggtggcggcgacagcaagcggcagctgatcaggcggttagaccggagttccaatctcggtcagaccggtggctttcagacggtcagaccggcacgactacctcggtcggaccgcgatccatcgatttcgagggtaac

SEQ ID NO: 2641 - DNA, 324 bp, Oryza sativa
  Clone ID: PAT_MRT4530_102397C.1
atggcggccccattctctaatctcggggtggccaccgtgagctccgggcgtccagatccgaacgccacaagctcgaggtggcctcctcacggtgacagcgacggcctcctcctcactgcacacagtgcgctgcagcgcaccctccgttggcactcccttatccggaccgacacgatctcagggcggcctcctcccgttggcggcggtggcaccctttcgtcgcgcggcaacctcctcctcacggcgcacggtggccatggcacgccctcccatcggcagtgtgatcctcctgtcgacacccttctccaacctttgttcttgtga

SEQ ID NO: 2642 - DNA, 365 bp, Oryza sativa
  Clone ID: PAT_MRT4530_102398C.1
gaacagatctagcggagtaatcaagtgaattcattgatcaagtggaatacatcgtctgatcttcacaattaaatcaccaaattattaatgtctttagcaagcatagtgcataactgcatatcttcactgctagatcaatatactaatatcaaacatgcagaagtttattttttttttaaaaaagacatgcatgaagatttgatcagctaatttttgccatgtttgatgtggctcagatccacttacttcgcgccacacccatcgtctccatccctcgtccccaaatccaaccagacctcgccacatcacccatgcacgcatggatgacgacaagctcgccctcgcctgtggcgcacgtcgcgttc

SEQ ID NO: 2643 - DNA, 102 bp, Oryza sativa
  Clone ID: PAT_MRT4530_102399C.1
aattcggcacgagggcgtctactactcgtgcgcttctgcttcctgttcaaacccaatgctccaccacatcgccttcgttccccaccccgactgacccagcct

SEQ ID NO: 2644 - DNA, 384 bp, Oryza sativa
  Clone ID: PAT_MRT4530_10239C.1
atggctcatcttcctcttcatccgggtgttgtgtgccattgtcaatgcccggtacctcgagttgttcttgttgtgcagccaaacatctcgaacgctcgtttggtgtggccggcgagtactctcgacactgcaaccactaggagaggggagttcgagaagaggctagccctgagggagcgccgcagtgggcaccatttcatctccttcagcttcagctcaacaatgcctaaggagcccaattgcctcgccgccgccaggattcatctcgacaaggctggatcctgtcccatcgagtcgtcaaggatggaggcaaatggctatgtgattttgtccagctggcaagagaccccaattgtgaggagcgagcggtggcaccgtgtttag

SEQ ID NO: 2645 - DNA, 131 bp, Oryza sativa
  Clone ID: PAT_MRT4530_1023C.1
atagaaaccagttggagcgctgtgaaaaaaaaatcaggaacatgtgttccacttgaaaaaaaatgcgtttcgttaataggttcactgcacgttctgttgcctgcatggtcttctacatgtgcgtggaaagc

SEQ ID NO: 2646 - DNA, 453 bp, Oryza sativa
  Clone ID: PAT_MRT4530_102400C.1
cgataaaatgaggaccgagttctccaaaaatgtgatggcagggttgccctacgtgctgtcgtggctcagctcacaccggtgccagcgcgccgctacacgggttttcgccagcgaaagctgcttccttaccgtcaggatgaagaacatgattgcctcagttgagaccgcgctggcctacatcatccagtagatagatcaataaacatgcggcatcttgatttttattactactcaattactcatctgatcgagatgaaatccgatccatccacaccgtgttcccatgaataagaggcccctaccgtctatagtgcccatgtacagttctgctcgactgcattgctgacattgtatgtattccatttttctaaactcatagtacatttgtatatccaatctatgtatacacacaggttgtttgtgaatttgtgaggtataagatctgttcgtctt

SEQ ID NO: 2647 - DNA, 933 bp, Oryza sativa
  Clone ID: PAT_MRT4530_102401C.1
ctacttggcagtgcactccggcggtaacccctgggggaaccggtacgtgtcggcgcagtaattgtagatcatgtagtccctctgcacctgccggagccggtcctgcgacgcgctgtccagctgctgctggtacatccacgggctccccgggttggcgcacgccgtggcgtcctgcgacgtgcacccgctcgcggcgagcccgcggtacgacgccgtgaacggcgcccgcgaccagtccgtcctcacgcgccccccctgcgtcgcccactcctccgcgtcccacaggctcgcgtacacccgcatcgcctgcgcccgcgggaacgccacccccgtcgtcgcctccgtgttcctgtactcccgtatcggcgtcccgtccacgtagaaaaggatgtgggaggggttccagaggacggagtaagtgtggaagtccttggtagggtcgaaccacatgcggaactgctgctcgcggccgcctttcccctggctgtacacgttggtgtgcaccgtgtacggctcgccgctcgcgttccccaggaactcgaagtcgatctcgtcgtgctgcgacccctgcgacgacaggtagaaggtggcgacggtgccggcggagttgccggggacgagcttgatctgcatgtcgaagcggccgtacaggtactggttcttggactggaagccggagccggacgacctgtccagcgacagcgtcaggagctggccgttgccgaggatcttgccgcggccgtcgccccaagtgatgtccacgtcctggtagaagttgccggcggcgccgccggcgagcagcagcacggagcacacaatcgccgccaccaacggcggcgttctcccgggattggaagaagaaaccatcgtgtgtgtgtgtaacactgttggattggattcggtttttgatcgatcgatcagatggttttcctc

SEQ ID NO: 2648 - DNA, 264 bp, Oryza sativa
  unsure (1)..(264): unsure at all n locations
  Clone ID: PAT_MRT4530_102402C.1
ttctcctcgtcgtctcgtctttcctttggctccncctgacctccatggcaccctggagggaggaatatgttgatcctaccagcgctcagtgcnatcnatggagacggtctgatgatgaatccntgcatcaagggcaggaagacgacgaaatgctggcgatggtccccgagagaattntgaggcnggtgaagacgacgactacgggaccttcgaccctacccccaccctggcgtatagcctcacgccacaggaaatacctaacta

SEQ ID NO: 2649 - DNA, 817 bp, Oryza sativa
  Clone ID: PAT_MRT4530_102403C.1
gcacgaggtagacaggcacaactttaccgcattgtggagctttatctacagaaagcaaatttggctgtcattcgcagatgtgcagatactgaattagccattgctgatgctgtcaatgtagaaaaggatatttccgaaaggtctagtagcaaatcagtttatgtgaatctttgctctcaagctactcgtcaacctgccaaaggaaaatcggagagtgatgcttcagacctaattgaaaaaagtgaatcagagaacggaccattaccacagcaagttcaaactgaaaatactgacatttgtaacattgatactgaagaatctttaaatagaacaggccactctgatcttcgcggacgcgtgggcggacgcgtgggcggacgcgtgggtggagatctggtgccagagaaaactgttggcttcagcaacgtggaagaagcactcaaaatggcaggcctcttggactcccctcctaacagtcctgagagaaagaacaccataattgaaggagggtgcattgttgatacggattctgaacccagcaaaaaattgcagtcaacttctgattcaattgtgagggatatatcatcgcacaaagatgctgatgattcctccatgctaattgatcttcatgatgaaaatggtcaaaacctccatactgtaacatcatctcagcaatcaaaacatactggtgatgagcatcagaaattgatactcggagaggaatctacggatgtaacagcaaataaaattgtctcagtgaacttggatgaagctggatgtagtgcggaacacggaaactcaaatgggtcaaataaag

SEQ ID NO: 2650 - DNA, 3606 bp, Oryza sativa
  Clone ID: PAT_MRT4530_102404C.1
atggccgttgaagaagtacaagccctccgcaaggagttcgacgcccaacaagcaagcagccatcaccagcctgttcgcaagaagcaaatttctttcggaccggaagatgccgaaggagtgctattcccgcatcaagaacccttggtgatctcggccgaggtagctggctttgaagttcggcaaatcctggtcgacggaggcagttcggccaatgtcatcttcgccgaagcttatgccaaaatggggttgccaaccctagccctcactcaagcaccaacctcccttcgtggtttcggcggcgaagcagttcaagtcctgggccaagtacagctggcggtggctttcggcacagatgagaataggcgcgaagagcaaatactctttgacatcgtcgacatcccatacaactacaacgccatctttggccgcgcaaccttaaacaagttcgaagccatctcccaccacaactacctcaaactcaagatgcctggtccggcaggcgtgatcatgatcaaggggcttcaaccttcggctacatcaaagggcgatttggccgcaattaacagggcagtgcacaatgttgaggccgaaccgcacgaccgtgcaaagcacatgccgaagcctgccccccatggcaaggtggtcaagatgcagatcgacgacgtcgatcccacaaaatttgttctgctagggggcgacctgggtgaaagggaagccgagaacatcctgaaggtgctcaaaaagaacattgacatcttcgcctggggccccgacgaagtgggaggtgtttcgacggacctcatcatgcatcatctggctgtcaagccggatgccaggccaaggaaacagaagctgcgcaagatgtccgctgatctccaagaggcagcaaaagccgaagtgcaaaagctgatcaaggccggggtggtccgagagatcgaccaccccgagtggttggcgaaccccatattggtgtggaagtcgaacggcaaatggcgcttgtgcgtcgatttcacagacctcaacaaggtgtgcctgaaagacgactcccccctgtcgcggatcgaccagcttgttgattcgacagctggctgcgaactcatgagctttttggatgcgtactccggctatcaccagatccacatgaatccggccgacatccccaagacagtcttcatcacgccgttcggcactttttgccacctcaggatgcctttcggtctgaggaacaccggagcaaccttcgccaagctgaagaccttcgacaacttacgcacggcgggtatgaagctaaaccctgagaagtgtgtttttggtgttcgcgcgggcaagttgttgggttttcttgtttctgaaaggggtatcgaggcgaaccccgagaaaatcgatgccattcagcaaatgaagcccctatcgagcgtacgcgaagtacaaaagctcgcaggccgaattgcggcgctctgtcgattcctctcaacagcagccgaaagaggtttgcccttcttcaagaccctccggggcgcgggaaagtttagctggacacccgaatgccaagcagcgttcgacgagctgaagcaatatctgcaaagcccacccgatttggtcagcccagcaccgggaagcgatctgctactctatctagcagcttcgccagtggcggtcaatgcaatcctcatccaagagacagagtcaggccagaaaccagtgtatttcgtctccgaagctttgcaaggggcgaaaataagatacattgaaatggaaaagcttgcttacgccctagtgatggcttcgcgcaagcttaaacactactttcaggcccacaaagtcactgtgccattacagtatcctttgggcgaagtgctccggggcaaggaaattactggccggctcagcaagtgggcggcggagttatctcccttcgacctgcattttgtcgcccgtactgccatcaagtcccaaatcctagccgactttgtggccgaatggacgccagcattcgcccctaaacccgagcctgccaaacaaccttgggtgatgtactcggacggctcgtggtcgcacaagggggcgagcgccgtagcagttgtcgctccgccagggggcgtgccgattcggtacgctgcaaggctgcagttcgacacgaccaacaacacggcagaatacgaagctgtactgttgggcctaagaaaggcgaaagcagtgggggttcgacgcttgctcatccgaacagactccaagctggaggcaagtcatgttgacaaatcttttgaaccaaaagaagaaggaatgaagagaggccagaacaaggaagcagacgccctagcgaaatccgctgcttgtggaggcccacattcgccaggcatcatctttgaagtcttgtacacaccaattgtgcccacagagagcctggacatcatggcaatcgaccaggcagaactgggcgaagaccctgaagactggcaaacaccgttcataaagtacctcaagaacggttggctcccggaggacgaagcagaagcgaagcgcctacaactcagagccgcaagatacaagttggtctcagggcagctgtatcgcaccggggtgctccaacccctgcttcactgcatctcctttgccgaaggcgaggaaatggcgaaagaaatacacaaggggctgtgcggtgctcatcaagccgcaagaacggttgcttccaaagtgtttcaccagggggtgtattggcccaccgtgctgaaagtttgtgttgagcaagctaagaagtacgaaagctgtcagcgatgggggttagacatcatcagccctttcccggtagcacgaaatgggtacaagtttacaattgtagcaatcgaatacttctcccgttggatcgaagctgaaccgcttggggcaatcacttcggcagcagtacagaaatttgtatggaaaaacattgtttgccgtttcggagtgccaaaggaatttatcactgacaatggtaagcaattcgactccgacaagttcagagagatgtgcaaagggctaaacctggaaatcaggttcacctcggtggcgcacccacagtcgaatgggacggccgaacgtacaaacgacaagatcctggaggcgctcaagaaaaggcttgagggggcggcgaagggtaaatggccagacgaaatgctatccattctctgggcccttcggacgacacccacaaggccaaccaagttcaggccgttcatgcttctctatggtgacgaagcaatgaccccaacagagataggggctaattcgcgaagggtaatgttctctagaggcgaagatgggcgcgaggtgtcgctcgaactcctcgaaggggtgagagtcgaagcactggaacacatgcgtaaatacgccacaagcacctcgacaacttacaacaaaaaagttcgactggcgaagctattgcctggccatctcgtcctaaggaagaaggcgaacccagtggcggtcggaaagcttgaatcaaaatgggaagggccatacctcatcaagcacaggtccaggacgggctcttttcgcttggcgacattggaaggtgaagagttcgaccactgctggaacgctgcttctcttaagcgtttctatgtctag

SEQ ID NO: 2651 - DNA, 3237 bp, Oryza sativa
  Clone ID: PAT_MRT4530_102405C.1
atggaggccatgcgccagaaaatgacgcaacttcaagacatgcttcgccaaatgcaagagcagcagcaggcatacgaagcagcaaggcaagccaaggtcgcttcggccccaattctccagtattcagcgggctacattccaccccaagtctacccgcaagcaccgattcaggcccttccgccacaagtcatgcaagcgccagcgtacttcgccgggcgcagcttcaagctttccttcagtaactcagccaaccccacaacacttcagcctagtccgggggcttcgccatggagtcaaggaccacagttcaacctcagcaatgccattcaagcaccaaccactcgaccacaggtaacgacgctaggctgcggaacaaatcaagcgcagaaccaggtcgctatggcatggacccagcctccgttcgacccatccatggtggcacaccaagtgccaccgttcggagctgggcaaccgaatactgtggtccaacctcatgcgctagtcatgacttcgcccttcgccacgccatatccacaaccaaacgggccttcgcagcaaggtaccgtgagcaaggcggggggcgaaaaggggctaccattgagtgggggaatcaaaatttgtccaatctcaccccagttcaagttcccacccgttctgcggtactcgggcgaaacggacccaaaagagtttctgtccatctacgagtctgcaatcgaagccgctcacggagacgagaacaccaaggcaaaggacataaccgaggtgtccgtcatcaacgccgcttcggcggggctgcttgaaggcaaactcacaagaaaaatctccaacaggagccgtagacactcgagcacctgcttcacatcattgacggcccaagtacaagcacaagtcgccgaaccggctcctctcgccattcaccaacctcagccagcgaaccaaggacaaccgccaaggccaagtcaagctcccatgacttggaggaaattcagaaccgaccgcgcgggcaaggccgtgaaggctgtcgaagaagttcaagccctccgcatggagttcgatggccaacaagcaggcagccatcaacagcccattcgcaagaagaagaagatgcagctgcgaatggtgcacaacatcacttcgacaggcgaaggggctccgcggtatttgaaccagcagatctctttcgggccggacgatgccgaaggagtgctgttcccacatcaagaccccctgataatcttggccgagatagttggcttcgaagtccggcgaattttggtcgacggaggaagttcagccgatgtcataatcgccgaagcatatgccaggatggggttgccaaccctagccctcacccaagcaccaacctcgcttcaaggtttcggcggcgaagcagttcaagtcctgggccaagtacaactggcggtggctttcggcacaagcgacaacaggcgcgaagagcaaatactcttcgacgtcgtcgacatcccatacaactacaacaccatcttcggccgcgcaaccttgaacaagttcaaagccatctcccaccacaactatctcaagctcaagatgcctggtctggcaggcgtgatcatggtcaaggggctccaaccttcggctacatcaaagggcgatttggccgcaatcaacagagcagtgcacaatgttgaggccgaaccgcatgtccgggcaaagcacattccgaagcccgcctcccacggcaaggtgatcaaggtgcaggtcgacgatgccgatcccacaagatttgtttcgcttagaggcaacatgggcgaaaaggaagctgagagcatcctagagatcgaccatcccaagtggttggcgaatccggtactggtgcggaagtcgaacggcaaatggcgcatgtgtgtcgatttcacagacctcaacaaggcatgtccgaaagacgacttcctcctaccgcggatcgaccagctcgtggatttgacagctggctgtgaacttacgagctttttggatgcgtactccggctatcaccagatccacatgaatccagctgacatccccaagacagccttcatcacgccgttcggtactttttgccacctcaggatgcctttcggcctaaggaacgccggagcaaccttcgccagcctggtatacaaggtcctctacaagcagctggggcgaaatgtggagacctatgtcgacgatattgtcgtagaaagccacaaggctttcgaccatgcgtccgacatacaggaaaccttcgacaacatacgctcggcggtgcagccctcgtccaagagagagtcaggccagaaacccgtgtatttcgtctccaaagctttgcaaggggcgaaattaagatacattgaaatggaaaatcttgcttacgccctagtgatggcttcgagcaagcttaaacactactttcaggcccacaaagtcactgtgccatcacagtatactttggccgaagtgctccggggcaaggaaattactggccggctcaacaagtgggtggcggaattatctcccttcgacctgcattttgtcgcccgcactgccatcaagtcccaagtcctagcagccttcgtggccaaatggacaccggcgttcgcctccgaaaccgagcccatcgaacaaccttgggtaatgtactctgacagctcgtggtcacacaagggggcgggcgccgtggcggtgctcacttcaccagggggcatgctgattcggtatgctgcaagactgcagttcgacacaaccaacaacacggcagagtacaaagctgtactgttgggcctaagaaaggcgaaagcattgggggttcggcgcttgctcatccgaacagactccaaacgggtggcaagccttcttgacaaatcttttgaggcaaaagaagaaggaatgaagaggtatctggaggctattcgatctatggaaaagtgtttcgccggcataacggtcgaacacctacctagaggccagaatgaagaagccgacgccctggcaaaatccgctgccagtggaggcccacattcaccaggcatcctcttcgaagtcttgtacgcaccaagtgtgcccacagagagcctggacatcatggcagtcgaccaggcagaactgggcgaagacccagaggactggcgaacaccgttcgtgaagtacctcaagaacggttggctcccagaggacgaagcagaagcgaagcgcctacagctcaaagccgcacgatacaagcttgtctctgggtag

SEQ ID NO: 2652 - DNA, 1594 bp, Oryza sativa
  Clone ID: PAT_MRT4530_102406C.1
cccacccgatttggtcagcccagcaccgggaagcgatctgctactctatctagcagcttcgccagtggcggtcaatgcaatcctcatccaagagacagagtcaggccagaaaccagtgtatttcgtctccgaagctttgcaaggggcgaaaataagatacattgaaatggaaaagcttgcttacgccctagtgatggcttcgcgcaagcttaaacactactttcaggcccacaaagtcactgtgccattacagtatcctttgggcgaagtgctccggggcaaggaaattactggccggctcagcaagtgggcggcggagttatctcccttcgacctgcattttgtcgcccgtactgccatcaagtcccaaatcctagccgactttgtggccgaatggacgccagcattcgcccctaaacccgagcctgccaaacaaccttgggtgatgtactcggacggctcgtggtcgcacaagggggcgagcgccgtagcagttgtcgcttccccagggggcctgccgattcggtacgctgcaaggctgcagttcgacacgaccaacaacacggcagaatacgaagctgtacttgtgggcctaagaaaggcgaaagcagtgggggttcgacgcttgctcatcggaacagactccaagctggaggcaagtcatgttgacaatctttttgaccaaaagaagaaggaatgaagaggtatctggaggttgttcgatctatggaaaagtgtttcaccggcataacggtctaacacttacctagaggccagaccaaggaagcagacgccctagcgaaatccgctgcttgtggaggcccacattcgccaggcatcatctttgaagtcttgtacacaccaattgtgcccacagagagcctggacatcatggcaatcgaccaggcagaactgggcgaagaccctgaagactggcaaacaccgttcataaagtacctcaagaacggttggctcccggaggacgaagcagaagcgaagcgcctacaactcagagccgcaagatacaagttggtctcagggcagctgtatcgcaccggggtgctccaacccctgcttcactgcatctcctttgccgaaggcgaggaaatggcgaaagaaatacacaaggggctgtgcggtgctcatcaagccgcaagaacggttgcttccaaagtgtttcaccagggggtgtattggcccaccgtgctgaaagtttgtgttgagcaagctaagaagtacgaaagctgtcagcggtatagccgaagccaagcagcatcccattatgagctgcaacctatcgcaccagtctagcctttcgccagatgggggttagacatcatcagccctttcccggtagcacgaaatgggtacaagtttacaattgtagcaatcgaatacttctcccgttggatcgaagctgaaccgcttggggcaatcacttcggcagcagtacagaaatttgtatggaaaaacattgtttgccgtttcggagtgccaaaggaatttatcactgacaatggtaagcaattcgactccgacaagttcagagagatgtgcaaagggctaaacctggaaatcaggttcacctcggtgg

SEQ ID NO: 2653 - DNA, 2856 bp, Oryza sativa
  Clone ID: PAT_MRT4530_102407C.1
atggccgccgaagagggagcagagccttcggcgcccgtcgtcgaagctggtgtggcaccatcggcttcggcacctatgccgcaaccaccaccttcggctcctgccgctttgacggggcaggcgccgaacacggttgatgcagcaaaggcagctgtggcggcgagggcgctccagaccagggcggagatcctttcgacaagccaactggcaacgacgccaggctgcggaacaaatcaagcgctgaaccaggtcgctatggcatggacccagcctccgttcgacccatccatggcggcacaccaagcgccaccattcggagccaggcaaccggatactgtggtccaacctcacacgcaagccatgacttcgctcttcgccacgacatatccacagccaaacgggccttcgcagcaaggtaccgtgagcaaggcggggggcgaaaaggggctaccgctgagtgggggaatcaaaattcgtccaatcccaccccagttcaagttcccatctgttccgtggtactcgggcgaaacggacccaaaagagtttctatccatctacgagtccgcaatcgaagccgctcatagcgatgagaacaccaaggcaaagctaatagcatttactcatgggagcaattgcgtgatgtctttgtccttaactttcgaggcacctatgaggagtcgaagacgcagcaacatctactcggcattcgctagaggccgagggatcgataagggagtacatacgtcgcttctcgtaatcccaatggcaagttcaggacataaccgaggcgcccgtcatcaacgccgcttcggcggggctgctcgaaggcgaactcacaagaaaaatcgccaacaggagccacagacactcgagcacctgcttcgcatcattgacgggtacgcaaggggcgaagaggattacaagcgatggcaagcaatccaagccgagtacgataaagccttcatcgccgctgctcaagcccaagtacaagcacaagtcgccgaaccggctcctctcgccattcgccaatctcagccggcgaaccaaggacaaccgccaaggccaagtcaatctcccatgacttggagaaaattcagaaccgaccgcgcaggcaaggccgtgatggctgtcgaagaagttcaagccctccgcaaggagttcgacgcccaacaagctggcagccatcaatatcccgttcgtaggaagctcaagatgcctggtccggcaagcgtgatcatggtcaaggggctccaaccttcgactacatcaaagggcgatttggccgcaatcaacatagcagtgcacaatgttgaggccgaaccgcatgaccgagcaaagcacatgccgaagcccgccccccacggcaaggtgatcagggtgcaggtcgacgatgccgatcccacaagatttgtttcgcttggaggcgacatgggcgaaagggaagctgagaacatcctggaggtgctcaagaaaaacattgacatctttgcctggggccccgacgaagtgggaggtgtttcagcagacctcatcatgcattatctggcggtcaaaccggatgccaagccaaggaaacagaagctgcgcaagatgtccgttgatcgccaagaggccgcaaaagccgaagtgcagaagttgctcaaaaccggggtgatccaagagatcgaccatcccgagtggttggcgaatccggtactggtgcggaagtcgaacggcaaatggcgcatgtgtgtcgatttcacggacctcaataaggcgtgtccgaaagacgacttccccctaccgcggatcgaccagctcgtggattcgacagctggctgtgaacttatgagctttttggatgcgtactccggctatcaccagatccacatgaatccagctcacatcccgaagacagccttcatcacgccgttcggtactttttgccacctcaggatgcctttcggcctaaggaatgccggagcaaccttcgccaggctggtgtacaaggtcctctacaagcagctggggcgaaatgtggaggcctatgtcgacgatatcgtcgtaaaaagccgcaaggctttcgaccatgtgtccgacttacaggaaaccttcgacaacttacgcgtggcaggtatgaaactaaaccctgagaagtgtgtttttggtgttcgcgcgggtaagttgttgggttttcttgtttctgaaaggggtatcgaggcgaaccccgagaaaatcgatgccattcagcaaatgaagcccccatcgagcgtacgcgaagtacaaaagctcgcaggccaaattgcggcgctcagtcgattcctctcaaaggcagccgaaagaggtttgcccttcttcaagaccctccggggcgcgggaaagtttagctggacacccgaatgccaagcagcgttcgacgaggtaaagcaatatccgcaaagcccacccactttggtcagcccagcactgggaagcgaactgctgctctatctagcagcttcgccggtggcagtcagtgcagccctcgtccaagagacagagtcaggccagaaacccgtgtatttcatctccgaagctttgcaaggggcgaagttaagatacattgaaatggaaaagtttacttacgccctagtgatggcttcgcgcaagcttaaacactactttcaggcccacaaagtcactgtgccatcacagtatactttgggcgaagtgctccggggcaaggaaattactggctggctcaacaagtgggtggcggaattatctcccttcgacctgcattttgtcgcccgcactgccatcaagtcccaagtcctagcagccttcgtggccgaatggacaccggcgttcgcccccgaaaccgagcccatcgaataa

SEQ ID NO: 2654 - DNA, 1002 bp, Oryza sativa
  Clone ID: PAT_MRT4530_102408C.1
ggttaaacaaatatagctcctcccaagagcgaattgctgacatacaacgatgattctctcaaacttttgctcggctgtatggcatacaactcgaagttcaacccaaatataaacgtggtttataaacattacaacggtgaaaaagtgtgataactaacacaaatactaacttagttcaacttgaaaataataaacataatagataatgcatactactcataataatcactcgaagcaacatggccactctcatacagtgttccatcttctggatgcttaagctcatctccacagaaatagcagtgttgtttgtcaatgggaagacctggaacacctcttggataatgaactctggcgccatagtaaccaccaattttttctttcccttcaagagagaccatgcaagtgggtatatatccattgttttcccagcgtacttccgcgaaaaataactcctccgagttcttgcaatcgccctttgcaataaaatttacatgaccatgaaaaccttcgtccagatttccacagctagtgatcgtcctgactaactcatatttgatctcgagctcggacttgaagatagatttacagaatgagctgttggcaactccacctcgacctccataagctgtggtttgtcatcatcaggaagtggaggattgagatccaatccgtgttgggtctccgaggggatcagcatgttgatgtgagcggaggagggaagtagagccggtggtacggacgcggcaagaggttcgtatccacctcttctggggacttggggagagtgcttcctccacgccttccggacctcagcgaggagggctgcggtggcggaggcggatctcgggccagtggaaaaggggggagctcagcggcgacgtgcgacgggcggccggtggcttgggcggcgtcccctccatcgccggcggcggacgacctcctcgccccgccacctccgccgctccgtccctcgctcgccgcccaacgccgccgccgctc

SEQ ID NO: 2655 - DNA, 141 bp, Oryza sativa
  Clone ID: PAT_MRT4530_102409C.1
atctaaagagaagagctcgatattggactcatggttgaggagaaagaatcccttgggcttggtttgatgcttcatgataaacctatccttggaaagaaaaaaaagggggtccgtgctcggaacaagtttgctgttacattc

SEQ ID NO: 2656 - DNA, 534 bp, Oryza sativa
  Clone ID: PAT_MRT4530_10240C.1
atggaggggttcgccggtttttataggaagcaaaggcggtggagggagaggtggtcgacgacggcacggctcggcgtcgatttggaggtggggaggcggcgcggcaaggtggcggcgatttttgagtatgttacgtatcctttggagtctggatcgatcgatctgagcgccatcgacatccactccggcgccgcgggcgtgagcgccaccaccccgccgtccccaagcctcgccgccggccaactcgacgccccaccgccaccaagcgctgccgcccgccctcgacgccccaccgccaccaagcgcccccgccgttactgttcgccggcggcccagttcccgtcggcaccaagctcatcattgtcgttgtgcttcatctcgatcagcctgcagctgattggggcgttgactgccggcggcggcgcccagcgggagtggtggcgaacggcggagtggtggcggcgcacggccgcgggagtggtggcaaacggcggcgaggtggtggcgctcacggccgtgccgagcgacgcctag

SEQ ID NO: 2657 - DNA, 172 bp, Oryza sativa
  Clone ID: PAT_MRT4530_102410C.1
tttaaaacatgatggaagtaaacgactccagacgtgctacacccaaggtatactgcaacccaaatgtaatggcacctgaagtccagaggtgcaagtatccagcagggcacagccaactgtgtttttgtgtatattggcgttgcacaatgatgatttagtactgccttggaat

SEQ ID NO: 2658 - DNA, 320 bp, Oryza sativa
  Clone ID: PAT_MRT4530_102411C.1
tggcacgaggcgctctacgaggcgctcctcaaggtcaaggaagagttagatgcttcttgggttcatctgcggctgctgctgacggtgttccaggtcctgatccagaggacctgcattcctcctcgctggacagtccacatgctgccatgccagagggaagcggtgggccccgcaaaggagcacgttgctgctgctcagatcgttggcagaatcgggaggcgatggctcagtgaaggtggggcgggtgcagagctttgccagaagaaggggaaagttccattgctgtcccttgaagccatacatcaattgcatattttcat

SEQ ID NO: 2659 - DNA, 441 bp, Oryza sativa
  unsure (1)..(441): unsure at all n locations
  Clone ID: PAT_MRT4530_102412C.1
gccgaggaatcccttaggatggtcatgtncctcactgctgggggtccaagctaagcgncttaagtaattaaccgtgtcagacatttgcatggtctgatcaaaagcatcatcatcatcgagcagagctgactcgatccggttcgagttcttggccataacatgcgtgctcgtggaaagctcaagagatcaagcttcagagatcgatggaacatggcagaaaaatctatgtacattagctaagaacgcatgtacatatatgtatagctagtttcaacttccaagtgcattctgagagggctgtgaacttctctggtttgtgcttccttttgacttgaacaaaaagatcatgcaagcagttgccttgcttggactctgaagctttgctttggcgtctaaattaaatcaagancctacctgaaaaaaaaaaaaaaaaaaaaaaaa

SEQ ID NO: 2660 - DNA, 543 bp, Oryza sativa
  Clone ID: PAT_MRT4530_102413C.1
atggggcggcagtgctcgagtcgctggcactactggcgacaccagataacagcacgaaagcaaaacgtcgttccggtgcaggcgcagctccgctttaaccacgcccagcgcgagaagcatcagaacagaggcggtacatttttcgatcggaaggccaatgctgtgcataagggcattagcagtgcgcggcctggaggcgacgatgcggcggcgtggcccaagcttcgaccgcaccgggtgaagctccccatctggcgcactgccgcttcctctccccgtccggcctcctccctcggtggcaggcatggatcggggggcggcgcggccgcggaggaagcttcctctcgccttcctcctgcacggcctgaccgaacacctgacgttatctccctcgggcctctgctcgcctttccggccgccgcgagtagtggttcagatgggaacaaacgcagccaacgtatgcgtgcatggtcaattgcgataaacatgtggccatttgatcggcaacatgtacatgcatgcgtgcgaggatcaggtaaattg

SEQ ID NO: 2661 - DNA, 299 bp, Oryza sativa
  unsure (1)..(299): unsure at all n locations
  Clone ID: PAT_MRT4530_102414C.1
aaccttatcttcccaaagcctcatctcctccttcctcccaccacctcgcctcgccatggcggccaccctcttctccacctcgctcacccccaccttcctcccggacgtcccctgccccaagcccgcgncgacggctcagcctgcttcccctgcgcgctgncgcgnggncggtaagcaaacggcgcttgcggaggcggctttctcccgtggcgcgcgtgcgcgagngagagagaggtgcggagtcgagggagtcgcagncctaagtgttttgnacttcgtaggcgcagggatcggggttc

SEQ ID NO: 2662 - DNA, 632 bp, Oryza sativa
  Clone ID: PAT_MRT4530_102415C.1
cccacgcgttcgctactgttttcttgcctttggatgaggcatgccttctcgatgtcaaccatatagaagaggcagggatccgtgcaggtttggtagaagagttcatgattattgacgagaatcctggtgatgaaactttgattttgagcttacaagcaattcagcaagaccttgcctgggaaaggtgcagacagcttcaagcagaagatgttgttgtcacgggtaaagtaattggtggaaacaaaggaggtgtggtagctcttgtggagggccttaagggatttgttccattttcacaagtgtcatcgaaatcaactgctgaagaactgcttgacaaagaactacctctgaagtttgtggaggtcgatgaggaacaaggcaggcttgtcctcagtaaccgcaaggcaatggcagatagtcaagctcagcttggtattggttcagttgtcttgggaactgtcgagagcctgaaaccttatggtgcatttatcgacattggtggaatcaatggccttctccatgtcagccagattagtcatgaccgtgttgcggacatctcgacaggtctgcaaccaggagatacgctcaaggttatgattctaagccatgaccgtgaaagaggccgggtagtc

SEQ ID NO: 2663 - DNA, 1140 bp, Oryza sativa
  Clone ID: PAT_MRT4530_102416C.1
atggcgtccctggcgcagcacgtcgcggggctggcgagcccgccgctctccggcgcgccgcggcgccgccccgcggcgcccacgcggccgtcggcgctgattaaaggaacagtgttcatgaccacttcaaatggtgcatatgttgatatccaatcgaagtctactgctttcttgcctttggatgaggcatgccttctcgatgtcaaccatatagaagaggcagggatccgtgcaggtttggtagaagagttcatgattattgacgagaatcctggtgatgaaactttgattttgagcttacaagcaattcagcaagaccttgcctgggaaaggtgcagacagcttcaagcagaagatgttgttgtcacgggtaaagtaattggtggaaacaaaggaggtgtggtagctcttgtggagggccttaagggatttgttccattttcacaagtgtcatcggtgtatgtgcatgtgcatggcatgagctgcctttcatctgcagttctcaatcacattgtaaacactagctgcccactattttacaaaccacttcttgaccttgatcagaaatcaactgctgaagaactgcttgacaaagaactacctctgaagtttgtggaggtcgatgaggaacaaggcaggcttgtcctcagtaaccgcaaggcaatggcagatagtcaagctcagcttggtattggttcagttgtcttgggaactgtcgagagcctgaaaccttatggtgcatttatcgacattggtggaatcaatggccttctccatgtcagccagattagtcatgaccgtgttgcggacatctcgacagttctgcaaccaggagatacgctcaaggttatgattctaagccatgaccgtgaaagaggccgtgttagtctttctactaaaaagcttgagccgacacctggtgacatgattcgcaatccaaagcttgtttttgagaaggctgatgagatggctcagatattcaggcagaggatagctcaagcagaggcaatggctcgtgctgatatgttaagattccagcctgagagtggattaactctcagttcagagggcatcttagggccattatcatcagacacaccttctgagggctcgggagaagggcaaaccacagatgaatag

SEQ ID NO: 2664 - DNA, 210 bp, Oryza sativa
  Clone ID: PAT_MRT4530_102417C.1
atggagggggcgaaggggcttctctcccttagggaagtgtcgacgaaaaatccacgcgccagccgatggtgccaggcttgtattgacgcgaagaagcagtgcggcttccacccctttttggcgaggaggatgatgttggagacaccgtcaacgagctgccgcgactttttggtgtcggggataaagtcggatgttgcgcgtaaggcttag

SEQ ID NO: 2665 - DNA, 1728 bp, Oryza sativa
  Clone ID: PAT_MRT4530_102418C.1
gccccccctcgaattttttttttttttgttttttttttttttttttttttttttttttttttttagagatgctgaactgaaagtccaactacaattgggcctttgggaggcctttctgcaagtgttggacaactttacaacagggaagcaacatccatttctttcagtaactttactttcatacacattgattgatacaagcacagatcgaagatgggaaatggttggaatacaataggtcttcttcatgccttttagatcgtgggaaaatgagttgatgagctaccatcacagctttctactcagacgtaatcttcctattgaagctattcatctgtggtttgcccttctcccgagccctcagaaggtgtgtctgatgataatggccctaagatgccctctgaactgagagttaatccactctcaggctggaatcttaacatatcagcacgagccattgcctctgcttgagctatcctctgcctgaatatctgagccatctcatcagccttctcaaaaacaagctttggattgcgaatcatgtcaccaggtgtcggctcaagctttttagtagaaagactaacacggcctctttcacggtcatggcttagaatcataaccttgagcgtatctcctggttgcagaactgtcgagatgtccgcaacacggtcatgactaatctggctgacatggagaaggccattgattccaccaatgtcgataaatgcaccataaggtttcaggctctcgacagttcccaagacaactgaaccaataccaagctgagcttgactatctgccattgccttgcggttactgaggacaagcctgccttgttcctcatcgacctccacaaacttcagaggtagttctttgtcaagcagttcttcagcagttgatttctgatcaaggtcaagaagtggtttgtaaaatagtgggcagctagtgtttacaatgtgattgagaactgcagatgaaaggcagctcatgccatgcacatgcacatacaccgatgacacttgtgaaaatggaacaaatcccttaaggccctccacaagagctaccacacctcctttgtttccaccaattactttacccgtgacaacaacatcttctgcttgaagctgtctgcacctttcccaggcaaggtcttgctgaattgcttgtaagctcaaaatcaaagtttcatcaccaggattctcgtcaataatcatgaactcttctaccaaacctgcacggatccctgcctcttctatatggttgacatcgagaaggcatgcctcatccaaaggcaagaaagcagtagacttcgattggatatcaacatatgcaccatttgaagtggtcatgaacactgttcctttaatgagtgagccgatatcggtgtcgatgtcggtggactcgacggcggagtcgaggtcctcgggcgagaaggagacgccctccatgggcgcggtgcggcagcgctcggaggcctcgtcgaacagctggcacatccgctcccgctcccgctcctccttggtgagcgcgtacgtcccgcacaccagcgccgacggccgcgtgggcgccgcggggcggcgccgcggcgcgccggagagcggcgggctcgccagccccgcgacgtgctgcgccagggacgccattcgcgctctcggcctacccgctgtggtgtgttgtggttgtggtgtggtgcttcggggcgacgagacgagtcgccggggtggcgga

SEQ ID NO: 2666 - DNA, 1152 bp, Oryza sativa
  Clone ID: PAT_MRT4530_102419C.1
acttggattctatcaagtttcccagatggttgggatgagtgttgatagatttctaattggagcattagtagagagatggcagcctgagactaacacatttcacttaccagttggagagatgacaattagcctacaagatgtgagttgtctatggggcttaccaattcaatgtgagcctattataggcaagtcagaggggccatgggttgatgaaattgagacattactaggagttactccaggaaaacaaacatcttctaactactccatcagcttaaagaaattatgagatcagttcaaggagatgccagaaaatgcaacaaaagaacaaattgaacattacaccagggcattcattttggatattcttgggtcaatgattttcccggatacattaggagatggagtgactgcaatgtacctgcaattccttcaggatcttgataaaccaaaggagtacaactggggggcagcaactcttgctgtgctttatagacaattaagcttcggtgcagaatgagagagattggagatggctggtccattagtgcttctgcagcattggtgtgggtcgcggttgagaccaggacgaccagtggatcaagataggaaccctattagttggggagagccagaccctgagagttgtcctacatttggagcaaaatggtgtggccaggaactttatcctctgccacataactcgggtgttgcgttttatcggaacttgctggatcaagttcaagacaatgaggtctcttgggaatcatataatggactattgatgtccatgccaagaagagttagagctgaacgtgctttctggtatagtcgagtacctctcatccatttttggatcattgaatttcattatccagatagagtgatgagacaactagggagaaagcaaaccattccacctcctcccccacatgatgagagcaagcttcgtcaactccataaaataaatcatacagggaaaccacgtgattggaggaagctccacgcagaatatgttaaccaatacaatagagtttggcaaagcatggttgatgaggagcaacattttgaccaggcaagttttgccacaatatcgtcattggtttcaacagtatgggatgtcagtgccgcaacctttccaggatagaagaa

SEQ ID NO: 2667 - DNA, 198 bp, Oryza sativa
  Clone ID: PAT_MRT4530_10241C.1
atggacagcataactgaaaggtgctcgtatgtctttgctgacaaagaagattgggctgtacaattttccgatacacacggagatagctacataacagctaacgccaaattgagccgacccagcttgcgaaagaagaactggacatttaagcgcacatgtcgcattgccatctacttcttgaaggaggaaattttcatc

SEQ ID NO: 2668 - DNA, 503 bp, Oryza sativa
  Clone ID: PAT_MRT4530_102420C.1
cgagttcaaggaggatgcggcatgtcagtttatctattaattaggaagagtttgttagttccattttatctttaagaaagtatgtttaatcaacaaggacaagtatctacccatgagtataaatatgtacacccggtgtcattgcaatttatctcacagatcaatacaattactctcggtgcatcccaccctctttactgaggtttttacttattaccggcagaacttggcacttgacgcaggactgcatcggctttcgatctccagcgaaggggtaagtcctacgttgcaccggccctggcaatcgtatcagctacattggtgttgtataaggctgcatcgttttcaacctcttggatcgctctggtttggttggtatgtttatctacctatttatgatatatcttagttaatctagtttggtagctcgatttacttgtatcggttgagattcgcttctgggtttatgccagtatcgactaaatccctttgctagattatat

SEQ ID NO: 2669 - DNA, 837 bp, Oryza sativa
  Clone ID: PAT_MRT4530_102421C.1
atgaggactaatcaagatgggttaggtcggtcagttacaataagtgatgaggagataggcttactggatggagatcaaactttagttcagcaaactgaactaaatgtttcagaacgtttcagtgccttactatggatgcctcattgccagcacaaaatctcaaaagtttgggaaaatgctaatgatggtgttagtgtcaggtatcaccacgtgggcattccataccattatttatgtgaaccactactgaagagacttggattctatcaagtttcccagatggttgggatgagtgttgatagatttctaattggagcattagtagagagatggcggcctgagactaacacatttcacttaccagttggagagatgacagttagcctacaagatgtgagttgtctatggggcttaccaattcaagggaaaccacgtgattggaggaagctccacgcagaatatgttaaccaatacaatagaatttggcaaagcatggttgatgaggagcaacattttgaccaggcaagtttgccacaatatcgtcattggtttcaacagtatgggatgtacactgttttttggatgctcgatccgctcaaggatatcaatatggaggctaagttaagcagcatgctaagcgagtcaggtctacctttatgtgtagatgacattcgatctgatgatagtgcatcaccattttctacccctaaaccaattaaacctgaggagataaacatggatgtgatggataactggttgtactcaaacaggggatttacaagataccttagtttaggtacatattctgatgtgctggaatctcaggataaacattga

SEQ ID NO: 2670 - DNA, 2730 bp, Oryza sativa
  Clone ID: PAT_MRT4530_102422C.1
atgttctcgtggttgttgaggattgcgtccgcgtgcttgggcccggcccggaggtacgcgcgtacgaggaaggatgaagatggcggcgataatggcggcggcgtcgccgacggcctgctgtggtcgcgggacctggggcgtcacgcggcgggtgagttctcctttgccgtcgtgcaggccaacgaggcgttggaagaccatagccaggtcgagacgggctccgccgccaccttcgtcggcgtctacgacggccacggcggtgccgatgctgctcgcttcatatctgatcacctcttcgcacacctgatacgacttgcccgagaaagtgaaacagtatcggaggaagttgttcgaggggcattttctgctaccgaagaaggtttcttgacacttgttcggagaacgcagtttttaaagcctatgatagctgcagttggatcttgttgtcttgttggtatcatatggagaggggtactatatgtggctaatttaggtgattctagggcagttgttggctatttgggtagaacaaacaagattactgctgagcaaattacaagggatcataatgcttgtaaggaggaagtgaggcaggaacttatttctcgtcatcccgatgattcacaaattgttgttctgaagcatggcgtttggcgcataaaaggcataatccaggtttcaaggactataggtgatgcatatttaaagaggcgtgaatttgctcttgatccatccataactcgcttccgcctttctgagcctcttcgccgacctgttctaacagcagagccatctatctgcacaagagttctttctctgcaagatcaatttgttatttttgcatccgatggtctttgggagcacttaacaaaccaacaagctgttgacatcgtctacaaaaatccacgagcaggaattgcaaagaggctagtaaacacagctttgaaagaagctgcacggaagcgagaaatgaggtttgttgatcttaagaaagtcgaaaaaggggtgcggcgcttcttccatgacgacattacagtcgtcgttgtttacatcgaccatgagttacttcaggagaaaaatgtttctgttcctgaactttcagtccgtgggtttgtcgactcagctaatgatggtgttagtgtcaggtatcaccacgtgggcattctataccattatttatgtgaaccactactgaagagacttggattctatcaagtttcccagatggttgggatgagtgttgatagatttctaattggagcattagtagagagatggcggcctgagactaacacatttcacttaccagttgaagagatgacagttagcctacaagatgtgagttgtctatggggcttaccaattcaaggtgagcctattataggcaagttagaggggccatgggttgatgaaattgagacattactaggagttactccaggaaaacaagtgatgaagcaaaaaaagcgaaaggcggacggtgacttggaaagcgggggaaatatgacatcttctaactactccatcagcttaaagaaattacgagatcagttcaaggagatgccagaaaatgcaacaaaagaacaaattgaacattacactagggcattcattttggatattcttgggtcaatgattttcccggatacatcaggagatggagtgcctgcaatgtacctgcaattccttcaggatcttgataaaccaaaggagtacaactggggggcaacaactcttgccgtgctatatagacaattaagcttcggtgcagaacgagagagattggagatggctggtccattagtgcttctgcagcattggtgttggtcgcggttgagaccaggacgaccagtggatcaagataggaaccctattagttggggagagccagaccctgagagttgtcctacatttggagcaaaatggtgtggccaggaactttatcctctgccacataactcgggtgttgcgttttatcagaacttgctggatcaagttcaagacaatgaggtctcttgggaaccatataatggactattgatgtccatgccaagaagagttagagctgaacgtgctttctggtatagtcgagtacctctcatccatttttggatcattgaatttcattatccagatagagtgatgagacaactagggagaaagcaaaccattccacctcctcccccacatgatgagagcaagcttcgtcaactccataaaataaatcatacagggaaaccacgtgattggaggaagctccacgcagaatatgttaaccaatacaatagaatttggcaaagcatggttgatgaggagcaacattttgaccaggcaagtttgccacaatatcgtcattggtttcaacagtatgggatgtacactgtttttttggatgctcggtccgctcaaggtttgtgggatcccatcccttatccactggataacttcgattggaccggttacatgcccagtggtccacctctctcccgattggatatcaatatggaggctaagttaagcagcatgctaagcgagtcaggtctacctttatgtgtagatgacattcgatctgatgatagtgcatcaccattttctacccctaaaccaattaaacctgaggagataaacatggatgtgatggatgactggttgtactcaaacaggggatttacaagataccttagtttaggtacagattctgatgtgctggaatctcaggataaacattga

SEQ ID NO: 2671 - DNA, 776 bp, Oryza sativa
  Clone ID: PAT_MRT4530_102423C.1
ttttttttttttttttttttttttttttgaaacaaattgagaagctgtctcaactcaattgcaaacagattatcatcagtcactgagtttacacacactgccataaaagaaaaacacaacttaaacaagaaggcatgccatctctaaagcacgcagtattaaacaacaggaacaaagcacacaacaaaggtcatcgctcctagtccttatcaggcctgctcctcagcttccgcagcttccctctcttccgctgcggcagccatcagctcatcaaatttctcgctcttttctaacactatctcaatcttagccttttggagcgggcgaactctcgattcatcgtttatttccaccgtagatgttctaatcttcttttcaacagcaaacccgttattcttaagaatctccgcaacagttacaactgttgcaatggccatcccgagcgcggagagctcgacatcgccgtgctgctgcatgtacctcttggcgaggttgacatagaagaagagtggcttcttggtgttggacacctggatgcggttgctgctgctcccggccgccctcctctgcgccccctcaccaccacctcccgccgccgccgccgccgccgcgggctccccctccacggccaggttcctcaccccctcggtgatctcctccaccgccatcgctcaagctacgccgctcggtggtggtagctcgctctccgcagatcggtggtggtggtggtggtgggttgtgcggcttggcctcctcttcctctcgtcttctctcgt

SEQ ID NO: 2672 - DNA, 428 bp, Oryza sativa
  Clone ID: PAT_MRT4530_102424C.1
agcatgaattacatattctagcattaatacgttaaattccattaagatggtagcattaacaggtcgtattatccataaaacaacccctagattctagtattcaacagaactgttttggttaataccaaaaattacacatttttttttcatcactatccctgttgcgatttgggacccaaggcccaaaaaagccctggattacttgtggcagccttgcaggggaagggcccaacaaatcccggaaggccaatgggggaaaacagccatgggatggggcctacattttttagccatcccctcccgggggggctaaaatgggtggattttaaagggcggcgggggaaaaattgccgtttcggggatatgctgccttttcgcccagggggttttgggcccaaattaacattttaaaaaggctagggaggttt

SEQ ID NO: 2673 - DNA, 433 bp, Oryza sativa
  Clone ID: PAT_MRT4530_102425C.1
gtataaactaaacagtgtccctgatgggggggatctttagagcaggtacttacaactgtactcaaaatactgaccctgatcacgcgcgttgtgcaaccaagctgttaactgtgcattgtaagtgcgcgggcatttcatagagacttcatatcctggcagtaccatattccacacttgacaagattcaagttcaagcactgaaatcatcaaacaaattttgtgtgggatttatgagtcatactcatcgttcaagacacaaatacctagaacttcaatttgttagctgcaggtacctacgttttgagcatctgctcctatagaattgtatttacagccaatagctctttaacctcgtaccgagccatgtttgatgccgtgcgaccggcttccaagttgcctgtttctttcacctcggggtctagcacctcccgag

SEQ ID NO: 2674 - DNA, 257 bp, Oryza sativa
  Clone ID: PAT_MRT4530_102426C.1
gctaatacatggagctcacccgaacccagtagcctagacttgtgcctgcaattgcaggtattaaacagtcggaagtgggacgaggcatccacatgtggcagttttactgccagtgtcttatttttgttcgcctagtttgttatttattggatctagatatcacaaatgcccgatgcattattaccagtatcgagaggggggtatttttttttaagagaccaaagatgtgttttgaaggtaaaaaaaaaaaaaaaaaa

SEQ ID NO: 2675 - DNA, 999 bp, Oryza sativa
  Clone ID: PAT_MRT4530_102427C.1
atgcctccaacgaagaaggacaagggaaaggaaaagattaaggagcccaagccatcggatgatttctacttggatctgggtgatcttcctaagagctatgccaatctaatgaaagatattcctcgtcgcttggaagaaattatcaaagctgaggcgccctccaccagtaaggggaagaagctcttcaagaaaatctcggggaagctatatactgcccagagtggcacatttttggttcatctcacgcctgataaggatactgcagattctggaagagtgtctctgctattccgctggaaagacttgtatttcgagggattttactccaaggggatttggttcaggctacaggattttcaggcagaactccctcctcagtctcagttgccatatgctgccaagggtgggaaaggagtggtgattctctcaatcgaatctaactatgcagggataggaggaaataccatatacatgggctctgatgcattcgacaaatgtctgaaagcaatgctgagagcacctgacctggaaggtcataggctctactcggttctaaaatcaaacagagttctagctgtccctgttgtaggaatatctgaacctttaaggttccctcaattccaggaatgggttctctcaaccctctcaccacctcctaccgatgctgaccactcctcgtcgtctgatgatccttctcctggaactgatgctgctgaatcgtactctgctggaatgggtacgggcagggacaagaaggttcctgagaaattctccttctacttcacaaaatggggcacgctttctgaaggattgttgaacaatagtgttccagaagaatttagcacgatgtccattgatgagatggctgcacttcttggcattctccgatggatggaggggatgtcattacctgcaccaaggagtggaactcatgatagtgaggcctccagttccagaccaagcagggctaccaagggtaagcataataccagtaaatag

SEQ ID NO: 2676 - DNA, 901 bp, Oryza sativa
  Clone ID: PAT_MRT4530_102428C.1
gccggccgggcactgagcccgcatcgtctcgtctccctctccctctcccaccccgcctccctcctcgacgagctccgagcggcggcgatggcgagcgacggcgcggcggccacgccggcgaaggcgagcccgaagaaggccaacctcctcgacccccactccatcaagcacctcctcgacgagaccatctccgacgtcgtgaagagcaagggctacgcggaggacacgcggctgggcaactggaagctggcgattggggcggccgtgatcgccatcgctctcctcgcgcagttctacccgaagaagttcccccagaaccgcgagttcctcctcggctgcatcgcattatatgtggtgttgaatgtggtgctgttgatacttagctataccaaggaaaaggatgccattatgttcacacaccctcctgcgggttctttcaatagcactggactagttatatcttcaaaattaccaagattctcggatatgtacactatcacaatagccagtgcagatccccagtctatttccgccaataagccagttcatttcactaagagtgttacaaaatggtttactaaggaaggagttctcgtggaaggcctgttctggaaggatgttgagaggttgattgatgactacaacactgagcgcaagggcaaatgaatgggtagtccatgtgactatgagacgttaattgtctagaaaagaaaccctcttgtggaattccttgcttggaagaatccttagcttaatcaaaatagacaattttgtcatacattactgtttcactggtgattgaaatactgtcgaagacacccggtaccatcccaaatcttttttaagaaaaaaaaaaaaaaaaaagcggccatcataaaaaaaaaaaaaaaaaaaaaaaaaa

SEQ ID NO: 2677 - DNA, 378 bp, Oryza sativa
  Clone ID: PAT_MRT4530_102429C.1
ccaatgaaaaaccccaaatgttacatttcttccttttttttttcctttttgggaaatattgcactaaggctgacccaaaatttagcaccttaatacaatgggagaaatttcctagcacgataaattcgaacctgaaaactacccaaatttggccctatttatactagttggctttatttgggtccagagatggtaagaaatatttaaacgagcacacgtgcccctaacgttcaaattatccgttaaacggtctgtacaccttgaaagcgtcaatgacgtaagaaagggagcccgaaagggcggcaaaggaaaccacggggcagcacgcgctgaacgttttgggcgaaacccaccttgggctgccacgtggcacgccgg

SEQ ID NO: 2678 - DNA, 1262 bp, Oryza sativa
  Clone ID: PAT_MRT4530_10242C.1
ctactttttagggtttgtgattttgcccctgcttttttgaaatgaagtagccgcctgcccaataatagaagcagcactaacactcagcttatgcccgtctcctccggcgtcggcagcaccatggaatgcgacgctcctcgtgctcgactgcgacgtcttttcgtactccgacgctgacgacgccgacgcgcacttctcctcctcggtcttcgccagctcagcctctgactcggccatgtactcacactccgacgatgagcagttgctcaccaccggcaacggcagcccgagcgagtccctctcgtcgacggcaatgtcctcttcctcgccgtcatcctcgtcgcggcgcctccaaaggccgtccctgcgcatgcagccgcgggagcgccgcacctccctgcgcgcgccagccacgacgccgccgccgctagggcatcggaatgcttccttcatgtccatgctcatgttcagccgatcaccaaccatgaaatagtttcccgatttgatagtcttgtgctcattccaccaatgccctgtattgaacacgagcacgtcggcgccagcccaacggttggcgtgccgaggcagcatgtccagccggaccgctcccctgacggcaccgctgcttgccgggaagcggtcgatcatgacaagcattggggcgcggtagtactcgacggagaggttgtagtctgcgaagaccatggcgaggtaccctttgtgcctgctaatgggtttcccggactgctcatatattcttgacttccccgctggcacggaggcggcgagcatgcacaccatggactcccactggttacggccgatcgagtcgccggcgaacacgattctgccgttccggctcctctccagcatatcagttgcattgaacttcgggagctggcagccatgaggctgccatcgccagtagcggaaagacgagttgctccggccgttgctgatgcactggaaaccagggtcaagaaacgggcagtcctcccggtaagcagtcacggccgcggcgtccctcacccatttaccgtcggagaaaatacaatcgctggcatcggatggatgaggaaccctactgttgatcaggcgaggcggtggagatcggaagaacgactgcggtgatggcatgcgtggcactagtgtgatgatggagagcgccaggaggacgagcaagacggaggagagaagagcgtatccagaatgcatgggtatggatgtcccaacaaacggcgaccattggtcggttgcaagtc

SEQ ID NO: 2679 - DNA, 248 bp, Oryza sativa
  unsure (1)..(248): unsure at all n locations
  Clone ID: PAT_MRT4530_102430C.1
atatggagaaagcaggcacgcgtgcaggagccggtgatgcaatagagcggtcgacctacgcgttcggataaataataatcgccattgttatattctagattatttatttatcaaacgaataaaatgattatggtcgcgtgcnnnanacaaaaaaaaaaaaaaattaaaaaaagaaaaaaaaaaaaaaaaaaaaaaaaaaaaaaaggggcgattattatttataaaaagcggggggggcgttctaaaaa

SEQ ID NO: 2680 - DNA, 389 bp, Oryza sativa
  Clone ID: PAT_MRT4530_102431C.1
acgccacgagaccaaccacctctcgtctcctctctttctctctctcctccccccgcgcgatccgaccggccgccgaggccaccgacgacgacgacgacgcgcgcgcgcgagccctagcctccccccgtcccccggatctgggagcttccacccctcccctgccttccatggtcccccgccgctgcgccgaggggcccaccgggggcaaccggatgctctgacggtgagatgcgaggcgacacgcccgacgggtcctgctagtgatcggcatagagacccccctttctcttcagccgacgagaaaggggatctgaccggctaacccccactcctgggcggctgggctggaatggacctggtcctgatccagggcggaggcatggacctat

SEQ ID NO: 2681 - DNA, 228 bp, Oryza sativa
  Clone ID: PAT_MRT4530_102432C.1
atgagctggtttcaatttttcacaaaaagggattctgaaagggcaaaatttgctacaggacacttaaaaaacatggagcagacgccgccgaggttgtcgacggcgaggttggcgaccgcgcgccaagagcggccgacggcgcggaggcggacgcggtcggggagggaacgcgaggccggcggcgtggagcgcgagcaggaggcggccactatcgtcgccgtggtttga

SEQ ID NO: 2682 - DNA, 552 bp, Oryza sativa
  Clone ID: PAT_MRT4530_102433C.1
cacgagagcatttcttgtgctctctcgtcagtgagtctgagctttgggcacactgaccaaaggcagagcggagagatgccggccgctccgtccaacggccgcctcttcaggttcctgccgccgcaccgccgtccgcagggcaccgacgtcgccgccgccgccgggtggaccgtcgccggcgtcgccaccgccgtctggctcgtccagccgttcgattggatcaagaagacgttcctggagaagcaggaagccgaggaggggaggaccgaagcctgatgaattcttgtgcgcaggcagcgtagcgtgtaatccttgcagaaagctggctgaaagatgcagaaatcaatggagttccatctgatttccagtgtacgactagtagttgctactgtagctgtagctgtgtttgtgttcatttcactctgtgcgacttagagcaagtttaatactcgctccatccataaaagtttaacaccatcgacttttttaaatatatttgaccggtcgtcttattacaaaatttaagtaattattaattcttttcctatcatt

SEQ ID NO: 2683 - DNA, 359 bp, Oryza sativa
  Clone ID: PAT_MRT4530_102434C.1
gcacgaggtataataaagatgcaatctacttcggttttggcaattctcgctcttgcattcggttgtgctttagctttcgatgctacactcaaccaacaatgggactcatggaaaggagtcaacaacaaagcctataccaatgaagaagaacttcttcgtcgtggtatctgggaaagcaacttgaaaattgttcaacaacacaaccttgaagccgatatgggttgttcacacattctatctcggaatgaacaaattcgctgacttaaccaatgctgaattcgtccaagccatgaacggttaccacgtcaccatgcgaagagaacgttaaaacggaaaaacattcgctttcaacccaaata

SEQ ID NO: 2684 - DNA, 258 bp, Oryza sativa
  Clone ID: PAT_MRT4530_102435C.1
atggcgcggagagcggccgggaaaggtttagctagtcctcgcctcctccgccgtcttgccgccgacccggtctccggcatggggaagcgcgcgcgccacggcggcttcgcccggtcccactccccctacttcgagtcccagctccgccgcctcatcaccgacgccggcctctccgcctcctccgccgaggacgtcgccatcgccctccgctcccgcttccccgagttccgccgctacaagctcgaccccttcgcgtaa

SEQ ID NO: 2685 - DNA, 246 bp, Oryza sativa
  Clone ID: PAT_MRT4530_102436C.1
atgggcgatcccatcgtgcgcgcgcgcaagctgggagagcctcgtggggggaagaaccccaccgcctactccaccaccatgtgctcggcaaaggaaaaatatgccaccctaagcgagcttgagctcgacctcaagctctacctcaacgcggctgccacctcctccttgagttccatctccaccgacatttgcctcaagctcgagatcgaggagctcgcaaaaatctctctcacacacttctggtga

SEQ ID NO: 2686 - DNA, 407 bp, Oryza sativa
  Clone ID: PAT_MRT4530_102437C.1
ccggccgggcttcgctccgcggacccgttttccattttttccacccacacagcggcggcgagggtttccgatggagaatggagacgagacgttcgcttcccccaccgccggcggggcggcggcgagttcgagcagccgctgaccaacggcgggggaggaggagggggcggaggggtgtaccccgccgccaaggcctacgacgcgggcgagttggacgcgctccggaggcgaaggcgacctggaggacaagctcgccgccgtggagcacgagaaccggttcctcggcgcggaggcgtaccgctcgaggggatcgtgtcgcaggccagggaggacatcgccaccgccgagcacggcattgccgccttcgagggggaggccgctttcttccgcgacggaggttaacgcgc

SEQ ID NO: 2687 - DNA, 412 bp, Oryza sativa
  Clone ID: PAT_MRT4530_102438C.1
aaccctctttaaggaataagcttgctgccgctggccggtactgctctatttgccgagcctgatgaatcttacctactactgtacctgcccggcccaatgatctaactgcaactacctagaggccaccataacggatccccactttggttgcgcacagcctctcttgaccaatgagcagaaggttctccaacgacgcatggtcatactcgcctctactccgtcactaaagatgcaactaggtcaaggacaatcgactgactctgactcgacgattcgagggtcaccgtgctgtaaagacatcgtaaatattgtttggatactcgcgcaattatatgccttacgcgtatggggcgtactgcttcactgctcttgatggagtgcattgcattgatcgatcttttgtgtgacatcg

SEQ ID NO: 2688 - DNA, 447 bp, Oryza sativa
  Clone ID: PAT_MRT4530_102439C.1
gacccacgcgtccggcaactctccaaggaccaaagggatctgtattggccatgtttcagcacacggcaatgaggttcagacttcagaagtccaaactgatttgtgtcttcccttcccaccatgtactatactgattgctatcttgcaacttgaaactcatcattgaccaacagtttcatcgatcagagcctattaacatgcagagatataatatctaatagcatttgtgttcaagttggctcacatcttaagctatacttatatttctagagcataaacagtaataaattcataagatgaagaatggattgtatttaatacgtatcaaatatcgcattgaagtaactcgttaggctctggtcctacacatctaaagccatactactccattgaccatgtggaagctgcccatgttcggctgcaccgatgccacccacgtgctcaagg

SEQ ID NO: 2689 - DNA, 911 bp, Oryza sativa
  unsure (1)..(911): unsure at all n locations
  Clone ID: PAT_MRT4530_10243C.1
gtgcgnccnttttgtggattgactcgcctccttactgcaagtagctcatcatcctataaaatggaaccccctcgccccgttctctcgttttagccccctcccgcgctctcccgtggcctccccacctctccccgccgtcctcctctctctcccgtgccgccggccgcctccagccgcctctcccgcctcgcccgcgcgccgtccggccgtgccgtcgccttcctcggctctgcaacaccgtccccttcaccggtctcaccgtctcctcgccggaaactcgccggaacggtgcccccgccggcaaccagtggcattggtgccactgtactccctccagccggctactgtccctcgtcggtgcggcagccgtcgtcgtcgccacctccctcggctccgcgacgctgccctcatccccggcatcacctcctcctcgcccgaagcttgccggagtggcctcctcgtcggcgtccagtatctccccgcctccggccggctcctgtacgtcgccggtacaccgatcgacgtcgccgcgttgtcctctcctccagctgctcctttgtttcgccggaacgccgtcgcccgtgctggcctctccatcctcatcgtcgccgacgtcccttcggccgcccgttcatcctcgccggctcgtcgtctcgcggcgccgcctccgtcgtcggcatcgcagcggcgtgttccgcgccgtcctcgtctccgtgcagctgccgccggctgccctcgtcggctcctcgccggttccggtcgtcgtcctctcgtcgttcccggtcgtcatggcgttcgtccctccgtcaagccattctcgtccgtctcgtccgcgtccgtcaagtgtgccgctgcaaccccggtcgtcggcttcgtcctcngcttcgcgtcgtaaagccttgtggcggcgg

SEQ ID NO: 2690 - DNA, 341 bp, Oryza sativa
  Clone ID: PAT_MRT4530_102440C.1
tttttaccaccaccctcttcatcatctatctcgggcggatcttttgaccgaggggcgcctttacccccacatcatcaagcccggctgctttaacaccgaccccatctttcacaacaacaagttcacctggtacacgacttcactctacccttgtaggtatgtggttagacccgctcggatggcgcaccggctcgccagagaagatcaaggagctgggcaccaaggagaccaagaacggtcggttcgacatgctcccagcattgggagctttgctttcacgcagagactaccgcaccctactccatatgcaacctatttgcccatatcgcctaccccggcca

SEQ ID NO: 2691 - DNA, 1035 bp, Oryza sativa
  Clone ID: PAT_MRT4530_102441C.1
atgaagcctgcctcccggaagcgcgggccgccggcgccggacccggtggagcttcccccgccgggcttcgtggcggaccgcgcggaggcggcggcccgcgtcgagcggctgctgcgctaccagttccgcgacgggcgcctgctggaggaggcgctcacgcaccagtccttcgccgacgacgccgtctcctaccagcggctcgagttcgtcggggactcggcgctcggcctcgccttctccaacttcctctacctcaccaaccccaccctcggccccggcccgctctccacgctccgcgccgccaacatctccaccgagaagctcgcgcgcgtcgccgtgcgccacgacctctacccgcttctccgccgcaactgcccccgcctcgatctcctcgtaggtcagtttattgaaacagtgaagcaagagccagaggatgatcttagtactgtaccttatggtggtagtgttgtcaaggctcccaaggtgctcgctgatattgttgaggccattgctgctgctgtctatgttgattgcaaatttgatcttgagaagctctggaagagactcacatggttacatggcctccaagaaataaggtggactgttaatacaaataacataaaagattggataaacaattttatttatgggaagcgtctggtcacaaggtggctgtttgagccaattattacagcagaaacaatagacgagcaacctgtgactatgttgcatgaactatgccagaaacacgggaagatggcacaattcaagacatggcaaaaaggtgggatgacagtggtcaatgtatttgttgctggggagctagttggtattggttcctcggagcagaaggtaattgctaagcttaatgctgcacgggatgcaacaaggaagcttgcaggtgcaaagaagcaagtgttaacaactggggttggcaacggattgggggatgagattggagagcttagggagtgcaaacagaagcttaatgagcaatgcagcaggcagaattggccaaaacctatctttaagtaa

SEQ ID NO: 2692 - DNA, 546 bp, Oryza sativa
  Clone ID: PAT_MRT4530_102442C.1
ctaaaatgcaagtaacagtgtttaccaacaagcacacttgtacatccagtggcagaaggaaaactaccacaccaacaagtgcttgggttgcttccaaggctatccatttttttaaggaaggattcagatatgaggcctaaagaactgcaaatcaagttgcaggaggacaacaaatgcacaaataaatatgatattgtggctagggggagaaaattgactatgattgaattgcatggcggatgggaagagagttttcagttgttatataggtggagggctgcagttagggctgggtcccctagtagtgttattgagattgacactaaggaggttgatggcaaggtatattttcatcgttttttttgcattaagtccttacatttctgggtttataactggatgtagaaaatacggagtatagattcaactgcacttagtggtagatggaatggacatttaacatctgccacatccatagatggtcgtaattggatgtatcccattgcttttggtttcatagatgttggaactactgaaaattgggga

SEQ ID NO: 2693 - DNA, 597 bp, Oryza sativa
  Clone ID: PAT_MRT4530_102443C.1
tcacgccggctctctcccctcctctctccgccagcgccggctcccctcctccctccaccggcgacggctctcctctcctccggcgaaggacggcgacgaacttggagaagcggggcagagcgcggggcgggagatggcgacaagttcggtggcggcggcgcgagatctcaccggcccctccacttctggccagtgacgagggcgcggagggctgcggcggcgcgagggctcaccgggcccctccacccccggcagtgtctcgacgacggatctggcgtcgggcgagcggcatcctcggggcctagcgaacaaacggcggcggcgcgtcctcgccccgccctcctcaccagcggcggcgccctccttagcctccaccggagctcgacggcgccgcccgaaccttgccaggcgtggatctggcctagagcttgacggcgccgctcggacctcgcccggcgcggggtggcgccgccggacatggagctctggcggcggcggaagaatccgagctcggcatggcatcctcctcccccggctttgtttcaactttttcagaatccgagctctgcacatgtgtttgttcagctttttgaagcg

SEQ ID NO: 2694 - DNA, 362 bp, Oryza sativa
  Clone ID: PAT_MRT4530_102444C.1
ccggccgggtaatgaggcccaattagatgggccgcatcaatgtggtttccggcccaacagtggcctcattcccggcctcttcaggcccagaatgtatgcgtcagacgtaggccgattcctcttcaggcccagaatgcatgcgtcagacgtaggccgattccttttcagccccagcattaggccttgttcgtttaatcccaaaaaagggatttgggggagaatacatcacaatagatatggaaaaatcccttccaaatcccaccaattctcttgtggaagggattaaccgaataagatcttaatgggacccaagaaggatgccttccatttccctccaaaaaaaaaaaaaaaaatttgcggcc

SEQ ID NO: 2695 - DNA, 1012 bp, Oryza sativa
  unsure (1)..(1012): unsure at all n locations
  Clone ID: PAT_MRT4530_102445C.1
tcaccgccgtcgaccacatccacgccggcactcccgttcccgtccctctctcgggcccctcatctcccagtcggtgacgagcatcgagagctcggagggcgacgacagtggcgcggatctggagtggcacgggagctcggctgacacgtcatcctcctcctcacctggccaccgccctatccccctactccaaatcctagctgacgccccctggcactcctccctccccgcttcagatctggtgctgccgacgacgtacgcagcaatggaggcggttgttgcggcggtggcgacaggatgagagcggcggcggatttgcgtcctcctcaccgtcccttgccggcgaagcgacaacccaggtggtggtgccgggaggagcggccgccgcttcctcaccggtgctggcgccgaggtctgatttccacaggacttcaatgacaggcggagtatttgtccacctcgcagatcaattttggccaccggcccctccacttctggccggcgatgagggcgcggagggctgcggcgacgcgagggctcaccgggcccctccacccccggcagtgtctcgacgacggatccggcgtcgggcgagcggcatcctcggggcttggcgtagaagcaacggtgggaagacggcggcgacagcgctccttcgaggtggtggcggcggcgtggatctgaagcggtgcgggagcttagcctccaccggagctcgacggcgccgcccgaaccttgtccggcgtggatccggcctagagctcgatggcgccgcccggacctcgcccggcgcggggtggcgccgccggacatggagctctagcggcggcggaagaatccgagctcggcatggcatccttctcccccggctttgtttcaaccttttcagaatcggagctcttcacatgtgtttattttagctttttggagtgtttgtttcagctttttcaagcgagttcctcgcgtccttgntaagggacgaaagcctcagcgaaggaacgagggcccacac

SEQ ID NO: 2696 - DNA, 1948 bp, Oryza sativa
  Clone ID: PAT_MRT4530_102446C.1
cctatccaacgtcaaatccgaaccctcccccccccccccactcctctgcgcctccctcctccgcggcctccgccatggcctccctcgcctccgcctccgcatccacctccctggtcttctccacctcctcctccaagccgcgcctcggctcctccgtcggattctcctcgcccgcgcggttccggcgcacggcggcggcggcggcgtccaggggcacggggcggcgcgcggggctgctggtagtgcgcgcggcgagggggaagttcgagcggaccaagccgcacgtcaacatcggcaccatcggccacgtcgaccacgggaagactacgctgacggcggcgctcaccatggtgctcgcctccgtgggcgggagcgcccccaagaagtacgacgagatcgacgcggcgcccgaggagcgcgcccgcggcatcaccatcaacaccgccaccgtcgagtacgagaccgagacccgccactacgcccacgtcgactgccccggccacgccgactacgtcaagaacatgattaccggcgccgcgcagatggacggcgccatcctcgtcgtctccggcgccgacgggcccatgccgcagaccaaggagcacatcctgctcgccaagcaggtcggtgtccccaagattgttgtcttcctcaacaagaaggaccaggtcgacgacgaggagctgctccagctcgtcgagctcgaggtccgcgaattgctctcctcctacgagtacgatggcgacgaagtgcccatcgtcgctggctccgcgctcaaggcgctcgagaacctcatggccaaccctgccattaagcgcggcgatgatgagtgggtggacgggatcttctcgttgattgattccgtggataactacatccctgtcccacagcgccagaccgacctcccgttcttgcttgctgttgaggatgtgttctccatcaccggtcgtggtaccgttgccactggccgtattgagcgtggcaccgtcaaggttggggacacggtcgatatcgtcggtatccgggagactcgcaactgcacggtgactggtgttgagatgttccagaagaccatggatgatgcgatggctggggacaatgtcggcctgcttctccgaggtatgcagaaggatgatatcgagagaggcatggtgcttgcgaagcctgcttccatcacgccacacaccaagtttgatgcggttgtgtatgtcctgaagaaggacgagggtggacggcactcaccgtttttccctggttaccgccctcagttctacatgcggactaccgatgtgacggggaatgtcacaaagattatgaacgacaaggacgaggaggcgaagatgtgcatgcctggtgaccgtgtcaagatggttgtggagctcatccagcccgtcgcttgtgagcagggaatgaggtttgccatccgtgagggtggaaagaccgtcggtgccggcgtcatcaatacgatcttgaagtaaactggatggagcatatccaccgtgagaattttccttgtttactctttgcgaaatgctctgtagttgttattacgcgttgagttttaggggttgctcatgtgaaattgtagtatggcacttttctcttcaagtgaatttgcatactttgtgatattcacgacaaagatacatctgtttgcaactaatttggctatgctgtgccatctactgtcatgtgttcaattgttcatctattgagcttgatgccacatggaattgtagagttacacatgtacggatgtagtacatttcttgcttcagattatataagctatcagcctagcatcatctgtgatgtggtttgcttgcttgacaaacctatcttgatgctagttctgatgcttacatatatatcaatttcattaaaaaaaaaaacattggggaactaatattaattatctgttggttaacaaaaaaaaaaaaaaaaaaaa

SEQ ID NO: 2697 - DNA, 288 bp, Oryza sativa
  Clone ID: PAT_MRT4530_102447C.1
atggccaaggtcgctaccgatagggagctcggcgtcgagctcgacagcatcttgtggggggcgtccgtggcgacggaggcagttgacgagatggcaacggggaattccccgtcggaggttactccaccatacccgcctccgcggtggggaattttccccatcaccatcaccgtgaaatgcaacggggcaacatctttccccatcaccgcctccgtgcggcagtgcagcaacaagcagtgcaacaaaagtgtgcccaagaatacaatatccatcatattcccagattaa

SEQ ID NO: 2698 - DNA, 750 bp, Oryza sativa
  Clone ID: PAT_MRT4530_102448C.1
atgtgggcgggcccaccttccaagattattaaaaagctgagatggtatgtcttcgctaggattgatcatgctgagaataagttgagcggtgagaacgagctcgccaacgttgggcagcaacagcggcgtggcaaggaagctggtgctgtgcgcggatgggtcggcgatgagcgccaacacggattgggggacgacgatggactcggtggaacagggataacaatgaggttaggtgtcagatcctccgccaccaccatcttcccttcttctcgtggtggtgtcctcgcgggcaaccgctgctgccttgcattggctcacgccctctcccaacatacatacgtggcgacgaatctcggacgtggtagacaggggatgaacgccaacgaggctcggctttttttctccgtccgcgtccgcggcgcactgcgccagagccccgtggtggtggcaccgacgtcgatcgcctgcgccgccagaatctgcccccaccgcgaccggtgcccgttgctcacgtcgaggaacgtcgcgtacaagttgtcgctgaacggcaggaggatgtctccgccggtgacaagccaccgatggaactccctcccgctgggcgggcgacgtcgtgttggtgtcggcgtaggcgaggtagcacacccgtcgagccaggctccggcgcggcagcttgcaacgatgtccacgaggctctcgccgtcttgcgtcgctgtgccgccatggggtcaccgaggcagacgccgctag

SEQ ID NO: 2699 - DNA, 314 bp, Oryza sativa
  Clone ID: PAT_MRT4530_102449C.1
ggagaagggcgcctgctacaagaagcggctcacctgcccggaaaagtgcttcaagtccttcagcttcaaggacaagcacggcggcggcggctgcggcggcggctggtgcagcttcaattgcaacaagtgcgaggccacctgctaattaatcaaaccgaatgatccatggatggcgaagaatcgatggccctctctactgaaactgatggatgtgtatggtatggggtgttgaattaatcggcagttattagagttttgtcaatcagctactaactgaatggaatggaatgttatgaaatatattctggtgagct

SEQ ID NO: 2700 - DNA, 228 bp, Oryza sativa
  Clone ID: PAT_MRT4530_10244C.1
ccttattgtttttgggggccataaccaaacaactggacagtgagggcaccaaaatccgtcaccagatgggaggacaggcttgtccttccacctgctcaaggacatgccgggttccatgtgaaaaaacatcgagcgcgcgctgggggacgcgcacacacagcaggagatctcggacaggaacaacatcttctgggtggaacaccccagaggtccacctatcctggacca

SEQ ID NO: 2701 - DNA, 3605 bp, Oryza sativa
  Clone ID: PAT_MRT4530_102450C.1
atgggggaggcggcggtggtcggctggctggtgtgcccggtcatcaggatagtggtcgacaaggccaggtcctgcgcctccgacaggttcaggtggctcaacggcggcgtccccgacgcgctcaagcagctggaggatgagctcaatcagctccgcgccgaggcgggctgcgtcgagcgctgcctcggcggcggcggcggcgggagaggcaactgtgagctcgtacgctggctgcgccagctcaaggaggtggtgtacgaggccgacgacgtcctcgacgagttcgcctaccggaggctcgcccccaacgacggcaaggtcagcctactagggtcttcttccattggcaagatcggcaagcagctcgttggcaaggacgagtcggtcaataggctcaaggccgtcgtggagaaactgagcagcatccgcgcgaactccggccggctgatgcaggcggcggggctgaccaagccaggttccggcgagccgagcagcacgctcctaacctcggatggtccggtcaccggctcgattctggaggatggtgaggtgtttgggcgcgacaaggagcgtgagcaattggtgtcttggctaatcggcagcacgcccgaagccgaaggcgaggatcggagcgccgccgccgatgacaccatccccgtcgccgctatcttggggctcggaggcattgggaagacgacgctcgcacgcgtcctgtgccatgatcatgaggtgaaggaggccttcgatctgatcatgtgggtgtgtcccgcaggcaattacagcaagctcgatctcgcgaagcaaatcctgcagtccgcggaactccccgacgacacgaatagcttcgatcggctgcagcggcggctgaaggaggccgtctcgtcgcgccggttcttgctgattcttgacaatgtctggaataaagatgagaatgagaactcgtacagggatatgtgggctgatgtgttagctcccctcagatttggccgagctgggagtaagatcgtggttaccaccaggaagaggattgtggcagacttgctgaatgcgagcaagtttgtttggctgaatgggctggagttcgctgatgtttggttgttgttcaagaagtttgccttcgacaacaatgatgttgacaggcacccggaattgaaggaaattggggagcagattgctgtgaagctcaaggggttgccattggctgccaaggttgtcggtggcatgctaaagcggaaaccaagtttgactgagtggaagaggatcttgaagatggaaatatatgacaatgttagctccacactggagctgtgttatcagaacctgcaggagcacatccaaccatgctttgcgatatgcagcatattcccaaagaactggaggttcaatcgtgacaagttgattaagatttggatggccctgggttttatccagttcaggccagatgatacgaagaatcaattggaggaggatgtagggaaggagtactttaatcaacttgtggcacaatcattcttccatgagcgcaaggaaggccgccgaacttactactacatccacgacctgatgcatgacctggccgacaatgtctctcgaattgactgcgcaagagttgaaagtgtagagtttgagaaaaaagacatacgcatacctgatactgtccgtcacttatctgtgaccagtgatgcggtgatgcagctcaaaggtcgggccgagctcaagaggttgcgcacattcattattctcaagcattcctcatcttccgttgttccattgccagatgatgtcctcaaggaattgaaaggtctccgtgtgcttggtttggatggctgtgatatggttgaattatcagataaagttggccagttgatacatctgaggtacctttctctttgcaagacgattacaaagcttccaaaatcagtgacaaaacttttccttcttgagaccctatatatccctaagaggtgtcagcttgaggagtttccaaaagacatgtggaagttgaaatatctccgccatttggatataaacaggacaaacacatcgaaaattgtcggaattggaaaaatgatccatctccagggatcaattgagttccatgttaaaaaggaaaagggtcatacattagaagacttgaacgatatgaatgatctccgaagaaagctccatatcaagaaccttgatgttgtagcaagcaaagaagaggccagcaaagctggattaagcaagaaacagagcataaaggtgctggaattggaatggaactcccctggcaaaagtgtcccttctgtcgatgctgaggtcttagaaggccttaaaccacatccagatgttgaagagattcatattaggagatatcacggtaatacctcaccatgttggttggacaggaaggacataacatttcttaaatatttacatttgaccaactgtagaaagtgggcggtcctgcctcctcttgggcagcttcccttcctcaaagttctgcatttgaaagagatgtgttcattgaaacagattggaagtgagttttatggaaccaatccaactgcatttccatatttggaggaccttgaatttgatgatatgccaaaatgggttgagtggaccaaagaagaagagaagtatgacagcgtgttccccagactccgtaaactgaagcttttgagctgtcccgatttgattaaagtgcctcccttcccgcagtccgtgagaaaggtcagtattgagaatacagggtttgtgtcacacctgaaactatcttcttcttcatcatcaaaagccaacaaagttaaattggaaacatgttctgccgctgtccttaccaatggtttgttccaccagcaacaagtgcaggaaattgttgatttgaccttgaggcactgccaagatgtaaagtttgaagagcttcatgcacttacttccctcaagaggctgcaaatatcttatttagagatgactgacgaggagttgggtacttgtttacaaggtttacaatcgctgaccttactggatatagtccactgcagtaaaataaccactcttccacagattgagaacccgagcaacttgacgaagtttcatgagctaaacattcggcagtgcccccaattgtcttctctgcattcattgcctagttttgccacacttgaaacagtgttgattgaaaattgctccagggtcaccgtagaatctttccctgccaacttcaacagcttaacctctctgagaaaactgagcataatgaactgcactggattggagtccttgccaagtggcttcccatcttcactgcaggttgttcatctgattggttgcaagccaacgttgctgagccaactacaaaataaggatggaccagaatgggataaaatagcttcgatcccaatgaaactgatccactgatcagggttcagacttcagaggctaattttccaggtgtgtttgataccattagcatatgcacatttcactgtacttgtaagttttaacatcaatgagatgtatctctgtttcatgtgtgagaaaaaagccaaaaatgtcaaaatttccggcacgcaagatgaacgataccagacgaaccccaacagatttttctggctggg

SEQ ID NO: 2702 - DNA, 260 bp, Oryza sativa
  unsure (1)..(260): unsure at all n locations
  Clone ID: PAT_MRT4530_102451C.1
cttgctttcctcaaatcgttgtgtcaagccagcagctggagcagagcagccatggctncnnaggcctacctagacgaagacctngtctgttttgttnnnttcantnttngttaacacagttactccgggagtnagtgctcatatgattctaatgcgntttataatncgnaccgattnntcatncttcgatggagtgataaanntggggcttnaaatnttgncgcanagntttttccagatgcggagtnaggcacggaatg

SEQ ID NO: 2703 - DNA, 1176 bp, Oryza sativa
  Clone ID: PAT_MRT4530_102452C.1
atggcggcggcggcggcggtgctgcttgcggtggcgtgcgccgcggcggcgatgatcgccggcggcgagtgcgggagggtggtgcacgtgggggaggagcaccggaggagcatgctcgccaatggcctcgccacggctcctcccatgggctggaacagctggaatcacttcgcctgcgacggcaacggagaagacgtcatcagggagactgctgatgcacttgtgtcaaccgggcttgcagctgctggctacaaatacgtcaacatcgatgattgctgggcagagccacaacgtgattcgaagggtaatcttgtggccaacaaaaagacattcccccacgggatcaaggcgctcgccgattatgttcacagcaaggggctcaagctaggcatttactccgatgcaggattcaagacgtgtgcgaaggttcagccggggtctctcggccacgaggagcaggacgccaagacattcgcatcgtggggagtggactacctcaagtatgataactgcaacaatggcgacctgaagccactggagaggggcgacatgcacccggcgaagtggggcgcggcgtacggcaacagctggagaaccaccaacgacatcgcggacacctgggagagcatggtgtcgagggcggatgagaacgaggtgtgggcggactacgcgcgacctggcggctggaacgacccggacatgctggaggttggcaatggcgggatgaccaacgacgagtacatcgtccatttcagcctctgggccatctccaaggctcctctgatcatcgggtgcgacgtgaggcacatgtcgcaggagacgtacgacatcctggccaacaaggaggtcatcgccgtcaaccaagatgctctgggcatccaggggaagaaggtgaggatggagggcagcagcgaggtgtgggcggcgccgctgtcgggttacaggacggcggtgctgctgctgaaccggcacgcggcggaggcggcggcgatcaccgcgcactgggacgacgtcggcctccccgccggcaccgccgtcgaggccagggacctgtggcggcacgcgacggtggccggcgccggcggcgagttgacggagaagatcaccctcgacgtggcgccgcactcgtgcaggatgctcctgctcaagcccctcatctcgtcccgggccaactga

SEQ ID NO: 2704 - DNA, 465 bp, Oryza sativa
  Clone ID: PAT_MRT4530_102453C.1
atgagggaaggagaaaaggttcctaagcttagagggatggtcataggagatgacggagccataggcttgacaacaagcgatgggctggtgatggcagtagggacaatgcggggcacatggttaggaggtgagggtgaaggcattgggagggaggagccgctggagacaggaaagatgacgacgaaggcactctccgtcgccagcttgagaaggaggaggccagttctttgctcggagatctccagcctcataaaccaagtgattttcgagcagttcctatcaatttttgtctgcaatctctgcatccatgctcgcaaacagcagccacagaaaccgttacgtttgtctgcttatgccgtgcaaaggaaagaaacaacagccacaacaaagacacagtacacttgctacctgaaacgaaacaagctccgtccaagcaattctttacaggttcacgttccaatataa

SEQ ID NO: 2705 - DNA, 707 bp, Oryza sativa
  Clone ID: PAT_MRT4530_102454C.1
gcacgaggttgatcaccgaggcgatggcggcggcggcggcggtgctgcttgcggtggcgtgcgccgcggcggcgatgatcgccggcggcgagtgcgggagggtggtgcacgtgggggaggagcaccggaggagcatgctcgccaatggcctcgccacggctcctcccatgggctggaacagctggaatcacttcgcctgcgacggcgacggagaagacgtcatcagggagactgctgatgcacttggtgtcaaccgggcttgcagctgctggctacaaatacgtcaacatcgatgattgctgggcagagccacaacgtgattcgaagggtaatcttgtggccaacaaaaagacattcccccacgggatcaaggcgctcgccgattatgttcacagcagggggctcaagctaggcatttactccgatgcaggattcaagacgtgtgcgaaggttcagccggggtctctcggccacgaggagcaggacgccaagacattcgcatcgtggggagtggactacctcaagtatgataactgcaacaatggcgacctgaagccactggagaggtacccggagatgagcaaggctctgatgattgccggccggccgatctacttctcgctgtgcgaatggggcgacatgcacccggcgaagtggggcgcggcgtacggcaacagctggagaaccaccaacgacatcgcggacac

SEQ ID NO: 2706 - DNA, 1065 bp, Oryza sativa
  Clone ID: PAT_MRT4530_102455C.1
aaataccacaatcatggaaagaccaccgccgcaccaatcttgacgccgtgcgctcccgtccaaagccgtcgccgagtccgatttttattctacccagcatgaatcgcgccaattcttgcgccaccgcgcgtcgcgcccggattggcgctaacacgtcgccagccgtttctacccgcggtcaagccaatccttcgccggtacaaattaacccctcctcagccacaaccccttcccccctctagctccgccgtaatcccaaaccccagcgctgccagccacatttgcggaaatatcttatacttagattgggacagtacgttagaattggatgatttccgggtggctagtaccgtctcgatcgatatagttattaccaggaaactcaaactcgggcggcacattaagactcaaagattggtagacatgggaacaaagaatagaggggttatggaacaatatagggtttatggacattttattgttgaatggatgaatggacaagttacaatgtatcgtcatatttatgtactcgttatttcaatgggcttcatgaagagaagaatcacgggtttgttcaagaagggatcaagctcatgttcaagtcatcaccaagataagtcgagtacacactcttccaccgatgtctccatggaggaggtggacacctcgccaaggcttctcgatgactccaacctcgacctcataggagaccgggagatgcagggctatcacatgctcaaggatcggccatttgctgacaccccagcatacgacctagaacttcttcagaaaataggtacggatgttgattttcgtattgtttggaaggctataggatgggagaaatttgctgtggtagatgagccagggcatgtcacagccacctcatcaaaatgttgccaaacggccgaagttcgtgatctctttgagctggtgttcgtcgatggactcctgctcatagttcctgatccatctgaagccaccggtacctcgtccaaaactgacggtgttggaaccgatccggaggcatcatactcgttatttatgtatgacgctgataggtaa

SEQ ID NO: 2707 - DNA, 2051 bp, Oryza sativa
  Clone ID: PAT_MRT4530_102456C.1
gaattgaattttggccatgggggccctttaacaaatcatcatcacagtatgcacaaaccaatatatcatcctctcatcatgttgtgtactacattctaaaaatcaaaacaaacggcttaagatcagtctgttacagaacgagctcatctacctgttgcccgagtaaaaaactccattggcaaacatgaccacactcagtgcccagtaatacagattcagtaatttggccatttttgttctaatctgagtgtgttgataataaacagagaactttctaaacgtttcaactgctcaggtttcaatgcgctctcaacagagagcacacaatctatcttcatggatcaaaggtgctcaatctcgccttatcgtttccgcgacctcctgggcgctgcttcctcgtcactctcactgtcatcgtctcggagggcgcttctaccgtatctgtccccagactgcgacctggctccttctgctccagaattcccagtggcgtcatgacccctgcttccctgatctgaagttgtctcatacctgtcacccctctcaccacctggccttctttgctcccgcttcgtgccacggttatttggtggaggtggtgggggcatgaagggagccataccaacgggtcgatttggccgtccaggcccacccattcccaagcctcccattagcggtccacgaccaggacccatcatcatttctagccccataggaaacatgcccccaggttgtgggggcctgccggggaagaccataccaggcataggacctcctctagcgaagtcaccagggaatcttgggccaaatggaggaaaaccacgaggcacaccaaaaggatcaggcataccaaaaccaccaccaaaaccaaaaccgtcgccgatcatgttgggagggaagccacgccctcccatcattggcccaacaccacgcagcattggcatttgaggtggccacatcatccctcttcctcttccccttccttgagattcttggccattgccctcttcttcctcctcgctttcctcttcctcctcttcttcattgtcatcaaacagcacaatatcttgattgtcagctgcctcatcagcactcgctcctttagccttttcttcttctttcttggcctccgctgcaattagtatagccgtcagctcgctgtctggttctagataaagcagtgaagccaattgctcaccaatgaagggttctaattcctggcaatctcggctgatcttaacggggagattgtcattgtatggattgcgcagatgatgtgttttctgaaatgacagttcacagagcttaagccattgtatggagaagttccgaccataatgtgccgttccatgagcagatttccaatttccaccaccaatgtagccaccaatcctagaagtcatctttgcacaaccctggaaattacgagttctattgattgagaatatcaaaataacattctcaatggattcaaaggcttcattaagtttagcctcattactcctttgggtagcccaaatgccctgctgaactgatatctccagattctccctattgcaactcttgacaatgaagtacctagatggcccttgtggaaggggcgttgcaattctagtggcttgattcgacgagccatttggaacagattggacttggtcatttgtatttggcttctgttgttgttgttgttgttgttgttgctgctgctgctgctgtggtggctgttgatttgtagtttgtgcttgctgtccaacagcaggctgagcggttgtggttgtagtattatctatactattttggttaggtaaacctgaaccctgtggatgttgaggtctctccccttgctgattatagttattgtgcctatgctgattgaatttattgaaagagcgaatctgcaaaatcttctgcagaacttcctcaacaggaggtggtggccctggtagcttaacatgcttgtaccggcaattaggaccattagggcaaaagcccatcttgtaccgtctgccggtagctgccgcggccgcggccgcggccgtgcccgccgccat

SEQ ID NO: 2708 - DNA, 779 bp, Oryza sativa
  Clone ID: PAT_MRT4530_102457C.1
aatcggcacgagcgaaggttcagccggggtctctcggccacgaggagcaggacgccaagacattcgcatcggggggagtggactacctcaagtatgataactgcaacaatggcgacgtgaggcacatgtcgcaggagacgtacgacatcctggccaacaaggaggtcatcgccgtcaaccaagatgctctgggcatccaggggaagaaggtgaggatggagggcagcagcgaggtgtgggcggcgccgctgtcgggttacaggacggcggtgctgctgctgaaccggcacgcggcggaggcggcggcgatcaccgcgcactgggacgacgtcggcctccccgccggcaccgccgtcgaggccagggacctgtggcggcacgcgacggtggccggcgccggcggcgagttgacggagaagatcaccctcgacgtggcgccgcactcgtgcaggatgctcctgctcaagcccctcatctcgtcccgggccaactgagacgagcgggcgagcgagcgagctcgccgccggcgagcagggctctccgggcgtcctcgccgtgacatttttttttagataatggaataaatatccctgtctttttcttcggacaatagagtataaagatggatatttatctttaaacgccaagtttcctagccatttatcttcccagaaccttatttgattcccatcattcacaatccaagaacccatatgtaagacagtattttgacattcattagacctggccaaattgagaatcaaaaaaaaaaaaaaaaa

SEQ ID NO: 2709 - DNA, 954 bp, Oryza sativa
  Clone ID: PAT_MRT4530_102458C.1
atggcggcgtcaggtggcaaaggtgacttcggggcggtcggactgggcgatctacatcggtcagactggcggcacaggcgcggtgagggcagcggcagatcgcggctgggagcgagcggcggcggcggatggcggcgggtgacggccgggcagggcggatccgacgcagggggccttccttgcgcagatccggcggcagctctgaccccgacgacgacgatgagtgggcggcgacgacgacgattgggcgacgatgacgacgacgcgggtggtggcggcggcggcggcaaccccgacgacgacgaaaagtgggcggcgacgccggcctcgtcccgcccggatccgggggcaggagcggccggaaatcggcggcgggtggcgggggctggtggtgcgggagcggtcggcgagctaggcattggcaacccgctgttcccagatgtcgctctactacgtacccggacaggaaggacttaagtgatctcgagggctgtcaccacctcggccaaaggagaggccgggatgacacatttttgggttcggcagaacccaccaattcggccgaacccgttctgcggccgttcgccatctgcttccacgtggacggcttggattccttcccagaggcggttgcagggtgttttggacaattcccatgcccctaactgtcatttgaaacctatataaggaggtctccatctcacttcaagcacacacaacattgagctgaattacaagaggctctattgtatcttttgtacattagaataaggtagggagtgaggagaagcttttgaggagtgcccggaagtttggcgctcatccgacttctacctcgacgagtgtagttttctaggaggaattctggaggagtaccggagctgtcggtacactctgctccgggttcggagaaccttcttcgcaccgatcgcccttcccaacagttgcgcagcc

SEQ ID NO: 2710 - DNA, 662 bp, Oryza sativa
  Clone ID: PAT_MRT4530_102459C.1
cgatgacaggatcggcaggatgagagggaaagaaggaaggaactcaaccttctaagatatgaagcagttaaggatgaactattgctcctgaccacaggaattggagctgcgtgcagtttatactgtctcctagtcttttctctggaggctgctgtcagttatgcttttggagttgctttcagttgcttgtatcttcaacttctctatcggcacacagataatttgtcaaagaaagatgttccagaaatttttatgaagaagaaagtgaaaagaatcggcataagaagcgaggatttgaagaatacaatagagaaggtgttgggtggtatttcagtagctctttcgtctccaaggcttgtgatacccgctatattttttggattgtcaaccttgtcagatcactttcaaaatagcattttaaattttgagcttgttccaggaatgatgggtttctttgcatacaaggctgccgctttggtacaagtctacagggacaatgaggaccttagattgatactgcctgaagaagatgctgacagcagttgatgtatcagtagtgaagacttatgttaatccagttcctttataaatcaagataagaatgatgtatagatcatatctcagctttgaattgaataaagtttctgttatttttcttcagc

SEQ ID NO: 2711 - DNA, 2280 bp, Oryza sativa
  Clone ID: PAT_MRT4530_10245C.1
atggacaaggaagttatcttaaatattccactaggctcaacaagacaacctgattcttgggcgtggcattatgagaggtctggaatcttctctgtgaaatctgcttatcgaatgctggttcaaacaaaattgcaaagagagaattggttagacaacaaagctagtgtctccgatttcagtgccattgctaagtcttggaaatctttatggggaatcaacgttccttccaaactgaagatttttgcctggagactgtcacaaaattccattccaacagaaaacttgcgaaaacagcgaaacatgagtacagcagatatatgtaaaatatgtggtgcagcacaggatacttgggatcatgcaattctccaatgcaccatggccaagtgggtgtgggctctagtggataatgatataacagaccttattgcaatcacaaatattaaagaccccagagaatggttgtttcatatgcaagaaaatctaacacctgagcttatggtaaaattgattgttatatgctgggcaatttggcattctcgatgcaaagctttgttgagacctctagtttgtactaaaacaaccagttggataccacctcctgaaagttgcatgaagattaatgatgatggagctgtttctcgatcaagcaacaaaggagctcttggagctatttgtcgtgacacatctggtaaatttctggcagctagtgctatggtttgggaagggatgtctgatccaactacactagaagctcttgcttgtaatgaaggacttgctatcgccatggactgcaacatcctaaaggtctgtattgcttcagactgtcaagaagttatcaggggtattgcgacaataccaaaatgcagatatttggcagtccttaatgacatcaacataagaagccatcactttgttagagtagaatttcatcatgaaagtcgggatctaaatgtagatgctcataacttggctaagtttgcatgtacattgagtgaggggcgtcatgtgtggcttctaaaccctccaggttttattgcgatgcataaagggctcgtcgatatcgctcgtgttttcagcgacgacgagtctttggacaaaaccctgacttcgcccgctggtcgaagtttaagtctttcgaccgcccccgttgtcatagttgacactggcggagcggggtgtagtgctgccgctgggaccttggcttccgctgaccgggtcgtcaaggccgcggctagggtttttggaagccctatgcgtcagccggttgcttcgccgcttgtcataccaaaggggaagggggctgccgtcgaaacatctgcctcgaagtattctcttgcggcgccccacttcgcccctggtgattttgaaactcaggcagagcttatccccttcgtcgagggggtaagtaatcttgtctcgccggctggcaacccgagcttgttcaccaaactgaacgagttcgacgaaggttgttctgccatcaaaagtttggcagttcggccgaagatggaggctctttgcctagaggtcagcaaagctgaggcgagcgccgagaaggagtcgcagcggttcgtgcgggagatggcgaaagccaccgagtccgcgaagatggcgtgccaaacacttcgccttgccctttccgacatggaggcgagggccggtggtgcggtctcggactgcgccactgcgtacggcgattgctgtgcacgcgtgtcggcggccttcaccatgggctttctgcaaccgttcggctacgagcacgtcgccgagttccctaactatgcgaagggggactgggaggtcagtgcacaggacatttcgcccgcgcttcacgcctggcgaaaacagttatggcagaaggacggccgatccaccgccaaggcgcgtcttcttgagcaactagcgaaggctgaggcggcggaccagggcgaaggggaggatgcagcggtcggagggggtggaggcgatgcccaagatcacccagagggtgttcaccgaaaattgtgcgtttggcccccctttgggaattggcgaagcaagaacaagaagttcgtggcagtgaagggtttgccgaaggtgcgatgtccgtttcggcttgtttatcatgagatgataataaacagcaacagttacaaggttttgaaggttgtcggctggatgcgggcgcaccccgggcgaaccctggaagactacgaccatgttcatacagaaggtctggagaacatggttcgcttttggcgaaaccatcagatgaccaatcgtcaggaggcgatctcctag

SEQ ID NO: 2712 - DNA, 1100 bp, Oryza sativa
  Clone ID: PAT_MRT4530_102460C.1
gctactcctccctccaactggggacagcctcggggaggaggtcctgcggatgttcctcgcggagaggcaggcgcacggcgacttcgtcaccaagatctccgacatggtctggaggaggaacggcggcgacctcggcgtgctagaggcggcggcggaacaagaaaattcagcggatgtggcaccagcgcaacctgaagaagctgatgtcatgggcgagggaatgttgaggattgcggcgacgagagattgggtctccggtgagagcagccttcctgtcagcaagaggctttctgccaaggatcggcaggatgagagggaaagaaggaaggaactcaaccttctaagatatgaagcacttaaggatgaactattgctcctgaccacaggaattggagctgcgtgcagtttatactgtctcctagtcttttctctggaggctgctgtcagttatgcttttggagttgctttcaggtaagctcaatttgcttcctattgaacttaagaactcagaagtttgtggtaccttgtttcaatataatgtcgctggggctactctctcaacagactgggttaacttctattgcaactatcaacgataaaaaataatctaaccagtcacattatgttgaacagttgcttgtatcttcaacttctctatcggcacacagataatttgtcaaagaaagatgttccagaaatttttatgaagaagaaagtgaaaagaatcggcataagaagcgaggatttgaagaatacaatagagaaggtgttgggtggtatttcagtagctctttcgtctccaaggcttgtgatacccgctatattttttggattgtcaaccttgtcagatcactttcaaaatagcattttaaattttgagcttgttccaggaatgatgggtttctttgcatacaaggctgccgctttggtacaagtctacagggacaatgaggaccttagattgataccgcccccagaagatgctgacagcagttgatgtatcagtagtgaagacttatgttaatccagttcctttataaatcaagataagaatgatgtatagatcatatctcagctttgaattgaataaagtttctgtt

SEQ ID NO: 2713 - DNA, 331 bp, Oryza sativa
  Clone ID: PAT_MRT4530_102461C.1
aaaaaagggcaactccctgcccttttattttttaaggggaaaaaaagagcgggcttgattgatagaggataaacaaaccccattttttttggcagaaatacataatagctgcataaagccacatccaataaacactgatgtcccctccaggggtccaaggcattttttaagaaacacaggggtttaaatggcaggaacaatgatgttgttcatagcacaaatgtttattaattcccaaccaaactgggactaaggggcacccttggcctattaagtcttaaccttttaacctggaaaggctgaacaaatttttttccagctctttaggggg

SEQ ID NO: 2714 - DNA, 555 bp, Oryza sativa
  Clone ID: PAT_MRT4530_102462C.1
atgacccgagtgtaccgaaccattgtgcacccaggacgttgtcatagcccccagtggcagcacgtagaaatcgatgtcgaagttgtgggtggagctgaagtccaggagggcgacgagatccgtcgcaccagtgcgagcaaggaacttgattgtgttgaacttgggcgagtgcacaccagtcaaggcatgcaacgatatgctcgattcacccaacgtgatgaactcaatgacgaaggacttctagcagcgaagtctggcgacggagcgaaaccgacagagcgtgacatctgtcttgagcgggttcacgaggcctgccgtgaaaagttgaacgtgttgattctccgagagcatagcgtcgcagtacaccagcgcaaggaagctattgatgtaatcctccaccatgccagtgcgccacaacgccatgagttcgctgagggggccatctatcattgttgggccaaaacgggtgtgcaccaattggacaaatcgccgccaggatggggcgccggcgttgagctcaagcctgcaataccacaactaggcatccccggttag

SEQ ID NO: 2715 - DNA, 231 bp, Oryza sativa
  Clone ID: PAT_MRT4530_102463C.1
atggtcggcgccagctgttgtcgaagcgacaaccgcgtacatcgaaggacgtggttactcaacagtgttggaaaaagcctgagcggctgggatggcccctttggcctcttcaaagttgggcttgttatggcgaagaccccatccttcggcatacacccttcgcccaatgatgcatttggtcttgccggataccagcgcgattcttcggccttcgcgatttctacttcatag

SEQ ID NO: 2716 - DNA, 185 bp, Oryza sativa
  unsure (1)..(185): unsure at all n locations
  Clone ID: PAT_MRT4530_102464C.1
aatgcccggaagngancctagtnacatgggntgntnaantaangttcctcgagggggggcccgggtacccaatccncccnaanattaattcttattanaatncacggggcggncgttttaacaacntcntgaannggggaaaaaccccggggtttccccactttantcccctggcagaaaatccc

SEQ ID NO: 2717 - DNA, 1388 bp, Oryza sativa
  Clone ID: PAT_MRT4530_102465C.1
tctcctacccccacctcaaaatggaaccctaatccataggttctcgattggagtttgagatgatattgtcaatgccaaagaagaagaggaggtcgtcgaagttggaggagaatcaccgtgtgaattatgaagcatatctgatggcttaaaatctagcctatttaggatatattttttgtcgacagaagtgcaagcaattgctcgtccatgagagcaaaacgacgtcccaactcccccccgatccacctgccccactgcaggctgcagctcacacccaaacgcctcacgccccgccgccatgcgcatcttcgtgctctccggccagagcaacatggccggccgcggcggcgtccaccaccggcgctgggacggcgtcgtgccgccggagtgcgcgccgtgcccctccgtcctccgcctcaccgccgcgctcgactgggtggaggcgcgggagccgctccacgccgacatcgacacggccaagacctgcggcgtcggccccgggatggccttcgcccgcgccgtcctcccgcgcctggacccgcccggctccggcgtcggcctcgtcccctgcgccgtcggcggcaccgccatccgggagtgggcccgcggggagcgcctctacgaccagatggtgcgccgcgcgcgcgccgcggcggagtgcggggagatcgaggccgtgcagtggtaccagggggagagcgacgccgagtccgacgccgccacggccgcgtacgccgggaacctggagacgctcatcgccaatgtcagggaggatcttgggatgcctcaactgccattcatccaggttgctcttgcatctgggaataaaaagaacattgaaaaagtgaggaaagctcagcttggtatcaacctgcccaatgttgtaactgtggacgcatttggactgtcattaaatgaagatcatctgcatcttaccactgaatcacaagtaaagcttggtgaaatgctcgcacaagtctacatgagcaattttttgccagcaacatgctaggaggagtcctgtcaggtgaaataatctgtttaactctggaagtttggcacctaaatatctttctctttaaactgttattataattcttcattttctcgttggttgaaactatctagaggtgaaccaaccaattcatcttgcatttcttgcacagtagcattgatcctttcatttagcaggacatcaacttactggtcaattatgtgttgtatctaaatttaacaattcgagagcaaaacatcacccaagaggaagtaattttctccttttcaccataagttggccatgtaagatagcattcaactccagtgccttttgtgttcctccaatatataaaattcttctttaaattgatccaacgaaaaaaaaacaaatg

SEQ ID NO: 2718 - DNA, 264 bp, Oryza sativa
  Clone ID: PAT_MRT4530_102466C.1
cacatgcccctcccctttccaaattggactgttcttctcttcataaatgaacggagatcggtacggttgctgtccgagtgcccttctgacgggacggcccatacctactcccacttccgccggaaacagcctggtatatatctgaccggaggtaacgtgccatctctgagaggcaacacgctagctccggctagagacgagtgcctagaggctctcgtcttgacgggatggggcgaggcgtgcgtcagaccgccaaccggataa

SEQ ID NO: 2719 - DNA, 260 bp, Oryza sativa
  Clone ID: PAT_MRT4530_102467C.1
accacatccttttcaatattctgatgtggttgctaccacctcccacaatactctacgggggccaagatctgctataatcttctacatgaaggccctgtatcttactacgaaaggacaatctgctggcgctctgtatgactactacgacgggatcaacttaacagcgtattcgttgctctaggggggccctcacaaccacctatttgctgtgctagcggttgttatgttgcacactatatgacctgtgttcatgtcttata

SEQ ID NO: 2720 - DNA, 450 bp, Oryza sativa
  Clone ID: PAT_MRT4530_102468C.1
atcccaaaaaaaaaaaagccctcttgcaaaaaaaaaaaggataaggggggggaacgattcttcgaaaaaacaacggggggcaccccaaggaacccccgccaggggaatttccctatcattattgacagctttgggggtttgggccaaaaaaaacaaggaaaagggggcccaaaaaaatttcccccccggcccccccccaaggggcgggggcggggccctaatttccggggcccaaaagaggcattttttttgcctttgcaaaagggaaacaaaaaccctcggggggggagtctaaaaacggaccatgtaggccccgcccccgacccatttgtagcccgaaaaaccctgaaggggccccattgcagcaatagcgatttccgggccaaaaaagaaacggggggccccccgcttgacggggcttggggaaactgcatttatttttgcaaaaag

SEQ ID NO: 2721 - DNA, 1069 bp, Oryza sativa
  Clone ID: PAT_MRT4530_102469C.1
ttccgccacgtgtccgccagaggagaggggtcccacagatcggtgaaggactgcataatttttccccttcttcttcttccccgcgagacgcacggcacgcctcctccttcgccgccgcctacgacgaggctttcctcctctctcccatcgccttcctcctctcctccctttcctcccaggcggcggcggcgccctcagcagcaggatccaccctcgcgccaccccaggccggccgatccgatccccaacgcgatcttgtggggggcgaggcgcggaaaggtggccgccgaatcgtcgcgtggttggttggttcctagatcttaaaagtgtcctccatgtcaacacttgtcacgtgctcactgccaggggctgtaaccactcatgcatcaaccaggagatttggaggttcacaatttcagacatctcaagctagctgcatctcatttaaaagggaagtgtctgctaaagcagtattaagaagcgtaagatgcaatgccactcagacccaaagtgctcagcggaaatcttcaactgcaaccgtcaaacgatctgaccccaaaggaaaaattcaggggccaaaattggatgatgggagcggtggttttcctccattccgtttcggcaaaggtggtggtggcggcggaggtggtggaggtggcagcaactacttcggtggattccttctcttcacttgtgtgttgctcctagattacctgaaggagtttgagaaaaacctgattgctcgaaggcaacgcgctggatatgatgcaaacaatgatatgttccaacaataattgtttaacttgttagcactaccctatctgttgatctgtaaaactctacaagaattcctgccgtgcatgtttatttcgttcacattacccgtagtaaatcatggcttgacctcaccgagaggaagctcagatgcactggacacagctactggaaatgtgagttcagtgctgtggtacatccaaatggaccgtattattgcaggtgttgaaattggaatgctttttggaatgttgaaaaaaaaaaaaaaaagaaaaaaaaaaaaaaaaaggcggcc

SEQ ID NO: 2722 - DNA, 344 bp, Oryza sativa
  Clone ID: PAT_MRT4530_10246C.1
cccacgcgtccgcccacgcgtccgcccacgcgtccgcccacgcgtccgcccacgcgtccgaaaaaaaaaaaaaaaaaaaaaaaaaaaaaaaaaaaaaaaaaaaaaaaaaaaaaaaaaaaaaaaaaaaaaaaaaaaaaaaagggggggttcgttttagaggttccacgtttacttacgttttctttagaggtaataaattttatttgggggcccctaaattaaatacactggccgtggttaaacaactgggggaatgaaaaaactttggggttaccaaattaaattgtttggcagcagattaatatttaacaggtgggaaaatatcgaagaggccaaaattgatc

SEQ ID NO: 2723 - DNA, 287 bp, Oryza sativa
  Clone ID: PAT_MRT4530_102470C.1
gtgtaaattggtagtattaggtaactatattttgagacggaagtagtaccatgcaagctaaatatagttgcattaatccgatcctgctatcacaaatggagtagagctaggaaaaatattatacaagagagtagacctatagtttgtaggaatacacatcagcaagtagcatcattttcccttatagttcaaaaagatcgggtcaagttcaccaaaaaggtgaaaagaaaacgatgatgaaattaagaattcatatcatcatccacgttgcattctccaaggtagac

SEQ ID NO: 2724 - DNA, 120 bp, Oryza sativa
  Clone ID: PAT_MRT4530_102472C.1
atggcgcagacggtggtagcgggcagggacagtgttgtgggctgcgcgcagctaccaggagggagaggctgtctccttttagattttgctatgaaaattggttttcacaagtggggctag

SEQ ID NO: 2725 - DNA, 260 bp, Oryza sativa
  Clone ID: PAT_MRT4530_102473C.1
tcacccatctcttcgccgcctgtcacgccgtccaccccgccggccgtcgcacccgagagaggagaagagagaggagaggggggagagtcggagagagacgaagagaaggggagacggggagtgaggaggaaggagatgggattgggggacgggtcgtacccggttctgaggttcagggacgaaaattggactggccgacagatagaggaacctaaatgcacgaccttggaccgttgggaagcccacggcccagcccacca

SEQ ID NO: 2726 - DNA, 203 bp, Oryza sativa
  Clone ID: PAT_MRT4530_102474C.1
tcgttctcagctgtcacagatcactgcatcaatggacggggccaccatggcgctcacctacccggagatggcccgcgcggcaccgtcgacctcctccgagctctggggcgaggagcgaaccaccatgcgcaggaccgccctgaagcacaagcaggctgcttggtttgacgagctgacgatcgaatagaagaggacagctaacg

SEQ ID NO: 2727 - DNA, 187 bp, Oryza sativa
  Clone ID: PAT_MRT4530_102475C.1
atggtgcgcggcacctggcagtgcgcggaggctcctctctgtgggattgggacactgcgatgtgcacacatcttgcatcgatggactggttggttggtcagcgctcttgcagaggttgccaatattataccctgcactcgacaagttgacatttttggatcgagcacgtgtggaattgatttgacag

SEQ ID NO: 2728 - DNA, 161 bp, Oryza sativa
  Clone ID: PAT_MRT4530_102476C.1
tgtttttctggcaccaaataattaccctatcttcctctttgtatatctagcacgctagttgcgagcaagaccaagatgggagggcaggaacagatagcaaccctagactgaataggacagactctctgttatgtccatcctgacagataccaaggatgctc

SEQ ID NO: 2729 - DNA, 834 bp, Oryza sativa
  Clone ID: PAT_MRT4530_102477C.1
atggcgtttttgaactttttgattccggacgagcagttcgctcgttttgtgatccagaagatccacatcaaagtgccgttgttggatgctatgcaagtgccaacatacgcccgttatctcaaggacatactcaacaacaagagaccgctgccaacaacggaggtggtcaagctgacggaacaatgcagcaacctgatactccacaagctcccggagaagaagaaagatccggggtgtcctatgatcacctgctcgatcggggcacaacaattcgaccagacctggtgcgaccttggagccagcgttagcgtcatgccaaaagacgtcttcgacaagttcaacttcacagtgttggaaccaacaccgatgcgcctccaactggctgactcatcagttcgttacccagcaggaatagcggagaatgtgccagtcaagatacgggatttcttcatcccggttgattttgtggtgctagacatggacatggggaaggagatgccgctcatcctagggcgtccattccttagtaccgcaggagccaacattgacgtgggaacggggagtatccgtttccatatcaacgggaaggaggaaaagtttgagtttcaaccaaggacggaacaatgctccatgaatttcctggagaaggaaacaacgatgcccaggaaccgttattggaaaacgccggtaaaatcacccgtaccggccaagaagtcagatcagccggctcagaagaagccgccgtccgcaccaaaatcaaaaaaggtgtggaaggaaaagctaaagatgcccgctccatcacctccggagacgggtgaaaaatcagtgcactaa

SEQ ID NO: 2730 - DNA, 965 bp, Oryza sativa
  Clone ID: PAT_MRT4530_102478C.1
cgcacccaatacactccaatatgatgtcaaaagaagcaccatctattgactcggctgacaaggagattcagccggaaaagactgtgccgtaggagtactgcgacacacggttgctgctgtttccccaacgaaaggacgagcagttcgctcgttttgtgatccagaagatccacatcaaagtgccgttgttggatgctatgcaagtgccaacatacgcccgttatctcaaggacatactcaacaacaagagaccgctgccaacaacggaggtggtcaagctgacggaacaatgcagcaacctgatactccacaagctcccggagaagaagaaagatccggggtgtcctatgatcacctgctcgatcggggcacaacaattcgaccagacctggtgcgaccttggagccagcgttagcgtcatgccaaaagacgtcttcgacaagttcaacttcacagtgttggaaccaacaccgatgcgcctccaactggctgactcatcagttcgttacccagcaggaatagcggagaatgtgccagtcaagatacgggatttcttcatcccggttgattttgtggtgctagacatggacatggggaaggagatgccgctcatcctagggcgtccattccttagtaccgcaggagccaacattgacgtgggaacggggagtatccgtttccatatcaacgggaaggaggaaaagtttgagtttcaaccaaggacggaacaatgctccatggtcagaataaagtacgggccgaatccgtagaatattcaagtggtcgaagtggagccacccaaaacggacagcttggtgatatttatgcagaatttcctggagaaggaaacaacgatgcccaggaaccgttattggaaaacgccggtaaaatcacccgtaccggccaagaagtcagatcagccggctcagaagaagccgccgtccgcaccaaaatcaaaaaaggtg

SEQ ID NO: 2731 - DNA, 186 bp, Oryza sativa
  unsure (1)..(186): unsure at all n locations
  Clone ID: PAT_MRT4530_102479C.1
gattccgccgagcacgtgccgctcgtgccgaanaccgcactcagctcgtgccgaatccggccngaggcgctncactactaagggaaanaccagtcacaagttctacantggcncntacanaggtatgaaatnccaattgtngnnnccgacccnnngtcctncgtncncntgcagcaanagtttcat

SEQ ID NO: 2732 - DNA, 1329 bp, Oryza sativa
  Clone ID: PAT_MRT4530_10247C.1
ggaattcggcacgagtttttttcttcttctttgtttgacggaacaaaaatctcaggcatgatatgatattctgatctgttcatgagttcatctgtatctcagtgtacatgcatttgcaaagcaaaaattccattttgttttgactatttcgcttccggccatggcgttgaacccgctcttcaccgtgacgttcgacgtgagcagcggcgacaactacggcgacttcatcgccggcatccgcagcagggtggccaacccgaggcacttctcccgcaaccgccccgtcctgccgccggtggagccgccgccgccgccgcgccgctggttccacgtcgtgctccgggcgtcgccgaccgccgcgctcacgctcgccacgcgcgccgacaacctctacctggagggattccggagcagcgacgggaggtggtgggagctcaccccgggcatcctcggcgccgcccccggcggcgccgccgccacctacgtcggcttcggcggctcgtaccgcgacctcctcggcgacacggacaggctcaccgtcgtcacgctcggcccgcagcagatggcgcaggcggtgaacgcgctcgccgcgcgcaggccggccgacctcgccaacggcgcggcgcagcggcgcgccatggacgcggtggcggcgctgctcctgatggtgcacgaggcgacgcggttccagaccgtgtcgaggctggtcgccgggctcatgcaccccaaggcggcgagcaagagcggcgccatcaccaccgcgatgaggaagcaggtgaacgggtggcaggtcctctcggcggccatgctcggcacggacgcgcggccgccggcgaggttcgcgccgctgagggacatgggcgtggacacggtggaggaggcggcggcgacggtggggatcctgctgttcgtcgaggtccccggcgggatgacggcggcgagggcgctccagctgttccaccatgggaactagattttgatgcagctggatttttttctccttgtttgagccaataaaatgttagatttgtgatggttttgctatttgatttgagtagaaatgttagattttgtgtgtattcggaataaattcagcaccatagttttatctatagctattttaattcatgtgagtactagtaagaacaataacatatcctactctgactgatgcaaccagatagagattatacttgttcatactgaaaatttgttcataacaactttcacaatcttttctcagagatattttgcattcagataactatgtatacacaggacacatatttctggatatgaacatccaattgaaaaaaaaaaaaaaaaaaa

SEQ ID NO: 2733 - DNA, 665 bp, Oryza sativa
  Clone ID: PAT_MRT4530_102480C.1
catcaaagctagtactactagtagtagtaggacagcgagccactcttcctcgtgccagcgcgagaagccaattcgacgcagcgcgcgcagagcggccggagcggagagagatgaagaagaagggcgggagcggcggcggcgggtgcctgggggcgccgttccgggcgctgtcgcgggcgtgcgactcggcctgcgacctctacgtgcgcggcatgtccgggtgcgcgggccgcgtgccggcggcgatggagtgccgtcgcggtcggccgcgggttcggcaggccggcgaccgcgacggcgacgatgcgcctgcgggggctgagctcccgcgacgtcgacgacctcgtccgcgccgcgtcgaggcagcggctgctgtcgctggccgagccggcggtggggtgcagccaagaaggttgggcattatcgcgaggctgccggcggggaagaaggggcccttcgaggcggcggcggccgccgtcccggcgccgaggaagaagggcgcggcgatggggaccatcgccgaggacgcgccgtgcgagttcgtcgcggacaccacgctgaaggccacgccgccggtgaggcggggcgcctcggcagacggcctagcggcgcgcgccggcgggtttggcgccattaaggtggggaccgaggccttcgcgcgctaa

SEQ ID NO: 2734 - DNA, 177 bp, Oryza sativa
  Clone ID: PAT_MRT4530_102481C.1
tcttattctaaatcaacaaaaaaaaaacaaaagggtggttttaaaataaaaaggggggtcaagcatcccatctgtgaagatcatacttgggcgccccctctagaggacataggcttatcttcgcccttagtacaaatgaggaatttttgacccgcctcccctaaaacttaaattatg

SEQ ID NO: 2735 - DNA, 593 bp, Oryza sativa
  unsure (1)..(593): unsure at all n locations
  Clone ID: PAT_MRT4530_102482C.1
ttttgtttttttttttttttttttttttttttttttttttttttttttttttttttttaaaaaaaaaaaaaaaaagtagatttttattaaggtaaaccggggggtactaatttaccattagtagatactacagcgattttttttttacgaaagaaaaaagaaagcgaaaaaacgagagaggaaaaaggaaaggggatcggggttgcgtcgtcgccttaaaaaacttttcgtttgccgccgccgatgcgcgcctgttgtttcccttcgcccgccggcggtgcgcccatttttctgtcgttcccctccccctggtggttgtaacttctcccatttccccgcgcttttttcttttgcccgtcgtttgctgaataaaatttggatcggaggctggtgacaaaaggtgggaaacaacggtggccggcaattgaaggtcgggggaccgcgggaaaaaaaagagggatgcancancaaaacggatccccctaggggcttgtcgttgtggcccccgtcgagcttcgtcgcctttgaactgttcgctggtgtttcgccatgtccgtagatttgttgcttgctgggaaaatgaggagggggaa

SEQ ID NO: 2736 - DNA, 333 bp, Oryza sativa
  Clone ID: PAT_MRT4530_102483C.1
atggatctgcctttcccgtcagtggtggcggctagggcggcgggaggcatccccggctactgcggcggtgccggccaccaccacccacgccaccgctcttcctcccgtcgactgcgccgacacacctcctcgcctcccacgccgcggcggtgcggcctcagcgtggtggagctggtggacaagggcgctgacgccgcggcgaccgacgcacgcgggaagcgtccccgggaggcgccggcgcaatgcgcgggcgcttgctccacgtcggcgaaaatccgagctgccgcaactagaatccgcgccagctcggtgcactgtgagaggcctaactag

SEQ ID NO: 2737 - DNA, 167 bp, Oryza sativa
  Clone ID: PAT_MRT4530_102484C.1
ccaaccgcggctgcggacaaactccgacggggaactgggaggaaccttgacccgggtgggggcccactcatggcgccaaagttatctatctaatcatgcgagctacacaatgcaatgcatcatccacagatgcgtttatatcagttaagtttgtggtgggaactatg

SEQ ID NO: 2738 - DNA, 677 bp, Oryza sativa
  Clone ID: PAT_MRT4530_102485C.1
aaaatgctttattgccacgtttattagacactctaattggcacagcattagcttggatcggagtacatatatttacccagattggaaatatttgaatttacaccggaatttaacgcatactttacaagcaagcagtcaatatcttcgccatattatagtgcaattgcaatttggctataacgatcggttggcctatagagtagtacggcgtgatgtgcataatcatttatcagaattaagcgcggtgatcaacaatatgcacagcgagccacaaaaatatcgttccgcattacaatttgctccacaattgttaaacactacaaacacactactcagctatatttctgcgttgggtaattatcgttctgaaagcgaggaacttagccataatatacatttttcagcggttttcttctctaaaggcaaacaagtgattgatattttagatgccattattcactcagatgatcggcaagttgatcaagcacaattaacacagcgtttaaccacaattaaacacgcccttaaacagtttgaaaatgaacagcaacatagccaagacaaactggcattattactcattcagcagttattaatgattgtgcaattattacctcatttactcacgttggttaaagaagaacaactttattcacagcaactcagctaatgcaccc

SEQ ID NO: 2739 - DNA, 147 bp, Oryza sativa
  Clone ID: PAT_MRT4530_102486C.1
ccctgcttctggcttggcatcaggtctaaattcactggagttctgcctaaacccttgcggctctgaagctagcatactatatgtattatcaaaggctattaattcggcgcacacgctgagatacatggctgagaatgaccttgtttt

SEQ ID NO: 2740 - DNA, 2508 bp, Oryza sativa
  Clone ID: PAT_MRT4530_102487C.1
atgggcaaaagttgtagccgcgccaccgccaccgtgctgctgcttctcgtcgtcgtcgtcttcctctcgtcgtcgcgtccattcccgtgcgaggcgcgccgcgacagcctcccccggggcgcctccatcgccgtcgaggaccacgccaccgacgtcctgctctccccggacggcaccttcgccgccggcctctacggcgtctcgcccaccgtcttcaccttctccgtctggttcgcgcgcgccgcgggccgcaccgtcgtctggtcagccaaccgcggccgcgcccccgtccacggcgcgcgctcccgcgttgcgctcgacggccgccgcggcgcgctcgtcctcaccgactacgacggcgaggtggtatggaactcaaccgtcgccaacgccaccgccgctcgcgcgcggctgcacgactccggcaacctcgccatcgaggacgcgagcgggaacatcctatggcagagcttcgatcaccccaccgacaccctgcttcccacccagcgcatcgtcgccgccggcgaggcgatggtctcggcaggcaagctcctcgccgccggcttctacagcctccgcttcagcgactacgccatgctctcgctggtgtacgacaaccacaagatgcccagcagcatctactggcctaacccctactacagctactggcagaacaaccgcaacatctactacaacttcacccgggaagctttcttcgacgcctccggccatttcttgtccagcgacaatgcgaccttcgacgccgccgacctcggcgagggcgccggcgtcaggaggaggctgacgctggacacggacggcaacctcaggctgtacagcctggatgagatggccgggacatggtcggtgtcgtggatggcgttcgtcaacccgtgcgtcatccacggcgtgtgcggcgccaacgccgtgtgcctctactcgccggcgccagtgtgcgtctgcgtgccggggtacgcgcgcgccgacgcgagcgactggacaagaggctgccagccgacgttcaaccacaccgacggcggcggcggccggccgcgggcgatgaagctggtggcgctgccgcacaccgacttctggggcttcgacatcaacagcagcgcgcacctgtcgctgcacgagtgcacggcgcggtgcatgagcgagccgtcgtgcgtggtgttcgagtacaagcagggcacaggagagtgctacaccaagggcctcatgttcaatggcagaacacaccctgcccatcttgggacggcctatctcaaggtcccagctgatctcgacatgccagagttgcacgtccaccaatggcagacgaatggccttgccattgaggaagacattgctggatgtagtggctcaagctcatcagagttcttgctcgatgtttccgatatgtcgtcgagctcgagcaataatcagggcaagtcaatatggttctacttctatggattcctgtctgcaatttttgtcattgaggtgtttctgatcgcgatgggttgctggatcttttccaacaagggagttttcaggccaagccaggtttcggtactagaagaagggtacaggattgttactagccattttcgcgcatataggtactcggagttggagaggggaactaaaaagttcaacaacaagatcggtcatggtggatcaggtatagtatacaaggggagtttagacgatgagagggtagtggccgtcaaggtgctacaagatgtgagccagagtgaggatgttttccaagccgagttgagtgtgattggtaggatttatcatatgaatcttgtgagaatgtggggattttgctcggaaggaacacataggattttagtctatgagtacattgagaatggatcattggccaaagtactatttgataggagagattccagcaagtttcttggatggaagcaaaggttcaacattgctctaggtgtggccaaggggttggcatatcttcacaatgaatgcctagagtggatcatccattgtgacatgaagcccgagaacatattgttggatgaagatatggagcctaaaatcactgactttggcttgtccaagttgttgaacagagatgggtctggttctgaaatgtcacggattcgggggacgagaggatatatggctcccgagtgggtttctagccttcccatcaccgagaaggttgatgtgtatagttatggagttgttcttcttgagctggtgaaagggaggaggattacagaatgggtagtggatgggaaagatggagtagaaactgatgtgagaagcgtggttaagatggttgttgacaaactggacagcaagaatgaatcatggattatggacttaattgatgatcaatttggtggtgaatttaatcatttgcaggctcagctagttataaaattggccatttcatgcctggaagaagatagaaacaggaggccaagcatgaagtacatagtgcaaatgctcatttctgctgaagatgaagctcatgcctttacctaa

SEQ ID NO: 2741 - DNA, 382 bp, Oryza sativa
  Clone ID: PAT_MRT4530_102488C.1
acacctttttcgccttttccaccttttcttcttttctcttttttgtttaaggcataatgagcatcatttttagcataaattggtcccccgcatcttaagcgatgcctccattgtaaaaattacaaatgtattcatctgccaaattgttcaacatgttcccccaaaaaaaaagttttgccgagcattactgaattgaagttctaggggatacaaccaacaaaatccaacttttccaagggcggctgttcctttttagcaccaagttctgatgaataaattcaatcttggataattagcaaatctgggaaaaacaaaatgccaaaatttatcttgaaaggatgaatttttatgaagaataattgggaaatatttggctttttgg

SEQ ID NO: 2742 - DNA, 210 bp, Oryza sativa
  unsure (1)..(210): unsure at all n locations
  Clone ID: PAT_MRT4530_102489C.1
cgaaagggaaccctcgaggccggccgggccaacgctcattctcctctcctctcaagaggggagagggctcccgtcctttcaaaccctntcgaatcgcatcgccgagccaaatggcgatcaccgccaacgtgaagctagagggccttcataccaacaccaacaagctctaccagatcatccataacgagaacttcaaattcataagactca

SEQ ID NO: 2743 - DNA, 1386 bp, Oryza sativa
  Clone ID: PAT_MRT4530_10248C.1
ttttttttttttttttcagagcaaaaaatggagttccaatccttctgtgtttcttttttccaatctttatttatgtatccattgatggttccaaaggagaaaacaaaaatcttcaaccaaaccattgacaaagtgacttgtctctctcaatcctttctccaatcaacagtgtgcaataataatattgtaccgattcttttctgtatgctactgtagagaataaccaaaatgaggagggaaaaaaactaaccgacaattggcaagtgaacaagaagccaaaaactacaggagcttgtctggtcttattggaggccggaccgggcccacctgtctgtgtcagcatcatgtcatggccgtgctctccgccggctgctcgatcttaacccctcctcccatctccagcccgtcgccggcgcgccgccggaacaccatggcgcactccggcagctcgccgagcccctcgaacaacgcctcctcctcgcccagcccctccccgcctaacccgccgacgtcgccgaactcgtcggggaggagcgcggccgtgccgacgacggcgccgccaaagaacatcggctgatcgtacagctgcatctcgtcggccgcgtcgatgtcggagggcgaggtcgacgtggctgggacggacacgacgtcgtagagccaccggaactcgtcgcgcacctcgatggccgccgcgccgccgccgccaccggtggcaggcccggcggtgacgccgtactggtgcgtttcctcgggttccacttccaccaccggctccggcggactgcaggcctgcgccttgggcttctgcggcgccgcctgccggttctgcgccctgggcaccgtggcggagtggttgtgctcgaaggagtaggtgacgatcaccgtgtccgggtcgttccggctcctctccacctgcttcctcgccgggcaccccttcgagctgctgcaccggtagtaagcccttggaaagggtgagcctttgatgggcttctggccgtacttccgccacgcccacgagtcggtcggcgtgttgccctccccgacgcccttcggccgcggcccggtcacgtcggccagcggcacggtcaccacccgcttctgcgccgaccgcctcgacctcccgctaggcgacgccgccgccccagccgccgaccgctgagcagctgccggtgacggtgacaccggcgaccccgggcaatccgccgcagcgacgtcctccccgcccttcatctgctcccgcccgccgccgccggacatcgtcggcgacgacaccgccgccccgtcgctccactcgccgtccatatatatacacaagagccggccggcggcgtgatctgtccgccgggaatggatggatcaaggaggcagttcttggatggatgccgt

SEQ ID NO: 2744 - DNA, 426 bp, Oryza sativa
  Clone ID: PAT_MRT4530_102490C.1
atgggctcacggccggcgaaccagaggcggactaggctccaaagcagcgagccagaggtggagggctatgaggaatggcggaggtcgcagggggcggtgagcggcggaggcagttggggacggcgagtggtgaggcggctccttctcggcctcctccacggcctcgcggtcggcgaactaggctccaaagtagcgagccagaggtggagggtgacgaggaatggtgcagggttggggtgggcgggccagccggcggtgggcggcgcggcgaagcggcggccggggaggagggccgtgaggcggccggcgcggcggctgtgcgccctcccggcgctcaacgccaccagactcgccccacagatccgcttcagccacgtcatctccgtgaccaccaatgtcgtcgcacacctcgcccttcccacgtag

SEQ ID NO: 2745 - DNA, 224 bp, Oryza sativa
  Clone ID: PAT_MRT4530_102491C.1
aaagggtaaaaaccttccccttaacttttacaaaaaaatttttttttgataagccttttcttcctcccgcgggatgaacattttttgtttaagggtttggccctggaaaattctttaattcttacccaaacggtttattttttaaaatttagtttaccccttaaacggttttacttattatgcaaaacacactttatgccaaaaggtccctttttttacttttt

SEQ ID NO: 2746 - DNA, 902 bp, Oryza sativa
  unsure (1)..(902): unsure at all n locations
  Clone ID: PAT_MRT4530_102492C.1
nnncgaggccggccggggaaaaaaaaaaaaaaaaaaaaaaaaaaaaaaaaaaaaaaaacaggcggggaaattttcctcctcccttctggagtcttcctcatcagaaatcagaagaggagagggtgggcaactcgcagatcgccttctcgtcgcgctcgcgccgcaggggtcgcctgagaacacatagacaatggtgaaggctgttgctgtgcttgctagcagtgagggtgtcaagggcaccatctttttctcccaagagggagatggtccgacctctgtgacgggaagtgtctctgggctcaagccagggctccatggattccatgtgcacgcgctcggtgacaccactaatggctgcatgtcaactggaccacacttcaatcctactgggaaggaacatggggcaccacaagatgagaaccgccatgccggtgatcttggaaatataacagctggagcagatggtgttgctaatgtcaatgtctctgacagccagatcccccttactggagcacactccatcattggccgagctgttgttgtccatgctgatcctgatgatcttggcaagggtggacatgagcttagcaagaccactggaaatgctgggggccgagttgcttgcggaatcatcggactccagggttagacgtctcaactttccaacatacagaagctgttcatgttcgctcgtatggatgttgaaataaaaataagcacctgatgtatgaccagtgtgcagtttgccccagtttatatatatgtgctatactcctgtccgaacattacagtcatttgacttgagtgcatgcgttttaagtatcattgaaaaaattgagtacatgtccataacccatcatctgggatgctgcgttaaaaaaaaaaaaaaaaaaaaaaaaaaa

SEQ ID NO: 2747 - DNA, 1895 bp, Oryza sativa
  Clone ID: PAT_MRT4530_102493C.1
ggggtttgtttttttttatatatgtttgaagcatagaaacgaatgtttctttgatattctccagagacatccaagcatgtttcaatttcagcagtattagagcatatattttaggattaacccatgtacaagaaaaacctagtatatcctgtcatggtcaccaacacaaccaggaaatatctacaggctgcacacacgcttattatgtatggaacagcaaaataagtgagttataaacagaataattgctatagacatgctctgtctcccggtttatcaattggcgctgacacggaaagcatgctggcataccccacattccactgtttctgagccagaggttggaacctgaacctgaagatggacagtgcaagtaggacatgcaacttccctcattctggtcccagatgaacctccagatgcagaacccgaggacttgcgatttctctctagttcgtcaccttaagttttcttgcaagatcttcatgactttgcactgtggcagacctgttggcagcttcctgtgctatgctaagcctttgagagacttctgccatgcatctatcacaaactcggacaagcggggcattatcttcagcagtcagagcagttcttccttgactgcatttgtcacagaatatttcaccacagttcctacaatgatgcctgcggttaaaaggactaaaatcaacagcacatgagtagcacttcttcgcagcctcatctggaacatcccatcttgtcagtgtatcaaggggataaatccttagtgtcctgcttgtgctgggatcaagcatgcgaattccatccagaccaatctgacaaagcacatcggtagggctcccggcaccctcaggcagcagtttaacccgaaacttctgcgcaccaccgttagcatcctcatgagactctgcttttggaacagccctcgcaattttcccaaagctcccacccacaccgccgccgccaccggtgggccactggtccgcccctcccgacgagggcccaatcgaccggccgtagtcatcaaacatcgcggcacccgaccgcgtcggcgccgtgccgcgcgccccgtacggctcggagccgccgtcgccgctatacgcgtaggcgccctcgttcaggtaatcatcgtcgccgtaccccgcggtaggaggcggctggtagcctccgtagtacggggcgtcgtagggcagcggcgcggggctgggctccgccgccggagcatgctgcgtggccacccccgccgccgtcggcgggtagctgtagtacggcgccggcgccggggacgactccggtgggtagggcgcggggttgggattgttgtagggcggcgcgtacccggcgtactggggcggcggcgcgtaggacggggccgacggcggctgatcggagtaccctcccccgagtagggcggcgcggaggcgtagctcgccgggatcgtcggcggcgcggcgtcggcggcggaggaggccgggtgcggaggcggattcggcgcgaactggtgcgggtagtagtggcccgcagccgggggggccgaggaggcgtagtctccgtgcgccgtagtgcaggagcgcgccgcccgacggcgacgacggcgcccgcgccaccagcagcccgccgcggccggagcccggcacgtagtagtccggcagggggaggcagaagaacacgaagagccagtcggcgaggcgctcgagctcccgcacgggcgccacgagcagcgcgcgcagcacctcgtcggcccgcagccgccgccgccgcccgcgcgccccgccctgtccctggcacagctccgccggcacccgcgccgccgccgccacccacgcgacgctgaacaccatctgcctcgtagactcgtggtacgttgttgcgttgcgtgcggttttttgttt

SEQ ID NO: 2748 - DNA, 554 bp, Oryza sativa
  Clone ID: PAT_MRT4530_102494C.1
ggcaatgggtgctgagctcactgacctagtgcaaagttctagcttgagtgaggatccaatccgatccgctccgaatcacatctttcatgtgatatttattttgtggtatgttgttacttacgagagtggtggccgtgacgttctgcgtgacgctggtggcgcgccacggcgcgacggccatggcggcgttcctgatctgcgcccaggtctggctcgccacgtcgctcctcgccggccagttgatcaatcaacctcaggccttgcttgccagcgcgtttgcaaagaaggatcactacaaggtggcggtgaccaccgcccgcgtgctgcaacttgccatcgtcctcggcgtcgggctgacggccttcctcgccaccggcatgtggttcggcgccggcgttttcaccagcgatgccgccgtcatcagcaccatccacaaaggcgttccgttcgtcgttggctcgcagacgataagcacgctggccttcgtcttcgacggcaaatggaggggaatggcatcgattaggataggatagggagagggtgaacagttagat

SEQ ID NO: 2749 - DNA, 546 bp, Oryza sativa
  Clone ID: PAT_MRT4530_102495C.1
atgacgatggcggagacagacgccgccgacaaattcgtgctcgtcaccgccgccgccgccgccgacgacgacgaaatcacccacgagccgcgggtgcgcgttcttgccggtggctacagcgagaagtccctcaacgcgaactacttcgccgccgccgccgccgtcgcaagtcggcgcgacgcttttgacaacgacgacgaggtggacgatgctgtcgcgaacgccagcgagggatcgggtgatgcagataacgacgaggaggtggagatggtgcttgtggaggatgagcaagggggaggaggtgatcacaggtggcagcagcatgtcgtcggcgtgctctgctccgttgggctcacggcggccaccgccgccggcctagccctgctgctcggctgcggccgcggcggcggcggtggccgccagaaaccggcggttgctgtcaacttccgggcatccgccgattacaaggtgcagatgagatcatcataccatgaatcgtcaatgaccgtaacaaaactgcgtgcatttgacaatgtcattcgctag

SEQ ID NO: 2750 - DNA, 308 bp, Oryza sativa
  Clone ID: PAT_MRT4530_102496C.1
gtgacaactgccagagagcaacatacttctcctaccgtagcaacctagtgcaccgacttgcacagcaactatggtatacttggccactgccatgggtacgctcgatgatatctcatttgtatttgcattgcttctagtcacatgcggagacagatgcccatgctatgaacatagtattcgctagagaccacaacagtactatcacgcgtgcaccactgcctcaggcatcgagcacagaatctaatcgaaggctctggctagagaaacgacaatggcggtaatctagctctggctgcatgtataggact

SEQ ID NO: 2751 - DNA, 211 bp, Oryza sativa
  Clone ID: PAT_MRT4530_102497C.1
agaggggaatcggcgggatggagaacgtccggcggcggcccggatttgtccggcgtaatgaaggccggtcgccggcggcctcgccctcccctcccccagatccggccggaggggaagtggcgagatgggtggccagctggcggcgggatgggaggccggccggtgactttagtcccggataccgggactacagggggttacgaaccgggac

SEQ ID NO: 2752 - DNA, 229 bp, Oryza sativa
  Clone ID: PAT_MRT4530_102498C.1
tcgttgacgcgtgggtcggtctcgccgtgcgggtgtctcttgtgagcaacagcacgcgccgcggtcggcctccccttaaatttcttcggctcatggcccgggcgggtgtgtgatgtttaatattcatattatcgaatttccgttaagctttacaccagtacctgtagaaagcacaagatttttgttgtttatgttttttattactattagtctatatcatattttaaca

SEQ ID NO: 2753 - DNA, 799 bp, Oryza sativa
  unsure (1)..(799): unsure at all n locations
  Clone ID: PAT_MRT4530_102499C.1
ccacgcgntccgcccaacgtacgtattgggtgttatattctgaaaattctccttccactgccaccgcacacgcaagggcaaagcttagcgtggcttcgctggtagtggtggtggctgtgccgtccagccgctgccatcttcctcaccagcagcagctagcagcggcgcccttctccggcctctccgtgctttgctgttctttgctttggttcggggatccgatttccattccatccatctcttgctcccgcgggtctcgtctctgtctgtgtttccctgatcattcattactggtcatgtggggcgatcggactcatcacaagcactggaatcaagctcatgttccctctggaacttctaaggacaaattccaggccaaagggcaaccgaagtttattcctgacaattacagttcagtggatgaggttactgctgcgttgagagacgctggtcttgagtcatcaaatctgattcttggtattgacttcaccaaaagcaatgaatggtcaggcagatattcctttggaagaaaatctctgcatgccattagtgccacccctaatccatatgagcaagcaatttctataattgggcgaacactgtctccttttgatgatgacaacttgataccatgttttggatttggtgatgcttctacgcatgatcagtccgtcttcagcttctaccaagacagtcgttcttgcttgtggttttgaaagaaggttcttgaaagatataggcaaattgtcccacatttgaacctttcaggaccgacttcttttgctcctcttatctacgc

SEQ ID NO: 2754 - DNA, 1660 bp, Oryza sativa
  Clone ID: PAT_MRT4530_10249C.1
atggcggcgtcgctcgcggcgctggcgggggcaggggtggccggggtggcggtcgagctgtggtggggggtcgtggagcggcaggggcccggggtgtacgactgggcggggtacctcgagctcgccgccatggcgcgccgctacggcctccgcgtgcgcgccatcctcgccttccaccagtgcggcgccggcccgcacgaccctccatggagtggagctttccagattgaaacgtggcattttgactctattaggaaaaaaggaggaaaaatatatgttcacaggaccaaaatttgtgtcatggaggttgtgatccataacatgtttagattcaaacgaagtacttttactgtctggtccaagccattgatccctctacctcaatgggtacttgaggagatggataagttgccagacttgtcatatatggatagataccaacgaagaaataaagaatacatctcactcgggtgtgatattcttccgattctgaagggaagatcaccaatgcaggcttattcagacttcatgaggagctttcgagatgcttttaaagagtaccttggggctatagtgacagaagttcaaattggaatgggcccaggaggtgaacttaggtatccatcatgcccaactgagacactaagtcaagcaggcatctcatctgaactcggggagtttcaatgttatgacaagttcatgcaagcatccctgagtgctcgtgcacaacttattggcatgcaagattggggaaacggtggtccagccggcacagatggctcacgacagaaccctgaagaaactagttttttccgtgctgatggtggatgctggaatactccttatggtcggtttttccttgagtggtattcaggaatgctgcttcttcatggagagagattatgtatggttgctgatgctgtcttctctggttccggtgtgaccatcgccggaaaggtttctggaatacattggcactactatacatgttcgcacccatcggaactgactgctggttactacaacacattgttgaggaacggttatcttcctatcacccaaatgtttgctagatacaaggctgccttgtgctgcagttgctttgacctgagggatgaggagagaaataactccaagagcagcccagaaggtactctccggcaacttatggtcgccgccaagatgtgcaatctacctctgaacggcgaaaactccgtgacaaggctcgacgatacgtcgctgaatcaagtcatcagaagctcaaggctctactcaggtggcacctcagggacatctttctccttcaactatgtcaggatgaacaagagcctgtttgagtttcacaactggaacaggttcaccaagttcgtcaggcagatgtcggatgccaggacatttctagccaggctcgagttcaggagagggcagcattacctctcctcgatgtcggttgtctgggtcgtcagccgggcctgtgcatagacatgaatcagaattggcaaagtgactgctagaaatgtagtgttgttcgtgtatctgtaacttggatcatgaatgtgattcgacagaattggaagagaactttgtgctcagccgaaaaaatataatcattggaaattgaaaggactatgcaaaaactgtatagaaaaacataattaac

SEQ ID NO: 2755 - DNA, 177 bp, Oryza sativa
  Clone ID: PAT_MRT4530_1024C.1
atggccacaaccatctttcccccaaggccaattgcacaaataccgccggcggtgatgataactttctgcgccaccgccgatgccttccaccgccgcaggtcccccaacgccaccttccagctcgccgtctcctacccgaccccaccatccacctcctcaaaccccggccaccactga

SEQ ID NO: 2756 - DNA, 304 bp, Oryza sativa
  Clone ID: PAT_MRT4530_102500C.1
gcgacacttccgatcggtccaccgcttgcattgttagcacttgacgacgctctaccgacaggcaaccagccggttcctgctccggagacaggtcggtgggcgctcgctacagcatgaacggcgcgctcgccgccacctccgtccacgactagaccgtgaaggatgcatgcggaaaatacgcaagcctgaacacctacgaggggaaggatgttctaatagtgaacgctgcatcataatgagggttaactaactccgactacactgagctgagccatctgtatgagaagtacaaggaacaaggctt

SEQ ID NO: 2757 - DNA, 716 bp, Oryza sativa
  Clone ID: PAT_MRT4530_102502C.1
ggtcagcttattcctactacatacaagaaaaagaaacaaatacaatatcccaaaggatatacctggtcctttgaaactgaaactaatccagcatagtttaatttagccttttttttcacatagttttcacgccatccgcatcttggcatgaattgagagtccttgtgcttccgagttcttcatctccttactgttcgacaccatatacactatactgattgaattgagtcctttgttcctgcattctagaaggtcagatgacctcacgagtagagccttacacgcatcgtaattggcacgcggcataaggggcatgttgatagagttgggccacattccttgcatgtcaggtgaccgcattgaaaagccatgtcctttggattggttaagcagattgggcaaacctgctcatcagtggtattctttccgaagccagttgactgggagcttgcagttggaggacgtgaggctgcagcgttgtcgttctcaagaactttgtttggaggaggaagaatcctcagatgactggccacatgacccgcatgcttctccagtggtcggaggccttgagttgctttatattgagaaggtatttccataagggctgcaagggcaaatgcagcctctttctttggcatatccttacttgttgacataatctctgtgaagttcacaaactgaaaattgtcaaaagctctgtcaggaatacagtcatc

SEQ ID NO: 2758 - DNA, 1750 bp, Oryza sativa
  Clone ID: PAT_MRT4530_102503C.1
ccgcggggagtcggcacctggctcctctctacgcttgccgaggcctggtggcagagaagcccgacagtctattccgtcggggaggagcttagagagagaagtcaaagactctctccttctcgtcaccttcttcctcctccccacgccgcgctctcctcccctcttaaaccactagcgccgcctccgcgctctctcctgcctcctctcctatgctcaagaacgcgtgtgggttggtcggcgtgtagctgcttgctttgctctcactgccggggctcgatctgcttgctctgcagaaattctttccaattcattgcttcttgtggcctgtgggcacctctacaatttgatttcagatggattgctgctttatgttcagaaaaaaacaacctgttgaaggtgatgatggtgaacatagagtgaagatattttcttacagtgagttgagaaaggctacccatgattttagtggggcaaataagattggagagggtggttttggctctgtgttcaggggagtgcttagagatgggacaaccgttgccgtaaaggtgctgtctgctacttcaagacaaggcgtccgagagttcttgactgaacttacagcaatttctgacatcaagcatgaaaacctcgtcacacttattggttgctgtgctgaaggatctcataggatccttgtttacaattatcttgagaacaacagtcttgcacagacattgctaggatctaggggtagcaacatccggttcgattggaggacccgtgtaaaaattgctgtgggtgttgctcgtggaattgcatttttacatgaggaaattcgccctccgattatccaccgtgacataaaggcgagcaacattcttcttgacaaggacctcaccccaaaaatttctgatttcggattggcaaggctccttccacccaacgcaactcatgtgagcacccgagttgcaggcacattaggatacctggcacctgaatacgctatccgaggccaggtgacaaagaaatccgacatctatagcttcggtgttcttctactggaaatcgttagcggcagatgcaacaccaacacaagattgccttatgaagatcaatttcttctcgaaaggacatgggtacgctacgagcaagaacgcctggctgagatcatcgatgctgacctggggaatgacctggacgtcgacgaggcatgccggttcctgaagattggcctgctatgcacacaggacgcaatggcgcgccgccccaacatgagcaccgtcgtcaggatgctcaccggggagaagcacttctcggtgcaccggatcaccaggccggccatgatcaccgacttcgccgacctcaaggtcagcagcagccagcagaaggagaacgagacaacacggtcatccaacatgagatcgttcagcaccactgatgaaacggagcctttctcatcgtcagagacgccgacgcagacgtctatctgaaaaaaaaaaacaagaagaagaactggaaatgtggagacaggactagtgttttttttgtgtttgtatattattgctccgaaaggggataggattacgttcaatttttttttctctttttggagagagtttcgtgtttgtttgatttttgtgacgaggagatgtttaagataggcagcgtattgcttctcgatctgggtgtaaatatctcgaaatgaagatgttcaaagcctcaaagataagctctgcacgattcacaaaaaaaaaaaaaaaaaaaaaaa

SEQ ID NO: 2759 - DNA, 546 bp, Oryza sativa
  Clone ID: PAT_MRT4530_102504C.1
ctagagtgcgaattttcttcgttccgtgacactccgtcccctagcgtcagtcctccgtcctcccggcgccaccgttgtcagtccaccgccgctcgtgcccgtgtcagctccggcgtcgccggtccgtcgctgcccgcgtcagccccgccgttgctcgtccgtcgtcacccgcgtcggccccgccgtcgctcgtccgtcgccgccatcggcgcacgcggtggagggccggaggagaggggagcagcggtggagggcagagggcttcgagctccggcggcggaggttggaccggcgccggctcggggcgcggtggcggcagcccggtgcggcggcggctgagctcggggacgacacgagctagctcgccagatgcgtgcgggaggaggagctcgctagtgtggggaggacgagctcgccggcgtgggggaggacgagctcgccggcggccagattcgtgcgggcaaacggcgagagatggatgaactgacgacgggcgtctttggatggacggagtgttacggaacgaagaaaattcgtactctagtg

SEQ ID NO: 2760 - DNA, 1104 bp, Oryza sativa
  Clone ID: PAT_MRT4530_102505C.1
atgaagagtgatgacaagaacattgaaaaggtgatggaaaatgtcgtagtaaattcggggtttggtgatgacgacttccagattggattcttggaccaagtaaaacaacagcaagaattgaggcagacggaggaggaagaagaagaaagggtcaagccttctgtagccaaggaggccatcctcttccttgcggatgggctaggcccatactgtcctcgggccgaggaaagcaatcccatccacccaaaccagctagggtcggggctgctccaagtcggctgccgcggcatgtcagcccacgcgccggcgatcgatgagggtctcctccacaggtactctcatgagtgcggcgatggtggcggcggcatggacaataccgtacgaggagtgagagacccggcagatgtcgtggagtggaaagccaagtacgagaagacctacaaagacgtcggcgaggaggggtgccggtcgattgcagtcacagggaatttgatctgcaagacaaaaggaaaggatgtattggtacttcactacttgaaatcgtcccaattaggattgtctctgaagatcaacaatgcagcagcaaagccatctccgcaactgccttcgggctgcaatgaactgagaagagcaagtactccagtggtcggaggccttgagttgctttatattgagaagttcatccatctcgcgccgtttgcccgcacaaatctggccgccggcgagctcatcctctcccacgccggcgagctcgtcctcccccacgccggcgagctcgtcctcccccaccggcgagctcgtactccccccaccggcgagctcgtcctcccccacgccggcgagctcgtccttccccacgccagcgagctcgtccccgagctcagccgccgccgcaccgggctgccgccaccgcgccccgagccggcgccggtccaacctccgccgctggagctcgacgccctccgccctccaccgctgctcccctctccgccggccctccaccgcgtgcgccgatggtggcgacggacgagcgacggcggggctgacgcgggcgacgacggcgggctgacgcgggcggcgacggaccggcgacgacggggctga

SEQ ID NO: 2761 - DNA, 174 bp, Oryza sativa
  Clone ID: PAT_MRT4530_102506C.1
atggcggttggggacaatacggggaaggagcttgaccaggacagatgggagatggattggtggggtccaaggaacactagcaacaaggttgagagaagggattgcagtcttatcgccgaggtcgtcatatggtcagcagcgaagtcctgcttccgttgtatatggacgaaatga

SEQ ID NO: 2762 - DNA, 300 bp, Oryza sativa
  Clone ID: PAT_MRT4530_102507C.1
atggcagggcgctgcaatagaagggaaactgaagtgaaatggcgctacacggttgaacaccaccacgcgacgtcgccgtcgcttgggttcacaaaaccgccggggccggggttaccgtgccccggcggtaagcacggttaccgcgcggttaccgcggaggttaccgcggtatttacattaccgtacccccgcggtaagcccggtaaccgcggtaaccgcgcggttaccggcggttttgtgaaccctgacctcttcagaggtaacagcatcttgagggattcacttaagatattgaagtga

SEQ ID NO: 2763 - DNA, 564 bp, Oryza sativa
  Clone ID: PAT_MRT4530_102508C.1
gctgccaccattcatttgcctcctctccttctctcactccgctctatctcctgcccaagcaatggccgccaccgcgtgccgcctccctcattctcttcttcccgcaagtgatgacctcccccgcgcactctctgctgccgtgcctgccgccgcccagcacgcgggccattgccgtcaccatcctctcgcttccgccgccgcatccgccaacgaggaggccgggaccgccggatccggtgacttcggcctcttcgctggcagatctggccactctaaggcgaggggaagccgacagccgccctctacgcccggtaccgcccctctctccctctcctctccatcctcttcatttccggatcggtggacgccggcgattaggcggcctagggttcatggtcaacaacagtggttgatccagtggctactttcccgatcgctcccctctctcctgtggcagcggcagtcacgattcgcgagattcctcatcccgcaccgtgcgctgatgatccctcttcgcctcctttcaccaatccgcggcaatggcacaatcgttgtcatcttcac

SEQ ID NO: 2764 - DNA, 3661 bp, Oryza sativa
  Clone ID: PAT_MRT4530_102509C.1
ggacgatcggatcgggagaggacgcgacgcgaggcgggctgcgttgtgagggagagaagggatgctggcggtgttcgatcgggcggtggcgccgagccctgatgggctccgccatccctgggctcttgctcaccagcaccagctatccgcggcgcccttctccggcctctccgtgctttgctgttctttgctttggttcggggatccgatttccattccatccatctcttgctcccgcgggtctcgtctctgtctgtgtttccctgcacgcccgctcctccccctcaccgccgccccctcctcgcttccagccgcgtggctttcgaccgcccgccactccaatggcggcagggagcaagaagaatccagaaccttcctctttttcttcttcaggcgatctcagcggcaataccgtacaagagctactcgcgatggacaaggttgccgcctctgagctagtgcccgaccatgtccagcagcgggaatctctccagcaccatctccatgttgatgatgatgatgatgagcatcggtctgtacacaatgagcaagagcatcgatcgcagtggcaggagcggctagccttctaccgcatcataggctatcagttattcctgcgtggcctgcttgacgaactggacatggcaaaactgaagcagaagttctctcctgacaatcttaataacaaggggtatttccagtactaggagagtagtgctgaatgtgacttagctaatcaaagatgcaatttgacttgcattgatgactatgagaggctagtgcattgtgaccatggtttgtaaatgtactggtatcaatagcgctcaaattatagtacctgcgagagtgatctagcatatgtctaattctgtgaagagctagcaaatgagactaagtggtttgaagattatttgttactcatggctgtcagggagaaggttacaaatggtgaatgggacaaagttataaatatagcttaccttcaagtacggaagatctgaaaactaattgaaataaattgctaaatttaaattatgccggatttctttcagtttctaaagaacatgcggttttatttttggaactacagggtttttgatgctgtgtattttgtggattggaagcggaatgcgaagcaaaggatggaattcactgatgctctgtcggaactctatagagaagatatgtttcccttgcgcaatgttgatattaaggatgagcttgacaacattcgataggacaacttcgaggcagggaattacgaatccgtgctatccaatgatgctcgtgaacagatcaaagaggacgtcataaaaatggtacacaggactagagccaagatcctagagcccgccgtcgtcgcccgcgtcagccccgccgtcgctcgtccgtcgccaccatcggcgcacgcggtggagggccggcggagaggggagcagcggtggagggcggagggcgtcgagctccagcggcggaggttggaccggcgccggctcggggcgcggtggcggcagcccggtgcggcggcggctgagctcggggacgagctcgctggcgtggggaaggacgagctcgccggcgtgggggaggacgagctcgccggtggggggagtacgagctcgccggtgggggaggacgagctcgccggcgtgggggaggacgagctcgccggcgtgggagaggatgagctcgccggcggccagatttgtgcgggcaaacggcgcgagatggatgaactgacgacgggcgtcgttgggaggacggagtgttacggaacgaagaaaattcgcactctagtggtgtattctgaaagtagtgcgaattgggtgataaatcctgaaagtaatcattcattactggtcatgtggggcgatcggactcatcacaagcactggaatcaagctcatgttccctctggaacttctaaggacaaattccaggccaaagggcaaccgaagtttattcctgacaattacagttcagtggatgaggttactgctgcgttgagagacgctggtcttgagtcatcaaatctgattcttggtattgacttcaccaaaagcaatgaatggtcaggcagatattcctttggaagaaaatctctgcatgccattagtgccacccctaatccatatgagcaagcaatttctataattgggcgaacactgtctccttttgatgatgacaacttgataccatgttttggatttggtgatgcttctacgcatgatcagtccgtcttcagcttctaccaagacagtcgttcttgctgtggttttgaagaggttcttgaaagatataggcaaattgtcccacatttgaacctttcaggaccgacttcttttgctcctcttatctacgcagcaatttctgttgtcgaaaatagtaacttgcaataccatgtcctcgtcatcatagctgatggacaggtgaccacctcaaatacaaaggatggaaaattaagtccgcaagagcaagcaactatacaagcaattgttgatgcaagctactatcctctttcaattgtgatggttggggtgggagatgggccatgggatgcgatgcaacacttcgatgactgtattcctgacagagcttttgacaattttcagtttgtgaacttcacagagattatgtcaacaagtaaggatatgccaaagaaagaggctgcatttgcccttgcagcccttatggaaataccttctcaatataaagcaactcaaggcctccgaccactggagaagcatgcgggtcatgtggccagtcatctgaggattcttcctcctccaaacaaagttcttgagaacgacaacgctgcagcctcacgtcctccaactgcaagctcccagtcaactggcttcggaaagaataccactgatgagcagaactgtggcataactcttattattttcttttatggcatcatcaaggtttgcccaatctgcttaaccaatccaaaggacatggcttttcaatgcggtcacctgatcaaattccctgtgactgcaatcgacctgttctaacctgacatgcaaggaatgtggcccaactctatcaacatgccccttatgccgcgtgccaattacgatgcgtgtaaggctctactcgtgaggtcatctgaccttctagaatgcaggaacaaaggactcaattcaatcagtatagtgtatatggtgtcgaacagtaaggagatgaagaactcggaagcacaaggactctcaattcatgccaagatgcggatggcgtgaaaactatgtgaaaaaaaaggctaaattaaactatgctggattagtttcagtttcaaaggacaggtatatcctttgggatattgtatttgtttctttttcttgtatgtagtaggaataagctgacctgtgatgcttggcccaaagaacttaccgaaggcagttgcggagatggctttgctgctgcattgttgatcttcagagacaatcctaattgggacgatttcaagtagtgaagtaccaatacatcctttccttttgtcttgcagatcaaattccctgtgactgcaatcgacctgttctaattgcagggatataaaagtgtgaaacaatgggagaaacacacggtaccagtcatcttattctgaaactcgtaatggaggtcgatctgaatggatcagctacgttacgtgctc

SEQ ID NO: 2765 - DNA, 2361 bp, Oryza sativa
  Clone ID: PAT_MRT4530_10250C.1
atgccgccggcgccatggccgacgccacgcaccgtcaggcaagccgccgagctccacgcccgcctcaccacctccggccacctcctcctccacccgccatccgcccgccacctcctcaactccctcgtcaactgcctcgagccccatcccctccacctccgctacgccctccacctgttcgaccgaatgcccccctccaccttcctcttcgacaccgccctccgcgcctgctcccgcgccggctccgatccacaccgccccttcctcctcttccgccgtatgcgccgcgcgggcgtccgccccgacggcttcacgttccacttcctgttcaagtgctcctcctcctcctcccgcccccactccctcctcctgtgcacgatgctgcacgccgcctgcctgcgcaccatgctaccatccgccgcgccgttcgtctcgaattctctcatccacatgtacattcggctcgggctcgctgccgacgctcgccgagcttttgatgagatccatgtcaaggacgcggttgcctggacaatgctgatcagtgggctggccaagatgggcatgctctgtgacacgcagcttcttctatctcaggctccagtgagggatgtgatctcgtggacaagcttgattgccgcctactcccgtgccaatcgggccagagaggctgtgggttgcttcaagaccatgctttctcatggcattgcaccggacgaggttaccgtaatcgccgtgctctcggcatgcgcaaagctcaaggatttggaactgggacgttccctgcacttgcttgtcgaggagaaggggatgccgacgagtgaaaatctcgtggttgcgctcatcgacatgtatgccaagtgtggtgattttggtcatgcgcaacaggttttcgatgccctgggtagaggcccaaggcctcaatcatggaatgctatcattgatggatactgcaagcatgggcatgttgatgttgcacggtctctgtttgatgaaatggaggtccgtgatatcatcacattcaactcgatgatgactgggtacatccacagtggccagcttagagaagcattgctattgttcatgagtatgaggagacatgacctgcgtgtcgacaactttacggtggtgaatcttctaactgcttgcgcaagcttaggtgcattacaacagggcagagcattgcatgcttgcattgagcagaggctggtggaagcagatatataccttggtactgcactgctggacatgtatatgaaatgtgggagggtcgacgaggcaaccattgttttccaacggatgggcaagagagatgttcatacttggaccgctatgatcgcaggtcttgcattcaatgggatgggtaaggctgctctggagcatttctaccagatgaggtgtgatggcttccagcctaattcagttagctacattgctgttctgactgcatgcagccactcatgtctactgaatgaaggccgtctgtactttgatgagatgagaatcttgtacaacatacatcctcagattgagcactatggctgcatgattgatctgctgggacgcagtgggcttttggatgaagcaatggatcttgtcaagaccatgcccatacaaccaaatgctgtcatatgggcctccattttgagtgcttgcagagtccataaacacattgacttagctcaatgtgccgcagagcatcttctgaagctagaacctgacgaggatggtgtctatgtccagttatataacatatacatagactctagacaatgggaaaatgcgtcaaagataaggatgttgatggaagaaaggcaagttaagaagactgcaggatatagttctattactgtggctgggcaggtgcacaagtttgttgttagtgacaaatcacatccacggatattggaaatcattgcaatgctggaggagatttcacacaggttaaagtcattgggttattcaccgcttacatcacagataacagtggatgtggatgaggaagagaaagaacaagcgctgctagcacacagtgagaagctggccattgcttttggcctcattaatctagcaccaaacttgccggttcatatcagaaagaatctgagggagcctcaagaaatccatgtttctgaaaatgatcttatccaattttcagagttgaacgggccaactttggatattgaatcatcggcatttggcttgttgagtcagcttccccgaaatttcctattttcagacctaccagaggatttcagccaaagcgcaggtaaggggatctgtcttccctatgcttgcttcattgctgattttctcctatggacagaatctggattggatggctaccattgctgcctgggctga

SEQ ID NO: 2766 - DNA, 532 bp, Oryza sativa
  Clone ID: PAT_MRT4530_102510C.1
gcacgagggtcctcttcaaggtcctctccgccttcgccttccgcgacatcaccctcaccaagatcgagagccgcccgcaccgccaccgccccatccgcctcgtcgacgacgcccacgtcggcaccgccaagcacttcgagtacatgttctacgtcgacttccaggcctccctcgccgagccccgcgcgcagaacgcgctcgccgaggtgcaggagtacacctccttcctccgggtgctcggcagctaccccatggacatgacccccatgaccgccggctcctcctccaccgtcacctccgacgattcctcctccacttgaccgccgccgccgacgaggagacgcgcatcgatcgagtagggacgttggtttcttgtggtcatgtcgtcctactcatcctccccccattgccgggagtaattaattttgcctttcattttttcttattcttcttctcgtcattatacgtgtaattgttccactccagataattaatctgcagtaaatattactagtacaaaaaaaaaaaaaaa

SEQ ID NO: 2767 - DNA, 401 bp, Oryza sativa
  Clone ID: PAT_MRT4530_102511C.1
ggggttggtttttttttttttttttttttttttttttaaaaaaaaacaaaagctgactgggaatttatgaatttagggttgatttaaaaaaaattcaggtttttgatagttgaataggtgaaatcctatatacatgacctgatagttaaatagttgggattttgtaaaaataacctaataggatggattttttgggcattccacaacaacggattttcaagaaaatttgtgttcactcatttgggttttgaagaaaaaatttgcataaaaaaatatatccatagggttggagatattctttttgtaaaaagaatatttaaatttgtttggactgggccttgaaaaccttaaatttttttaaaatgttagggaagtaattttgcaaatatttttttaagggg

SEQ ID NO: 2768 - DNA, 577 bp, Oryza sativa
  Clone ID: PAT_MRT4530_102512C.1
agtggatccccgggctgcaggcccgcccatcttgtcagatccttcttcatagttacgaccaatcctatccaatccaattgttttgagaaccaagggaattaaggagaagaatcgaggaagaagaggaggccatggttgtgtacgagcaggatccggatgttctccgatggagccttcaccttcttcttccacccgccgctgccctacactaccaacaacgcaccagcagcgtcgactgcgatgagatgatcgcccacgccctccaggaggagctttcctacgcccaatcccaatccctatcctcatccatcctccatctccccccctctgctcctccactaaaggaagacgaacaagatgatgcgccaccaccaccaccacccccctttagttcttgttcaacccctgcagattatactaatactaataatcataatgcccatgactgcttaatcgagtttgtcgatgatttctctgctcttgatggccaagttggcaaaagattacacgacatgattcccattcctgtaactaactctctactgcttattccccaccttctcttcaaccattcatc

SEQ ID NO: 2769 - DNA, 281 bp, Oryza sativa
  Clone ID: PAT_MRT4530_102513C.1
attatttttagtgaccacaagaaaaattctgacattcacttgcttacatttttttcataccaattcacaaagctcacaaacttgttcccactccacttcccacagcagtcaggccatttcagctccagctgcaccattggcagcatcatcccacactttgcatcaaatcataccatctacagctcatgttgcaaactcagcacaactccttccaggtggcaacacaggcaccatcacacttcaacacacttccaccacatcaaccatccacacagcctgca

SEQ ID NO: 2770 - DNA, 837 bp, Oryza sativa
  Clone ID: PAT_MRT4530_102514C.1
atgaaaacaaaacgcatgcatcggaccggcgatcacgccggttttgatcgggtacggctcgtaatcgcgtcagctggcacgggaaaagcgacggccaccgagaactccgcccaaatccaggccgccggcccgccgcaccgcgtgtgcggccgtgcgcctgtcgcgggtcaacctgcacgctgcaccggcctgcgccgcgccgcgcggccggatggcgcgtacgccttcacgagagtgccgcgcgcgcgcgcgctcgctctcgtgccgtgggacgccgcgccggccatgatcgctggctgcgcagctactgcacctgcacagctgcactactacagcggcacgacgcgcggctgtttcaaaagtagtagggagcaagtaataatttcctgtgttggtctgagcgtagcagcgagcgctgatcacggcctggagccctggacaatggcgcacaatgcaatcatggcggagagggcactgcatgcgaccgatgctgcattgctgcgggttaaaaagtccctcgctgtatccaggacatacagggagagagaggatttgtttttcacgcgacagaggaagtatcgtgcaaaaagttttaagttccctgatacttcaacagtgagctattctgaaaacttctgtgcatcatccatccaccctgcgactggcaaggcgaattttacatgcttcgtgctacaagacccggtcgtctttccatctgcaagacaagatgaaccaatgcatacatggatcatcaagtcatggatactcaagtatgaggacagtacatacagtgtcttcctggacaatgagaacccaagactacagaagaggatcctc

SEQ ID NO: 2771 - DNA, 1599 bp, Oryza sativa
  Clone ID: PAT_MRT4530_102515C.1
atgaggaacaattatattactggggcgacgtgcggcagtggcagcgagttcggcacagaggaagtcaaaggtggggcgggacatgcggaaggcgcagtggaagtcggcctccgggtagttggcgctgctgcacagatcccactatgcaccaaggcggcgcacgggctgacgatggcggcggtgtcgagcatccggttggaccgcagcatctccatggcgtcggcggtgtcctctgcggccggccagagcgaggggcttccccttctctttcttccaatcgacgccgtcgccgccgcagccgcggcactgctccccatgccaccgcttctcatccttggtatcgtcatatacctcttcgtgttggtggcagtcgttgagctggaggagggggagctcgtggcatggtcttccccagataagagattggttggaattcgaccttttaattccccgtcccaaaccccctcgaattcccaagtcttccaaccaaatcgccggccgacggagctcgccccgcttctcgtcgccgccggcgtctgcttcggcttcgccgaccctaccaccaatatcatcgccaacaccctctcctccctccctcccgatcacagtgccaagaagcgcaagcgcaagacgaaggcggcgccatcggcagcagcagcgaggtcgtcgtcggagacacgagccatcgccgagcgatcgctggaggggctcgtcaccttcctcacatcctacttccgctacctccccacctgggacgcgctccgctacctgcgcctcgcgaacaccgacctcctcgtcgccgtccgcctcatcgagctcaatcgcggctgctacaacaccaaggacgaacgattccaaatctcctcctacgctgccagggctgcccttacatgcgcagcctcatccgcgaggcaaccgaacgtcgacggcttcatcgccgcttcgttttcgctggcgtctcatcttgaattcgtcacccaggccgtgccaggtggtttgacaatatcactccgggctgttttacttgacaagattcatgccaagtacatcaaggcaatctctcgattaccaatgcaagatgttcgggctcattaccaccttgcctttgtcaatggtggttactgctatggcccattcagttgtgtgaccaacatcatcatcaataccctctggtatgactctgctttccctgctgtggagaaacttgaggtggacatgatctgcacctccacctttgttcgtgtggagtcccgaaagattgaagctgcactaaggaaaaagggatatctatatgatcttcaagtaatctgtgttgcaaatgagcgtgtgggcagccagatgaacttcttggacttcaagtgtccatattcacataccagcattatcactgtggtgttgaaggctagtggtgaaaatgccatcgtcttcaggaatgaatcccagttcaagcagcagaagaggatgactgtcatgcctacaaaagcaacctccacagctgcaagaaatattgtctgcaagttaggtagcaggatcatgcttgttttgcttgctcgactcaaggacaaggccaagaaaggaaaggaacatctcacttcctaa

SEQ ID NO: 2772 - DNA, 1883 bp, Oryza sativa
  unsure (1)..(1883): unsure at all n locations
  Clone ID: PAT_MRT4530_102516C.1
atgggggtgtggagggagggggcggggtggtgcttctgctcgggtgggggaggggggaggtcggagagggtcaaggcggcgatcttctcggcgaaggcggcggcgctggcggccgtcggcggggggcacggcggggccggcgtcctgatccaccgcaacctgctgctcaccacgcacggcaacctcccgtccgccgccgccgccgaggacgccgaggcgctgctcggccacgcccgcctcgccgcccgcctcgttccacacagattcttcattaccagctcaattcttgaccttacaatagtcggccttgatcctgcggagaatgagacaaccttgcaggctcagcaacctcactacttgaaaacatgctgcaaaccaagcctagatcatggaagtgttgtttaccttctgggtcacacaggaaagaaggaacttgtgattggggaggggaaggtagtgattggcacagataacctcttaaagctctccacggatggggtgacatggtgccctggctctgctggttttgatgcccaagggaatttagccttcatgatctgtgaccccatgaagttggcttcctcccccaccacaaggtcatcttctacatcctcatcttcatcacattcatcaaagaaagatcacccaatgcaatttggtgtccccatatctgtagtttgcgattggctctatcagcactggcagggcaacttggatgaagttagcaagccaaagctgccccttgttagattgatgtccagcagaagtgatcattcaagcacctccttcactcgtcgccatgtgttcaagcctgcagatgatgagaacgacgatacatcggtttcttcacaagtaacttcgaagcctaaacatcagcaggcgtcaggaaactcggccaatgcaaggatatcacatgatgcgaaccctctggttgatctgcgtgcaaacaatgagcaaggggtttctactccagagatatatgaatcaccccgacaaagttcttgccaaggccagaaagatgctggttcagttcaacttctggatatcaacttcccacctagtgctcccaagaccatctttctaccgctgcccctgaagcaaatgctttctgatgagaacaacgcagatacgtccaagcctagaaaccaatccagagacaatggctttccatcggggataatatggcaccgtaattgtgaggctctttcaagggatcctccagtagctcctctgcaggatgattgcagcagtgaagggcagtcgagctcgtcacctgttgagctactggagtatcgaaatgaagaccacttcagtagcgaggaggaaacaatgtactcagcggaaaccatggagagcaggaacattccaagccccagggagaagcacgtcgggaggagccagagttgtgtaacctacaggaggtggagctctccaaggatgtcgacaatacagaacggaaccttaagaaagcagcacaccctggtccctgtgcgcaagagtcactcgcagaacacgagtctgccacaaaggagtcatgactacctgagcccaacagtatcctcggctatgaagaagagaaactcaatggaacagcaactgcccacgaagccccggcggagcattgctcaaacatctccaaaatggatgttctgatgaattnatggttgtnttctttggtttcctggtggaatgttagtgcagcatcancaaagcatgccgatttttggtggaaatttgctgctctcatgtttttttccnctgtaagttgatgctccgcttccttagttctttctctacggcattgtgtgtgtgtgcgtgtgcanaatgacttggataaataaaaaaaaaaaaaaaaaaaaaaaaaaaaaaaaaaaaaaaaaaaa

SEQ ID NO: 2773 - DNA, 146 bp, Oryza sativa
  unsure (1)..(146): unsure at all n locations
  Clone ID: PAT_MRT4530_102517C.1
tagcnccgacaaancacaaaaggangtattgtcatcgagtagacagtaacttctncttctctgacaacccctaanaacagtatagtaacagtnctctgaaatctagcatgacatatacagatgacatgatatagtgtgatcagtct

SEQ ID NO: 2774 - DNA, 339 bp, Oryza sativa
  Clone ID: PAT_MRT4530_102518C.1
atggtggtcatgcgcaccgccaccgagcagagcaacttcaagctggaaaaggtggaggaatgggttcaccttgacgaggtggagttggtggcgcgaggtttggccaacggggctccggtgagggagatcgaccggcggcagcgtggtggccagacatggcagcgaaaggtggttgcaatggaattcgctgatgaggacacggtttgccacgagcttgaagttgagctcgagctcggctcgttcgagcttcgagcttttctcaagcctgtttggtgcggtggaatactggaacaattcattccattcaaagaaaaagctgacactgtgatgcatgattag

SEQ ID NO: 2775 - DNA, 490 bp, Oryza sativa
  Clone ID: PAT_MRT4530_102519C.1
tgcaggaattcggcacgagatggagtccaccaccggcggcaaggaggaggagaaggagaagctgtgccggcggtgcaaggcgacgtacgcgccgtcgggcaacacgcggctctcctgcaggttccacccgtcgtatttcgtgtgccggcgccacgacgaccagaagaggtactaccagcttcgcgacggcgacccaccctacgccgccaagttctacgactgctgcggcgccgaggaccccgacgccgccggctgcaccaccgatttccacctctcctacgacgacgccgatgcctagccgctcacccctacctacctaccttgtacgtataccgtataccaccaccgcctgtattcctctttctttctcatgtatgctactactccagttcactaataacgccacgcctacaaacaaattactgtaatactaatcaccaatcatttcaataaattcagtcatatgagatgagatggctccttaatttct

SEQ ID NO: 2776 - DNA, 407 bp, Oryza sativa
  Clone ID: PAT_MRT4530_10251C.1
gagcaaaaaagacaggatcaccatattaatactaaacgagacggacccggcggtggctacacatagaaacacacaaatgccattcacagctgaatctcaaccctgcaaaaattgatgcttgaggagatgagacatgacaagacttacccaaggggctcaggtgggttatgcatacaacaacatgaaaaggaaaacacatttcacggagaataacatgaccacagactaaacaatgtatgacaactgtcgtacaaaccgagagcaaatttataggatgacaacctgttccaacgaataatggcctaacttgaaacaaggaaaattgtacctgctaccgttgtgccagagcacaccttctttatactgaccctaaacaggggcacgaaaaaggagtacacaactgctgt

SEQ ID NO: 2777 - DNA, 1163 bp, Oryza sativa
  Clone ID: PAT_MRT4530_102520C.1
aaagtaaaagggtggcgatgcgccgagattgtattgaacgtgtgttgttgtattacatagggctcggggtctatttatacccgagattacaaaatatgttcgtgtcggacatgactcttatctttaacaaactctaagataccataagtctttgcagcagacttttgcccaaacatatctctaagaaaattacatgaaatatcctaattaatagatataattgccgtctcaggactcaatccgtgcatgacaatcctcatgaagctcattaactcaacccgacaatgtgtaccgcgtcacattgtcggactcggctcaatcggctaaccttgtccaactcggactctgccgatcccggtcatagcagatgcggactttagcagatccttgctctgtttccagaacgacttccatcttggattccgcctcaattttatctccatctctgataaaatcctggatcgagtcttggcttgaatttaaccaagtgttgatgtaaaaacacgaggcctgggagatctgcttaactctagtgcaggtccaaaagcttgcctttaggttcgtaagcgtgccagttgatcctgcaaaaatatgcccatatcggacacgactcttatctctaacaaactctaagataccataagtttttacggcagacttttgcccaaacatatcacattgttagattcaacttaatcggctaaccttgtccgacttgaactctgctgattaaggtcgcagccgattcggactcagccgattcttactctgtttccgaaacaatcttggacttggattccgcttcaatctaatctctatctttgatactcgaattaccaaatttagtcgttaacaccaaggcgttctccttcccccaatcgctctccctctcggctcccgactcccgactcgactcccagtctcccacctgtcgcccctccttcccccaacctctctccgagcaaaccctaatcgtcgccgccaccttctcctctctcccctgacgccatcaccgccgtggatctcttcccctctctccctctgatgccgcagttgtctcctcctcctcctcctcacccgccacgccgcccgattctacgcggtgacgagccaaccctacgcagtggcgagacgatcccggctgcggctatcctacccgcgac

SEQ ID NO: 2778 - DNA, 123 bp, Oryza sativa
  Clone ID: PAT_MRT4530_102521C.1
ttaaccccctgcctcacctcgtttccttgcggaggtgaggaaaaccttcaccaactttcccgggacatccacaagattttggaagctcgcgggcaacacaagatatccaaagtactcaaccat

SEQ ID NO: 2779 - DNA, 316 bp, Oryza sativa
  unsure (1)..(316): unsure at all n locations
  Clone ID: PAT_MRT4530_102522C.1
gtcccctctcctcctcgcctctcgcctccgcggaggcggcggctgcggctgcggcggcgccgctctcctccaccggacgcgccgnggctttctcgcgccgagcaccaccaccacccagacgacgaggacgagtttcgcggcgataagctggctcgggaagctggggctgggcgggctggggggaagcccccgggcctcggcggcctcggccaaacttgcgccaggccccgatgaggaccgacccggcgccgggaaccaagttccgcaattcggaatcctagtttctattaggttctaattaactagctgggggggg

SEQ ID NO: 2780 - DNA, 177 bp, Oryza sativa
  Clone ID: PAT_MRT4530_102523C.1
atggcgagggtgcgcgcctacacggcctcgagaagtccgtcgccgagagcgacggaggggagggctaggagaagtgatgtctcgctgaggatagagtactacacgagtgagctggacaaaaacaagagtgtagagattggcaacgggccatacatagcaggcacacgctcgatctga

SEQ ID NO: 2781 - DNA, 384 bp, Oryza sativa
  Clone ID: PAT_MRT4530_102524C.1
atgtgcaccgagggcgaaaagggcaagcagaagagacgaaaccagcagagggagactggacgcagcagaggccatactgaaagaacccagcagtctgtttgctcgtcggtgttcggcatcaatgctttaaatgttcagagactacatggtatggaagaactgggaaattgctttgtcaaggcagttagagactggcgggttcaggtgatgcgtgaagggagctgcgacggcgacatcagtggaggaaagaaccgaggccgcgccggctgccggcagctggcgatggagcttgtgctcgacggcggcgtcgaagctaacgaattctcatgtggttcaggaaatgcatttttaacaggagtatgttcgaccggttcagcggcctaa

SEQ ID NO: 2782 - DNA, 306 bp, Oryza sativa
  Clone ID: PAT_MRT4530_102525C.1
atggggaatccattttcgacgttgtggaaagtggatgagaactatgtgatggctagtgcagctaaagtgcagttgggagtagaggcatgccttaatggtggactccacaatggtggagatgaagggaaaagggagggaaaccctagcttcggcgacacgaggaatcgacaagagattcccactagtataaagctcgacatacaaatataccacctcaatggtggagatagggcccggccagcgcgggcaagtgcccaggctccaccactatgcagcagtttatcagcacttagttacaatgtttag

SEQ ID NO: 2783 - DNA, 396 bp, Oryza sativa
  Clone ID: PAT_MRT4530_102526C.1
aggacgcgttcgtaaatattctccaggtggactcacaggacagagcatttacaaaagattcagaggaagactgggattccttacaaattcatgctgtttatttgatgacgaggacagaaatattggatctatatcaaaaatgggagtgacaagcgtgctgttggagaacggtgtgaatgttgacatgttgaagatgagtgtgagcaactatgccacagatgttgctgcctcgagcacaagtaaagatgaatagcctcattgaacgactagaaccaacagacaagaaaaacatataaatgtaagttaagcatgcatttctaagaatttatattgcccttgctcatgtacgagatggagtatttgagtacaggataacttttgagagcaagtctttgc

SEQ ID NO: 2784 - DNA, 321 bp, Oryza sativa
  Clone ID: PAT_MRT4530_102527C.1
ttgtttttttttttttttttgttttttttttttttttttttttttttttttttttttttttttttttttttttttttgggcccaaaaaaagttttttttggaacggggaaacattaattcccccccttttggaaaggtcagggaagcatccctttttaggttttttcccctccctaagccctaaaaaatagagggaactgggtggaacccttgcccaattggatggttttttcaaagatttttggccccctggggggatgaaagggggctttcccctttttggggggccctgggaggggcgggaaaaccctcccagggggg

SEQ ID NO: 2785 - DNA, 138 bp, Oryza sativa
  Clone ID: PAT_MRT4530_102528C.1
atggggtctaatttcgccccgcatctctactcagggccgggtggagaagtcaggggtcgggggaggtgtcgttccagcccaacccacccgacccgccccgttgccatccctagtgctgcaaattggaccaaggagtag

SEQ ID NO: 2786 - DNA, 300 bp, Oryza sativa
  unsure (1)..(300): unsure at all n locations
  Clone ID: PAT_MRT4530_102529C.1
cgctcatggacggccaggacatcaccattgacgtnncccgatttcaggccagtgttgcagcaagctctcgacaaccttgccaccaagtagattatgattacattttgttcctagttcatctcatcacattcacattcttttaccctcntcttttccatctctcgaagattatatatattgaatgcacacacttgcaactatatactattacactgtaattaagatagaattttaatgggcgaatacaaaaattgagagaggagattgtctgttaaaaaaaaaaaaaaaaaaaaaaaaaaa

SEQ ID NO: 2787 - DNA, 575 bp, Oryza sativa
  unsure (1)..(575): unsure at all n locations
  Clone ID: PAT_MRT4530_10252C.1
ctcaacttatagggaaacgctggnaccccgcaggtaccgtcccggaattccccgggtcgacccacgcgtccgcggacgctggtctcgttaatggtttgtacttggttggctattcatgtggacctctttagcaaatggggtcgtncagtcaagctagcaaggggttatcggaaggttccctgctacatgaataggatgcacccggttattcctggtggccacactgcttctgtactacttgcaagtgactaattcttgttgtgtgctgatccttgtgcctgctgattccttgtgacattgaaaaaggcancnattctaggaaaatatttagacggattatgtggtgttagcaccttactttcagaatattatgcgagagatgttaaacccaagcccataatgagccaaaagataatatctgagcgccgaacttctggatgttttcgtcctcatccattttggatgaaagtatatattgaatgtaattaaacgatgatggatttttgagaaggccagttcctgtgcacgataaatgaaaaatccatttttgtttgcaaaaaaaaaaaaaaaaaaaa

SEQ ID NO: 2788 - DNA, 3245 bp, Oryza sativa
  Clone ID: PAT_MRT4530_102530C.1
atggcttcgcattaccaggctgccaccttgatcgcgtcgccgtcgtacccaaatgcaatcgcttggtcgactgagaacctggtggctgttgcctctggtcaccttatcactatcctgaacccatctgcactggaggggcctcgggaactggttgttcttcgtcctagcgacccatttcccataggagtggttaacagagaagatctctttgaaccatgtataatgcccacttccttagcacgtgaaactgaattatgcgctcgatctatttcatggtctcaacaagggttttctcctaactccggttgtctgttggctgtttgtactgttgatggtcatgtaaagctttatcggtcaccattttgtgaattctgtgatgaatgggttgaggttgcagatatatctcgattgctgtttaagttttacaaaggtatagaatttggggaaaatgatggtcctagttcacttcctcaggaaaaagaaaatactgaacaaaaccagcaagtcatgtgtattggtaaactgcaagagcctcttctgagcatgggtacagaacggagaaaaaggaaaccagcaagatttgaaggttttgtttatcatgaggataatggtggcgtagatgctccaatggatgcggactttttattggatccaatctctaatttaaagaaaaaaacattgaagaagcgcagtgtagatgctccaaaggatgtggactttatatcggatccatctaatttaaagaaaaaaacatcggagaaggacgatgtagatgatccaaaggatgcagacttttcattggatccaatctctaatttaaagaaaaatacactgaagaaggtcacgagacctggacttgacgatgctgtcagaaatggtcagggcaacactcaaaatattcagacaccatcatactgcaatggagaagacaaatctctcccacttattacggcaaaacagtattcatgtcgtgaagcacttttgtcttctctcgtagttgcatggtctccagttctaccatcacctgacagaagttcttatttcacgggacattggtgcattcttgctgttggttgcaagtctgggagtgtttccttttggaaaatacacaaacctgaatactacacaatagacatcggcatggttactagagatccaatgctgatcggggttgttcaagctcatttatcatgggtcactgccataagttgggaacttttttcctcaggctcttcaaaacctttgttgcttttggcaactggatgctcagatggaagctcaaagatatggctgggtgatattgaagggttaaatcaatgtacatgcgcaaaagaagtgcccttgacattagtggctgagcctcccctctttattgtcgttaagattttaaaatcaaacatggttatcattgggtttattttttaccttttagaagtcccgccaacagtcgtgatcatgttgtttaacgcatgcaaactctctctgttggtcactactgattcattagcaccagtctcgtcaatctcattatctgcaccagctcagcatcaagactcagttaatctggcaattggaagagcatctgggtcactagaagcatggtcgtggaacatatctggtaacaaaattcagaagattcatgcatgtgacgctcatgatcaagtggataattctgcacattgttggatgttcaacgaaaaacatctagaagaaattcctctgcacacagatggtccggagctgaaagagtccgtagatctcacagaagtatccgatcgatgttatggccttgcactagcacctggagaactaatgattgctgtggtgcgcagcttggactcaaacttgttaaatcagatgtatcaggccaggacacaaaaggcagtggttgagttcatttggattggtggtcagttccttggtattccattggacaatagcgttatcctcagtcttcagtctgccgccttatctgagactaatttcttgtggtggggatccaacattttttggtcactgaagaaatatgagaattgtgaaacagtgcttgtcttatgggatctcattgctgcactacaagggtttaagaaatctgcacctacctttcttgagacattgatgcataaatgggtgtcaggtttgttttcagatgatccacattgtgcttctatcgacatcccatcacattcaattcacaacatgtccaaagtcagctcgcggaagttgcacttgctgaatatcgtatgtaggaaagtaatgcttagtgatcaaccgcagtattctcctggtgcagaaaaaggtaatgatgtaatggctgatttgtggaacaatcttctggtaagaagtgaaagggagctgcaagagaggcttgtggctttcacttttgctgctgtcctcaaccgaacagcatatttgctcaagggtgcccctgctgaaaacagctggtttcctgttggagttgcccagatggactcttgggcatccatgaacgatggagaagtgagggatgagctcaaatttcttagaacgaggatcaatgatctaggagacaggatcaactcagtgtgcgagtactcagttgaagaatactgcacctactgcaatgcaccagtccccttcgagtccgcagatgttgccatgtgcagtggtagcaatcctgctactcccccagctgaagctcacaaattgtcaagatgcacagcgtcgatgcggctgtgccctgttcttcaaccaacatggcactgcgcgtgttgcgggaggacggtcgacaagctgctgccggaaatattcttcaccatgcccacatcattttgggatgtcactcatggtaacgaatcgcttgatttatcagcgccggccgtcccattttgccccttctgcggcatactgctgcagaggataaagccggagttccttctctctgtctcaccggtatagaagctagtgacactaggcagcttccagctgtaagttgtaatactgaatacgtcactaatgcactttgaatttgttgttggtggggggctgcttctaaaaacatgtgcttaaaataagcatggctggtttgcgctaggtgtggtggtgccatcataatgtaacaacccgtgtaacatgtgacatctgtaactcttggcaataaagcgggcaatatatactacttgatgtgagaatatgagataccaaaaaataaaaaaaaaaaaaaaaaaaaaaaagggggcctagtgccgaattcctgcagcccgggg

SEQ ID NO: 2789 - DNA, 2577 bp, Oryza sativa
  Clone ID: PAT_MRT4530_102531C.1
atgaatgatattatggtttttaatgaattgatcagtaacattgaccttcaggaattgcctcttaagggcagaacatatacttggagtaatatgcaatcacaaccacttctgcaacaactagactggttcttcacttccccctcttggacagttctctacccaaatacaatggtcactgctctgagtaaatgcatttctgaccatacaccatacccctctgagaccacagttccaaagacagacattttcagatttgaaaatttctgggtagagctcccaggattcatcgaagtagtgaaacttttctgggatatccctgtcagagcagacagtcaagggaaaatcataaatggaaagtttaaaaatctcagaagaggactcaagatttggagcaagaggctctcaaatttgaatacactgattggtaattcacatgaagcaattgactttttagataacattgaggagcagagacctctctttatccatgaatggaacttcagaaacattgtcaaaaatcacattttgaaacttcttcattacagaaatattttctggaagaaaaggtgcacaatgaggtgggtcaagtttggtgatgaaaacacaaaattcttccatgcttcagcaacccaaagatatagacagaacaaaatctcccatttaactctaaatgatggcaccattattacttcacatcaggaaaaggcccatgcctttctaaacttttacaaaggaagaatgggaacctctgaaggaattcaaatggcgatcaatctgactgagctgattactcctcttgctggcctagaaaacctatcaaacatgccatccaggcaagagcttgaatctattatgaaggcaatgcccattgataaagccccaggtccagatggtttcaatggtatgttcatgaagaagtgctggaatatcattgctgaagatttttacaaattggcaagagagttctttggtttacagtcctcgatccaaaatttaaacaactccttcatctgtctaatcccaaagaaatcttctccagaaactgcaaatgactacaggccaatctctgttcaaaatatgagtatcaaattcttatctaaaatcttggcagaaagactgcaggctgttattcttgatcttcttcatgaaaatcagtatggcttcattaaacagagaacaattcaagattgcctggcatggacttttgaatttctccaccagtgtcatcaaagtaaaaagcaaattgtgattctcaagatagattttgaaaaagcttttgactcagtggagcattcttccattttagcagtgttgaaagcaaagggtttcaatgaaacttggctcaaatggatatcagacctgttaacaacctcatcctctgctgtacttctcaatggaattccaggaaagaatttcaagtgccaaaagggtgtaaaacaaggagatccaatttcacctctcctctttgtcttaactgctgatcttctgcaatcaatgataaacaaggctcatgatacgggtattctttccaaacctattccccgaccggacaccaaattcccaattatccaatatgcagatgataccctgataatcatgaaggcttgtcaaaaagaaatttttagtcttaaaggcattcttcagtcttttgcttcttccacaggcctaagaataaactttcataagtcttgtatgattcctatcaatgttcctgaggaaaagactgaaatccttgctgggactgtggagattatgggtaccccatacccacacggcatggtctcgtgcgctacccccttttattattgccgaattcatgtttcgacagggacctttggatgtaacattggatctttgccattcacctacctgggtctgcctgttggaactacaaggcccaaaatcatagactttgtccctttaattgacagagtagaaagaaggttgcctgctattaccatgtttctaaaccaaggtcaaagactcactatggtaaactcagtcttatcctccctccccacctattacatgtgtaccctcaaaatcccaaagaaggtgatagagcacattgatagagcaagaagacactgtctatggagaaaatcaaatgaagttgatgctaggtctctttctctagaagcatgggataaagtttgcaagcccaagcacaggggtggccttgggataattaatttggaatttcaaaactgtgctcttcttatgaaacacttggataaattctacaacaaaaggggactcccatgggttagactgctatggaatgcatattacaaaaacaaccctcacccacgacatgccatgcaagaaaaaggatccttttggtggagggatgtttttcgtcttattccaatcttcagagggcttagtgcaattcaaattaacacaggagattcaaccctcgtgtggaaggatccttggacagacatcatacctcagtttgccttcccgacgattttctcttttgctgccaatgaagacgtatccattcagaagttcatgcaaaatgatctagaccagaatttcttccttcctctctctgctcaagctctacaatag

SEQ ID NO: 2790 - DNA, 880 bp, Oryza sativa
  Clone ID: PAT_MRT4530_102532C.1
gaagcttcagctccactcccacaggcagctcaactgggatctaagccaaaggtcttctccttctggatcctttttattcaactgaggcttgatgattattgcaaggtgagtacatggaatacttcgcaagccacacaacaaatatgcaagtgtacaaggataccaaaggatggcatagtattggctcatttgcaaaagcagcattttgcaatcatttaggagaacgaacaaacgctccttcgaaacgaccaaaaactaaacctagaacgcaaaacgaggaaaaacggccagctacggcaaatgatagcacagcggcgggaactgatgacaccaacacgaagaggagagcaagacggtccttaccgacacttacacgacaacgaaaggcgaagcttcgagcggcggcgagatcaggacgacggtggcgacgactttacaacaatctccagtggagacgagagggcggtcgggcttctcctcactgctgcgatgccgacggaggctgcggcgtggtccggcgaccacggagtcgacgatggatggcggctggagaggcagcggcaacggcggctctcgggttcacgtcggcgagtggctgccgacgagatttggcgcaagggaaatggcggccgaggtagtcctcgtccttgcggagcagatggaggtgacggcatagggcggcatggcgcggctggagtgacggccggcggcggagagatgaggctatgtcacagccgtgaaggccgaaccgttgccatgttttgatctctggcgaagctttgccgtcgactccgtggtcgccggacctcgccgtatccactgtcggcatcgcagcagtgaggagaagcccggcagccacttccgcgaagacgcaagccat

SEQ ID NO: 2791 - DNA, 792 bp, Oryza sativa
  Clone ID: PAT_MRT4530_102533C.1
atggacgagcttgtactctccccttcctccttctccgccacggcctgcttcccgacgcttgacttcgagttctgcgaggtccccgaccaatggctgctgggactcggacacgacgagctcgacaaggatgccgccgcctccgccttggcggcggcagcggcctcgcaatcggcgagcaacgacgacgtgcccaggaacccgcccgccacgacgacgacgacgaagcggcgggggcggaagccagggccacgctccggcggcggcggcgcgcccccgatcggccacgtggaggccgagcggcagcggagggagaagctcaaccgccggttctgcgaactccgcgccgccgtgcccaccgtgtcacggatggacaaggcgtccctcctcgccgacgccgttgactacatcgccgagctgcgccgccgcgtcgagcggctcgaggccgaggcgcggagggcgccgctggctccctccgctgccgccgccgccgcctgggccgcggggctgggcgccggcgccatcggccgggatgatctcgtggtgcggatgatcgggcgtgacgccgccatactgcgcctgacgacggcggcggcggcggcgcggcacgccccggcgcgcatgatgtgcgcggtgcgggcgctgaacctggcggtgcagcacgcgtcggtggcgcgcgtgggcggcgcgacggtgcaggacgtgatggtggacgacgtgcccgccgcgctccaggacgaagcccgcctccgcgccgcgctgctgcacacgctgcagctcgccgacacgacctag

SEQ ID NO: 2792 - DNA, 564 bp, Oryza sativa
  Clone ID: PAT_MRT4530_102534C.1
atggcggggaggcagctcggtgaggaggagtggcggcagcggttcggcaaggaggaggacgcgcagcggggaggagcggcggcgtggaggagcgcccccttcggccacctcacctccttcgtatcccgcatccacaatcgacgggcgaaggggcggcggcaccgggaggaggaggcagcaagcaggcgagatctcgtcgacgaggtggttgtcatcgtcgacgaaggcgaccgcggtctccgtagcgatggcgcagcggaggaggggcacggcggacagggctgcctcgtggggacgcaccgtgaggtcgtcagcgtgcacaaggccgagggaggagacggagcggcctccggcgatgtccttcggcgacagcggtggcagattggagggggaaacacggcggtggcagcaggtcctctccccgtgggcagcggcgatgggggaggagctcgccgggaggtcgccgcttcgccgcctcgccgagaggtcgccgcgtcggacgaggaggagaaggggcggggaggagtaggggcggcaccggcgtcaggcgggaggcggcactag

SEQ ID NO: 2793 - DNA, 2703 bp, Oryza sativa
  Clone ID: PAT_MRT4530_102535C.1
atggagctggttacaggggtgatgggcagtctgctccccaagctgggtgagcttctcaaagacgagtatgacctgcagaggggcttgagagagaagatcaagtctctctcccgggaactcgagagcgtgcacgctgtcctccgaaaggtcggcgcggtgccatcggatcagctcgatgagctggtcaagctctgggcacgtgatgtcagggagctgtcctacgacatggaggacattgttgacatgttcttcgtgcgcttcaatgacggtcatgagtccgatgacccacgtccagtgagcattgatcctcgccttcaggctctgtacaaaaggtcaacagagcttattggcgttgatggaccaatggacaagatcataaacatgctatcaccttggaatgatattcatctgtctgataagaagaagatcatctcaattgtaggatttggaggactaggaaagaccacccttgccaaagcagtttatgacaagcttaaaccagatttcgattgtggggcttttgtttcggtcggtcggaatcctgacatggaaaaagttttaagggacattctgattgatcttgacaagcaaaagtataagcattcaattataatgacattgaatgaaaggcagctcatcaacgaaatcaaggatctagtcgagaaaaagaggtgctttattgttgttgacgacatatgggataagaaatcatgggaactgataaaatgtgcactgcaagatagtaattgtggaagtatagttgtcgcaactactcgtatttccgaagttgccatgcatgtcggtcatgtttacaaaatggagccactttctcttgatgactccaaaaaattgttgtatgcaagattagctggtgctcaaggcaagtgtctgaatataccaccagctgtggcatgtgaaaaaattttgaacaaatgtcatagtgtgccattagccataactacaatagctagtttgctggtgaacaaaccagaagaggattggtctgaggtgtacaattctattggttttggtcatgaaggcaataatgatgtagagaatactagaaggatattgtcttttagctactatgatctgccttcacatctaaaggcttgcctattgtatctaagcatattttctgaagatgttgagatcgataaaaatattttgatatggaaatggatagctgaaggttttgttcaagacgaacaagcagcaggggtagagttatttgagcttggagagggttgtttcaacgagctgataaacagaaacatgatcatgccagtggaggtacaatatcaagggtatcaatctaaggcacgctataatgaagggtatgtatatggttgccgtgtccacgatatgatgcttgatttgatctgttcattgtcgaaggaaaaaaattttgttaccctggtggacagctatgagcaagtggaacttccgctgagccatgctcgcaggttagccatgcagagtatgagtattaaagagataaaccgtcttcagctgcctaatatgggcatggagcaagtgaggtcctttttggctaatcgttgttatggtattagtttggcattctcagactttcgagtgttacgtatattagctctagaatattgtcagggcaaaattaatttgtcgcatttcaggagtttatatcacctgaggtacctggggctagtcaatgcggaaattacagagctccccaaggaagtgggagatctgatgtttctccagacattggatctacgagaaacttctatactggagctgccagaatctgtgggtctgctgacacaactgttatgcctatatgttgatcatcgtacatgggcgccagttgatctgatcgggaagctgacgtccctgcaagagctgtgcataaggcctgcttatgcgtacgacaggttctacgatgacaaggccaatggtatgagacagtttgtgaaggcgttgggcaggctgggagaattgagggtgctccagactcagattgatatattggatgatagcatggagaaagatttgctagagtctctagacaatctgcagaagatacggtccttggaaattttgggggcatcacgagggttgaacgtcgaatggactagaacaggattcatttcccctaggcatctccagcgcctgtatttggaatgccttgagttttctggactgcctgcatggattaactcgtcacttcttccaaacctctcctatctaaatatgacaatggaggttgtgcaagagcaggacatggaaacccttgggatgtttcctatactctgttacctaaaattatattcgcgttgtacaaagctagtaagctttaagcatacaagcaatgcaggctacttccagaagttgaaatccttcaagattgttggttcatcagtcaggtttgatctgagtggctgcgacatagaatcttctttcatgccaagccttgaaacctttgagactgatgtccatgtacgcttcctaaaagatgcgaacatgcttggtttcgacaagcttggcttggagaacctccctagttcgctaaagagaatcattgttgtaatctgctgtcgagatgccagtggtgcagaggttgaggaagcacaggcggcattggagcatgcaactgacagccatgccaacagtcctaaacttacaattatgagatatggagtacaaattaaacggcccttgtga

SEQ ID NO: 2794 - DNA, 1140 bp, Oryza sativa
  Clone ID: PAT_MRT4530_102536C.1
atgggtcaagttgcaaagctgggggagattcccatcgtgcccttacatattggacagttagattcaatctggtaccgtaccagtaccttgaggggtacacttgaggacggggaagaaatagcagtgaaacggctttcaacaacctcctcacagggatttcatgaactgaaaaatgatcttgttctagctgccaagctcgagcacaaaaacttggtgcggttacttggtgtttgcttgaaagaagaaaaactacttgtatatgaatacatgcctaacataagcctactagataccttccttttcgattctgataaacgacaacaattagactggaggaaaaggtttatgataatttatggaattgctcgaggccttttatatttgcatgaagagtctagccagaagatcatacatagggatcatacatgggaaatgaaccccaagatctcagattttggccttgccagggcatttggtggagatcagtcaaaggatattacaagacgacgacctgttggaacccttgggtatatgtcgccggagtatgcatactgtgggcatgtctccacaaaatcagatatgttcagctttggggtgattgttcttgagatggtgactgggagaaggaacaacggcatttatgcttccacaaggacagattcttccgaatgcatggactccatatatctactgagctatgtatgggagaagtggaggacacgatcgctggcggacgcagtggacgcgtccctgggtggtcggtaccgtgaaaacgaggtgctcagctgcgtgcagattgggttactgtgtgtccaggagaatccagccgataggccggacatttcagcggtggtactaatgctgagcagcaactccatgtcgctgcggactccttctaaaccagccttcttcttcggctccggcggcctcgccgtggatgctggcgccggacatgtgctgttgggtactgatggtacagacgacattgctgacgtcggcaataagcagcagctatcacctaaccctgtttcagagacactagtacagatccttccatctgtgacgacccctaacaagactggaatttgcggaccgtcacaaggaagtaatctcaatcgggccggagtttcgcccgattga

SEQ ID NO: 2795 - DNA, 1072 bp, Oryza sativa
  Clone ID: PAT_MRT4530_102537C.1
acggcgacatgtgcgagccgggctccgtcgactacctccgccaccgcggcatggacttcaacgccctcccatggtcgggcgtcggcgccgccagcctcggccgcctgctctggagctccggcctcctcgccgcgcggccgtcgtgggccaccttcgccggggcctaccacgtcgcctacttcgccaggatcttgatgctcgccgtcgccgtcgccggcaccggcggcggcggggcggcgaggcggctccccgccgacgtcggcgccggcagccgccgcaccatctccccctcccgcaccgcgcccaggcacaccgcgcactcccgcccgacgccgctcgccgccgtcgcgccaccgtcgtcggagcttccaactacataagcgtaggccggggggagggcctccacagggaacggctcgccgccgccgctttcgccagcagcgacgacgacgaccgcgccctcgccgtcgacgtagccggagaccgcgtcgcgctccctccatctccggcaccgccactatcgctcactcgtgcgtcacctcgtctcctctccgcacgcgttggcggcgccggcggcgcctctcgccgcccgcattctgccggcctcagccaccgacggagcgtcgcctgccctcagcccccgccggccgcagccccttctcctacgccgacgagcttctcaaggcgttctgcgctgcctttccttcttcttcatcgtcgtcgcctgcgccgccgccgacgcagccgcagccagagcagcagaaaccggtgcttcccgcgtcgcagccgcagccgcagccgccgccgccgccgcctcctctccgccaccgcgctcgcccgccgacgccgcctcgccctgcggccgccctcccattctcccgtgtctccaccgccgcatcgcccatcttcttctccaccttcctcctcgccatggcggtctccgtctactgctgcctcctgtgcagagaccgagtccgctcggaccgcgacgacaccggcgccgtcgccgagcgcgcacgtggcggcggtatcgtcgccccgctccccgtcgaggccctccccccggcctacc

SEQ ID NO: 2796 - DNA, 288 bp, Oryza sativa
  Clone ID: PAT_MRT4530_102538C.1
caggcgggagcccggcctggtggcgctgatccaccacaccgtagccgcaggggttaccggccgtgacagcttctacatattacggccagccacaccaaccagctgccgatccacaaagcgctacatggaggcgagcgcgactagggtgacatgcacaccaaatgcggcgtagggctggcagacggcaagcgggacgcgcgcggtgacccggcgtacgagcgctcggggggcgagggcagcctacggcggataggagtaggcagcatctgccgacactaccagcaccga

SEQ ID NO: 2797 - DNA, 516 bp, Oryza sativa
  Clone ID: PAT_MRT4530_102539C.1
atgccacttcagcacgctggcctctcccttcctctcctttcctctcttctctctctttctctctctcactcctctctagacttggcaggccggtcgacggtggggaggaggtcgctagcgatgcggcggtggagacacgggagaatgggagggcggccgcagggcgaggcggcgtcggcgggcgagcgcggtggcggagaggaggcggcggcggcggcggctgcggctgcggctgcgacgcgggaagccgaaggcgacggcgtgggtgagcgtggaggcaaagtgaagaaagctcacctcctcttggatctaggcacgccgcctggcacctgcctcgcggccgccagcttcgccttggccggagaggccgtcgtcggggctggcggattctcctacaccaccaccaccaccggtttctgctgctctggctgcggctgcgtcggcggcggcgcaggcgacgacgatgaagaagaaggaaaggcagcgcagaacgccttgagaagctcgtcggcgtag

SEQ ID NO: 2798 - DNA, 705 bp, Oryza sativa
  unsure (1)..(705): unsure at all n locations
  Clone ID: PAT_MRT4530_10253C.1
gttctttttcgattgggtattcctctccttttgtatctctttatccaatttcggtctcgattagttcacaagattgaatggccaagtcatggaaaagccgttattcgattgttttaaaagaatgttgagccgggcccgggtatgtaagttcagcgatgtacaaacaaggattgatttgacttcccgcacctaggttggttgngtaggttggaagaggaatagaatctcattcatgtgttcatgctagcagaagagcggatccccacacataagactcttttctcttgaaattccgaatgtaaatgattcaaagaaagggtggactgcagcaatagcaagagatcagcgaacgaagcggagaatgatcacaattaggtcgatcctaccatagccgagtctacatccaagacctgacacgatgaaaaataagattctttctaaaagagctaagaaaaggagtacgaggactagctcaacgtatacccgcacgaaagacttgaaagagctcacgcgtattatgcctaccttggctactggtgaagatggagtcgtaaattgacttaaccaaagccatacctgattgcctacgaaggtcttaagtctccgcacgcccaacacctacccctacctgtatccttaacaagggtcgggatttcccacgcataatactatctaaaaaaaagattaatgattttgggatggcaa

SEQ ID NO: 2799 - DNA, 558 bp, Oryza sativa
  Clone ID: PAT_MRT4530_102540C.1
caccgcttgtgctgtcaatgataggatcacctgcctctcacctgtcacggtactgtgcatatctgctatcatctgctcccgagttgctgccagatgataaggcatggttgaagagattgtataaatctgtcaagaagatcaccaagccactttttagcaaaagcgatgggcctatggaatttgagcgcttacttcaacagttggctgaaagttcccatagtaacactgagttgaagaacggggttgcactgggagtgcagttggtggatgaaactcaggatgcagaggagggatggagggtccttgctgggttctggtctgacatggtgttgtacattgctccttcagacaatctaggggctcatggagaggccattgcacgaggtggtgaactgataacaatcctctgggcgatgctcactcatgctgggatcatcagtaggcccagaacagacaatgctgtttaactgggcaatgcaagttatgtttctccaagatgattatgcttttattaacgctataatatttatggttaaaaaaaaaaaaaaaaaaaaaaaa

SEQ ID NO: 2800 - DNA, 1158 bp, Oryza sativa
  Clone ID: PAT_MRT4530_102541C.1
atggaggcggcgagatttggggcggtgggtgagacgagacgagagtgcgagacactcccccccgatgtggttggcgtcggggagaagggaagggagagcggggcagggaagcggaggaggagctccagcgccgaggccctcgcgctcctcgtcgagctttcctctggcttagcattgtgggcagcgagagctggtggcgacccacacgctgccgctcgccaggcgcgccgcggacggcggcgctcgtcgcggtcgcggtggaggctggaggcggcgccgacgcggacggcggcggtcctcactgccgcggcggaggctggaggcggatggcggcgctcgtgggggacgctgcggaggcgggaggtggcgccgaggcggacggcagcgctcgtcggggccgcggcggtggctggaggcggcgccgaggcggcgctcgtcgggacttgggaccgcggcggaggtgggaggcggcgccgaggtggaaggcgactcgatggatggggtggggactggggatggatggaggcggcggtgctgagggcaagagatcgacgagaggagcggagggaggaggaggagatgggcggagtggagcaggagcagctgctcagcctgggcgtcctcatcgacatcgtcgacgagcagtggatgcgcgacaccctcccagccgacgatgtccccgtgccgcccgccatggccgtgaagacggaggaggcggaggatccagcacccgccatgcaacagatcggacgagatggaagcttagatgttgctaggaacaacgaaatcactggtggcatctatatcatgcgcgccgatacaataggatatggcatggtgcacttcgtgcagatgactaacctgacgctaccccgagcgtgctgcgtaccgaaagcccgacatgcaagagccgagaggtccctgtgtcgacagaccaccgcgctgcgcggtggcatccccaccactgcgtctcagcgcccacctggccacctcctccaccgagccgacgtcaactccatgactcctttaagcccagggaagggaatcagaccaaaaaatacagtgacgaagtcggactctgatgacgtgccgtggggtaagaagctgaataggacaaaaaatacgcgcatgcgggcaaaaaagtcggatgacgattga

SEQ ID NO: 2801 - DNA, 738 bp, Oryza sativa
  Clone ID: PAT_MRT4530_102542C.1
atggctaagcgaaactacctcggtaatcgtataacgataccggcgcaaatatttgtggagctatcaaagcgactggagggggtcttcttcctcgtcctcgcgttctgctcggctcggcccgaggcgtgtcgcggcggcgaggcgcggctccgcggccaggggccggggaaggcggccgcgaaatccggcgaggttctgccggcgtcggtggcgccgagaggaggagcgcggcggcccgaccggcgcggcttggcgggacgcggcggcgagctggcagctagggcgcgggagaaccggggcggcgggagagcggtcgtcgctcgagaaggaggtgctgctgccgagctccgcatctgggcaacgccgagcttagctctcgaggttcggtcagatctggcggtagcggaggagctccggcgccgtgagttggccacgcggtccgccggcacgcaccggccgtcgttcgccagcgaggaaggagacagcggtgcacaacagccagcgaaagagcaagcggcgcatggcggccggcgggagaggaggcggagcgcgccaatcgccaggagagaaggcgacgctgcgctgcccttcggccgccgggaatttgaagtgaattctaggccgtgccacgtggctcaatgccagctcaacaaaaatctcggcgccaacattatcggcgctgagacgttatacctcagcgccaaccttgatggcgttgtgcccacggcctcggataag

SEQ ID NO: 2802 - DNA, 778 bp, Oryza sativa
  Clone ID: PAT_MRT4530_102543C.1
ctagtggtggtggttgcgcccggtcgcgcccggggggtcggcccggccggccgcaagggaggagctgcgtgcgtcctcctcctcctcgaacatgtcgccatcgtcgtcgtcgtcgtccgccaccgccccaccccgctctgcgccgccggcttcgcgcgccacagcctcgccggccttctccaacacggcgctccccttcccgttccggtctccctcgccgtcctcaattcgctcccctccccttcccccgccgaccgccgttcccatccacaccaccgccgccgccgccgcccacctcaccgtctccacgcccgacttcgacaccgcggcgggagccctcttcgcgcgccacggctgccgcatgcgtcacgcggttgaggagggtggggccgccacgctcgttttcgacgaggcgacgaggccgatgccgtgtcgcccgccgccgtattgtcgctgccgttcctctgcctcgtgggcggtggccggtgggggagcccgcgcgccgcttctccccccaccgtctgcgcgctgctcctcgccgccctgcgcgccacccctccccgccgaccatccgcgcgctgctcctcagcgcccacgcgccgcctctccccgccgcccgctcgcccgtagctcctccccccaccgctgtcgcgtcgcccatggccgccatcaccgccgtcgcgtcgtccgtcgccggccgccgacgcccttcttctcccgccggttgaggaagggagagaagaggggaaaagggagagggatgaggctgatgtggtag

SEQ ID NO: 2803 - DNA, 646 bp, Oryza sativa
  Clone ID: PAT_MRT4530_102544C.1
cccgggctgcaggaatcggcacgaggtttttttttttttttttttttttgaacaaattgaataatataaattctaaacaataatggagtgtacgtccatcccaatatgatgtactcccatcagacaacagtggtcttgctaagattgtcctgcgcatttcacaccctttaatttttttcccttctttctctctatacaaaggcataataagttattcactactattatatggcttacaagaacattacgctaacagctatcaggaactgaacaagagcacatgtaacctaacaaacactttgattgtgatcatcaaagcgacaaaagactccgcaggtgtcaattccaatcagctctcctgaatctgaaattaataattcgctaactggactagacttgtagccaaatagcaacaacaagggtgcccagataaataagtaggctaagctccagtctgttctggttgacaccattttgtgccgatgtcgcagcaggtctctctggaatattaacagatttattgcatgaagaagacgatgcttgcatagaagatggccatggggcagcaatattatcattcaaatcgcatgtgaaactaatcccagtagctgggtcaaaagatgcatccgagggcatacttggaaga

SEQ ID NO: 2804 - DNA, 4893 bp, Oryza sativa
  Clone ID: PAT_MRT4530_102545C.1
atggcctcgtcgtcctccgttcctgctccctctctccatgggcagtcagtatcggagaaactctccaagtccaatcatgtgctgtggaaagcacaggttctcgccacactgagaggagctcagatggcgggatttcttgatggcactgccgtcgctccggcgacaactctggtggtggcaagcaaggacaaggacgggaaggaagtcaccgagaaggtggccaatccagcgtatgcaacctgggttgcacaagagcaacaggtcctcagttacctgttgtcgtcgctctcgcgcgacatactcgttcaagtcgcaactctcaccaaggcttctgaggtgtgggaagccatagatgcaatcttctcgtcgcagtccagggcgcgggtcctgaacacccgcatggcgctctccaccaccaagaagggcaacaagagtgttgccgagtatgtaagtaaaatgaaatctcttgctgatgaaatagctactacaggaaaacctcttgatgaagaagatctggtctcctacatccttgccggcctcgactacgactacaacccacttgtttcctctgtggcaacacgagtggaacctctgatgtcctcagctaactccatgttgcgtggagggcgcggcggcggcggagggcgtgatggacgcggtcgcggacgcggaggtggcaatggaggccgtggcggttttggccgcggcaacgacaacaagaacaatggaaaccggccaacctgtcagctgtgtggcaagatcggccacaccgtcatcaagtgctggaagaggtttgatacctctttcactggagaagagaaggtggccggcgcagctacctcctacggagtcgacaccaactggtacctggacacaggcgccacagatcacatcaccggggagctcgagaagctctcggtgaaggagaagtacaacggcaatgatcaagtgcacactgcgaatggcacaggtatggatattaactgtgtgggtcatactacaattcgctcctcaaacagaaatcttctccttcgaaatatcttacatataccaactgcgcagaagaacctagtttatgttcatcatttccttagagataatcatgcctttatggaaacttatccccatgtcttctttatcaaggatctggcaacgaggaagctccttcttcaaggccgatgtagaggaggcctttatccacttccatccagccactctacctccatgaataagcaagctcacagtgtcgtcaagccttcaacggcgaggtggcatcaccgccttggccacccttcttttgctgtcgttaatagagtcattagtcagaataatctccctgtaattcctgattctagtcaagcatcgaacctggtagaacggctgcttgaacgcaagatcaaggttgttcagaccgattgggggggtgagtaccagcggcttaacaccttctttcagcgcattggcatagagcaccatgtttcctgcccacacacccatcaacagaacggagccgccgagagaaaacaccgccacatagtagaggtttatccgtttgcttctcttcacactaatgctggcgccaaacttagagctgaaatccttctgcttccatctcacttgcaaccctcctcatcctttggttccgggggcgaattgttggttgaaccactggttaataatcctaaccctgacactaaccaaaatgatgagattagtgcagctgtaatcaactcgggagatggtgatgcaaatgcagcacaaaatttcagcttcaaaggtgcagaaacaaggtcaaacgggcaatatttcatgcaggatgcacagccagcttctagcgcacaaggcagcatggatccatcacatcagcagtctccgtcatgtcagcaggcagcagatgcacgtcagccaacagcaggtgcagcaggcgctgaccttcatgaagcagcctctccggttggtgaagggcagatgcaggaattggagcccgagctgtcttcgtcacatggctctggcacgccgaccggagagccagcccctggatcgtctgcggcaaccaattctggagatagtacacaggacccagagactagcactgaggcgtttgcagtacctgaagagactgctgtcactgcaccagttgggccagtaactcgtgcacagagagggatccggaaacgcaaggagtacactaatggaactgtcaggtatggttttttgatagaaacaggtgaacctgtcaatttgcaagaagttgttagtaatagaaattggaaggttgctatggataaagaatttacagctctcatgcataataaaacctggcatctagttccaccagtacaagaaaaaaatatgattgattgtaagtgggtatacaagattaaaagaaaatctgatgggtcaatagatagatataaggcaagactagttgcaaaaggatttaagcaacgttatgggattgactatgaggacacatttagtccggctactaaagctttacttaaggatcttgagaaggattttgctctcaaggatttgggtgatctccattacttcttggggattgaagttaagaaaaactcccaagggctagtgttgtcccaagagagatatgctacagaagttctgaagcgagttggcatggccaagtgcaagccaaccaacactcctttatcaacctcagaaaagttgtcatcaactcaaggagctgttctgggacagaatgatgccacacaatatcggagtattgtgggtgctttacaatatttaacactaacccggcctgacatttccttttctgtcaataaagtatgccaatatttacagcaacctacggtggatcactggagtgctgtaaagaggatactccggtatatacaaggaacggtaagtcttggactaaagatcaacagatcagcaagtactttgatcagtgcttttttcgacgcagactgggcagggtgtgttgatgacaggagatccaccggaggctttgcagtgtttttagggtctaacttggtttcctggagcgccagaaaacaagcgacggtgtctaggtctagcacagaggctgagtacaaggcacttgcaaatgccacggctgaggtaatatggataagaaaattgttagatgaaattggaataaaacaaccaaatgccgcaagattatggtgtgataatcttggtgccacctatctgtctgctaatccagtctttcatgcaaggactaaacatatagagatagattttcactttgtgagagaacaggttgcacaaaagttgctagacattcggtttatttcaactgatgatcaagtcgccgacggcttcacaaaggctcttcctgttcgacggcttgagatgtttaagaacaatctcaacttggggcgacccgaggcaaagggcatcgctttaatccacttttacaggatttacctaattcgccttctctatctctgtctcgccttttctactctgtctctgtctcatcgtctccctctctacacatggaatcctgacgattcaaaattttggcaggtacgagacacgatgatgtcgtcccgagatactctgcctccgccggatctccgacatggcggcggcggcgcttccgaccaaaccaacagtgccgttcccgtctcagaaactccaatggaagacggcggcggagctccggccgcagcaggtagtagtaatacggcagcaccaccgcaaccaccacgtcttgacggccctaccctggaaagggaattacgtcggtgcaacatcaagcttgggaagcagaaagtctccggtgaagcatcaacggcgaccaccgaaccgccgcgaaagaagctcatgcacgacgggattcgtgccgccgccgccgccgcaccaccacccagatcaccgccgacgaggaggatcatcagctacatggtcaccgcggcagcaccgccggagaggaagaagacggcggcggacgaccggttccgcaacctaggcacctgcagcgcgcaactacgcaggcgcctctcggagctcgacgcgacggagccggagttcgtctgcgagaagacgctgcgtatgagcgacgtccaccgcaaccagaaccggctgctcttctcctgcaagcgcaaggaggacctcgaccaatgcccgatcacccatctcttcaccgacaaggagacgcaaatcgtccacaagaaggacgagatcgcagtggagaagaagaagaagaagaagatcaaaaaggatgagaagaagaaggagattaaaaaggaggaagagaagcagatcagggagaagctggggctgaaggtgacggtgttcgaccagggcggcaacgagtacgggatgacctgcaggtacctcgagtccaatggcggctaccggttcatcgaggggtggggcaagttcgtcgagaccaacggcatggccatctccgacagccagagatggacacgggacgtcgtcgtcaagctgctggcgttccggtcgcggaggctggccagaggcgccgagcagtccgaccaccccgacggccccatcggcttcatcgtgctgcaccacgagaacgggagccgcggccgcggcgacaacgacaacgacaacgaggaggaggaggaggaagaataccaaggcaaagcgccgccggccaacccgaagaaggagaagagcaacggcaaggaggagcatgtagtaagggcgtcgacgtcgtcgtcctcgtcgtcggcggaggcggccgtgggcgtggtggcgccaatgcacgaggtgtcggcggcgccgcggaatatgttagaagaggatgcgtgcctggggatggtgaagctatggagcgacacaggctcgtcgtcgtcctcgtcgaaatataatgggcccgaatcatcagaagaaaaaagaaaaaaagactga

SEQ ID NO: 2805 - DNA, 414 bp, Oryza sativa
  unsure (1)..(414): unsure at all n locations
  Clone ID: PAT_MRT4530_102546C.1
gaacattttcatgtgagcatccttgtaaaaccattgtgcttgannnnnataccaactgaaacgtgagttttatatgtaacttgctttccttgtgcttcaacatgttttggtttgtggcttggtatctcctgaattaatctatataacttactttccttgcagattcaacctgattggaggcaggctttgtctctcaggaaggctatagaagataaaattgccaaaggtgggacattgagaaatttgttccagttatatcctatattattggttttgtattgagctacgtgatggattgtctcacaaatcgaacatttatttatttttcctcattttcactgggacaacaacttattttatgataattctgtctaaacatctgcatgcgttatctgcagatggtctgatcggaat

SEQ ID NO: 2806 - DNA, 495 bp, Oryza sativa
  Clone ID: PAT_MRT4530_102547C.1
cttttcattctgatgggatatgtggttagttgcagcggcacctaaaacatggtctcgcaaagcccttgtggtttaacagtttcatcagttaaatctgtccttagattcgcatgatataaatgaagagtgaaaccatcactgctcactagtctgtcctatcattttttgctgcttttctactgttaaggctcagtttgaatcaaattattgagcggattgttgctgtagattatctgcttgattaaagagataaattaaatattttgataaataaaattaacaaatagcttaaaacaagtgatttaagcaatactgtagaataatgttttttagaaaatatattttatcaaaacttggagcaaataatcagtattgataatatgtaaataatctaaaaagaactaagttagccatgatgttctcaccgtagcaggcagtcatactagcatttattttgctgtgaaggtggccattattactgtcttcttctggcat

SEQ ID NO: 2807 - DNA, 194 bp, Oryza sativa
  Clone ID: PAT_MRT4530_102548C.1
ctgtctctttccttgcatctcctctcctcttctcttctcttatataggccaccgcgaggtcggtctccatccatccatccattccagcatttcttgaagcttgctgtggatcagagaggatggctcacgagatgatgggtggcttcttcggccatccgccgccgccgcctgcgacggcggcggtgggtgaggag

SEQ ID NO: 2808 - DNA, 288 bp, Oryza sativa
  Clone ID: PAT_MRT4530_102549C.1
atggctacacgcgtggcggtggcgctggcttcccgcatcggatttgacagctacgacggtggcggtggcttccgtgcaagaggggaggcggcggttgacgggcggcagcggcgggtggagacggtgcggcccagcggcggcggcgacggcgatggctgcgccctcccctccgcggtgtacagcgggaggagcggcggatgcccggaggcaccctcccttagccagatctggcgggaggaagggctacggagccgcgccgcctcaccgtcctccgtgccgcccgcctag

SEQ ID NO: 2809 - DNA, 1734 bp, Oryza sativa
  Clone ID: PAT_MRT4530_10254C.1
atgtcagtgagccatggcgaggagctcgagatatcgccgtgcgacccgaactccgaggatgaccggcggcggcgcgggatggggtcgtcgctgcggcggaaggccatccgcgcgctccggaagcgcggcgggcggcggcggcccccccgcgtcgacttccggtacccggccgccatgtccatcgaggacgtccgcgacgccgaggaggagctcgccgtcgccgcgttccgcgaccgcctcgccgtgcacgccctcctccccgacaagcacgacgactaccacatgatgctcaggtttctgaaggcaagaaagtttgattcggagaaggcgatgcaaatgtgggcggagatgctgcgatggaggaaggagttcggagccgacacgatcttggaggagttcgagttcgatgagctcgacgacgtgctccggtactaccctcagggctaccatggcgtcgatcgggaaggccggccggtgtacatcgagaggctcggcaaggtgtatcccaacaagctgatgcagatcacctcggtggacaggtacatcaagtaccatgtgcaggagttcgagagggctttcagggagaggttccctgcctgcacattggcggccaagaggcacattgattccacaaccaccatactggatgtccatggcgtggggctgaagaatttctcaaagactgcaagggagcttgttcaccggatgcagaagatagatagtgattactatcctgagacattacatcagatgtatgtagtgaatgctggcagtggcttcaagctgatatggaacagtgtgaaagggtttcttgacccaaaaacttcttcaaagattcatgttcttggtacaaactaccagagtagacttcttgaagtaattgacaaaagtgaattgccagagtttcttggcggttcatgtacatgcagtgaaggtggttgccttggttctaacaaagggccgtggaatgatcatgtcattttgaaggggatgatgagtgatatatcaaatgctgaatcagagtcagatgttgatgagttcagtttatcagctgtcctgaggagtactgactacagtttccttactccagttagcgaagaagttaagggatcagattcttcaactttctgtagttgtgagtcttgtgacaggaagggtctcccagatgtaactcctgaatcttctcagtctgtacaacaatcttctgaaatggtgccaaaccaactggtctctcatgaacattcatccacaaccagatggatgaataatttagggaacatggcaattagttttcatggcactctgactggaaggactttgagcaatttcgttagagtagtaggcacactcatgatcaagatactagccgttttcagcctttttgtcagtagaagaggaaacatgctagagaatgttcatccttctaatgtagaagatgaacctcagcctcgaagtgcaacggaagataacatgagtgcttgtttacaacgtcttgaaaaacttgaatcattatgcaatcatctcatgagcaaacctccagatatgccaaaggagaaagagtgtctactgctacaatcgtttgatcggataaaaaccatcgaatcggatctagaaaggactaaaagagtattgcatatgaccctggtcaagcagatggagatgatggagaccttggaagctatgcaacatcactaccaatcttccagtgtcaggaggagattgtgctgttcataa

SEQ ID NO: 2810 - DNA, 449 bp, Oryza sativa
  unsure (1)..(449): unsure at all n locations
  Clone ID: PAT_MRT4530_102550C.1
ggcgaccttaaccagcacactgcccaccgcagcgtcaggtaacaggcgaggcattgaaacggaaactcctcagaacggcgagcacgctgcgcgcgggatcgtcaccatgaggtgtccgctgaacctctgacacgaacctggcatacccggcgacggtgctcaaagtgcctcgaggacaacgtctgcgtcgagacctacgaggccggaaacaccatcatggaggacgaccgtaagaagatccgcggcgtgccatggaaggctgcatctgagttaccgaacgctggatgctgttctgataccgagcatggagagctcattaggctgatcactggggacgcaactgtggctatggtgagcgtaggaggaccagggaggctaggctccccaccatgatcctgtggatgaggaggctgcgagngataagacgattggtgtccttgtgtcgtggg

SEQ ID NO: 2811 - DNA, 306 bp, Oryza sativa
  Clone ID: PAT_MRT4530_102551C.1
atggctggccgagccgatctcgagcccgacaacgctagtgcgccgtccaatcggcccttatggcagatctgggccgtcggttttgtggaccggcggtggaccacccacgtggtccagaatccagcagttccgacgctcccgtttactacaaagtggttgcagaagttcctccagcgccagagcaaggcaagagaggcactggcgtgtgaggttggcaaaaggaaagctgaaggagttgatattactcaagggtcccatggcccatttgctagctacgcccattggaaggaatcttttgcaagatag

SEQ ID NO: 2812 - DNA, 259 bp, Oryza sativa
  unsure (1)..(259): unsure at all n locations
  Clone ID: PAT_MRT4530_102552C.1
ctggatttggaatttttttctccgccgnctctccgacgactgcctgccgccgncggctcaaccgacatcgccgatccgntctcccgtcgttgtccctnggacgctgaagtctnctnggactgtctcaaccggcatcaccgncgtaccgtacgccactcaaatcgtcacgtatcgtcggtctccttcgacaaactgctttngcgacctactcctcggcctccggctnaaccggcgactatacggagccacgacgtcgttn

SEQ ID NO: 2813 - DNA, 564 bp, Oryza sativa
  Clone ID: PAT_MRT4530_102553C.1
atggagggcattgttggaagagtggaaacgataaagccttgggccgtctggctcgcctctccatcgccattgctgctgctcgctccgcttctcttctcttctcttctgagtgaggcgcagaggtgggagagagtgcgtgtgattggggggaaactgaagaggggcgaggagagatttcagagagtcagccctgattgtctcccgctccccaatggcggcggcggtggcggaggtagccggaagccggcggcggggcccagatcgagcaaggacgacgacgccccggccgccgccgccgccgccgacagcgcgcgtaccagcccctacctcgccgcggcatccgcatcgctcgagtccaagccgcgcactcgcgctcctcctccgccgccaccggcaccggctccggccccgccgtcgtcgtcgtcggcagccgctgcgccaggcaggagcccggcgcgcgagcgcgagcgcgaccacggccaccacccctccgacatctccgaccccacctccccgagctccaccggcgtcggcggcggcggtgctggggggagcggcagcgcg

SEQ ID NO: 2814 - DNA, 282 bp, Oryza sativa
  Clone ID: PAT_MRT4530_102554C.1
atgacctcggcttcggcagcggcggaagggacgaccacggctccggcggtggcggaaagggtcagccacagctccagtggcagctggggaagacctcagctccggtgggggcagcggtggagtgtgggtatggcggcggctagagaagaactcactccgacggcagcaatacacgcgaggaggaggagtaagaagcctgaagatcgcatcaagaaccgacatggacctgcctgtaggatgttgcaaaaagatgagggtgcaaaaggagaggcgtatctgtaa

SEQ ID NO: 2815 - DNA, 1090 bp, Oryza sativa
  Clone ID: PAT_MRT4530_102555C.1
gtatcatgatcgattagaatgtttaagtgaaacttttcaacagaatgtttaattttaaaattgaaaattttgaaaactttcaactctttttatgaaatctttttttttttaattgaaactttcaactcagaatttaaaaagttaccactcagtatttgaaaacttcagtctcacacagtagcaggcaaattagcgtacagcaaaatgaatcaacactagcacttgagtccctagaaagacttatacgaattgataattgcagcgtcatcctgcttccagctaccaaactttgtggattcacatcttcaccatcgccgttatgaaaatggcgctcagaacagaagctattgcaatccgtttcacgactagctttattccgtaaccattaactaggtgcttaagttcacggtatggcggaagctgcctgagtatcctttcgtcctccaggttggagttctcaccactatattccagctgcgatagcagatggaacagctcgattttcttctcctcgacttgtgccctaaggctagcaggttctttgttgctgataccagactccccgttcacagtaggttctgcgtgaggaaaatgccggtcataccaggtcttgacttgtggcctaatgctcgcagggatacgagacagctccagctccacatccacgatatgttttgattgaggcaaatgatcatgctttttattgtttggagcagctccggcggagctgaatgagcggaggagcggcatccggccgccggcgccggggataagcctcggcaacaaccgccgttgttcctctctaaccgccggcgacggcggtacgaaagccgtcgcctgttgaagggcgcgaccgctgaccttcctcgccgcaaatcgaagcgccgccgccatggacgattccgctgcaagatccctgggcggtcggttcctaagctcctatatttactccaattcctcgatccctgctcgcaaccgaatttgggcctccccgaaacccgaagcgccgccgccatacgcgattccgctgctagatccctgggcggtcggttcctaagctcctatatttactccaattcctcgatccgac

SEQ ID NO: 2816 - DNA, 608 bp, Oryza sativa
  Clone ID: PAT_MRT4530_102556C.1
ccgggcggctgcaaggacagcggcggcggggctctctctctctctctccaccgctcgcagtggagctggacggggcgccggcaagacggagcggcagatggtggcgacggctgaggcagccgtggtggcggcaacggctgaggcagctgcgacagcgaggtggcggcggcggttgaggcagccgcagctgtggtggtggctacacgcagtgtcgaccgtggatgagggggaggaggcacggcggcctcggacggctagctgagggcgtggtagacggctgcatctggccggcgcagtagcgtttggaggaggggtcggaggccggcttggtacagagaggcgcagcggatggcagtggaggtcggctcagcgcgagaggcgcgggcggcggagatggaggccggcttggcgcgagaggcgcggccgatggagggaggccagattggcgcgagagacgcgtccggtggaggaggccggctcggcgcgagaggcgcggccggcggtggaggaggcgaccttggtgagtggaggagctgctggtgggtgtggtgcggtcttcggcgcacgaaggctagccgatggagggcgccggtgcaggggtcccacat

SEQ ID NO: 2817 - DNA, 322 bp, Oryza sativa
  Clone ID: PAT_MRT4530_102557C.1
cgggccgggactgaatggctggaccgacgcacgcgcgcgcttgtaccatgcggacgactgcgacggccgagcggcggcgtcgagaacacccggcgcttgatataggtgcaagaggcctacgagacgctcttcgaccccaggcgacgggccatctaccaacgcgccctcgcgcgcggcgtttgacggcttgacttctactacttccggcgcgtggtcctctactactaccaggatcaggaagacaagtctggctggcggagaacttgcggagaccaaatggaggagttgaagaagaggagcatgcctaacgatttagaggaga

SEQ ID NO: 2818 - DNA, 374 bp, Oryza sativa
  Clone ID: PAT_MRT4530_102558C.1
aataaagactaacattagtgtggggttctaccaaactataatcaacatactttctaacacaactaaaacatccttcttttactcttgcccataaacatattcctataaactacacttttaacacactgaattgatgtcatgaagaacagaagcatgacctactgacttgtacactccccaaaatatacaagctgacaagctctttgaacctatctcatacacattatcccatagacacattgactgacacgacacatatccatctcacccctatcaagaccttgtatgctatcatcatatagtctacttcgagagaacgaagacaccatgctacacgccacctgaggatttatcttggctagctagaaaacaac

SEQ ID NO: 2819 - DNA, 437 bp, Oryza sativa
  Clone ID: PAT_MRT4530_102559C.1
tgttaaccataacgtgcattccttaaacaagacaaattttgtggaggatcatggcgacactgatgctagcaaagctgacttgaccaccccatccagagaaattctgcctgcaaatgtacttgattcatctaatgttgccagagggcgaagtcaagaggattatggagccacatgtactcctgatgcagcagctggtcagtcaaccattaatgacaatgtcaccaataataatattggtttgaagtcaggaaacaatgcttcgctcaacatcaacaacaaaagttctttgaaacccttagagaagtcggtactgcctgaacaatattcagctaaccgtataggaccacttcagggggctgatgggagcatgatgagatctgattctagtatcttgacagcacgtaagggagataaaataattgctgatctagctggcg

SEQ ID NO: 2820 - DNA, 253 bp, Oryza sativa
  Clone ID: PAT_MRT4530_10255C.1
atggccgtggcggtggcggcggcggcggcgttggtggtgatgtgggcggggacggcgacggcggcggcggccgtgtacgaggtgggcgacaagaccgggtggaccatcatgggcagccccaactacacagcctgggccgcctccaagaagttccatctcggcgacaccgtcgtttgggaactaaactcggcctactttaacgcgcccacagtccggctggactgcagatcagtactccgtgtagagcagatcg

SEQ ID NO: 2821 - DNA, 279 bp, Oryza sativa
  Clone ID: PAT_MRT4530_102560C.1
ctctccgatccccacgtatggcggctgctgcggcatctgcggcggcggccactgccgctgtggacggtgcgcgtctgctgcagctggaggagcaggcggtgcacggcggcagcatcgcatgggagtacctctgactggacggaaggctacgcgcgcgcctagcgaaggccgtcctacggcttggcctgggcgtcctgaacgactcctccgcccgctcccgtctggcctcagaacagaggacgctgtatgatcatgtggccatagcttccatggattggc

SEQ ID NO: 2822 - DNA, 774 bp, Oryza sativa
  Clone ID: PAT_MRT4530_102561C.1
atgacaaaagctataccaaaaattggttcacgtaggaaagtatgtattggtttgcgtaggaatgcgcgttttagtttacggaagagtgcacgtagaataacaaaaggagttattcatgttcaagctagtttcaacagtactattataactgttacggatccgcaaggtcgggtggttttctggtcctccgcgggtacttgtggattcaaaagctcaagaaaaacatcaccctatactggtcaaagaacagctgtagatgctattcgtatagtgggtttgcaacgagcagaagttatggtaaagggtgctggtcaagcggataccgttggtattgtcctgcgaagagctttacttggagaaacagaaggaacatgtatcacacatgcaaaatttgggagtgtgccacacggatattctacaatagcaggtattgaagaatcggtacaagaaattttactaaatttgaaagaaattatattgagaagtaatctctatggagttagaaccacatcaatttgcgtcaaaggtcctagatacataactgcccaagatattatcttaccgccttccgtagaaatcgttgatacggcacaacctatagctaacttgacagaacccacggatttccgtattgagttacggatcaagagagatcacggatatcacattgaagtcagaaagaacactcaagatggaagttatcctatagatgctgtatccatgcctgttcgaaatgtgaattatagtatttttgcttgtgggaatgaaatgtga

SEQ ID NO: 2823 - DNA, 355 bp, Oryza sativa
  unsure (1)..(355): unsure at all n locations
  Clone ID: PAT_MRT4530_102562C.1
cagactcttgggctggaaaatagttaatttcttttcacaccacccanatagcctccacgtggggtccttcctatttgacgatgtanccatcccactcaactacaagcacatagagggtttttgtgtcaacacctacaccctaataagggggatggaaagccttaccttgtcaaattccactagaaacctacctgtgctgtcaaatgcctgttggatgatgaagctgtcactgtttgcgacacctgccacaaccatgccactaatgacttgactcattctattgcagcatggaattacccatagtggaaactttacatccagactattgatccttatcatgaggacaaatttgact

SEQ ID NO: 2824 - DNA, 5610 bp, Oryza sativa
  Clone ID: PAT_MRT4530_102563C.1
atgtttttttttttttttttgtgcgtaatgcagatttactcttgttttactagataaataaataaagcaaaaattggagtagttttctggtagaaattatcttgttgcgatcctatgaatcagttcaattaaaaccttagattcatactagagccacgatgattgagtctcaagctaaacaaaaggcaagggttcttcgaataagaaccgcttgatgatcatttattgaatcggtgtaatgactcgacaaaatcgagagaaaaaaagttgttttttgggcaaacaaaattggaaggaagaaattttctttttttatttttattaagaactacttgaatttttttcagtctggttgcgaggtctgaatagttaatatgaatcatagtttcatttttttttcttgatccactctatctatttcgtgttccagatactagaataaataatatccgacgaattagaatcatcttgatagagataacaggtgctttctatgtattatcaataggagcaaattctaacaagtcacacactcattattccaagagatactgaaaccaaaaaattccacggcggagcaacccagaatgtgctagaaaagtagggctaatagtagaaaagactcttataattggagaatctaagccgaaatttttaaagaaaaaaaaaacttcaacccatttcgatttcatatattgaaaattgagaaatcttttaataaaattgctatgcttagtgtgtgactcgttagtttttttttagggttcaaaaaggggattaaaaaaaaatagaatgaaccctactatgtaattatagaaaatgaactaataaccaaaccatattgcttcgtattgtcgagatcctaactaagaaacagtcactatatgaataaatacatctagtcataaatgagtaaatctatcatatacgtgtagcaactgcaattttttctttaaaaaaaaataggattctaagttgtgaagcaaaactaaaggggatgtagataaaaggaaggatgatagaaagaaggaagagaaataagaaagatataggattccaatatgtatggtctatgaattacatcataaaaagcaatgtgataaagcatcaatataataaaaataacagagaattcgaaatcgtaatttgattgaaacaagaaatacaaatttcaaggaataacaaagagcgtcccgagttaataaaactgagaaattgactcggaaagaaattttttggaagctccattgcgagattcaaacctaaccattaaaggagaagcagtgggaacgacagaacctatgactggataggattttcttgaaaagaatcccaatacttcattgggtgggatggcggaacaaaccaaaaaaattgtcttatttgataaggttatgaattaacaaataagacaggaaagagtaaatattcgcccgcgaaatttttattgaattagaatactttaccgcgattcaataagagtaaaataaaaaaaggagattaaaaaaaaaaaaaaaaaggaattacaataagtatagattactgataaataaacatacacatctggatatattctagatcctctttcttgactatatattttagtattttaataaattcaatattaaaaaccctaacctttcctattaatgtgtatctatccgtaatattttagaatattgtggaattagagaaatttgcacactttctcatttgattcgcgaggagctggatgagaagaaactctcatgtccagttttgcagtagagatggaactaagagagaaccatcgactataaccccaaaagaaccagatttcgtaaacaacatagaggaagaatgaagggaaaatcctaccgaggcaattgtatttgttttggtagatatgctcttcaagcacttgaacccacttggattacggcgaggcagatagaagcaggacgaagagcaatgacacgatatgcacgtcgtggtggaaaaatctgggtacgtatatttcccgacaaaccggttacaataagaccgaccgaaacacgtatgggttcgggaaagggatcccccgaatattgggtagccgttgttaaaccaggtcgaatactttatgaaatgggcggagtatccgaaactgtagctagagcagctatttccatagctgccagcaaaatgcccatacgaagtcaatttcttcggttagaaatataaccccccaaaaaaagtagtattgaacataaaaaaccaggttcttctttctggaaagacaatatttctttcatccttttgcattgaaataacaaattgaaatcaaaataatatgattcaacctcagacccttttaaatgtagcagataacagtggagctcgaaaattgatgtgtattcgagtcataggagctgctagtaatcagcgatatgctcgtattggtgatgttattgttgctgtaatcaaagacgcagtgccccaaatgcctctagaaagatccgaagtaattcgagctgtaattgtacgtacatgtaaagagttcaaatgcgaagacggtataataatacgctatgacgacaatgcagcggttatcattgatcaaaaaggaaatccaaaaggaactcgcgtttttggcgcgatcgccgaggaattgagagaattgaattttactaaaatagtttcattagctcctgaagtattataaatactagtagacaagatatagatcaaataaaaaattagtagattgtgtttcacgtatatgctttagaatccaaaacgaaaagaaaaaagagaacatgttgattatagaaaaattaggaggaacctagaattagagtcttatgggcaaggacactattgctgatttactaacctctataagaaacgcggacatgaataaaaaaggaactgttcgggtagtatctacaaatattaccgaaaacattgttaaaatacttctacgagagggttttattgaaagtgttcggaaacatcaggaaagtaacagatatttcttggttttaactttgcgacatcaaaagagaaagactagaaagggaatatatagaactagaacctttttaaagcgtatcagccgacctggcttacgaatttatgccaactatcaaggaattcctaaggttttgggcggaatgggaattgctattctttctacttctcgaggtataatgacagatcgagaagctcgactaaacagaattgggggagaagtcttatgttatatatggtaatcgccccgcctatagcggtaatcgccccacctatagttatagtacccaaattctatcttgaacttcctatttttcaaacaaaaatacaacgtttttttatttgaaaataaaaaaaaaaaaaaaggagaaaaaaaatatgacagaaaagaaaaataggagagaaaaaaaaaccccgagagaagcaaaaattactttcgagggtttagttatggaagccctacccaacggaatgttccgcgttcgcctagagaatgacaccatcatcctgggctatatttcaggaaagatccggtctagttctatacgaatactgatgggggatagagtcaaaattgaagtaagtcgttatgattcaagcaaggggcgtataatttatagacttccccataaggattcgaagcgtaccgaagactcgaaggataccgaagatttgaaggataccaaagattcaaagggttaggtttttcttttttttttctagggtaaaaaattcaaagttctaaaattcaaacaaagagacttattttttccaaaagagtaaattcatagtttaagaaaggaatacggaaatatgaaaataagagcttctgttcgtaaaatttgtacaaaatgtcgactgattcgtaggcgtggacgaattagagtcatttgttccaatccgaagcataaacaaagacaggggtaatctttcgaaaaaagaacttgactttctaaaaagtaaaaaaaaaagtacccgcgaaaatgtccaaattccaaataaaaaaattcaagtaaaggatatattttaccctgaaacggatatctttgtatctttttttctttttgttatttctaactcatatttatgagataataaaatatgacaaaagctataccaaaaattggttcacgtaggaaagtacgtattggtttgcgtaggaatgcgcgttttagtttacggaagagtgcacgtagaataacaaaaggagttattcatgttcaagctagtttcaacaatactattataactgttacagatccgcaaggtcgggtggttttctggtcctccgcgggtacttgtggattcaaaagctcaagaaaagcatcaccctatgctggtcaaagaacagctgtagatgctattcgtacagtgggtttgcaacgagcagaagttatggtaaagggtgctggtagtggaagagatgccgcattacgagccattgctactagtgctgtacgattaagttgtatacgcgatgtaacacctatgccgcataatgggtgtcgacctcctaaaaaaagacgtctgtaaaagaattaaacccctttcaagagaaataaacgattcaatgatcaaataataatactagtctatatggttcgagaggaggtagcaggatccactcaaacactacagtggaagtgtgttgaatcaagagtagatagtaagcgtctttattatggtcgtttcattctgtccccgcttagaaaaggtcaagcggataccgttggtattgccttgcgaagagctttacttggagaaacagaaggaacatgtatcacacatgcaaaatttgggagcgtgccgcacgaatattctacaatagcaggtattgaagaatcggtacaagaaattttactaaatttgaaagaaattgtattgagaagtaatctctatggagttagaaccgcatcaatttgcgtcaaaggtcctagatacataactgcccaagatattatcttaccgccttccgtaggaaatcgttgatacggcacaacctatagctaacttgacagaacccacggatttccgtattgagttacggatcaagagagatcgcggatatcacacggaagtcagaaagaacactcaagatggaagttatcctatagatgctgtatccatgcctgttcgaaatgtgaattatagtatttttgcttgtgggaatggaaatgcaaaatatgagatactttttctagaaatatggaccaatggaagtttaacccctaaggaagcgctttatgaggcttctcgtaatttgattgatttatttcttccttttcttcacacggaggaagagggtactcgtttccaagaaaataaaaacaggtttacttccccccttttaagctttcaaaaaagattaactaatctaaagaaaaacaaaaaaagaattccattgaattgtatttttattgatcaattagaactgccttctagaacgtataattgtctcaaaagggccaatatccatacactattggaccttttgagtaagacggaagaagatctgatgagaattgacaaattgacagttttcgtatgcaagatggaaaacagatatgggacactctagagaagcatctcccaatggatttacctaagaataagttctag

SEQ ID NO: 2825 - DNA, 1095 bp, Oryza sativa
  unsure (1)..(1095): unsure at all n locations
  Clone ID: PAT_MRT4530_102564C.1
ggtctcaaaccaattgacattttttatatatacttccagcatggcccggtttcatagcacaaaacaaacttcacattgcaaaatttccattggataatttttcagacaagcaccagtcaaagcaaccacagattatacatctcagatcatgagaccacgcaaacagacggctggacaatcaacaaccaacaagcatcaaagcatttcgcagaagaaccgaaacagcatccaaaatggggtcttgaattctacagttgtgccgaagaatcactgatctcaagggatgattctggggactctcatgccaaatccgcgcttcattttctcgacggttggtgcaagtttgccgagacaatacagctcctcaccagagacttcatccgacactttaccggacatctcaactctgtatgatctaccgggagaatctgggagtcctcgacccacaagtaaatccaaatccttctgctctaagttctctcccattaacaaatacancctgtatttccagcagcgcatttcttgggcataggantaattgagttctggaatattgggcggtatcatgccgaggcaagactgtcccattacaccccagaaaccagcacggtaatcataccagtattcaccaggatagattggtccagctatcttctcagccttcctgaccgcccgatcagagatggggatagccattaatgaaaacctttgctcggccattgcccattccgttgttaattttgaagctcttctttatgagattggtgaaaaatgaatcacccgttttcacggcccgagggtgatctacaggttgtgccacatcacctcgatcttgcatgtagtcaggatcatcatactcatcatccgacaagtcccctatgttcactactgatacatcttttacagtgttctgcttgaaactttctgtcaacacagccttctcatgttcagatcgagtacttctgcttcctttccctgatccatcaactaccttctcagatggcgagtatccaaaatgatcacgacgatgtaaacttggaacacgggtagacacctcagcttcaggatgaagatccctagacccaggggtgtccc

SEQ ID NO: 2826 - DNA, 364 bp, Oryza sativa
  Clone ID: PAT_MRT4530_102565C.1
agtaaacgccacaactcttcggcttcactaaaggcgcggcaacgcaaacgcgtgctccgtacaccgccgccgcccgttcgtgctaccgctcaacgttcgtcgctccgcaggtacaccgcgcactgaccggcgacaacgccgcgacgtgggagaactccatactccatcaacacatgtcagcttcgctttcgcatcccatgatcggcccaatctcggcttcgcgccaacaccaccgaggagctctcacccctgaattcagctggcgcgttctacccttctcgaggaatcactcgcgatcgcactccggcgagactgtactttggattcgtgcgagtcgcgagagcgctcgctgcgtacgctgctc

SEQ ID NO: 2827 - DNA, 355 bp, Oryza sativa
  Clone ID: PAT_MRT4530_102566C.1
tttttatttttttttatccaatcacacccattttctctgcgccgaattcaataaacggggagccccaaatccctaaacatcaatcctccatatccaatgacaaccatcctttaaccataaacttcccaaatacaaccccatactttctcaacacatcacagctcctccacacacatttaccatactcaaaaccaacttaataccacgactcaaaactaaatccttgacacataaaaatcaactccttccactgctgacattcaactccatcctattccaatacaatttcctacaaaaccatcccgcaatcccactcttcattaacctccagcactccaatcaatccccccttcat

SEQ ID NO: 2828 - DNA, 465 bp, Oryza sativa
  Clone ID: PAT_MRT4530_102567C.1
atggccaacccttgggccaggttggacggccgtgatcgcttcaagatccgtgcagtcaactccctccacaccttccactcctcctccccctctcctcctccccttcccctctgtcaggccggcgaggcgacaaacggagctaggcggcagaccggtgcggcgagcgggcgaggcggcggctggtcgcggcgacagctgggcgcggcggcgagcgggcgaggcggtggccgggtgaggcgacggccgggcgaggcgacaaagaagcggatccatagagtcaatggcctcgacgataccgcccaccaccaccgcaagccatccccgccgttcgtcgctgctacctcgagaggcgcggcggtagcttggctcagcggctgctcgccctcgccgctgcctcgggaggcccgcctcgatgacgacgacctcgacgtatggctgacctcggcgagctcgcgacaacgttga

SEQ ID NO: 2829 - DNA, 684 bp, Oryza sativa
  Clone ID: PAT_MRT4530_102568C.1
agaagcattgaaattctatcaggattcttttgcgatcttcaaagagggtgcgatcgtgttaactggctccacactatcaacacattattgaaggcacaatcaacgcaatgtctagagatgatgaaagattgttaacaatatgagggctgccgcactgcgctgctggtccttcggttccccgggctgcagcatcggctcttttggtctcatgctattgatgatgtattatataagattcttactggtggctgcacctcgttcacataaagccaagtcagattttgtgccacaacaagctttttaatatggtgtttcgagaacttgatggatatacattcttatgtgtgggatatacttggaaatctagcagtacattgcaaaaatgagtatctctctgttaggaaagggccagactctgccttgcaggcactaatacattgtatttgctcacttgcagcagatgctatgcagaaaagcaacaccatgagattatccaaggatgtgcatgagccagctttgagggctgttctgatgatgcttctctcacccagtggatacattttgtctgagggacataattctggaggctcagtcaaacgaagaaatgaagtgttaccatggctcatgccaaatctcgacttcgcatgttcactgccataaaattgtactgagcatgagctgtga

SEQ ID NO: 2830 - DNA, 164 bp, Oryza sativa
  unsure (1)..(164): unsure at all n locations
  Clone ID: PAT_MRT4530_102569C.1
gttcagacagctctcctctcctcatacttagcttcactctcttccaaaacctacactaacttaagtctccaagaaggcaagagtcgccgtcgccgtcgccgccgccactccangcgctcgctagctagagctgtgcacgatacaataagatganaccctagccg

SEQ ID NO: 2831 - DNA, 303 bp, Oryza sativa
  Clone ID: PAT_MRT4530_10256C.1
ccatgccatcaaacttcttcatatccatcccttctacaacccccttggaagatctaaaagattattcaaaaaggtcaagaatttccctcgcttccatgttgacatgttttatgtttataagcatcattcatagacaacttcgagagtttaatcatacatttcatcacctaaacacaaagttgcttctttgcatggcgtccttcaatcctattgattcatttgctgcttatgacaaggaaaacttggttaagcttgcacaattttatccaaaggatttcacaaaattagatacaaaccatttgc

SEQ ID NO: 2832 - DNA, 268 bp, Oryza sativa
  Clone ID: PAT_MRT4530_102570C.1
aggggggagaacacgacacaaccaaataaatggaccccttcaaaaaacggggggggaagcgcccaaccgcacccaaggatgggcgcccccaccccaaaaaacaaaaaacccccccccgccaagcacacccgggagaaccccaaaaaaaaaaaaaaccccacaagaaaggaaccccaaataacgggccagggggggcacacgccccaaaaggacagaaggggataacccgggaaatggggccccggacaaaaaaaacgaaccgggggga

SEQ ID NO: 2833 - DNA, 250 bp, Oryza sativa
  Clone ID: PAT_MRT4530_102571C.1
gaaccagctgcactcacagtgaagtcagaattcaagggtcctgatatgaggacgtactgggggagagcatgtgcttcagctacagtctggaactggcatgcgcacttaaagtgttagacagagaggacgccaccaagatgctataaaccttttgtggaaacatgtatagatgctgttcaaaaaactgaagcttttaagtacattccaaagtcgacagatcctcgcgaacgatctgaggcatatgcacgga

SEQ ID NO: 2834 - DNA, 381 bp, Oryza sativa
  Clone ID: PAT_MRT4530_102572C.1
gcacgaggcctcgtgccgaattcggcacgaggggcggtcgggcgcggcagcggcgtgggcgaggcggcggcgagcagcgaggcaaggcttcgtcgtcgcttgtcgtcctcctcatggtcgtcacgtgcatcgtcaaggcagcgatgtggcggccgacggcgatttttgctttttttttttttggtttttttttttgttccgggtggtataacacaaccgaacgggatatatcccgtgcggtcggtctgccccacgcaaaaatgctgattttcccagacacccggctgcagacgggccgtacaaccgcacggggaaatcttgtctgtagtagtgtcggtctaacaaaagaaaactgcgaatatcacacaaacattgccgagt

SEQ ID NO: 2835 - DNA, 598 bp, Oryza sativa
  Clone ID: PAT_MRT4530_102573C.1
accgtttccactctgacgcttcctttccctacggctcttggttgttccacttcttgaccttccgtacccagtttctgaatctgatcgagcatgatatttcattcccagcttgctgccttcactacttgacctctgctacagactgtcctcttccatcatcttccatgtcccgatgccttgagctccttctggtgctgtgctcttctaaggattgcctcctggtcttcttgtgatgcctgccagtggacttgctgcctgaaggactctcggtggtgtcttgatcgatgaagtccgaagaccggccagaagatccaggctccaaactttcttggcgttcagatctgttcttcctcgacctaactttaccatggtctcctttacctccatttccatggtcaatcctatgtttttcttcacgcatgtacttgtgggactctctttcactttccatgttagaggagtatttgctggtcttatctttaatctctcgatgtcggtgcttatctgatgcagatgattcttttctgtctcgtctgtgctcagtatggctgctgcgttcatgcttcgaatgtgaataatctctggacgagtgctgttc

SEQ ID NO: 2836 - DNA, 396 bp, Oryza sativa
  Clone ID: PAT_MRT4530_102574C.1
gtgactctacgaggccggcactgcgaagcggaagaggtggagggcgtcggcagccggcgacgggcgatgcgaggggagggctgcctgcctgtctcctcgtcgtccgacgcgaggcgccgcggcggcagccagcgatggagggcggtgggcgacaggagtggagctgggcagcggcggccggcgggagagggcagccgccaatccgccatggcctgccgcggaggtggcccgccacccgtggacgacgcatgcgattctactgaatatagtttcaaactgaacagcatgaaggcagcaaatctccttcaaccccttgtcgttcatcacggtgatttcactgcaacatgagctcatgaacagaccagagattccaagcaactttctcaattcgttcat

SEQ ID NO: 2837 - DNA, 2037 bp, Oryza sativa
  Clone ID: PAT_MRT4530_102575C.1
tcaggaatcatgactactgcgacttctttttctccttgacctgtgcgttgagagattctcgtcactgcttctcgatcggctcctccatgcatcagagctcatatctctggtgtctgaatctgaagtaacctctaaagtgtcgctgcgctcaccgtttccactctgacgcttcctttccctacggctcttggttgttccacttcttgaccttccgtacccagtttctgaatctgatcgagcatgatatttcattcccagcttgctgccttcactacttgacctctggtattgagtctccaagtctgaatcaacatcactgtttgttgctacccatctatcatccgatgtatcatggtgatccttgcgttttacagctacagactgtcctcttccatcatcttccatgtcccgatgccttgagctccttctggtgctgtgctcttctaaggattgcctcctggtcttcttgtgatgcctgccagtggacttgctgcctgaaggactctcggtggtgtcttgatcgatgaagtccgaagaccggccagaagatccaggctccaaactttcttggcgttcagatctgttcttcctcgacctaactttaccatggtctcctttacctccatttccatggtcaatcctatgtttttcttcacgcatgtacttgtgggactctctttcactttccatgttagaggagtatttgctggtcttatctttaatctctcgatgtcggtgcttatctgatgcagatgattcttttctgtctcgtctgtgctcagtatggctgctgcgttcatgcttcgaatgtgaataatctctggacgagtgctgtttatgtgcatcttcatcccttgttctgcttggtgtgtacctaggatcagaacttctcggtctcctcctgtctgaactctgtgagcgctctaaatgtggggtgtcgcttggcttgccatagatagaatcatccgagggaccaaaaagagcagccatcttcctaatccagtatctaggaggaggattatcccaatcagcccactcataatctcctccagggttgcgaaagcaatgaataaaattacaagcgattccacgtgaacatgtcttgaatcttgacctcatgtattcaccacatatggcaaccttccatcttgtcacagcaacaaattcacatgttatctgcttcccagcaaaataccgtccattcatgctgctgtaggcaataagagctgaatccaatgatttataatgcacataaacatttcctcgaagatggagtgatccatttcgacacaccttaaagttcacaagttcaccaaatttcagaaattctgtgtgcacatcttcataaaattcttcatagctctgttcaatctcttcatctgtacactcaagcccttcatcttgctccaaagcaaggcctggaccactatacatgtttctcatgagcagagtgcatgatttatcaggataaaaatgaactctgctgcaacgcactccaaagcggcaagcccctgtcttgaggtgaaatgggcaatgtgccttatcctgttgaattggctggttttccttggctttctttggtactttgaccattttcttcttcacagtgatttcatttccttcccatatgatctctgctggtccatcttcaacatattcccattcgtcatcctcctcggttccatttccatggtcatctttatactcgcgggaggaatcctccggagccgtcgactcctctctcgcagccgcggccttctccgcggcgcgcgcggcggcggcctccagccaccggcgctccgcgtcctcgaaggctcgccgcgcgcgctcggacgcgtcggcctcggcctcctcgagctcccggaggcggcgctcctcctccgggtcggccgcgagcgcctcagccgccttccgagcggcctccgcggcctccctccgcgcccggcgccgccgctccttcttccgctccctccgcctctccttcctcgtgaccgccgcatccgccgccgcggcgggatcagcggccgccgtcgacat

SEQ ID NO: 2838 - DNA, 612 bp, Oryza sativa
  Clone ID: PAT_MRT4530_102576C.1
tcagggtgtgacagtcaatatctgcttcgcctcggtttctcaccctcagagtaacggacaggtcgagagggcaaacggcatagtactacaagggatcaagacccatatctacgacaggctcatgtcacatgacaagaagtgggtcgaagaactcccctcggtactatgggccgtgcgcaccacaccgacaatgtccaacaaggagacacccttcttcctcatgtacggttcagaagccatgctccctaccgagttacgacatcagagtacacgagtacagaagtactctgacgaggatcaggaggaatagcgaaacgatgacgtgaaccaactcgaggaacattgagaacgggtgccgttagggcagctagctaccaacaggccctccaccgctatcacgagaagcgcatccgagcacgcatactttcgatcggcgactacgtcctccggcgagttcaaagccaagcagggcgaaacaaactctcacccaaatgggaaggaccgtatacgatcacacaagtcttgcggccaggcgtattcaagattgcagacggcgacggttgcgagttagcaaattcgtggaagattgaccaattgcgtaaattttatgta

SEQ ID NO: 2839 - DNA, 2718 bp, Oryza sativa
  Clone ID: PAT_MRT4530_102577C.1
atggctgaggctgtgattcttctaaccgtgaagaagattggtgttgccctggggaatgaagcaataaaccaagccacatcatatttcaaaaaatctgtcacacagctgacagagcttcaaggtagcatggggcgcatcaggagggaactccggcttatgcatgagtttttttccggaatggatgttcgtaatcgcaacaaccggaagtatgaaatctgggtggaggaggtgaggatgctagtctatcagatcgaggacattgtggataattacttgcatcttgttggccacaagcatcacattggatggggtacctatctgaagaaaggattcaggagaccaaatgttctgctctctttgaacaagatagcgtcattggttaaggacgtggaggccagtttagtgcacttgttccaggccaaagaacgatgggtgtttatggatgtcggtgcggctactggtggtgaaagctcaagctacattgttgttgagaagtcccggcatctagctagcatttcacgctccctcgatgaagaagatcttgtggggtggtgcatgggatgggaggtctgggtaaaacagctttggcagcaaatgtacagaagtgaaaaagagaagtttgaatgccatgcctgggtctccatctctcaaacttactccatcaaggccgttctaaaatgtttgatcaatgaactagatgagaaaaagagtattcggggtaacattagcgacatggataccggaggtcttcaagatgaactaaagaaattcttaaaggatcagaaatatttgatcgtattggatgatgtttgggtaccagaagcagtcaatgacttgttcggagcacttgtctcaaatctcagcaggagcagagttcttgtgacaacacgcattgatggtgttgctcaccttgctttcccagacaagaggataacactaaagccgctatcagaacaagaatcatgggaactcttctgtaggacggcttttccaagagacaaagacaatgagtgccccgcagagctgatgacattagcaaaacaaatagttagcaaatgccaagggatacctcttgcaattgtttctgttggaagggttctgtttgtgtgtgaaaagactgaagaggaattcaagcgcatacataaccagcttgactgggagctagtcaacaacccaagccttgaacacgtcaggaatatcctttacttgagctacatctatcttccgacacatctgaaaagttgcttcttgtattgtagtttgtttccggaggactatctttttacaagaaagaggcttgtaagatggtggatagcagaggggttcgtggagaagaggggcataagcacaatggaggaagtggcagaagggtatatcaaggaattggtttacaggaacatgctacagcttgttcagaagaactcatttggtaggatgaaatcattcagaatgcatgatatcttacatgagttggcagttgatttgtgccgaagagagtgtttcggtcattcatacaattccaagaataaacatgaagagtttcttgagaaggatgaacgccggatggtaatacacaaattagacaaggatgttaaccaagccatttcaagtgaatggagcagacttcggtctttcgtcacattggaaagaaatatgtcatcacccaacttgctaactctggtagcgggcaagtgcagatatatgtcagtactagagttaattgggctgcccaaagacaacattccaaatgtcatcggtgatctgtttaacctcaaacatcttagcttgcgggattccatggtgaaattcctcccaaattctattgagaagctttccaacttgatgacactagacctttgtaaatcggaaatacaagagctacctggcgggatagttaagctaaagaaacttcgacacttgtttgctgagaaattgaacggtaagttttggcgagatttccagtggagcactggtgtacgcatccacaggggactggagatgctaagcgagctacagacgctgcaagcactggaggtgcaagatgaacgatctgtgaggagcttaagggagctgaggcagatgagaagcattaggatattgggtgttaagggaaggtactttgaagacctctgcgagtccctatgtcagatggaatatctttccttgttaaacatcgcagcaagtgatgaggaagaggtcctccaattgaatggtctgaagtggttgcatccaaacgttaaaaagctaagattgattgggcgattggcacaaacaggactgctgtcgtgtgcacctgaagcagggagtcactcattgtgttcattatgtctattttggtcacagttagcagaggacccactgccatccctgtctcggtggtcgaatttgacggactttaggctgacgagagcatatctcgttgaacatgtggttttcctcccaggatggttccctaggctcaagacactctatttggtagacatgcctaatctgaagaggctgaagatacaccaaggctccataacaagcctggaggaactacatctaataaacctccgtggcatgacagaggtcccatctgacatcatcttcctcctgcccaccctcaagtatctgtacttcctggagatcacttgggacttcttcatggcgttgcgccgctctagaattggcagtatccgatggcgatacagtctagcttctgatgcgcgcctctga

SEQ ID NO: 2840 - DNA, 626 bp, Oryza sativa
  Clone ID: PAT_MRT4530_102578C.1
tcccgggtcgacccacgcgtccgctcaacatgtctctgatttgtactgatcataagttacaaagtctgttagtctttttcctaaaaaaaaaaaaaaaaaaaaaaaaaaaaaaaaaaaaaaaaaaaaaaaaaaaaaaaaaaaaaaaaaaaaaaaaaaaaaaaaaaaaaaaaaaaaaaaaaaaaaaaaaaaaaaaaaaaaaaaaaaaaaaaaaaaaaaaaaaggggggggcggttaaaaggaaccaaagttaacgaccggggggggggaaggaaaaagttttttaaagggggcccaaaaataaaataaaggggcgggggtttaaaaagggggggaggggaaaaaccggggggtacccaaattaaagggctggggaaaaaacccccttttcccagggggggaaaaaaaaaaaaaggcccaaacgaagggcctttcaaaaaaggggcccacccggaggggaaaagggaccccccccggaaggggccaaaaaaggggggggggggggggggtacccccaagggggcccgtaaccttggcaagggccaaaggcccggttctttgggttttttcccttccttttttggcaaggttggggggtttccccgggagggttaaaaagggggggcccc

SEQ ID NO: 2841 - DNA, 553 bp, Oryza sativa
  Clone ID: PAT_MRT4530_102579C.1
agatccaattgaaatcttatgcatgggggcgctgttatctctaacgggatttaccaaacataaaagagcaatagctccctgtaatcactaagatatggcatgaaaatctcttagatgtggaagctttttcttgattgtcacaaaaggtgctcttgcttagatgcgtaccaatgtcatatctccaatcaccctgctaaggtaagtatgatttgtttgccacataggaaagtaatcagtgtggtttgaagaaataaaatggcatgccatttttaatctaaaatgcaaaaacaacacttttagtgtgtataaagggagatagattgagctaagtttacatgttgtactataccttcagatttcagttctttgctgcagataatagtggcacaaggttcctggtttgaaaattttttgttactgcaaaaatagtcaataaaacttcgctattgtttgtgttgcttatttccattaaattacttctcagaagctatgttccttctctgtcttgctagcttgtccttttcactgggttcaattgtaagacatgaattat

SEQ ID NO: 2842 - DNA, 1217 bp, Oryza sativa
  unsure (1)..(1217): unsure at all n locations
  Clone ID: PAT_MRT4530_10257C.1
ttttttttttttttttttttgggtaaacaatgccagctctcatttatttgaaccaaagtgtacacatataatctgaaacttgtgaatacggagaagtacattctgtaagaagcagcacttgtatggtataaaaaaaagggaaatacaggaaatgtgaggaatgctatgtaaaataaataaaatgcacggtaatcaggtcacttcgacatgaagagagatctgcactgctctgctgtatcatcaggactggtaactgtatgtccaattgtccggtcagactcaaatatctcataatcattgcctcccttgtaggttttgtccccaaagaaatggatttcttgaaattcctcaagatatctcaagcagtaagttttgtcccagccttgtgggaacacatcaaaactaatctgccctccaatagaaaatgtcaagttcaagtgggcgaacttttcacgaagcactgagaccattttaggccgaatgttatgtaccttatcatacttttcaaactcatcacgttcttcttgactacaatttctccctatgggcgacacattcagcattccacttcggaactctatgaatgtaccccttttgattgggatgtccaagtcagcaatgtaatgaagcgtgaagttaataaattcctttagctgatcatctccaagaaacgatttcaaactttgagttccaatgagttcgccgttcttgtgcgcgaccaggccattttcagagaagcagtaatcgtaatcagtagtaactgatttgccgagttgttcggaaatcttcaccagatcagatcccccaaccacgcccacagtgacatgctcgcgcagctgcttcatgaactggagcatctccggcgtcaccaccttgcggggcgcggtgagggtgccgtcgacgtcgaagagcgcgaggacaccggcattcttcctcgccgccatcgccaccactccgctcctcctcctcctcctcctgctgctacagcgaacgggcgcggtatagcagcagcaacagagcccggatgatgcgtgcggcgacgggaaaggcagcttgggtcgtttcgccggtgcggatctagacgcgctccctcgcttcgcctcgcttcccgcggcggcggcaacggcgaggcgggggaatttataggcggcgcgggcgcgaggtgtgcgtcgggatctgcgcgaggaggcgaagcggaggagccggccggcccgagn

SEQ ID NO: 2843 - DNA, 369 bp, Oryza sativa
  unsure (1)..(369): unsure at all n locations
  Clone ID: PAT_MRT4530_102580C.1
gttgtaaagttgcnngagagagatcagttgttgagtgcgtggaagcngagatcaggangatgctggagaagctgtgggacgacgtggtggccgggcctctgccggtgaccggcctggagaagctccgcaaggccgctttctcccgcccccttgtctttctctttgatggcgacggcgaggcgtgcggggcggcgtncntgcggncgctgtcgntgccgtcgaccccgacgacgccggtgtcgccgtcgtcttcgtctccgncgncgacggcgacgacggcgccgcggggctgcttcgtgtggnggagcgtgttccncccggggtgcctcctcgcctccttgagcctcggcgctctcctcttcgtccgcc

SEQ ID NO: 2844 - DNA, 813 bp, Oryza sativa
  Clone ID: PAT_MRT4530_102581C.1
atggcggagacactacggcgaatccgagatggcggcgccatgctcctcctcgtcctcctcaccatcgcagcgcaggtgcagcaggagtacgaggtcacctcctcctcgtcctccttgccatcgcggcgtggcgcgggcgagggccatcagcagctgccttgggcgcagcaggagtacgaagtcacctctgccgccactgcggggccctgcgatgcctacctcgtgttccgctcctccccaccgctctacgcctccgccgtctctatcttcaacctcctcaacgtcaccgccacccccggcgacgaggtcgtccgcggaggagatggaggagcaccaaaactggaagaagaacgcgctgcctcggcggcgagcggcgccgtcccgaccccgcttgtgtccatctcccgctcggtgccgcacaatggcgaggtcaaccacgcccgctgcatgccgcagaggccgtacacggtggctaccaagacctgtgtggatgaggtgcatgtgtaccatcttggtgacggcggcgagaagagcgacgtcgatgtggtgctcagggggcatgaagctgaggggtatgggctggcgccagttcagagtacggtgccgttccaggtgagcatctccaccagccgatccaccatcgcagtcgacgtgccgacctgtcggagcacggcctcgccgagccgcgggttcgccgcgacattgacgaagatgacgaagggagggagagagagagagatgaggaagggagagaagaggggaaagagggaaaggaggctgacgtggacacctgacatgtgggtcctatgctga

SEQ ID NO: 2845 - DNA, 2178 bp, Oryza sativa
  Clone ID: PAT_MRT4530_102582C.1
ctatccagccttttccgctacaactttcctcatgaacggttttatacgtgatattgacctttcataaccatcttctgaatcattctttgcattatcatctgatgcctgctccacatcgttgtcttcttcattttctcgtcttggttttgcttgttgtcttgatgtaggcttccagcttgctttggcaagtgacttagcaagtaaatctgcaatatttattgacatttcctcagctttctgcacatgaggaaaatgatcttcctcaaaatggtgtgacaaccacaagtacattgacaggacctgatgttttgtctcaaggtccagaagctcagtgtcgttctttgcagaaccctttggcattcccattgcaatgctaacacgacggctttggctatagtttgtagcaaatctcagaagatggtacatggcttttggatcccttatattcactggagcaaaacaaaaattgtagcgatccttgagggagagaccctggatcctctcaagcatattagcaaccttcttgatactttcctggtgacacatgaagtatgtactgtcgacgcggcaattttcacggaacttatccagcagttcattgaaggtaaggtcaggaaactggatggcaaaactttccacctgctcaaagcaagggaatagaccaactttcttcgcttcctcaaatggctgctgaaggcactggatcaaataatccaaatcatccaacaagaaggtggttgtcagcccatctgggtaaatactgcctctccgaccagctcgcccagcaatctgttttacctgtgaagcagcaacaggtaccatcctgtccccattgtacttggccaaactatagaataccactctcctaatgttgaggttcaatcccataccaacagcatcacttgctacaagcacatcatactcattatcctgctcattaaacagctttgcttgctgccgccgtgtctctggtggaagagctccatatataacgcaacacttgtgcttcgtaaacttctcgattgccagtttcacctcaaatatctctctgcgtgaaaacgcgacaatgcagtcaccagagcgcacattcttgaggtctccaagcagtgtctttgcttcaacaacaagcggtttgaagcgctcatattgatgcacctccaaatcatctccagtatctgcgcaaatcttccgaacaatcttcagaacactagggtcaccacagagatgtatctcgtctgccttgagcccaagaacggctcgtgtccacgcatagcccctgacagggtcagccatcatctgtatctcatcaaccactgcaacctcgtagggctcctccgtggagagcatttcgatcgtgcacgcgacgtggttggagaatggcacctccttgatctcctgtccagtgcggaggctgcagtagacgcccagggcattgaccttgtcgaagacctccatggcgaggagccggagcgggctgcagtacacgccggacttggcggcggcgaagcgggtgagcgcgttgtgcgtcttgccgctgttggtgggcccgcagtggtacaccacccgccggcgcatggcgcgggcgaaggggtaccacgcgtgcggcgccgtgaggtccgccgcggccatgacagactcgtgcttcctcagctcgtccgcgaggtgggtcacgcagaactcagcgaaggccgggaggaggagggcgtgcgcgtcgtcggccgggagggagaggaggtgctcggcggactccagggagaggcgcgcggggaggaagtggcggaagcggcgggcgtaggtggggaacgccgaggcggggatgtagagcgcgagggcttggtcggacatagccgggtccttgccgaagcggcggaggagcgccaccacggcgtcccacgtggccttcgggaggcgcgacgcgccggtggcgggctccgaggtcgacacctcgcgccatagctgcttcccgtcaagaggcggccgcggcttactgtccccctcggcggtcacgtcggaggagaagaagaagcggtggtggggcggtgggtcccagggggaaggggatcggggcgcggcccgctggaggtgggagaggagtgggaggaggaggatgcgccggtggtgttgagaggatgtggagcggcggaggagtgcggcggcgatggcggcggcggcggccat

SEQ ID NO: 2846 - DNA, 443 bp, Oryza sativa
  Clone ID: PAT_MRT4530_102583C.1
ggcacgaggggagcgcgggggccgcgcagttcgccggtccgatcctcaccatcgtcgccgccgccgccgtgaccttctacgccgtcagcttcatggagctccgaaagaaatctttcgaggaactcgacgagaagtactcggagctcgacgacgccggcggccggcagcgccgcgcgcgacggcgggccgagcgcaagtccaggaagaagtgactgaccgacatctcgatatgatgatcagatcagcccaactgcctgagaacaggaggatgatgaaccgtcgttgtcgtcgttggtcatttccttgctagatgctagtagtggttaattatcgaatgtaaacctgatttcaagcttgtttcagtactggtcttccatctcatccgtttttgtattgaaatttggcaagttcaaagttgcagaaaatagctgccctggatcgat

SEQ ID NO: 2847 - DNA, 2405 bp, Oryza sativa
  Clone ID: PAT_MRT4530_102584C.1
atggccggccgccacgcgccgcacctccggctggccgtgccgccgcgtctctccccgcacccttccttccgcttccccaccaccccgctccccaccccgtccaagacccgcctccaccacccctcctcctccccctacgccgccgcgctgctccgcctcctcgccctccactccctcttcctcctcgcccccgccgcccgcgcgcccgcctcctccttcccctccctgccccctctcctcgccctcctctccgccgccgtctccctcctcctcccccccttctccgccgccgcggcggcgcaccaccccttcccggccgtcacgcacctcctccgccccgcggcgctcctcgccgtcaccctcctcctccgcttcgcctccctccgcctcctcgcctcccccggcacactcgtcctcgcggaatccgcgggggccctcctcgcccgcgcgctccgccgcccttcccgccgccgcgtcgtctccgtcgccgtcgcctccttcgcgctattcttcttcgcctccccttcgtcttcttcttcttccacctcccacctcctcgttctcctccccttcgcctccggcctcgtctcgtccgccgatcaaacaccctccgtgcgccatgtcacccgcggccgccatgcccgtgccgcggtatttgccctcgccgcggcgttcctctcggtgcctgcggttcttggcctcttcttcgttggtggcagtgacgccggcgatggtgatggtgacggtggagctgtgctgccgatcagccagctctggtggctgctcctcaatgccgccgtcttcggcatggtcttgggacgccggccagattacgacggcagtagcagcaggccaagcgtggatttcgcaatgactttcttgtgcactcttgtgctggagctgttgtactacccgaagctgtccttaccgggcttcttgatttgcggattgttgttgtggatcgccagtcgggagctggctgcatcagggtatgtggagctggggagcgcggatgtgtcggaatctgtgtacgaggcaatcatggggccagtccggcatatcctgaacgaacggaagtcgaggaagattgcggcatttctgctgatcaacacggcatacatgtttgtggagtttaccagcgggttcatgagtgatagccttgggttgatctccgacgcttgccatatgctgtttgattgtgccgcattggcaattggactttatgcgtcctacatcgcaaggttgcctgcaaatggattgtacaactatggaaggggcaggttcgaggtgctgtctgggtatgtcaatgcagtgttcttggttcttgttggagcgctgattgtgttggagtcctttgagaggattcttgaacctcgtgagatatcaaccagtagtctgttaacagtttcaataggtgggcttgttgttaatgtcattggactggttttctttcatgaggagcaccaccatgcacacggcggtagctgttctcactcccattctcactcgcactcccattcacattcccactcgcactcccattctcatgttcatgggcatgaggatcatcacaatcatgatcatgcccttcagggtgtaaatcacaatggggcatgttgtgagcatcatggagatgcaaataagagccatcaccatgatcaccaccatgatagtagcaatgaggagagccatcacaacagcctaacggagaactcctgcaaggagaatcatagtcactgccatggccacgatcatcatcatcatcatcatcatgaccattcagaacatcaccaacaaagtggagatcatgctcatcaagatattagcaatatcagcagtgatccagcaatccttgagattcccctgaacagtatacatactcattgttcagaagctcactcttgcaatggaggattacagtcatcagaaaaccataataagtcgagaaatagacatcacattgaccataacatggaaggaatcttcttgcatgtgctagctgacacaatgggaagcgttggtgttgtgatatcaaccttactaatcaagtacaagggatggcttatagcagatcccatatgctcagtatttatttcaataatgattgtttcttctgtccttcccctgttgaggaattctgctgaaattttgttgcaaagagttccaaggagcctcgagaaggacataaaggaagctttggatgatgttatgaagattaagggtgtcattggagtccataattttcatgtctggaacttaacaaatacagatattgtaggcacttttcaccttcatatcacaacagaagctgacaagtcttctataagagaaaaagcttcagatatatttcatgaggctgggattcaagatctgactatccagatcgaatgtgtcaagagatagca

SEQ ID NO: 2848 - DNA, 294 bp, Oryza sativa
  Clone ID: PAT_MRT4530_102585C.1
atggcgatcggcggtaagagcgtgaccgtggcctggccgtgcccgcctgctggccgaacatgggcgaatagaagaacacacctgatccaagacccgatacctcttggacaatcggagcacgatagtattagcaggcaaaaatcaacgcccacgtcggtgtcggacatgtcgaacacatgcccgtgcctatcgaacacagtatccgtgggcccccacggcaactacgtggcgaagaggcgaagaccgcaccccgtcgaagtctttcccccggagacatttccgccatgctgctaa

SEQ ID NO: 2849 - DNA, 250 bp, Oryza sativa
  Clone ID: PAT_MRT4530_102586C.1
ttcttccttcattttttgtctgttccaatctaccaccatacttactgcactgcgacctcaccacactgaactcaagtcagtaatactgccattgtcaagagggagctctagctttcctttcccaaaggcagaggcagcagcgtggcgtgcattcacttccctccctgtccagtactccagtccataacactgttggctgggtgcctgcctgaatgaattcagtaggagtagctcaataggttgacacaca

SEQ ID NO: 2850 - DNA, 425 bp, Oryza sativa
  Clone ID: PAT_MRT4530_102587C.1
cacgagatacccatcgacgaggaagatctccctgaccgggatgatgatgaggatgacgatgggatgggtgatatgcaagaggatgattcccaatatgcatttcgtgctcatacagacgagatattcgctgtggcatgcagtcctacagatgcatcacttgtggcttctggagggaaagacgatagaggattcctgtggaagattggatcagcagaggatgttttggagctggccgggcacacagatactgtctgcacggttgctttcagttcagatgggaatcttttggcttctggaagttttgatggacgcataaatgtgtggaatacagctacacgaacacttcagggaacccttgaaggttctggatctggcttcgagtggcttaaatggcatccacgagggcatttgataattgcaggatc

SEQ ID NO: 2851 - DNA, 1485 bp, Oryza sativa
  Clone ID: PAT_MRT4530_102588C.1
atgagcatctcgggcgaggtccccgccggcgaaggctctgatggagaggaggtgttcatcaatgaggaggacatcatacacgagatacccatcgacgaggaagatctccctgaccgggatgatgatgaggatgacgatgggatgggtgatatgcaagaggatgattcccaatatgcatttcgtgctcatacaggcaagttggttgaaaagaatgaatttatgatttttttggtgctgatcattgacgagatattcgctgtggcatgcagtcctacagatgcatcacttgtggcttctggagggaaagacgatagaggattcctgtggaagattggatcagcagaggatgttttggagctggccgggcacacagatactgtctgcacggttgctttcagttcagatgggaatcttttggcttctggaagttttgatggacgcataaatgtgtggaatacagctacacgaacacttcagggaacccttgagggttctggatctggcttcgagtggcttaaatggcatccacgagggcatttgataattgcaggatcagaagattgtaatttgtggatgtggaatgctgaccataatgccattctgaatacctttgctggccatagtagcacagtgacatgtggtgattttactccagatggtaaacttatctgtactggatcagatgatgcatcattgagaatatgggacccaagaactgcacaaagcagacatgttgttcgaggccatggctatcatacggatggattaacatgcttatcagttacttcggattcccaaacaattgttagtggttcaaaggataattctgtgtgtgttgtgaacataaactcaggccaggttgttggctcactggacggccacactggctctattgagtgtgtcggcatctcaccaagttacaattgggtggctacagggagcatggatcagaagctcatcatctgggaccttggtcgccaatcgatccgatgcacttgcaaccacgatgagggggtgacatccctggcatggctgggcccgtccaggttcgtggcgtcggggtgcatcgacggcatggtgcgaatctgggacagcctctccggggagtgcgtgagggccttcgccggccacggtgacgtcgtgcagtccctcgccgtctctgctgatggcaactccatcgtctccgtgtccacggatggctctgccctcatcttcgacatttccatgttcaagtgaaaccatagtagcagtagttaccaatacatgatgaagccaacgcaaaactgtacaatggtctcctcagccactttggttataggccaggggattgagattttatacatggagccactgcgagttgtacaattaaacaccctcgtctaggggattacaactgcaagtcgaatcaatttttgtgtgagcatttggcatggattaatagcatatttccctgatgttttgcagcaaaaaaaaaaaaaaaaaaaa

SEQ ID NO: 2852 - DNA, 728 bp, Oryza sativa
  Clone ID: PAT_MRT4530_102589C.1
agaaatcaaagcaaagccaagcaagtaattttatgatcacagaggaagcacaaatcacatggcctaacgattgtagatcataaaattaagtacgatagaactaagcatgctcatgtaaagatacatcaaagatagtttgagctagcacaatataagatacgaaacataggagggtaagtttattggttccttgcaagttatacaaaaccacacagtttgttatggagatatatgaaattattgacgttgactaagcttggacggtgatccaccttcaacggccatggccttgatgtttttttttttgaacgaatgccatggccttgatgttgaccatgcggcatggctggtgatccatatgtcccacttcccacagtgcctgaggtgtactcctgttacaataacattgacaggctcataaaaaacactattcagaactaaaaacaaaagaggacatactcatccatttttgcctcttctagaaaaattgaacctatgaaaattaattcattgtataagtcataagaaattttccttacttacatgaaacttacaggtacagaagaacatcccagctaactaatttgtgcagcaaagctctattgtcaagttgtttgttcttgtcatggcaactaattagcagtgacacccttaatatacttaagctaaatggcaatttttacatatccaaagattgttataaaatgagattgcaatgcaagtgctta

SEQ ID NO: 2853 - DNA, 670 bp, Oryza sativa
  Clone ID: PAT_MRT4530_10258C.1
gtgacgccggagatgctccagttcatgaagcagctgcgcgagcatgtcactgtgggcgtggttgggggatctgatctggtgaagatttccgaacaactcggcaaatcagttactactgattacgattactgcttctctgaaaatggcctggtcgcgcacaagaacggcgaactcattggaactcagagtaagtccttaggcaaatatatgcattatatagtgtctgaaatttcacttggagatcatcaaattcctggctggggcctgggaataatggtagaggttcttcttttcatttggccaatttctaaatgacatagtgttgccatacccgccccccccccccccccaaaaaaaaaaaagtcattggctgctactggtcttagaacgacgcctttctatattatggaacattatggaacataatgttttgtgctctgcagagtttgaaatcgtttcttggagatgatcagctaaaggaatttattaacttcacgcttcattacattgctgacttggacatcccaatcaaaaggggtacattcatagagttccgaagtggaatgctgaatgtgtcgcccatagggagaaattgtagtcaagaagaacgtgatgagtttgaaaagtatgataaggtacataacatttcgcctaaaatggtctcagtgct

SEQ ID NO: 2854 - DNA, 582 bp, Oryza sativa
  Clone ID: PAT_MRT4530_102590C.1
atggacgcaaagtggagcacggcggcgatcaacggaattttgatcagtggaatcggacacttcaggcggcggtctaaaccgttcgatggctacttcaatagggagatgaccagacgtggtgctcgggttggtggcggcggaagcgattggcgaatcaatcggtgggtcagacacttcgggcaggtggctcgaactttctgttcaaccgagaggctttgcacaatcgtatgcattggttacaaactgatggcatgcgtcattagcggagttggccggaagtgcagaagcgaaggtgcagaagccgtgagatacgttaaggcttggaagtccatgtcgcgatgtgtgttccgattggttgaatctgatttgaataggggtaattcaaaaagtcccgggcaacaacgggtgaaaatcgttgagagcatcaacgggctgtctggcagtacaggatatatccaggatctgcgggatcaagtcaaatttaagacggtagatgggggtgaacatggtcttcgggaaatctatgacgtgacagctaggagaaatccaatttcgcttggcaagacgactgtggtgatatga

SEQ ID NO: 2855 - DNA, 337 bp, Oryza sativa
  unsure (1)..(337): unsure at all n locations
  Clone ID: PAT_MRT4530_102591C.1
ggccgcggccctcgtctggtggtgctgaagtactggtgatcgacctacgtggccacgtttcgtgcggcagagtaattttttttaggaaggcgattgaacccttagagcaaccgcaatgattatctataggctctctacaaaagattcatgtcattatatttttctatatgaaagagattaaatgaagaaagagagtaaagctatctactaacctgtagatagtctatagagaaaaacgaggcaatgtattagagagctatagatacccatatagacatattattgaggtggttttcttttagtctagcaaaaaaaaaaaaaaaaanaaaaaaaaaaa

SEQ ID NO: 2856 - DNA, 583 bp, Oryza sativa
  Clone ID: PAT_MRT4530_102592C.1
actccaaaacaatcgtagtaattaaattgcaggctagttgtttgcaccatggcgcagtactactcggaggtggaccactgcgcggaggagatgaactggccgccgcacgccggcggcgagcactacgccgtcaggagggagtcgtacgaggaggtggacgagatggcgcgcgcaggcagggggcaccaccacggcggcggcggcggcggccacctgggctacagcggcagccgccacggtgatgcccatctgggcggccaccgggaggagcacctcgtccacggtgacgagcaccgccacggccacggcggcgggcgccagtacgactcctgcaccggccagtactacggctgagcacgtacgaggctgcagtttctgtatgactactatgtgtgagtgtgcgtgtgtacggtcgtgtacatggtgtgtgtgtgcgcgctgacgcacgtacgagcgtgtgtctacgcgcacatgcagcatcttatctatgtgctgtacgtacgagaataattgagaccgtggtacatgaataaataagagcttcgacgtgcttctatatatgcacgtttgttaaaaaaagatc

SEQ ID NO: 2857 - DNA, 121 bp, Oryza sativa
  Clone ID: PAT_MRT4530_102593C.1
aattcccggccacacccccgcttcgcgtaatttttgcgttcacacagtttaagcattattcatctatctcaaaagacctgggggaccccaactttgaggaccaatgtccctttgctctcct

SEQ ID NO: 2858 - DNA, 254 bp, Oryza sativa
  Clone ID: PAT_MRT4530_102594C.1
tggaggccaacaccaaccaaacaccaacacgcccgtgcctcacattgctggcggggggctggggcggcatttatgcgccggggggcgccaaccagctgccagcaaacaacagcctggaggacaaccaaaattggggcaaaggatccaaagatgaggcaacggacaaaccaaacgcgggccggggcggaccaaaggcacaatctacaccccggcccgaaaacggggacccgcgaacgaaacaaccgaaaaaataa

SEQ ID NO: 2859 - DNA, 309 bp, Oryza sativa
  Clone ID: PAT_MRT4530_102595C.1
accacacgatacgcatctgatgaatgagctggaagagatgttcaatatacaggacctcacacggagagggcacgtggctttcactgaggatgagtgtgacacaatcgcaagttcgagatcatccttggataggaaggagccggatgggtatctagattgcgctctattgaatgagaatcgaggtgaaggtctcaattcagccggagttactagattttacttattcatcgctggtgaagggaacggtgactttttggctgggatattgcttgatcgtaatgttttctaacctttcggcatttgatatat

SEQ ID NO: 2860 - DNA, 638 bp, Oryza sativa
  Clone ID: PAT_MRT4530_102596C.1
attataggcacccagttagtcaaaatgtcagtgtcgtcttcagcgtagtatattcagcatcaacagtgatcagttcagagatacattggacactcgaaacagactgaactctgaaactgaacatatgtgtgtcagcttcagcatatgcagccacagcacagatcaattcagagatacactgaacacatacacacctgaacaacctgaaatctttttgcgattacacgacagatgtaagtgcatgcacaacactacacacgtaacaccacactcacacaatgacagatgcgccatctaacacatgctcaaagagacgggaatccacaacacatccctgatcttactaaattctattgaatgcccactagtatgtctgtaatattcatgggcaacaggacttgaaccctggtgggatgggtggatatacatatcacaagtgtttccctgaacaacttgaaatcttaacatatgtgtcagaacagaaggtgaaaacaccatcaggaggggtgaaaattttaatatggtagtaattcagattgctaggaggcatcagaatatgacatgtttgtgaggaacagacaatcagattctgccatgcaggcgacagattggttggtgatcgatgctgcaagggcact

SEQ ID NO: 2861 - DNA, 1720 bp, Oryza sativa
  Clone ID: PAT_MRT4530_102597C.1
atggcttccatgccgcagctggaggaaaaggattcatccgatttggcaatcaacaaaggcccgtcgctggatcttgtcaaatctcccttgatgatgaatgatgcatctgcaactgtaactgcaatgcagcccaacgaggggatggaggagttccctgtcaaggttcggaagccttacacgatcaccaagcagcgggagaagtggacggaagaagagcacgacaagttccttgaggcattgaagctgtatggtcgctcttggcgtcagatacaagagcacattggcacaaagactgctgtccaaattcggagccatgcccagaagtttttctcaaaggtggtgcgtgagcccggttccaataatgcgattgagatccctccacctaggccaaagagaaaaccacttcatccgtaccctcgaaagtgtgcgaattctggatcggacgcaaatccagcaacagcgcaattgaagcttgctcctggctcatcttcatctggctctgatcaagagaatggttctcctatatcggtgctatctgcgatgcagtcagatgcttttggatcgtcagtatccaatccatcaaccagatgtacctccccagcgtcatctgacgatggaaataacattcccacattcacgagtggggaagataataatgtgccttgtgaaccaacagtgatagatccgtcccagtcccacaaggaaatagaccaagatagaaaagacgtgaataatatgtctgaagaggattcttcagaagaagaggtgcaagaaacaagcttgaagctatttgggaggacagttgtcatcccagatccaaggaagagaagctcctcagatccgaagcatgaaagtgaggagcagatatcacagccttccaatgaagaaatgttgcaggcttcttcatcggttggggagattccagcggcatattgtgcaccaaatggttggtttatgtcatacaattctttcccattccaattcggtgaatcagcggcagatgctagaattccccctttacacgtgtggtggccttactacggttttgctcccattagccatcctagaggactaagcacagtgatgcagcagactgaaggtagtgacgagagtgacggtgtgaagagccactcatccgaatcaagttcggactccggggaaaatgtgcagatgaccgctccccagagctcgagaatagtggaatcacttggagcgatttacgtccgagactcaggttcaagttttgagctaaaaccgagcgcaaattcagcgtttgtaagagtgaagccaagcaacagcggagatgaagaggtaataaggggatttgtgccttataaaagatgcaaatttcaataacgcaggcaagcgggtattttcttgaaagctgctaatttaacagagaagagtaggagcacgaacgttgcttgcatcactgtatttttttttgtttgtttgcggggattggtggtgcattaatgaattgtttgctgcttgcaccttaaaaaggatagagatggtgtaagcagtttgttgctgtaagaatgttacatgtagactagtacttaaaattataggggatgccaatctctgccctgatgatgttgtaaaagcagtacgcaccatgttttacctctggttgaaagctaagctgttaatggaaattgatctctatggactgtttggttaaaaaaaaaaaaaaaaaaactcgagactagttctc

SEQ ID NO: 2862 - DNA, 438 bp, Oryza sativa
  unsure (1)..(438): unsure at all n locations
  Clone ID: PAT_MRT4530_102598C.1
aaacacataacccctggcggggtggattgcccaggaaatttggtttgaagatgaatcaacctgcccctaagggcaaacgaatttcaatctaatcagggggttttgtaaagcatacttccaggggtgggggggattcggagacacaattaccctttttgcccaaacggggaaaaaattttttcccacgattttttttttccaagttacaatcaagccccttttttccatggctggataacggcaacaacaatgatccccattttgatnaccaggaggatgatggcttaaaacatccacttcctggagtttttttggggctttttcgggttttgaaaagcactgaccccttgttgtatggggggggtagcatttgaaacatggggctttatgtggttgatcatgtctccttgagcataaaccaaaactgccatatccatg

SEQ ID NO: 2863 - DNA, 784 bp, Oryza sativa
  unsure (1)..(784): unsure at all n locations
  Clone ID: PAT_MRT4530_102599C.1
ccggccgggaaagaaacctctctctcaagtgtcctaacaacttctccccatctctctgaagccagcaaattaaactctctttctgaaaatttcagtacagagcttctgaagattctgatcatggaaggcttcatcccgttcatctacaaggccatcgtgcagtacaggaaagaagggcaggtctccgtcggtgacctcttcttcgacgagccgtcgccgtcgtcctatttccgcctccccggcgactccggtcggtaccagcagcagcagcaggcggcgatgagcgtcctcttctctcaggcgacgacggctgattccgacgcggtggcgccgcgtcggtccccgctgcggtgcacggtgcatcaccgtcggccggcgaccgcaacaccatgaatcatatcatggtgatggaagtgcaaggtggcaactggcaacagaagaaattaagcaactcaaatggaagcaaagcaagtgaagacttgcttaggtggtaggaatggaggttggtagattaattgtggtatgcatgcagattgagcaactgtgaatattatactagcataagttgcagnatatgttactgttttttttctatttcttttctttttagattgtgatttgtgaaaatgtgcagaaatgatgcatgggtgcaagttctccccaggagatctctgcaccataattagagtggaaaagtgagagntgtgtatagtgccatcgaggaatatgggcataaaaaaagtgtgtacatgtacaaagcacgtatatatacatgcatggggtg

SEQ ID NO: 2864 - DNA, 596 bp, Oryza sativa
  Clone ID: PAT_MRT4530_10259C.1
atttttgttatttaggaattaatctctcaggatgttgatttcaaagaaaaaccgacatgcgatttacgaaactctcttcaaagaaggagtgatggtcgctaaaaaggattttaatgaacccaagcatcccgaccttcaacatatcccaaatcttcaagttattaaaactatgcagagtttgaagtctcgggattacgtcaaagttcagttcgcctggaggcactactactggtacttgaccaacgaaggaatcagcttccttcgtaactaccttcaccttccatcagagattatcccggctaccctcaaaagacccgtcaggagtgaaaccgccagaccaaggccagctgccgctcgtccagacacatctcgcatggatgaagataggtctgcttacagacggcccggacaaagcatgcctgacaaaaaggctgatgtcggtgctggatccagcgatgttgtttttaaaggaggatatggacgaggaagaggaggagcaccaccccaataattttatttcaacatttcatcttacgttgttaaggattctctttttaattgaataaacttttcaataaaaaaaaaaaaaaaaaaaa

SEQ ID NO: 2865 - DNA, 1686 bp, Oryza sativa
  Clone ID: PAT_MRT4530_1025C.1
gggctgcaggaattcggcacgaggccccccccttttttttttttttttttttttttttttttttttttttgggatcaactcattttgattcaaatcaattcaatcaatattatgcgagttcagcgaacaaacatgtggattctgaactaatagacaaaaaaatgaaacctttatcctatccaagaattgtacaccaccaatcaagtaattccatccccccaaagtcagccacctccaaaccgaagcctaacgaatcaatctgaattgtaccacaaatgaacaagaatttgcttcctctattctccatcttccctttgtgcgccaccgcagtgtgccgcccctccccttcactgtcctgtacagccgaaggcggcagctggcttgtggtggcagctgtgatggctgtggcaatgaattgcaaagcaattccatcaccacacacagctccacaaggcaacctcaatgaaagaattattgtgtatactaattaactatctacccagaacacgccgtcgaaggcaacgccaacgacgacccggagaccggcgcggatgctgcggcggcgtcgtccccggcaacgtagaggtcgtatgatttccaggtgtggtcgagcgggcaagggttgccggcgtcgaggcggtcccatggcttccccttcccggaccagtgcatgaggctgaccggcccgtcgtggagcgggcggcagctgccgcgcacgttgtcgccgccgaggccgtgctggttccagcggtggtcgacggcctcgacctcgccggcgaagacgaggaggaagggcggcagcgagcccagctcgtagatgcgcttctccttctggatctccatccaccgctcgatgcggtggcggtagttgccggcgcgccagcgccggaggtcgatgaccatgacgccggtgttgaagtagcagggcgggcggcggcggccggcgaagacgcggcggccgaggcctgggtcggaccagaacgccggggtgaagtagcgggagaagttggcgtggcagtactcgggcgccgcgacgacggcggcggcggggaggcgcgtctcccagaggcgccgcacgtcgtcgacggcgagcacgtcggagtcgaggtagatcgcgcggggcacgcagcgcgggagcaggtcggcgaggtggttccgcgcgtagttgagcggcgactccagcgcggcgcgcacggacgccgagatgagccccgccacggcctccgccctgaacgcgtagatctcgaaccgcagcgacgggaacgacgccgccacggcgcgccgcaggtcaccaccacccccaaccctcctcctcctccgccaagaagtggaagaagagcgactccgggcaggaggcgtgcttgagcagcgagtacaccgccgccatggacccgcgcaggtagtgcgcgtccagcgtcatcgagatgtgcaccagcccagcgtcacacacccccgccgccgccgtcgccgccgcgggacacccttccccgttcctgtactccggcgcctcagcgaacctcggcagcgccgccgcctgagcgcagacggccagcagcagcgccaccgcagccgccgccgccgcggcccgcgccggcatcgcggtttcttggattcttgcagcctcctcctcctcgtcccgtggtggtggtggtggtgggagcagcagcagcagcagcaacgcgtccg

SEQ ID NO: 2866 - DNA, 716 bp, Oryza sativa
  Clone ID: PAT_MRT4530_102601C.1
gttcagcaataacttaatcttggaataaaacactcgttataacaattaataaacgaaaagagttgggtattagttcatgaagaattctgtatgaatatggataaacgacggaaagaataaataaagatctttttttttgtattgcattccatatcttttgtcctattcttctttccccgaggggtatttaaaaagaaaaaaggaataaagggttaattcgttcttgatagccatttccttaacaagtgaatgggaacatactctggatcggaatccgaagaaagtactacttgctcatttccaccaatttcaagtccttattatgattccttttatgaggaaaaatatctaatgctttagattccctcattactaatcctttatgtactttagtgtttctaatccctcactaacttttgatggattcccttatgattacaactttctgtatcgggaatcccttattattgcccgcttcaagatatgatgactaatcaaaaaatctcaaccttggggtaaagaatttacaccgcttatgtttacttccattttttcttgtacataggaaatgagattttttctttttactacaaattaataagcagttttgtttcactcatatagctatctagtttaacttactaacctgaatatagaataagaaaaggaggataaatattcaatgaatttcagaggaaaaagatcctattttaacg

SEQ ID NO: 2867 - DNA, 1040 bp, Oryza sativa
  unsure (1)..(1040): unsure at all n locations
  Clone ID: PAT_MRT4530_102602C.1
tcggaccatantcaagggagaggaggaagccctaccttccattttcgcgcttcctaacaccctatnagngcacggtaggaggcggcgagcgcgcggcggaggcggaggagtaccactgccacgacttcgagtgggaggacctccgggcggaggtggaagccaaccctgccttctcctaccacctctccccatttcccacgaccgtcggcaccccggagacgccgccgccgccgccgcccttggaggcctggacgagcttccaccgtcgccacacatgcggcaagtttttcaaggaaagaaggtatttgctaaaggaatttccagaacttcttaacagcaaggatagtgcaaaggttttagagctcagagttggtttggaactttggatttgtcaagttcatgcatctttgaggataaagaatacttttgcctatgggcatttgaaaactgttgacacccagcatcaacaaatacttctcctttcaatttcttctgcttctgaagttatacataatcctggaatctctagtccaagcacaactgtatatgcttgtgattgtagcaaagaaactctggagaaggcaaatgagattgtttgcagcacaaaaggagttgaagtcaaggataggttccatccttttttactggatgcttcgaaggaaacttttccagattggttgttctgcaaatcctgtcgaagtccatgcgcgagtgatggtaacatgttagtagaataccctgcctttctcagagacaatccatgttgtgttgatggtgtggattttatcactatgatattcacattatcagccataccttttgacaatatgctagctacactagagcgttgtgtatctgttctaaaaccaggtggccttgttttgtttagggactacggactctatgacatgacaatgcttcggtttttacctcaccaaagagtgggattccgggaatacatgcgctcagatggcaccctttcatacttcttcacattagatacagtgagagaactctttcatgcctctggactactagag

SEQ ID NO: 2868 - DNA, 333 bp, Oryza sativa
  Clone ID: PAT_MRT4530_102603C.1
cgtgaaggggaagggcgggaaggcgtacgggcagtacggcgcgctgtgcctggagacgcaggggttccccgacgccgtgaaccaccccaactgttaacaaccaaatttggtaacatctgtgtcaggaaagaagattggatcaaagcaaagtcagaggcggagatcgattcgagaacagagcaagaatcggctggagcccagatcggctacgattagtatcggttaagtccaagtcagactggagataaatatgggcaaaagtttgccgcaaagacttatggtatcttagagtttgttagagataatagtcgtgtccggtatggacatatcttg

SEQ ID NO: 2869 - DNA, 204 bp, Oryza sativa
  Clone ID: PAT_MRT4530_102604C.1
atcaattctacatctccacatactatcatgtccactactcataatccatatttagagcggaatcaaccctctcggagagggtgtggatcctcatggccagcctgttccttcacagctattatctcaatctccttaccaacaactaccccttcattaccatccactacatgacctacatgcataaactacgataccatactctta

SEQ ID NO: 2870 - DNA, 617 bp, Oryza sativa
  Clone ID: PAT_MRT4530_102605C.1
cggcatcttctacactctagctcacagcttcgcggtttccacgcacttgaaaactcacgtttccaagccggaaaaccatggctcgcttcgccgtagtcgccgccatcgtcgccctcctcgcggtcacggccgccgcgcaggccccgggagcggcccccgtcccggcgcccaagatggccccgctgcccgctcccccggcgaggtccccggccaccgcccccgcgccggtcgccaccccgcccaccgccgcgtcgccgtcccccatggcgtctccaccggccccgcccactgacgcccccgccgccaatgccccctccgccgtcaccccgtccgcggtcaccccctcctccgtctccgccccgaccggcgcccccgctgcctcctccacgtacaccgccaccgccagcttcgttgccgtcgccggcgcggtcgccgccgccatcgtgttctagatggatggatggatgatttgatcgacgcgttgtttatacggcgagattcttttttgtgattctgttctatttacagacagcgagacactgatattcagatgtttacacttgtcatgtttgatgagatgattatcgatggaatatattctttcatttattattacc

SEQ ID NO: 2871 - DNA, 393 bp, Oryza sativa
  Clone ID: PAT_MRT4530_102606C.1
atggacattggatcagcaaagagatatttctaccccaagtcaaagtcggagatcaagtcggaggcggaagagggcgacgttgacggctgccatggacgaggaccacggtggtggacggaagtgacgagcacggaggatgagctgcagcggaagaacgtgatgacggtggttgcggtggaggagggccgcagccaaggcgaacgtaggcggcggcggcgacggcggctggggtggacgacaatgatgatggtccggtggataaaggagacggtgacaaccgtgcaagacgagggcacccgtgcggctgtcgcgaaagatggcgaccgccggactggacgacgtggtcatgcggcgtacgcagccgggctgtgcaacggacgtggtatacggtga

SEQ ID NO: 2872 - DNA, 1017 bp, Oryza sativa
  Clone ID: PAT_MRT4530_102607C.1
atggctcacgagatgatgggtggcttcttcggccatccgccgccgccgcctgcgacggcggcggtgggtgaggaggaggacgaggtggtggaggagacggaggagggtggccatggcggaggagttcaggggaagctttgcgcgaggggacactggcggccggcggaggacgccaagctcaaggacctcgtcgcgcagtacggcccccagaactggaacctcatcgccgagaagctcgacggcagatcagggaagagctgcaggctgaggtggttcaaccagctggacccgaggattaaccggagggcgttcacggaggaggaggaggagcggctcatggcggcgcaccgggcgtacggcaacaagtgggcgctcatcgcccgcctcttccccggccgcaccgacaacgccgtcaagaaccactggcacgtcctcatggcgcgccgccaccgcgagcagtccggcgccttccgccgccgcaagccttcctcctcctccgcctcccccgcccccgcccccgcgccgccgccgccgccgcagcccgtcgtcgcgctccaccaccaccaccaccggtactcgcagcagtacagcgggtacagcggcgccgccgagtccgacgagtcggcctccacctgcaccaccgacctctccctcagctccggcagcgccgcggccgccgccgccgccgccgcggcggcgaacatcccctgctgcttctaccagagcacgccgcgcgcctcttcctcttccaccgccgcgtgccgcgcgcctcgcgtcgcggcggcggctgacacggtggcgttcttccccggtgcaggctacgacttcgccgccgccccgcacgccatggctcccgcggcggcgtccacgttcgcgccgagcgcgcgctccgccttctccgccccggcgggccgcggcgagccccccggcgccgtcgaccagcgcggcggcgcccaagccaccaccgacagccacaccatccccttcttcgacttcctcggcgtcggcgcgacatga

SEQ ID NO: 2873 - DNA, 2980 bp, Oryza sativa
  Clone ID: PAT_MRT4530_102608C.1
aggaatcggcacgagggttcatttctctcttgctccggctcgcctcgcatcgcctcttcctcctcttccctcatcgcgttcgcgtttccatccccatctccatctcctcctcctcgccgcattcgcatctccctcctctcgccgccgccgccaccgccaccgccgccgctcccttcctgccattaccgcccgtgcccctcacccccctttgcccctcgatctctcccccctagggtagggtaggggcttgcctccgattccgtacggacacaccctacctagggtagggtaggggtaggggtagggttgatagagagaggttccgggatgacggccggcgagggctgcgcggcccgacgcgggtgatccgctctcacgcggggagcccctctcgcgcgcgcttgcttcacgtgggggatcccgtcgcggctatccctcctctcctctcttcttcccccttctagtctagtttagggttttctatctatccatctagattttgatcttcccctcctcgctgcttcccctcgcccttctgacctggcgcagatgttttcccacggcgctgattccgcccacgacgccggcgccgtcagcaccggtgcctccggcgtccccacgcgcttcgtctggccctacggtggcaagagggtctacctcaccggctcctttaccaggtggacagaacatttgccaatgtctcctgttgaaggttgtcccaccgtttttcaggccatatgcagtttgtcccctgggattcatcagtacaagttttgtgtggatggggaatggcggcacgatgagcggcaacctaccataacaggagactatggtgtggttaacactttatgcttgactagggactttgaccagataaatacaatattgagccctagtacacctggaagtaggatgaacatggatgtggacaacgacaattttcaacgtactgtttctttgtctgatggcattattcaggaaggtcctcagagaatttcagaggcagctatacagatctctaggtgtcgtgtagcggattttctgaatggacaaactgggtatgatttactcccagattctggcaaggtcattgctctagacgttaatttgcctgtgaagcaatcttttcatattcttcatgaacagggaattcctgtggcacctctatgggattcattcaggggccagtttgttggccttttgagcccactggattttatactcatattgagagagctggaaactcatggctccaatctgacagaagagcagcttgaaacacatactatatctgcgtggaaggaggccaagcgtcaaacttatgccagaaacgagggttcttggagggcaaatcaccatttagttcatgccaccccttatgaatccctgagggaaattgctatgaagatactgcaaaacggtgtttctaccgttccaattatgttttcctcatcaccagatggctcatatccacaattgttgcatcttgcttccctttctggaattttgaaatgtatttgtagatattttaaaaattctcaaggtaatttacctattttgagccaacctgtatgcacaattcctctgggtacctgggttccaaaaattggtgatcctaatggccgtccattggctatgttgcggcctaacacatctcttagcgctgccctgaatttgctggttcaagctggtgtgagctcaataccaattgtggatgacaatgactcactgcttgacacatattccagaagtgacatcacagctcttgcaaaagacaaggtgtacacacacattcgcctagatgagatgaccattcatcaggctctgcagcttggacaggatgcaaattcgccctttggattctttaacgggcaaagatgtcagatgtgtctccggtctgacactttgttgaaagtgatggagcgattagctaatcctgtgaatagtagtttttcttgtctggtgaaggtgaaggtgaaggtgcaggtgcagcgtgcggtgcgtccttggtccctgtcgagtaacggcgacgggcttggcgtcgagcggaaagatctagagaggctgaatgagaaggtgaaggagcacatcgaggagaaggcggggagagcagtggcgaagcacagccagcttgtgaaggaggtggacgtgcgcctctccgcccgcggtggcgagctcagccgaggtcccaagatttgcaggtgcgagatcactctcttcaccaagcgccacggcgtcatccgcgccgaggaggacgccgagtccacctacgccagcatcgacctcgcctcctccatcatcaagaggaagctcaggaagatcaaggagaaggagaccgacgtccgccacctcaaggggaccaagccccccgtctccgactggccgccatcattgctcgacaacaacgacgacgacgcccaggcccagctcaaggatctggaggaggccgtcggcgccgaggacgaggacacggtgctcaccaaggtggtgcgcaccaaggtgttcgagatgccgccgctgtcggtggaggaggcgatggagcagctagtgaatgtggaccacaacttctacgccttcagagacgagaagaccggggagatgaacgtcctgtacaagaggaaggaaggaggcttcggtctcatcgtccccaagggagacggtcatctccacaaggagaccatccccaactctgaccaccaccacccctcccttgctgcctagcctctacacctcctgcatcaccatcctcatttgctaattatttctatgcttgcccaagagtctctaaatattactagtattaattaatccaagtgatgagagaggtctttgattttgtctccgtgtacatcgatcgatcgactcttgactactctgtttaaccaactgttttcgatatatttatattattaatgatttttccaaggtttttactctaaaaaaaaaaaaaaaaaaaaaaaaaaaaaaactcgaggggggg

SEQ ID NO: 2874 - DNA, 463 bp, Oryza sativa
  Clone ID: PAT_MRT4530_102609C.1
gcacgagggggagataattcgtcgttcgttttgtgcatccatccagaattcgttccagatccggggagccagcatctcaagcttctctcttctcttgttattaagagcaagcaaacagtagtctagcgaagcgagactgcgagagcagagcattgttcttcttctctagctattagtggtggggaataatgggtcccggcaccaccgcggcaatggccctcgcgccgcctccttcccatcagcatcaccatcaccatgtcaagcacagccagcttgtgaaggaggtggacgtgcgcctctccgcccgcggtggcgagctcagccgaggtcccaagatttgcaggtgcgagatcactctcttcaccaagcgccacggcgtcatccgcgccgaggaggacgccgagtccacctacgccagcatcgacctcgcctcctccatcatcaagaggaagctcaggaagat

SEQ ID NO: 2875 - DNA, 597 bp, Oryza sativa
  Clone ID: PAT_MRT4530_10260C.1
atggcgctgtccagccgcgtctcgccagcgacggcgacggcgaggacgagcacagcgagcagcgtccagcacacgcaccggcagcaccgccgcccgcggcccttgcgccgacgcccaccgggtggattcggtggtagtccattgagatggagacgctgcttgccgggcggctggcggcgcgtcgatgggacctcggcgaccggccgcgcgtcgatggggaggccggcgagccaccgcgcgtcgagggggagccgagctccaggacgcgcgtcgtgggggagccaggcggccggcctcgcatcgtcggggagcaagacggccgaccgcgcgtcgtcggggagccggccggccggcgttaaactagattgggtcaagcctgttgtgcacgacagcaatgcctcgccacgccacatgctatgtgcatctatgaggcttctggccaacaccaaatctagcaaaaggagccagatccagccaagcatcctcgccaacagtatggaagatgacgatgcgcgatggatccactgccatctggtggaaagaggggcaaacagccttccaccggagcgggcaaccacaactacacctccgttgtag

SEQ ID NO: 2876 - DNA, 605 bp, Oryza sativa
  Clone ID: PAT_MRT4530_102610C.1
tattaagagcaagcaaacagtagtctagcgaagcgagactgcgagagcagagcatgttcttcttctctagctattagtggtggggaataatggctcccgccaccaccgcagcaatggccctcgcgccgcctccttcccatcaccatcaccatcaccatgtcaagcagctgcagctccctccgtctgtctccgtctccgtgcccctccgctccggtttccttggccgcgcactgcctgctgcggatgtcgtgggacgggcccctctcctcggtccgcctcattatgcagggccgcaacgtcaagctgaatgagaaggtgaaggagcacatcgaggagaaggcggggagagcagtggcgaagcacagccagcttgtgaaggaggtggacgtgcgcctctccgcccgcggtggcgagctcagccgaggtcccaagatttgcaggtgcgagatcactctcttcaccaagcgccacggcgtcatccgcgccgaggaggacgccgagtccacctacgccagcatcgacctcgcctcctccatcatcaagaggaagctcaggaagatcaaggagaaggagaccgacgtccgccacctcaaggggaccaagcc

SEQ ID NO: 2877 - DNA, 519 bp, Oryza sativa
  Clone ID: PAT_MRT4530_102611C.1
atgcggcctgcgttgttcggccccggcttcgacggcggcggcgagcagcgcggtgcgttgcagggccagcgtttgacggcgacgtgcggcgagatccaatcccagcgtcgacggcacgggctgcggggtccacggcagcatgcggcatgtgtggcccacgactctgcgaggtctggtctaggcatagccattgcgagcagcggggtgagacacgaggtggtcgtggagagatcagacaccaagctatgcggcggcggtggcattaggagcattgccggccatgacgtcgaggtggccgaggcagcgaggtggtcgtggagttgtcggaacaggcaccacgaccactctacaaccacatcgctgcctcgcaccacgaccacctgtgaatgttatcgtggtcaacatagacagctcgtcatggatggtcatgtacatcaacttgaaaaaatgaagacgtcgaggtcgcagtggtgcgcctcgtcggcgcggatgacggtgacgacgtcctcgacgggatga

SEQ ID NO: 2878 - DNA, 1718 bp, Oryza sativa
  Clone ID: PAT_MRT4530_102612C.1
ggtatctctctctggtacggcgccgacgtgcggaggctgtttgtacaagttgagccgcatgcaatgcatgttgaggagcaactggaaatcgatttggaacttcattgatgcgtgcaggtgaaggtgaaggtgaaggtgcaggtgcagcgtgcggtgcgtccttggtccctgtcgagtaacggcgacgggcttggcgtcgagcggaaagatctagagagggtgggttacgtcgacagacactggataagatcaatccacatcgccacattactccgcccttttagacgcttgtctgctgctgctcatcagtagttcatcagtagtagtggtaggggagataattcgtcgttcgttttgtgcatccatccagaattcgttccagatccagccagccagccatctcaagcttctctcttctcttgttattaagagcaagcaaacagtagtagagcactccactccagtcagtaggtagctagcgaagcgagactgcgagagcagagcattgttcttcttctctagctattagtggtggggaataatggctcccgccaccaccgcagcaatggccctcgcgccgcctccttcccatcaccatcaccatcaccatgtcaagcagctgcagctccctccgtctgtctccgtctccgtgcccctccgctccggtttccttggccgcgcactgcctgctgctgcccacccacagccgctgctcgccgccgagagccgccgcagcagcgccgtgtccgtgcggatgtcgtgggacgggcccctctcctcggtccgcctcattatgcagggccgcaacgtcaagctgaatgagaaggtgaaggagcacatcgaggagaaggcggggagagcagtggcgaagcacagccagcttgtgaaggaggtggacgtgcgcctctccgcccgcggtggcgagctcagccgaggtcccaagatttgcaggtgcgagatcactctcttcaccaagcgccacggcgtcatccgcgccgaggaggacgccgagtccacctacgccagcatcgacctcgcctcctccatcatcaagaggaagctcaggaagatcaaggagaaggagaccgacgtccgccacctcaaggggaccaagccccccgtctccgactggccgccatcattgctcgacaacaacgacgacgacgcccaggcccagctcaaggatctggaggaggccgtcggcgccgaggacgaggacacggtgctcaccaaggtggtgcgcaccaaggtgcttcgagatccatccgctttcgttgtgaggaaggcgtatgacgcagctagtgaaatgtggaccacaacttctacgccttcagagacgagtagacccggggagattgaacgtccctgtacaagaaggaagggaaggaggccttcgggtctcatcggtcccccaagggagacggtcatctccacaaggagaccatccccaactctgaccaccaccacccctcccttgctgccctagcctctacacctcctgcatcaccatcctcatttgctaattatttctatgcttgcccaagagtctctaaatattactagtattaattaatccaagtgatgagagaggtctttgattttgtctccgtgtacatcgatcgatcgactcttgactactctgtttaaccaactgttttcgatatactttatattattaatgactcttccaaggtttttaaaaaaaaaaaaaaaaaaaa

SEQ ID NO: 2879 - DNA, 1270 bp, Oryza sativa
  Clone ID: PAT_MRT4530_102613C.1
accaccttaatttgctccctgtacagtgtcaccaccgctactcccttcgcacaagcaccgccccttctacctccgcgccgtcgctccctttatctctcgacatgtcagttgctttatctctcgacatgtcagttgctgcttctccctcaacgtgcctccatccttgctccctccgtatgtgtcgtcgctttcgctgctccctctgcgtgccgccacccctgctacctccgcacacactgcctccgcgccgctctctccgctcaccgccaccccttctcgctccgtgcgccaacggcaccgctccctcctcctgacctattcattgctacttctcccttcgcacacatcgttgtcgctcctactctctccacgtgtgccgccgcccccttctccctccacatgcaggtgacgtcgctccctcgttccccgcccgtccgctacaccagcctcccaattacctaccaaaaaaatctagtcatcctcatccgtatcctctcctccaccatccttatcctctcctctccaccactcgtttcccttccccttctctctctctctctctcccccacacttagaagaatcgcccggctccctcctctcccacgtccacgcgccgccgcctccctcctcgacgacgacgacgaccgcgacgccgccgacggctccatccactctagatccgcgtgctgccggctccctcctctcccacgtccgcgccgctggctccctccaggacgacatttgcgcgccgccgcatccctcctcaccgccggtggcctccctcctcgacgacgatgacgacgactgcgacgacgccgacggctccctcctctcccacgtccgcgccgccggcgccctccatgacgacgtccgcgcgctgccgcatccctcctcgccgccggcggcctccctcctcgacgacgacgacgaccgcgacgccgccgacagctccctccgctctagatccgcgcgccgccgacagctccctccgctctagatccgcgcgccgccagctctctcctctcccacgtccgcgtcgccggctccctccacgacgacgtccgcacgccgccgcatccctccgccgctggccacgacgagcgacgacgacggctccagatccgcgcgccgccggcttccctcctcgccgcctccgccggccacttcctctcctcccctccgtccgctgccgtcggcgcccgtggtgaggccggcggcggcgccccatggttttttttattttcctgagatgattttcacagccgggctg

SEQ ID NO: 2880 - DNA, 198 bp, Oryza sativa
  Clone ID: PAT_MRT4530_102614C.1
ctagaacaaggaccactcgtgtaggactagatacagcggagagagcttgttgctccaacattatttatagcagcaccagagctgacggggctgtctgcaaggggcggaccgtcctcaatgcaaagctgactgcaataagtttgcgagtgtgcacacacgatgatatctattgataactgactgtcaagcttgcgaacc

SEQ ID NO: 2881 - DNA, 321 bp, Oryza sativa
  Clone ID: PAT_MRT4530_102615C.1
atggcgtcagcgtcgtcgtcctcttcttcgttctttgacatcgagccactcgacggcggcgaggcctgcctgtccggccacgccatggacgcctgctccctctgccggaagccgctcaccaggaactgcgacatcttcatgtacagagggaacacgccattctgcagcgaggagtgccgggatcaccagatggagatggacgaagcagcagtgagggttagcgccacgaatgcgagggagcgcgctgcaagaaacgagcagcgccacaggctcgacgccggcagtgtcgccgtcgcggcgaatgtgcccgtcctgagctaa

SEQ ID NO: 2882 - DNA, 262 bp, Oryza sativa
  unsure (1)..(262): unsure at all n locations
  Clone ID: PAT_MRT4530_102616C.1
ctcaccccatctcctcctcccctctcctcccctccagctggggcnggcgggatggaggccggccacggcaggccccaggacagggcgacggnatggaggcctccgcggcggcccgacgcgaggcgacgagatggaggcggnggcgggctgcatcgagggcggctggcgaccggcgccggtcgagaggggcggtggccggctgcatnggncgcggngcnggcgagatgggggcgactggcgccgntcgaggtggcggtggccg

SEQ ID NO: 2883 - DNA, 334 bp, Oryza sativa
  Clone ID: PAT_MRT4530_102617C.1
tcttgatctgaaactagaaagtgataaaactggatggtatattgataccagtggggaacaagaggatcagtgctcggacgtgagagctcgtatatgagtggtgacatcagactattgacattatgcagattgcgttgagcatgtcactctgacattagtaaatggacgagctgatgacaaaagatgtttatgccgggctcttaggaagggtattgatacggacctttgattggtgtctgatgagaacgaggaattctggcgtggaacagagccacttcaactgggtcgcttgccgtgccttccagattcagtaactgttgtgggatattctctt

SEQ ID NO: 2884 - DNA, 390 bp, Oryza sativa
  Clone ID: PAT_MRT4530_102618C.1
atggcgctgaccaacctcgtgctgggggcggcggtgttggcggcagcggcgctcctcttcgccaccgacatccgcaagtccggcgcgatgttccgccgcaacgcccgcaagatttgggcctggctcgacgaggaaatgaaatccgcatccgccgtgtccagaagatcctgtagcacctgggtttcatacatgctttcaatggaaattcataatgggcctccaaaatccaagagtgggccaacaccaccaactcgcaggccggagatccagatcgtgccacctccaccaacttctaagctgattgggccgccaccaccaccaccagtgcagaatggggccagcaagaaggagaaacttgggatgaccaagccagtcatcattgttgattag

SEQ ID NO: 2885 - DNA, 366 bp, Oryza sativa
  Clone ID: PAT_MRT4530_102619C.1
gtactactaggcagtaagctagctaactaactacgtgggtatggcccccaccgtgatggactcctaggacacctctgtggctccattccaagggctcacgtgcaccgtcggcctcaccgttagacgccgatccaccaactcgggcttcggtaacgtcagacaatggcggaaggatcaagtgcatgcaggtgtggacaattgagggcatgaagaagttcgtgaccctatcgtacctgtcaccaattaccggggaggatcttttgaagcagatcgagtacctgcttcgatccaagtgggtgcctagcttcgagtttaacaagagcgtgttcgtataccgggagaaccacacgtctgcctgatactact

SEQ ID NO: 2886 - DNA, 248 bp, Oryza sativa
  Clone ID: PAT_MRT4530_10261C.1
gtgagagctgggattatacaggttcggaccactatggagcgtaataccctactcctgtacgtaggatttagggttcagtgttacaaaggttcctaaactccagggagaactctcactcttcttcccctggggcttaggctaattgagagttgtccccccttttcggtgggacggaatgtgggggcaccgccacccatccgatcggacgtgaccggtcacagaccggtcacaatccggtcatgcccgat

SEQ ID NO: 2887 - DNA, 163 bp, Oryza sativa
  Clone ID: PAT_MRT4530_102620C.1
ccaaaatagatcatcattaaacaagtgtcattttgtttatttgtacaaagagtaatgtgagtaatgtgcatcattgaatgtgttacatgcaaccaacaagattaatttctaatggtgcaatgacatccaatatttaaaatataagtcattcacacttttcttg

SEQ ID NO: 2888 - DNA, 636 bp, Oryza sativa
  Clone ID: PAT_MRT4530_102621C.1
atggggaccgtgtcatccagcagccgccgccgtgcggccgggagccaaccaagcagcagcagctgggtgaaggcgctcgacgtggagaacgatgaggaggcggcggcacgcgcggacgcggacgcggacgcgcacgcgctcgaggcgaagggcgacaagctgatgtcgcaggcgaggcgggagctgcacggcgtctggtcttacgtctcgcggcccttcattgtcgctgccagagcgcgcttctacttccacaaggccgccgaaaccttcgtgctcgccaacagctggaggaaagcggcggctgcacaccacgaacatgccgtttgttgcatgaagattgggcgatcaggtaggctcagagcggcatttgcgctcttcgaggctggaaaatgctacatgaaagttcttgaacctgatgatgaggagatgacgagcagaacggtgagcgacctggaaaaatcccttcgcatgtttgtcttggagaacgaattggtaatggccgcagaagtctgcgtggagctagccaacttgtatgccatgctgaaacagtgggaaaaggttagggagtacagacaaaaagcggcagaattccacgcaaagacgagtgatgcgttgttcgacacttccactgtttag

SEQ ID NO: 2889 - DNA, 447 bp, Oryza sativa
  Clone ID: PAT_MRT4530_102622C.1
ctagggcatccccgcgccgacgccgccaccgtatctcgccgtcgtctcgcgctcgtcgtcgtcaccgccgcctccgcctcctcctccgccgccgcatctcggcgccgggcagcgccaagccgccacgccgcccaccgcgcctcgcgttgcaccgccgctgcgcaacgccggcgccgtgccgcgcgcttcgccgccgccgcgcaacgtcgccaccgggccacgcgccacgccgccacgcggccaccgcgccgtcccgccgccgtccgctgccgccacaccgccgtccagctgccgccacaccgccgctccgcctccgctggacagaagagggcacgcgggcaacgaggtgccacgaagaagcttgagggtcggcacatcataacggaagtggacgaagatggccgacctagtgccccggcagaagccgccaagaactatgtacgtcat

SEQ ID NO: 2890 - DNA, 192 bp, Oryza sativa
  Clone ID: PAT_MRT4530_102623C.1
atgaaggaagagatgatgatgttcttccctagtggcctccgtgtcatgcttgtcgatgatgacatgaagaccgagatgttgtcattcttccctgatggcctccatgtaattcttgttgatgatggcaagaaggccatgagaaccgcaaccgcgacgttgtccaccctacactacctagctctcggcgtctga

SEQ ID NO: 2891 - DNA, 491 bp, Oryza sativa
  unsure (1)..(491): unsure at all n locations
  Clone ID: PAT_MRT4530_102624C.1
ccgctgaacaaaactcaaaaaggcctttcgcacgtgatagggaggtgctcaacatcaagaactagccacccagaagcttacgtgaaccatgatgaaaaaaagcgccctaactcaacatgaggccaattttgggggccccgtcaacagcatacataggctggagtgaagcttcacgtaacccttgttctggccgcctggcctgaacagagggacaactgcctttgcctgaaggccatacacattgctgagagcggccgtgaccttcttcttgcatgccttgaggtgcacgacggacgacgaggaggatagattcatttgcaggagcaggaggaacagccgctgcaggtggggccacacttgcaggtgttgcaaccgcatncgccgttctcgccgctcttcaccggcatctccattcctccagagctcgccttggtggatggagcagcgaggacgaaggtcttggggggggctgtgggcctcccctggggggg

SEQ ID NO: 2892 - DNA, 1440 bp, Oryza sativa
  Clone ID: PAT_MRT4530_102625C.1
atgcccaccgacaaagccccaaggctagatggcttcactgggatcttcttcaaagtctgctgggaaatcatcaaagaagacattcttctggtcttagactcaatctataatctcatatgtgcacatctaaatctgctcaactccgcgaacatcgtcctaatacctaagaaagaaggggctgagggggtcgcggactacaggccaattagcctcattcacagtatcgccaagattttctccaagatgcttgcgctgcggctaaggccacacatgcatacgttgatttcggtcaatcaaagtgccttcataaaaggaagaagcattcatgacaacttccttttcgtaagaaacatagctagaagataccaccgcttgaagcgagcaatgttgctattcaagctagacataactaaggccttcgattccgttcgctgggactaccttcttgccttgctacagcgaaggggtttcccaacaagatggagagattggttgggggctattttctcaacgtcaacttcgcaagtactcctcaatggttcgccagggcagcgaattaagcatggcagaggcctcagacaaggggaccccctttcaccactgatattcatacttgcaattgaccccctgcaacgaatcctctcaaaggcaacagagctcagtgcaatctcaaagttgcgagggagaacgacccgtctgaggacctcgatgtatgcggacgacgcaatcatcttcattaaccccactcgaggcgatgtcacggcttttgcagacatcctacatcgctttggcactgccactggactcgtcaccaaccttcaaaaatcccaagtggcggccatcagatgtgacaccattgagttgacggaggttcttgagggcgttccggtggccagaacgggagatatcaccggaggaaaatgtaaagtcaactggaaaaagacgtgcttgccaaccagtcagggaggattgggagtcctagatctagagaaattcacgagggccttgaggctgcgacggttatggcacgagtggaaggatccgaccaagccttgggtgggactggaaacgccctgcgatgaaattgacaggagtcttttcgccgcctcaacaaagataacaattggagatgagaacacgacgcacttatgggattttgcctggatcgagggacaaagacccagagacctcatgccactggtctatgtgatctctaaaaacagagggaggtctcttcgaaatggaaaggaggaggatgcctgggttcaggacctagctctggaatcacactcgcctattatagtagaactagttgaacaactggttgtcctgtgggaagcggtccggaatgtccacttaggcattggagaaccggaccagattacctggaaattcacaagtagcggacgctacacgacctccttggcctaccatgcgtaa

SEQ ID NO: 2893 - DNA, 670 bp, Oryza sativa
  Clone ID: PAT_MRT4530_102626C.1
agcatctgcagcagcggagcagatcggcatccgccgcttcctcctcctccggcgatggcgctggatcccaaagccaatcacgctgccgctgctgctgcttccgccgacaaccccacggcggcggcggcgaaggcgaaggtgaaggtgaaggtgctcttcttcgcccgcgcgcgggacctgacgggcgtgacggaggccccggtggaggtgccggcagggagcacggcgggagactgcctcgcccgggtgctggccgccttccccaggctggaggagatccggcgatccatggtgctcgcgctcaacgaggagtacgcgcccgaggacgccgccgtcggggacggcgacgagctcgccatcatcccgcccatcagcggcggctgacaatctttccacttctccaccaccctccccccaattcgaagacacgggggcgcaaagagagaagaaaccaccggttctttcttttgctttcctcttctttctacttgtttcctgatacaatttcaatcatacaatatacgcaagtttgagtaataagcatcgcctgttttcgcgatgataattgttacttggcatcggtgtccttcaatcatgttgatgaatcttgaatcacatttcgatttgaaaaaatataaatgtgtgggtcttctcaaaaaaaaaaaaaaaa

SEQ ID NO: 2894 - DNA, 3069 bp, Oryza sativa
  Clone ID: PAT_MRT4530_102627C.1
atggagagcgagctaggagcgctgtcgcacgtgcggcaggcagcgggcgcgcccgccgaggcggccgcatccgaggcgactacgtcctcgcccaccatcgggatcatccaccagatcttgaacctgaacagggacaaccacttccaccccctgcgcacccaacaagagaacgaacccatcacaaaatcagcaccaccggcggcggcgcacatcgcagtctctcctatgggattgcctgttatggagcatcttggaagctcaagcattgtgcgtgggagaggcaagaacaagaggatttggacgtactttgaggatgaggagctgatcaaggcattgttcgagattgctttggatccaagctggaaatcagaagggggtttcaaaaatggatactgccaagttctagagaacgtgcttgctaagaagttgccaagttctggccttactgctgttccgcacatagagtcgagagtaagacactttaggaccaagtttggcgcaattgaagtgatgctaaccaaaagtggcttttcttgggatgacaatagaaagatgatacaatgtgagaaacaacaatacgatgatcattgcaggaaaaacaatgaggcaaagggtctatatggtgtagcattccctcactatgatacactagctgcaatttatggtaaagacattgctactggagaaggtgcagagggtcttggtgaggctgttgctaatatggagaaagaaattgttcaagatattcaagatgaagaagatgaggaggatgaagagagagtgtctagagaaacgcctcggcggagcatcgattcagctgcagctcgacggagcatcgattcagctgcagctcgacggagcatcgattcagccacacctcgacggagcattgattcaactgcttcaagctctaagaagaggaagaaagacagcaacaaactgaaaaataccttgtcaagtgacccttttatggatgtctttgccaatgttcaaggtgatctgagggatgttacaaagcatgtgggagcaatggtggcatctatgcaacgtgaagctgagatccaagagaaggcaatggctgaggaggacccactacaaaaaattcagaacgaagctattcttgagtgtcaaaagattggattgactggtactgaagttgtcaatgctgcagctgcttttgtaaaagtgccggctcaaatgagtatgcttctcgctcttccagagtctctcaggagggagtacgtactgaaaatacttgctgaggatctgtctgaatccgccgacgatgcggtcctagcatacatcaatcagtttcttcttgaagatgaggaagatgaatcttgtcctggcaccatcacatcggtggaggactctgccctcctcgccgtcgagaagccattcgttgacatcctcactgctagccaagaggcctgtcaagagaattcttggatagattcttgttgtgatttcacggggaatggaggattgcttgatacgttcacaaccacacatgccgcttgccagccagcgccttgtgaatttgagaaggagaagggggagtgtgctgttcataaaggccggaagaacccgcatgatgattgcctattgttcgaggaagagagcaggaggagcaagcagttggcagtgtctgaggaggagactgtcagagagatgtttgacaaggtgcttctgtgtaatggcgaatgcgagctccgggcaccactgccagctgaagcacggaactgcggggtgtacgtgaaaggatctggaaataagagaggccgaaagaaaggaaaatctggagcatctgcagaggatgatgcggttgatctcactaccctactcattcattgtgcccaggccgctgcaatcgatgatcaccggaactccaatgagttgctgaaacaaattaggcagcgttcttctgcatatggagatgccggtcagaggttagcacattgttttgctaatgcgttggaggctcggctagctggcactggcagcaacatttaccgttcacttgctgccaagcgaacttctgtttatgacatattgaatgcattcaagctgtatgttacagcatgcccgttcaagaaaatatcgaacttcttctcgatcgaagccatcttgaacgcatccaagggtatgacaaggttgcacattgttgactatggtatacagtatggattccagtggccaatcttcttccagcggatctcgaagagacctggtggccctccaagtgttcgaatcaccggtgttgacttaccacagccgggattccgccctgcacaactcattgaggcgacgggccgtcggttgcatgactatgcccgtatgttcaatgttccatttgaataccatgctattgctgccaagtgggacactatccgtgtcgaagatcttaagatagacaaagacaaggatgaacttcttgttgttaactgccttttccggatgagaaacatgatggacgaaatggtgacagatgacagcccaagaatgcaggttctgaagacaataagaaagatgaatccaaatttgttcatccatggcgttgtcaatggcacctacaatgcgcccttcttcgtgacacgattcaaggaggctttgttctactactcttcactttttgatatgcttgaaacaactgcttcacgggtcgacgaaaacaggctgctgatagaaagagatctcttcggccgggaagctcttaatgtggttgcttgtgagggcactgagagagtagaaagaccagagacgtacaagcaatggcaggtgaggaacatcagggcaggcttcaagcagctaccactgaaccaagagacggtgaagaaggcaagatacaaggtgaagaaatcctaccacagggatttcctagttgacgaagataacaaatggatgctgcaaggttggaaggggcgtatcatctttgctctttcagcatgggaaccaaactagactagcaaactgtaaatatgactaactcagctgatttcttctgtggaggtaccactccattagttatgtctgattcctatttcaatgaattttgacctatttctgggc

SEQ ID NO: 2895 - DNA, 1170 bp, Oryza sativa
  Clone ID: PAT_MRT4530_102628C.1
ccgcgcttcctcccttccgcgctcccccctctcccggcgcgctcccgtactcgtgcggccatgggcaacctcgccgccgccgccgccgcctcctccgccgcagccggcggcggcggcgccggggacgccgggcaatgcccgtcaccgggcgtcccatcgccggtgggggtgcgccttcttctcaacccccgtgttaccgcccccctgcctcacaccttcggcttcaccccatatcctccccaggcctcacgctggatcgggcgacgggtacccctccgacggtgggctgctgctgtcctccggcaagcggcggcgcgcgcaggagaggaagaaagctgtcccttggactgaagaagagcaccgaacatttcttgctggtcttgaaaagctaggaaagggggactggaggggtatatctaagaactcggttacccacgcgtccccaactcaagtggctagtcatgctcagaaatattttcttagacaaactaatccaaacaagaagaagcgcagatcaagcctttttgatatgatggcaactgatatgtcaccagcaccaaactgccctgtcttgccaccatcaatgggaaaattacatgatatggtagctatgactaaacaactccagaacagcagtttggaaggagtctcatcttcaagcacagttaatctagcaccacaagttgcaagagatcttcctcccccaattccatcttttaaagcaacaaatgtagattcaagtctcagcaaaatgaaccacatggacggtttcttgagggcgcccatgctgttcagaccaattccaagaatcgctgaaggggcatcttcatcgactcctgcaactgcaagcatagctgatctggaatttcaagctaacctgactgcatgttctaatgcattattcgcgagtccgagaagaaagccaaagaaggcagatcctccagcagagaaggatctggatctgacagttgccccaccctcccaacaaaccagggccagtatttcttcccagaacgcagtaggcgtaattcaagtcgtatagactgataattttttttggggagttttaactatgttgttgaatgtttacaaaaataaacattaacattatattagcgatacaccaataaaagaaggaattaaagataaaaaaaaaaaacacaccccccc

SEQ ID NO: 2896 - DNA, 2646 bp, Oryza sativa
  Clone ID: PAT_MRT4530_102629C.1
atggagcatcttggaagctcaagcattgtgcgtgggagaggcaagaacaagaggatttggacgtactttgaggatgaggagctgatcaaggcattgttcgagattgctttggatccaagctggaaatcagaagggggtttcaaaaatggatactgccaagttctagagaacgtgcttgctaagaagttgccaagttctggccttactgttgttccgcacatagagtcgagagtaagacactttaggaccaagtttggcgcaattgaagtgatgctaaccaaaagtggcttttcttgggatgacaatagaaagatgatacaatgtgagaaacaacaatacgatgatcattgcaggaaaaacaatgaggcaaagggtctatatggtgtagcattccctcactatgatacactagctgcaatttatggtaaagacattgctactggagaaggtgcagagggtcttggtgaggctgttgctaatatggagaaaaaaattgttcaagatattcaagatgaagaagatgagaaggatgaagagagagtgtctagagaaacgcctcggcggagcatcgattcagctgcagctcgacggagcatcgattcagctgcagctcgacggagcatcgattcagccacacctcgacggagcattgattcaactgcttcaagctctaagaagaggaagaaagacaacaacaaactgaaaaatacattgtcaagtgacccttttatggatgtctttgccaatgttcaaggtgatctgagggatgttacaaagcatgtgggagcaatggtggcatctatgcaacgtgaagctgagatccaagagaaggcaatggctgaggaggacccactacaaaaaattcagaacgaagctattcttgagtgtcaaaagcttggattgactggtactgaagttgtcaatgctgcagctgcttttgtaaaagtgccggctcaaatgagtatgcttctcgctcttccagagtctctcaggagggagtacgtactgaaaatacttgctggccctttggccctgcacgactcacctcacccaacatcccacgaaaaccctcgcggcctcggccatcgcccgtcgcgcacctccaagcccacgcacctcgccgccctcgccttcgcctccgttcctcgccgcgctcgcggcctcctccgcgcctcgccgcctccaggactcgtcgcgctgccgcctccaggcctcgccgcgttcgacaccgtctccaggcctcgccgcgctcgacacctcctccaagcctcgccgcttcgcttctcctaccgctcccaagcggcccacgcgtcgccgccgtcctccaactactacacaatggacagaggaaaggaggccagggccagccggtccaagaggggacaaaaggaggatgaaatgaggttacggagggaagctgccgaagttctggatttacagaggaatggcgatctagacatggcgcttgatcgcgctatgagcctcttcaacgcctctccatgtcccatgatctacaacctcgtaggggacctgaatatgaaggcatttcactcccgagcggccaagggcagcccagaaattttggcggaatcccagttcaacagagcactatcaattgcacgaccattagatcctgccatccataacatttcatatggagtatccctacctgaaaaagcctctaagagccaaagaatcactgcagcaagagaaaggctccaacgagcaatcgatataaacaacaatgcttgttgtgaagtcgatgtggagcgtgttctcagcattgcaaagagctcaggagtcgcgtatgcggtgcatagggccgcagctgttgcaaccacattccctaagtcagctcgtgcgcaatttctgccaacctatgtggcactggaccttgccaagagtattgaaccagatgctgataaggaggagctgaggatgagtgttgtcgagcccattgagaaggctgacgatccaagcagtcacgacatccctgtaggtccatttactgcaaaggaagtagctgatgctgctgaactgcaaagggagaaacgaaaagaaggaaatgacatcatcaaggcagtcaagaagaagttgcggaatttaccttcggatagatcaagtaatgaggtctgtgaggtcctcgttgaaaatgctaacccctcagatttggaattgattgatgtggaggacaatggggtgaagccttcagcgacactagaaacaaaaggcacctccaattatcagaactcagtacaggacgttcctaagattttggttccaaagatctctgatccctctttatacaagccccctcctgatccgcggatcgtaaatcagcaagccactcggtatggctatagcgctttacacaggccagctattggacaaagtgttgtgactccagtaaatagacttgtggagatcgttgatgcagcaaataagtttgacccatacgaggtggagcattcgcaccaatcatacagaagagaacaggctaagatcccaaaggatcaggaactatgtgtcatctgcttctttgagagatattctactatcgcaatggcttcaggaaaggagatattatcatcagcagcagtaggatgctattgtgatcttgacttccacaggaatgatggtgaatag

SEQ ID NO: 2897 - DNA, 300 bp, Oryza sativa
  unsure (1)..(300): unsure at all n locations
  Clone ID: PAT_MRT4530_10262C.1
actagatcaccacacgcgcacacagacacgacgcaccaatggcgctcgtctacgactgctgcttcaccaccagncgtgacgagcgctccccggcgccgccagggcctcctccttactcggacgatccggcaggagcggaaggctgctggtgaggcaggccgagtcgtgctcacggcggtcgtggagggcaatgcgcgctacggcgccggacaggccaatatgattgcctggcacaacctcagggacgtgcatcgactgaggtctatcgggtaactgccgcttgggtcccgaggagtctgg

SEQ ID NO: 2898 - DNA, 3432 bp, Oryza sativa
  Clone ID: PAT_MRT4530_102630C.1
atggagagcgagctaggagcgctgtcgcacgtgcggcaggcagcgggcgcgcccgccgaggcggccgcatccgaggcgactacgtcctcgcccaccatcgggatcatccaccagatcttgaacctgaacagggacaaccacttccaccccctgcgcacccaacaagagaacgaacccatcacaaaatcagcaccaccggcggcggcgcacatcgcagtctctcctatgggattgcctgatcgagcgccgccgcagcttctcctccacatcgcgcgcgtcgccatcgccgccccctctccctgtgcgcgtcgccggcgcctcctcctcaccctgtgcgcatcgccggcgcagccccctcgccccgcgcgtgtccccgcgcctccccatcgtcccgcgtgtcgccggcgccgtcccctcaccccccgcgcatcgccgacgccgccgtcttgcgctcctccaccaccgccgtcttccgatgtggatcttgaccggaagaactccgggaacaagggcgaggctgtgaagcagggggctggtgccatcaaccacatcggacttccgtcgttgctgtcatctatcaatcacctcgccgttatggagcatcttggaagctcaagcattgtgcgtgggagaggcaagaacaagaggatttggacgtactttgaggatgaggagctgatcaaggcattgttcgagattgctttggatccaagctggaaatcagaagggggtttcaaaaatggatactgccaagttctagagaacgtgcttgctaagaagttgccaagttctggccttactgctgttccgcacatagagtcgagaaaaaacaatgaggcaaagggtctatatggtgtagcattccctcactatgatacactagctgcaatttatggtaaagacattgctactggagaaggtgcagagggtcttggtgaggctgttgctaatatggagaaagaaattgttcaagatattcaagatgaagaagatgaggaggatgaagagagagtgtctagagaaacgcctcggcggagcatcgattcagctgcagctcgacggagcatcgattcagctgcagctcgacggagcatcgattcagccacacctcgacggagcattgattcaactgcttcaagctctaagaagaggaagaaagacagcaacaaactgaaaaataccttgtcaagtgacccttttatggatgtctttgccaatgttcaaggtgatctgagggatgttacaaagcatgtgggagcaatggtggcatctatgcaacgtgaagctgagatccaagagaaggcaatggctgaggaggacccactacaaaaaattcagaacgaagctattcttgagtgtcaaaagattggattgactggtactgaagttgtcaatgctgcagctgcttttgtaaaagtgccggctcaaatgagtatgcttctcgctcttccagagtctctcaggagggagtacgtactgaaaatacttgctgggtggatcttgttcgaagattcaagagtcatgttggattctggttcttatgatgatgttgactatggggatttgttctccatccccaatccacctgcgcctcacttgctcaatttccccctccagttcttcccttccaacggattcatcagttctgctgatgattcccatagatcaccagctggtatgtttggctcgaccccaagccccacatcaaccacaaccgagttggaaaattcagaggatctgtctgaatccgccgacgatgcggtcctagcatacatcaatcagtttcttcttgaagatgaggaagatgaatcttgtcctggcaccatcacatcggtggaggactctgccctcctcgccgtcgagaagccattcgttgacatcctcactgctagccaagaggcctgtcaagagaattcttggatagattcttgttgtgatttcacggggaatggaggattgcttgatacgttcacaaccacacatgccgcttgccagccagcgccttgtgaatttgagaaggagaagggggagtgtgctgttcataaaggccggaagaacccgcatgatgattgcctattgttcgaggaagagagcaggaggagcaagcagttggcagtgtctgaggaggagactgtcagagagatgtttgacaaggtgcttctgtgtaatggcgaatgcgagctccgggcaccactgccagctgaagcacggaactgcggggtgtacgtgaaaggatctggaaataagagaggccgaaagaaaggaaaatctggagcatctgcagaggatgatgcggttgatctcactaccctactcattcattgtgcccaggccgctgcaatcgatgatcaccggaactccaatgagttgctgaaacaaattaggcagcgttcttctgcatatggagatgccggtcagaggttagcacattgttttgctaatgcgttggaggctcggctagctggcactggcagcaacatttaccgttcacttgctgccaagcgaacttctgtttatgacatattgaatgcattcaagctgtatgttacagcatgcccgttcaagaaaatatcgaacttcttctcgatcgaagccatcttgaacgcatccaagggtatgacaaggttgcacattgttgactatggtatacagtatggattccagtggccaatcttcttccagcggatctcgaagagacctggtggccctccaagtgttcgaatcaccggtgttgacttaccacagccgggattccgccctgcacaactcattgaggcgacgggccgtcggttgcatgactatgcccgtatgttcaatgttccatttgaataccatgctattgctgccaagtgggacactatccgtgtcgaagatcttaagatagacaaagacaaggatgaacttcttgttgttaactgccttttccggatgagaaacatgatggacgaaatggtgacagatgacagcccaagaatgcaggttctgaagacaataagaaagatgaatccaaatttgttcatccatggcgttgtcaatggcacctacaatgcgcccttcttcgtgacacgattcaaggaggctttgttctactactcttcactttttgatatgcttgaaacaactgcttcacgggtcgacgaaaacaggctgctgatagaaagagatctcttcggccgggaagctcttaatgtggttgcttgtgagggcactgagagagtagaaagaccagagacgtacaagcaatggcaggtgaggaacatcagggcaggcttcaagcagctaccactgaaccaagagacggtgaagaaggcaagatacaaggtgaagaaatcctaccacagggatttcctagttgacgaagataacaaatggatgctgcaaggttggaaggggcgtatcatctttgctctttcagcatgggaaccaaactag

SEQ ID NO: 2899 - DNA, 338 bp, Oryza sativa
  Clone ID: PAT_MRT4530_102631C.1
tttttgggggtttttatttttttgtgtgtttttttttttttttttattttttttttgtgtttttttataatcgtggctggccaggtaaaccacgcaaaacattaaatgaaaagggaaaccggggtgggggcaaaaaaatcttaggaaactggggggggatttaccaaagtttaacggccctggatcccgggcaaaagggtttttcaaggaccggaacccaaggggctaatggcttcaccacccaaaaggttaaggggcggttccaacaaagggcgcacttaaagacccctaacgccacggccagggggggggggccccacaaaaaaagggcccggccc

SEQ ID NO: 2900 - DNA, 1668 bp, Oryza sativa
  Clone ID: PAT_MRT4530_102632C.1
atggacagaggaaaggaggccagggccagccggtccaagaggggacaaaaggaggatgaaatgaggttacggagggaagctgccgaagttctggatttacagaggaatggcgatctagacatggcgcttgatcgcgctatgagcctcttcaacgcctctccatttccagattgcattgagacaactaccgcccacggtgagtctctttctgcatctaaggagtacagtttggcggaatcccagttcaacagagcactatcaattgcacgaccattagatcctgccatccataacatttcatatggagtatccctacctgaaaaagcctctaagagccaaagaatcactgcagcaagagaaaggctccaacgagcaatcgatataaacaacaatgcttgttgtgaagtcgatgtggagcgtgttctcagcattgcaaagagctcaggagtcgcgtatgcggtgcatagggccgcagctgttgcaaccacattccctaagtcagctcgtgcgcaatttctgccaacctatgtggcactggaccttgccaagagtattgaaccagatgctgataaggaggagctgaggatgagtgttgtcgagcccattgagaaggctgacgatccaagcagtcacgacatccctgtagggtctaccaaaggggatgaatatgatgatcggatttgctttgtaaagaaacagatccatgggcttctacaaactcttgtactattcgcaagacgtgattggagccttataacaagtgaaaagcaacgaatgatcctatctgtgaggcttgatgttctttgcgaatactacagcaaaatcaaccgttcactatccaagtctctaacagatgctcatcatttcgaagtagctgatgctgctgaactgcaaagggagaaacgaaaagaaggaaatgacatcatcaaggcagtcaagaagaagttgcggaatttaccttcggatagatcaagtaatgagttccatgttgcttgtaaaattattcaggaaatgtgtcataagctcctcaaaagttcatgcactgattaccgagaattcgtgttgccccttcttcgattccaccgatggctttcgtattctgacaacttaattgctggagaagataaaagaagtgaggtcctcgttgaaaatgctaacccctcagatttggaattgattgatgtggaggacaatggggtgaagccttcagcgacactagaaacaaaaggcacctccaattatcagaactcagtacaggacgttcctaagattttggttccaaagatctctgatccctctttatacaagccccctcctgatccgcggatcgtaaatcagcaagccactcggtatggctatagcgctttacacaggccagctattggacaaagtgttgtgactccagtaaatagacttgtggagatcgttgatgcagcaaataagtttgacccatacgaggtggagcattcgcaccaatcatacagaagagaacaggctaagatcccaaaggatcaggaactatgtgtcatctgcttctttgagagatattctactatcgcaatggcttcaggaaagaatgcgggaaccaaatgcaacttgtgcaatgcgagatttctaaaagacagtgatctagagttccacaggagatattatcatcagcagcagtag

SEQ ID NO: 2901 - DNA, 599 bp, Oryza sativa
  Clone ID: PAT_MRT4530_102633C.1
gcacgaggccatctcatctcgccatggcggcagcaactaatgaattacaatttgtgtgggtgcaactgcaggccgggtcgacggtggcgaagatcgggccgtggggcggcgactacggcggccgcgaccacgacgtgacggtggcgccgcggcggctgcggagcgtgtccctccgccacggcaagatcatcgactccatcgccttcacctacgacggcggcgacggcgacggcgagctccactccgtcgggccgtggggcggcgacggcgccgagctccccgaggcggtggcgaggaagctcgccgccggggagcggccccccggcgccacggtggcggagttcacgttcgacgccggcgagcgcgtcacggaggtgcacggcacggtggggccgttcggcgaccgggacagcctcgtcacctcgctcaagctcgtcaccgaccgccgcaccatcgggcccttcggctacggcgccgggacgcccttcagcgtccccgtgcgcggcgacggcggcgtcgtcggcttcttcgtccgcgccggcgcctacctggaggccatcggcgtctacgtcaacccgtgcatcccctccgagaaatga

SEQ ID NO: 2902 - DNA, 1239 bp, Oryza sativa
  Clone ID: PAT_MRT4530_102634C.1
atggagagactttcatttacttactacccagttgggagggttctgaacatgatggctgtgtccttcatgatgcaattcacagttatggagcatcttggaagctcaagcattgtgcgtgggagaggcaataacaagaggatttggacgtacttcgaggatgaggaactgatcaaggcactgttcgagattgctttagatccaagctggaaatcagaagggggtttcaaaaatggatactgccaagttctagagaacgtgcttgctaagaagttgccaaattctggccttactgctgttccgcacatcgagtcgagagtaagacactttaggaccaagtttggggcaattgaagtgatgctaaccaaaagtggcttttcttgggatgacaacagaaagatgatacaatgtgagaaacaacaatacgatgatcattgcaggaaaaacaatgaggcaaagggtctgtatggtgtagcattccctcactatgatacactagctgcaatttatggtaaagacattgctactggagaaggtgcagagggttttggtgaggctgttgctaatatggagaaagaaattgttcgagatattcaagatgaagaggatgaggaggatgaagagagagtgtctagagaaacgcctcgacggagcgttgattcatcagcacctcgacggagcatcgattcagctgcacctcggcggatcatcgattcagctgcacctcggcggagcatcgattcaactgcttcaagctctaagaagcggaagaaagacagcaacaaactgaaacataccttgtcaagtgacccttttatggatgtctttgccaatgttcaaggtgatctgagggatgttacaaagcatgtgggagcaatggtggcatctatgcaacatgaagctgagatccaagagaaggcaatggttgaggaggacccactacaaaaaattcagaatgaagctattcttgagtgtcaaaagcttggattgactggtactgaagttgtcaatgatgcagctgcttttgtaaaagtgccggctcaaatgagtatgcttcttgctcttccagaatctctcaggagggagtacgtcctgaaaatacttgctgtgctggccatcgtgttgaaacaccatggtggtttgagcctaccacagctgctgcaatctccaccagaaacttatcatgctattgaagatggccacaacccaagcaaaaccagcttcatagacatgaaggactag

SEQ ID NO: 2903 - DNA, 273 bp, Oryza sativa
  Clone ID: PAT_MRT4530_102635C.1
atgggaaggcgcggggacacgcgcggggcgagggggctgcgccggcgatgcgcacagggtgaggaggaggcgccggcgacgcgcacagggagagggggcggcgatggcgacgcgcgcgatgtggaggagaagctgcggcggcgctcgatctggacgaggcgcgtgaggagagttagggggtggaagtggttgtccctgttcaggttcaagatctggtggatgatcccgatggtgggcgaggacgtagtcgcctcggctgagctgggcatgtag

SEQ ID NO: 2904 - DNA, 308 bp, Oryza sativa
  Clone ID: PAT_MRT4530_102636C.1
aaaaaaaacaaattttaaaaaaaaataaaaaaaccttatttaattgaaaagggtaaaaacccggaaaaaaaaacacaattccggaacagattaaaccttttttcaaaacatcggaaaaccaaccccggggggcaaaaaaaaacgaaaatttaaaaggaaaaactacctgcattaatggaaccgggaaaaaaaactgaaaattttatgaaaaaaccccaattttacaaaacctaagtgggttaaatgaaggggattcctcacccggacccgggggtcaacccgtaaaaaaccggccgggccctggcggg

SEQ ID NO: 2905 - DNA, 330 bp, Oryza sativa
  Clone ID: PAT_MRT4530_102637C.1
atgcatagtgcactggacgccagtagtttcgagtggaagtacaaggcacggtggcctctgtccttgcacgtcgccgcggacacggacacagtggcttcacacaacttttctctgtttcgcccttttcgcgcagagaaaaacaagcagcccaacgcattcggacagggactaatccgagaccccgtcgccgttttcgccgggcgcgcaccgcgaaatgtcaggccatatgcagcgatacaggcgggggctgatggcccagcggcagcgagcgaggcgtggaccatggaccacgccgcgggagcaatctcggtcgacttgagccgagcttag

SEQ ID NO: 2906 - DNA, 311 bp, Oryza sativa
  Clone ID: PAT_MRT4530_102638C.1
ggattgggtttttttttttgaaacaaaatgccccccaattttaaatctggagggggacaatttggctttaagggccatattcgtgtaggaaaataaaccccccctttgagaaaaatccgttttttagggggatttttgaggaccgggggttaagaccacaggggggccccggggggcaaccatgttgtgggcattgtcggggacggtgtaaaagcggaggggggggtggtgcccccctgggtgctctgggaggaggaaaggaatttagatgggggtggggaaaaaggttggtttttggggggacacccccc

SEQ ID NO: 2907 - DNA, 692 bp, Oryza sativa
  unsure (1)..(692): unsure at all n locations
  Clone ID: PAT_MRT4530_102639C.1
gctaaaatggttgaaaattaacttactgcttttggtctgagaaaacaagtatacacatggtaaattattgtggtttgtggttctagaactctcgtcatgatacctctggttctcagcgatgattttgctacagtttattgggaattctatgctatttggggttgcatgtcatttgtcatgcatacaatcatttcttgttcattggaataacaaaagaaaatgctcatatatgaatgctaagttatcagaacttctccaggctgtttatctgaaaaaacttgtaaactttggaaatttttgtatagtttatactggatattgtttgttctatgttcatatgtcacaggcttaaaaaaggaactgttatgaaaagctccatgcccctcaactgaaacttttagaggcaggagagctttaaagaactgcagcagctattcgtagacatgttccaagctgatcttgattcgggtttctgcaatggaccctcaaagtgctaccatacccaggcccaaagccagactcgaacatcctcaacctccccttcgatgtcaccgtctccaccgcctccagtagctactgangcagaatcgccatcatgtaatggtattaataagcgtggttcatcagcaatggactcttggaaagccctcagagccagcgaagtcggttctggacagagtcaatcagggttt

SEQ ID NO: 2908 - DNA, 676 bp, Oryza sativa
  Clone ID: PAT_MRT4530_10263C.1
ctaataaataaaaattccaaaaattgaaacactcattcccatccaccccagccccatcgttgttgtcgccacaattgttgttgccattgtcattgttattgcccccgtagttcgccatcgccgccgaagtttgctgccaccgtcgtcaaaggccccaccattcctgaggctgtcaccggcggatccgaccctcccggagccgggggcggtgcatccgcccttcctgaggccagacaacaccagatccgccaccacatggcttactgcttcagaggctgcccctcctgaggccagcggcactggattcgccaccattgaggttgccgtcgtcgcggccctagcctccgtcatcatggtagccctagtctccatcacccctccggccacgtgtagattcggcgcatccaacactacccctctccacccctttgctgtcagtgccagatccacgctcatggtggcaccagctcccattgggtgcccatctgccgcgtgcaccttctgcaggcctctagcggcgaaccgcccctcccattgctgctcactgactgctcctattgccagccgtcaaggagagccgatggaggagaggagaaaagacggcgaaggagaggaccgaagagatgtggaggagaggaaaaaacttaacgggtggaagaaaaggagatggatttga

SEQ ID NO: 2909 - DNA, 472 bp, Oryza sativa
  Clone ID: PAT_MRT4530_102640C.1
gcacgagggcctcccctcatccagcaacaccgtccctctccaccgctcccccaccacccacggcgcctcccctggccgcgggcaccctttttttctacacctcctctctcgccacaatcctctctctcgcctcctctccgtctcttcaaatcctaagcggcggcagctactcccctccccggcgtggcggcactgctcctcccctcccggcgtggtggcagcggctgccccctccccttccgacgtggagccaacggggctgctactccccctcctcggcgtggccgcagcggcggcgacagttccctccacggttgccccctcacctccccgaagttgagccgacggaagttctctccggcgtggtggcggtttgatttgtgaatatttttaaggattttgtgatttgggatattgatgtagcaagttcatgaggctaattggtttttttgtgctaaaaaaaaaaaaaaaa

SEQ ID NO: 2910 - DNA, 393 bp, Oryza sativa
  unsure (1)..(393): unsure at all n locations
  Clone ID: PAT_MRT4530_102641C.1
gcttgcccttccggaacgctcccaaaccctaggcgcgtgaccatgtcggggtcgtacggatccgacgactaccgcggcggctacggcggccgaggtggcggcggaggcggccgtgggaggggaggtggcggaggaggagggggaggatatggtggtggtggtgtgggaggtggatatggtggtggtggcggaggatatggcggcggtggcggagggtacggcggcggtggtagaggtggcggtggaggaggaggctacggcggcggtggcggcggcgggagaggtggcggcgggaggggtggaggacgtgacggtgactgggtttgcccagacccgagttgtggcaatgttnactttncaaagaggactgattccacaagtgtggacacttct

SEQ ID NO: 2911 - DNA, 342 bp, Oryza sativa
  Clone ID: PAT_MRT4530_102642C.1
ccggaatcgccgccacgccccacacatcacgggagagagaggtgcaaaaaacttagcgctgaaactgaggatggcaacatccatgagcacctgcgcccttggtggcgaccggcccagtccaacgacctaccgtccatctcccgccggggatcctgcttcgccatcgtctgcagcggtgggaagaagatcaagaccggcaggccctacgtgataaggaggtggcatgtcagtcgatattgatgcaatctggcaggacgagcacggggaagggtgcgatccaattcggtgaccagtaccgtgcaatcgtggactggtacatgccactctactcgccggaggaat

SEQ ID NO: 2912 - DNA, 1347 bp, Oryza sativa
  Clone ID: PAT_MRT4530_102643C.1
cggacgcgtggctgatgaacaacctgcagtcagagatggcgtcgccgcgaatctgctgttcggcgctgctcgtgctgctcctggtttcctcgtgcaatgcaggtgaccacccggcctgcccggcggcgtggtcggcggcggtgggggcggagctgttccacggcggcgtcggcggcggcggcggcggggaggcgcagtgcagcgcggcggcgccgcacacgccggtggccgtgttcgcgcacgacgtggacccggtgcggttcgcgctgaacctggagttcgccgaggcggagttcttcctgcacgcggcgttcggcgtggggctggaccacctcgcccccaacctgacgctgggcggcccgccgccggtgggcgccaggaaggccggcctcgacgagctcacgtggcgcgtctgcgccgagttcgcctaccaggagatcggccacctgagggcaatccagaggacagtgggtgggatcccaaggccgctgatagacctgagcgcacacaacttcgccagggtaatggacgaggcggtcggctaccacctagacccgcccttcgaccccgacgccaacagcctcaacttcctcctggccgtctacgtcatcccttacctgggcatcaacggctacacgggcaccaacccgctgatcgacggctacgccaccaagcgcctcgtcgccggcctgctcgccgtcgagtctggccaggacgccgtcgtgcgcggcctcctcttcgagcaccgccgcgagacagtgtccccctacggtgccacggtggcagagctcaccgaccgtgtgtcggcgctgcgaaacaagctagggcagtgcggagtgaaggacgaggggctcatcgtgccagagcagctcggcgctgaggggaagatatgcaccaacatcctctccgccaacgtcgactcgctctcctacagccgaacgccggcagagttgcttaggatactctatctaactggcgatgagcacgtacccggcgggttctacccggagggcgctaatgggaggattgcccgaatgttcctcaaaaagccacctcgcattaaccacggtgtctaattagctatgcctacaattggtaaatgggtcctatcctcctattacctcacacatcaatatataatgatagtgtcattagaatgattgatgtgaacccatcaacaatggccaccccccccacaaaaaaaaacataaaaagaataaataatgtcattgagtgtgatgtatatgattgccaaaaatatgaatcactccttcaagtcttttgtatttgagagcataactcatttctccctatgccaaatatatttgaccggagggaggtatgtat

SEQ ID NO: 2913 - DNA, 584 bp, Oryza sativa
  Clone ID: PAT_MRT4530_102644C.1
cacacgctcctcttcttcttggcccaaactcttccaactccatcttcttctccccaaagatcaattgcgcagccgacgatcgtcgatcgatcgaatgcgcaattgcgggatcatcagtttttgtggcgggtttcttgatccataagtagctaagctgctgcccattcctttacttctttgccaaacgcctcctctaggtgtaggtggcgcgtctcccttgtacttggatccaaagagaccgtgtcgtctcgtctagagtaggtctctatctaggctctgatcttgagcctcattcggagaccatgtactaggctccattgccgatcttgtcctctcactctcacctgtccttgttgctcatgctcactcacagctcttcttgatcagttcatcagctcatcagggtcaaccttcggcagccattgttgtagcaggacattttgcctttttcatgtaaagttgcagtgtgaccttgggctggagcaaggaatatatctccccagttcttgatcgccggcaaggtatatcgggaattagattcttccagcacaaaagatcttcagacaagcagcggcggcggcgac

SEQ ID NO: 2914 - DNA, 459 bp, Oryza sativa
  Clone ID: PAT_MRT4530_102645C.1
atgccaccgtcgttgctccagcgcctgccactgccactctggcccccgccagctgcaaccgccgctccagcagcatccgctcgttgtcctttttgctcctccgatgaagatgtggagcacctcttcctacgctacaccggagtggcaacaatctggcacgcctttggcttggacgaacaacaaatcgcctccctgccgcagcttgaaggtgtctgggacattcctccgccgggacaacccgccactccaagagtctggcacaccatcctgcttgccgtcatgtggaatatttggaaacgccgcaacaacaaggtcttcaattccgttgacgatcctgcctcgttagttctccaacgttgtgctagtgacattgacctttgttcccaccgatgtaaaaatgctgagagcaagcaacagctccgcaactgggcctcctacctctatgtaattatctcttaa

SEQ ID NO: 2915 - DNA, 300 bp, Oryza sativa
  unsure (1)..(300): unsure at all n locations
  Clone ID: PAT_MRT4530_102646C.1
cctaagctagacagacagcaacaagaaagcagagagacagaggtagagaggcttagagagctattgacgtgcaattcttgtncgcgttcgcggcaanggatgtggagagctgcgcgtcgtcgtcgccgccgccggangccgccgtcgactggcgcggccggccgtgcgagccgcgccgccanggcggcatngcgcgccgccgtcttcgtgctanggatccaggcgttcgagatcanngcgatcgcgngcggtggggaacaacctgataaccgtacgtnttcgggggagatgcacttcccg

SEQ ID NO: 2916 - DNA, 203 bp, Oryza sativa
  unsure (1)..(203): unsure at all n locations
  Clone ID: PAT_MRT4530_102647C.1
aaacagncgnagtattttnaaaccctagagccnccanccncagagcaacatngncgacgncaccnncanncgnaacaacaccgacgncgaggaggagctgagaatacgagncgntgncgaaatccaagngcaaccgccctgtaaccttatccaagancaagaaggaagcctggnttagagcgcaagnngcaaagtggttaccg

SEQ ID NO: 2917 - DNA, 1860 bp, Oryza sativa
  Clone ID: PAT_MRT4530_102648C.1
atgggggagcctgggggcgccgaggcggccgtctccgcgaggctgctcgagctggcggccgacgacaacgcggcggggctcggggagctcctcgcggcgtggccctccctcgccgacgagcccgcgccgtggtacaccccggcgcggggcgcggagccgctgaccccgctcatggtcgccgccgtgtacggctcggtgggctgcctcgacgcgctcctctcgccgccctacctcgtggaccccaaccgcgcctcggcgtcgtcgctctccaccccgctccacctcgccgccgcgggcgggtccgcctccgcccccgcggcggtctcccgcctcctcgccgccggcgccgacccggccctcctcgaccacctccagcgccgggcgtccgacctcgtcgcgctcccgcccaactcgctcccgctcaagaaccacctcctctccctcctcggcgcccgcaaggagtggcctcccgacccctccctccccgacatcaagaacggcgcctacgcctccgacgacttcaggatgtactcgttcaaggtgcgcgcgtgctcgcgggcctactcccatgactggacggagtgccccttcgtccaccccggcgagaacgcgcggcggcgcgacccgaggaagtaccactacagctgcgtgccgtgcccggagttcaagaagggggccgggtgcaggagaggggacatgtgcgagtacgcgcacggggtgttcgagagctggctccacccggcgcagtaccggacgcgcctctgcaaggacggcgtcggctgcgcccgccgcgtctgcttcttcgcccacacgcccgacgagctccgcccgctctacgtctccacgggctccgccgtgccgtcgccgcgcggggcgttggagatggcggcggcggcggcggcgatggggatggggctgtcgtcgccggggtcgtcgtcgttcacgccgccgctatcgccgtcggccggcgggggcgggggcgggggcgggggcagcggcggcggcggcgcgtggccgcagcagccgagcgtgccggcgctctgcctgcccgggagcgccgggaacctccacctgagccggctgcgcacgtcgctgagcgcgcgcgacatggccgtcgacgagctgctcgccgcggcggcggcggcggcggactacgacggcctcgtcgcctcccccgcctccatccggtccgcgagggggaaggcgcttgtgccgtcaaatctcgacgagctcttctccgctgagctcgccgccgccgcggcgtcgcgctcgccgcgctacgccgaccaaggcggcgccgcgttctccccgacccgcaaggccaccgtgctcaaccaattccagctgcagcagcagcatagcttgctctcgccgcgggcggccgcggtgacaccagagccggtctccccaatgagctcccgcctcctcgccgcgctggcgcagcgggagaagatgcagcagcagacgctgcggagcatgagctcacgggacctcggcaacgccgcgtcgctgctggtcggctcgccggtgagctcgagcatgtccaaatgggggttcccctccggcaacccggactggggcgccgacgacgaggagctcggccgcctcaagcgttgctcctcgttcgagctccggtccggagccgccaatggcaaccatgagcctgacctctcatgggtcaacaccctagtgaaggagccgacaccggagaagatgatgacgacgacatcggcaatggattccattggcatcttgggacagaacacaagccgtgatcacatcgtcggaggcgaggatgacactgccggagtcatcagcagctggcttgaacagctccagctcgatgagatggttgtctag

SEQ ID NO: 2918 - DNA, 262 bp, Oryza sativa
  unsure (1)..(262): unsure at all n locations
  Clone ID: PAT_MRT4530_102649C.1
gtcactcacctaatgagacagaggttactactgagggatgtggtcagaaagaactgaaaaaaatgattgatatatgggtgttgcttgacacagnaaagcgagttatctactcctccgactacttactccgagctgaccgtgttttagtttacgaaagcggtggcttcatgatgggggtgccgatgactatgccggggcggcgggtgacagatccatatggcgcacaacaagggggccggaagcaccaaaaacgggagggact

SEQ ID NO: 2919 - DNA, 430 bp, Oryza sativa
  Clone ID: PAT_MRT4530_10264C.1
tttcatcctcttcaaatttagttctatctgtctccaatttactgtggttaattaggttgcgatttgcaaggatagaggcaaagattactatctgcaacactgacttcttttgttgttgaaggaaacatatgctcttactttcagttcagatttttcttttcattttctccgtttgcaatttgcagttctgttgttgttgcagacgatgatggtgtgtgtcggaatgcattagcccatagttcttgtcgatgtggtcttttttttcctctctctttctcttgattgatatggaatagttacacagttgaaattgttacagatggccacaccagtgcctgtcacagaatgctatgatcctatgatgttatcaacattgttaaccaaacaccagtcaacttcaaatatctgaggattcagagttgtgctcata

SEQ ID NO: 2920 - DNA, 391 bp, Oryza sativa
  Clone ID: PAT_MRT4530_102650C.1
accacaactccacatgcatatatgcatgacacagcaaaatatatgttacacaaatattattatacatcaattaaatgcacaatccaaggctccatgcatgcctccacatctccatgacacaaggtcagagctcatgtatatatgcttaccatatgtccactatattatattttatgatgctatataagcattagcccagggtgattaaaacctattaactttatttaaattattgccagggttaataatgtaaatttttgaataggctttaatttaaattaattccattgcattgcattgcaagagattcaagattgccagtagggtgaattatttaatttaatttagttgatcattaccataattgagggtgaatttatggatgggccac

SEQ ID NO: 2921 - DNA, 717 bp, Oryza sativa
  Clone ID: PAT_MRT4530_102651C.1
tcattcacgtcgatgcccgtgtcgcttcacctcgccatcgtgctgctctctatgtgcgaggacatcgacaccgcagccgccacactcatcatcacacatcaacttcacgttgtcctctagatccgagttagggttcttgtcctcctcgctgactcgccgcgttggagcgcgtctatttccactcacgcgcgggtgggcagcggagcaggcgagcgaggcgagatgtccaagctccgacggcggcgactcggcgtgcgccgtggtggggatgtggggactcggcgacgaaagcctcgacttgggggagacgagggcggcaatgaggtggccttggccttgggtaccggcatgggtgccttggtggacttggtgggtggcgcggtgaccggagccggggtggcgggtgtcttcttgaaggagactgacggcgtggtggtcagcatcgtcgtaggggcgagtggagatggcggcatcgatgtcgagaacgacctcctcctccgctccaaccccgccatctctgccccccctccgcccccgacgaaccgccgacaatggagctcctcaccaaggacgacagcggagagtccgtggctgtcgcgagggcgacgctctggtggtcggctctacctaccgcccatctgctccatgagctcgcccgcaccgctatgctccgtccgccacccttgctgtgtttctttcaaaaaaaaattaaaatag

SEQ ID NO: 2922 - DNA, 2917 bp, Oryza sativa
  Clone ID: PAT_MRT4530_102652C.1
atggaggtcatcggtaaaatgccggcaaaggtgaagaggattcggttcgctgactctcaaacagagtgcgaggttgttcttcccctaaccatggggggcggcgcaacctcatcggccattgcgccggacaaaccagcacagaagaagggtaaaaggaagaggcggtccaaaccggtcgccggagccgcaactggagacgaggcagctggttctaagggtcccaacctgacacgatgtagtgccgcactagcatcggacgcttgccgtgctttgtccaatacgcaccacgagaaactagaggagattgggttagacgccgtggcatgcatgacacttgcgagccttgagaagccagatctcatacgttggctcatggacaggaccgatcccgacacgatgtgcatctctcttgacgacgataggaagatccagatcaccccacgcatagttcagcttgttatgggcacaccactaggtggcaaggacattgttatcccacctaaaaaggttgttcgaatcgtacatgacaggattgtagaagaactgggtttggcacgtaatgttcggctcacaccaaagatgctgattgaagcgatcaagcaacggaaggatgaccccatggcagttaggttctttgtcatggttctcatgtccacgctgttaatcccaacaacagatttttacatccccaaggattatgtgtggctggcagctgatcttgaccgggttgctgccattgattggtcaaaggttttatatcttgacaacatcctccctcccagagaagttgttatggaacggatgttcacaccccgtatccagatgttcaccaaggacatcgtcgaccagcttgtcaatgaggaccaaaatgctggtggggatggcacaccgcctttcgggaacctccccctgcgcccgatttccacaacttgctacgccaacaagcagaacgtcaaggggaaggggccgatgagcgcggttattagggcatcatcattaacattccccaacatgtccgcaatcatcagtactcaccttgcagggcttccagaagagaagaggatttgtttgatggatgcactcggcgagtatgataaacaggcgaaagaaagtgcaacggagattgagcgccaatttagcatggtggttgacaagcaaaatttgctttgtcaacgtctcatcgatgcgctgcaaagcgacagctctgcatccccacgaccctatgcaggacaatcttcaggttgccagcagatcagtaatgcgacggttgttcaggagtgcatgacaccacagatgcatcctatagttgcacaacagcaccacaagcagatgccaaacgagcagcagcaacagcaccggcttgacgagcagcatcagcgtcaggatcaccagccaaagcagaaccatccgcacgatgagctgcagcaccagaagcagcagccggaacagcagcaacaggaccaagttcagcagcagcagcagcaggagcagccgcacgatcagcacctgcagcaagtgcagatgcatgaccagcaacagccgctgcaccatgaggagcggcaggagcaacacgaccaaattgctggcagtcctaaatcagcgggcgatggcatggctaatgttgatcacgtggacaccaccccgcaagcccgccatggcgttacagtgcagtctccaacggcaaatattgaaaacccacttttaggactcaccaggcaactgaccgaggaatctgctatccccgtcgagcatgagggagcggacggtccttccaaaaaagctgatgaaatggatgtctcggcagatcctatggacgttcatcggatcgacgagccaaacttacaacaacacacccccaccgtcatgaaggaaacagcaccagaggacacagcaatcatagtgacaacagatgccggcgtggcacacgggttttactcagtcccagcaggcgatgcacgtctacatttgccgcggcctgatcagggtactcacacggtgccatcaattgccaatcctccacaagatgtcggcgctgctggagttcatcataccgacacatctccggcaacccactcatcggttcggtctgatgatagtcatctcgactctctaaacgaagcactttccatcacgccgactccgtccctggttctcccacccgacgatgaaatgactgacacgcaagtttacgacaagattgaggaaatatgcttgagggagggagccccatccttgtctgagctgatgtctgacaccaatgtggacattgaaggcgtaaaatcaaccccgtggtcgcaacctaagcggttcatctccagacccgcaagatttgtatcgccagtggtagtgggtccatcgcatcacacgagcaacattgatgccagtgtccagctcagggatttcatcatcaacaaccaggatcgcatcaacagccactggtcactctatgctatcaacatcccacacaagcggattgacataatggattctaacaactatccaatgattggtactcagttcagcgatcaccatcggcatttgtcaaaacggattgtcaaaaggttgagtgacgcactccagacggccttgccaaaaaagttctgtagattcggcggattccggaagactcccatgccgtgcgccaagatggctatttgttctaacgattgcgcattctacatcatgaggttcatggaggcctatgacggcaacagggaacccatcgagacaatgatcatcccggtaacaatttctacaccggcgactcgacgatcatccgatcaagcatcctccaccaactaattttcagcgaacacaatatcgccgttccgcaccacccagatatcgtgccgttccgtggcccgtcgtcagactgattttctgtctgaatgaatcactttgactttgcttttcctgc

SEQ ID NO: 2923 - DNA, 339 bp, Oryza sativa
  Clone ID: PAT_MRT4530_102653C.1
gtttcttttttggattccaagccgtcccctcgtctccaccgcagccgctccaccgccgccacctccaagcccccgccgtccacgaccccagataggcgtagcgactgctcgatgcggcagaaggtgtccgacatggaggaggagctgctgacggtgaatgacgcctctgggaaggtgcaactcttgcagcgggaggtggagaaggccaaggagtccgagcgcacgatgctcgagccgctaatatacactacgaagcagctggagcagacgaagactctcgtggaggaggccaaactggagatcaccactctgcatcaaggcaacacgagcctcgaggcc

SEQ ID NO: 2924 - DNA, 209 bp, Oryza sativa
  Clone ID: PAT_MRT4530_102654C.1
gatgcatcagcaagcatttaacattgaaccgggggtgcatgcatttttgaaaaccatccatctttcaggggggtcaatagttcgacaccactgaataacaatggtttaaccaaccattaaccaaacattgtaccaaacaccacttttacaagaggcatattccactaaacccactgctgtatgtaactcacgctctgatgaacggacaa

SEQ ID NO: 2925 - DNA, 405 bp, Oryza sativa
  Clone ID: PAT_MRT4530_102655C.1
atgggcaataaaggtggcaagatatggaggaggttggggaggccacaggcgcagcgcatcaccagcagtgcaatgtcagtggagtggagttatggcctctctttgaagtttgaagttttggtccggctcgccaccggcggtcgtgcccctagccgacgtcgtcttgttccaaacggaaaagcaaacgaggcgtcccctcgcaggaccgcgcgacgcctcactgggggacacgcccccagctcgttctcgcgcaggcgctcgggggcgaggctgaggcgccgctcgccgccggagagaagaagggagggcgaggagggaggcggcgccggcgagcgcggtgaagaaggcaacggcgccatcgtcgatgcggccaccgccggcaccgccacagtctcctcgatgtag

SEQ ID NO: 2926 - DNA, 2022 bp, Oryza sativa
  Clone ID: PAT_MRT4530_102656C.1
atggatggcagctcagcttgcagagttgctgttgagcttggtccatttgtcgagtttactgacaacggtaggccagaatttcatgtcactaagaaaattaactgggtgttagacaaagatacgatatgttggattgatctcatgagtgatcttgatgttgaggttaaacatggtcctgctcaggaattaagtgtaaaatttttggacataaatgctggtagatttgctcagatagcatctgacagtgctttacttcatgcttgtgatttgtactgggagcaaaggaggctccctttggttgttgaggtgagtgatgacccacagaataggacagagccttgtgtagagcagggcacgattgaggcaccggttgacacttggggtgagaatgatgaggttgagtatgttggtgtagctgatgagaaggagaagtataaagatttggtgtcagatgatgaggaggttgatccagattatgagcctgattctgacgaagacgatgatgacttagctgtcgacgatgaggaggaatttccctattgtgactcgaggaggtacagagcatattgcaaggctaagaggtgcaagtggagaattcatgcgtcacgattacaggatggcagaacatggcagataaagaagcttccataccaacacaattgtgctagcacagctggattggagaacaactgtatggacacaaaaattcttggatttagcaggatgtttgtggcactgaaaccatgtgtagatgggttcttaaatggatgcagaccatacttaggtgtagactccactgtactcacaggcaagtggaggggtcaactagcatctgcaattggcattgatggtcactactggatgtttccagttgtgtatggggtgtttgattcagaaactacagataactgggcatggttcatggagaagctgcatttggctattgggtcacctattgggttggtcatatccacagatgcaggaaaagggattgatacagtagtgagtagagtattcacaaatggagtagagcatagagaatgcatgagacatttggtgaagaattttcagaagagatttagtggtgaagtatttgaaaggaacctgtggctagcatctagggcatatagacacgatatttttgagcttcactacaatgagatgatggaagcatgccctaaaccagttgagtggattgaagacttccacaaacacctgtgggctagaagtgaattctctactgctagcaagtgtgactatgtcacaaacaatatagcagagactttcaatagttggataaggcatgagaaatcacttcctgttgttgatttgatggataagattagacaaatgatcatggagaggttaagtgtgaggaaaaggctagctgataagttaactggacagattctccctagtgtcatgaaagccatatatgctaagagcaagaacctagggtacaagctgtactctgctcacagccatacaggagaaattggaggtacatgcagagatttaaagacttggaggcacactcttgacctgattgcccaagaatgcaactgcaaaaagtggcaattgactggaattcctagcacccatgcaattttccttatcatttcaaggaggggtttggaattggaaaagtttgtcagtgactattactctgtggctactttcaagcgtgcttatgcaggttttgttgtcccaatgacagataactcacaatggcaaaaggtgaatgttggcttcaagttatatcctcccatattgaaaaggtctgctggcagaccaagaagcaggaggctcaaaggagttgaagaagggtgttcagggaaaaggaagcatagatgcaagagatgtggtcaatttggtcacatcatgaaaacatgtaatgaaccagttgacgattctagtgccccaccaccagcttccccaaagcctaagaggaagagagtaaagaaagttgtggttaaccctattacaaatcctaccacggaccaatttggagcagctttgtaa

SEQ ID NO: 2927 - DNA, 1230 bp, Oryza sativa
  Clone ID: PAT_MRT4530_102657C.1
gaatctcaagctcccccaaacaggcccgtaaggccatctacaatcggtatccccaggtcgtgcccctagccgacgtcgtcttgttccaaacggaaaagcaaacgaggcgtcccctcgcaggaccgcgcgacgcctcactgggggacacgcccccagctcgttctcgcgcaggcgctcggggtgaggcaacccattgcgtgggtaggttcttgaggcgacgcaccccagagcttcgatttcctcttccacccctctcccttttgtccccggcccatgtgttaagggcgaggctgaggcgccgctcgccgccggagagaagaagggagggcgaggagggaggcggcgccggcgagcgcggtgaagaaggcaacggcgccatcgtcgatgcggccaccgccggcaccgccacagtctcctcgatgtagccgctcgccgtcggagagaagaagggagggcgaggagggaggtggcggcggcgagcacggtgaagaaggcgacggcgccatcgtcgatgtggccaccgtctcctcgaagcagcgcggccggcgccgctccatccgccggggggccagatccggccacggcggcgccggatctgccgcctccagggtcgccaccgccaccccctcccatctcgcaaatccagtcccagaccttcgccggcacgggcatcaccgacagccgaggctgccggagcagcgcgaactccctcatcccctccacctcgccgccgccgccgcccgccgccttcttgatctccccgagcgccaccggccgccggaactcccccaccgcgcggacgtccaccgcgccgccgctcgctgcctccccctccccctcgtaccactccctggcgacctccacgacgccgacgacgcggcgggaggcggcgccggcgccggagtggtagaagaggcagcggtcgcccacccgcatggcgcggaggccgttgacggcctggcggttgcggacgccgtcccacggcgcgacgccgccgccgggggcgcgcgcctggtcggaccacgaccactcccccggctccgtcttgagcagccagtacttgcagttgccggcggcggcggcggcggacttgggtgctgctttcttcgccatcccgcgtggattcggagctccggcgatcgccggggtgaggcgaggcgggttgttttggcgggaaattgggcggctagggcttgtggttgcgcggggaattcccaatctcaccatcgt

SEQ ID NO: 2928 - DNA, 479 bp, Oryza sativa
  Clone ID: PAT_MRT4530_102658C.1
ggggtgttttgttttttcttttttttttcctggatcaggttgttgagatgttttgtactcggcaaacgccctgttggtgtgggggtgggggtgggggctatcggggttggccgcttggccgtggggggaaaaaaacgaacggcccccctttttaaggaggggggcgtcgctctgaggctaaaacgcaagggggccaaatgagggggggcgataaaagggagaggaaaacgacgggcgcccggggcggggggaagggcgccgaaccaaaaggacacccgtgccgagaaagaggctttctttagggcgcaggaccgacgcgggagaaaggggccgacccgagggggggcgccgcccccgggggggggggggcccacggggaacgcagcccccggggcaataaaaagggggggggggtcccggggaaaaaatactctttaaccgaggccaggaagaggggggggtccccccgggcggggggg

SEQ ID NO: 2929 - DNA, 340 bp, Oryza sativa
  Clone ID: PAT_MRT4530_102659C.1
ccagatcttttgctctcttttcttttgatgagagagagaaaggaattccccatttcagttgggactaatttcgagttccaatccactgttgcgcaggtatgtggatccaagaatttcttggccgagccgatctggaggtagttgcggctaggtcttgcgcaactggaggcgaaggggatctgctccatatggttgtggatcatctcatctggatgagcaatattgcaaaagcgacaacaacttgggtcttagcccgtttggtaatgtacccttatctatatagaaaaaaaaaaatcccttctctggaagaaaaggggattcattttgactggatcagtgg

SEQ ID NO: 2930 - DNA, 836 bp, Oryza sativa
  Clone ID: PAT_MRT4530_10265C.1
cttcattcgaattttttttttttttttttttactgaatcaatgaagccccttatttcttgttgcacaacacatgaaacaagtacaaataaatgagaacaaattctacttcatagccatggtacgaaacatagtgggctccatttttaaaatttcctttacgaaggaaattaagggctggcgtcaccagatccaactccagctcctccaccaccgccactgccaccatattggccttgaccattaccgccaccattgccaccagcatttgcatttgcatatggtccatagtagtagttattagcagtgctagagccatagcccgtaccactgccggacccatgaccattggatggccaataaccaccggcttgtccggcaccaccaccaacaccagcaccgctagcactggatgacccaccataaccatagtatccattttgtgaagtttggcttgagcctgagcccgtgccgtatccgctaccagatcctgatccaccgtattggctgtaaccaccacctccgccgccacctccaccacttgcatgagcaccataagagttactgctaccagacccagccccgactcctttcccagctccccctccgttcacatatcctcctccctctccacctcctgtacctgaaccttgggaactggagtatctttctactcttgcagcactggctagtccaatgctcaagaggacaacgaacccaagagctgcaagcttggtgcctgccattgccttacagctctagctactctatctagatcgccctataaacccaagagctgcaagcttagtgcctgccattgtgagattattctgagtag

SEQ ID NO: 2931 - DNA, 267 bp, Oryza sativa
  Clone ID: PAT_MRT4530_102660C.1
ttacggtgccgaactgccccctaacctaaaaccccaacgggtgtcggtcccattaacgacagccacggacggtggtcatggaagtcgaaatccgcatcaaggacgtgtgtacaccactcaccctgccgcaactcaaccctaccccccgccaaacatggatggcgcctgacaccccccccacatctcaccctaacaggccattaagtattgttcacacgccgcattgtgcaacccagctacacacctgcagccacatttagtggtgtc

SEQ ID NO: 2932 - DNA, 548 bp, Oryza sativa
  Clone ID: PAT_MRT4530_102661C.1
ctgtcttgggttctgtgtttttttttctcaggtcggcactgagtatagcatcaatttgagcttcagggccagacgatcctgtacaagatatttattacaatgggtatgtgcatttgattgagcccggtgctaacattgacatatgcatgcttttcaacctatgtagaaacactacatctgtacatagcatacacctgtgatgcctgacacagacaacatgaaaaaaaaaactgaagcaacctacctggaaaggggaaaccaatgaaaggtggcccgattccaacgttcaaaactgccaaaacccaatagaacaaggcgagtctcctctgtgtagagtttaccagtgactttgttggtttgccaactagcttagtttccggcggactcctcgcaacccaggggcttgtagggcatgaatccaatcatctgcacctgcctgacattgccaaagacaaagattctaaccaatgcgtctggatatgccctcttggcctcctagggctctttgagcacctgggtggcatcggtgcatcccaacatagggagtt

SEQ ID NO: 2933 - DNA, 270 bp, Oryza sativa
  Clone ID: PAT_MRT4530_102662C.1
tacctactgctgtctaaaacagattcagtcagttatcttgtcagatgttttagaacttgtagatggcagaatttaattatctattgaatactgaagttgtagagtattttgtgtagatactcctagagtatttgtttgatatcaccgctgttttaattttaaagatacaaaattaacaaacagcgttgctgctgtatggcatgtggttcagggtgggagtctttccactgggtcttggtttcaagcgtaagagtgttatggtgattgatg

SEQ ID NO: 2934 - DNA, 1473 bp, Oryza sativa
  Clone ID: PAT_MRT4530_102663C.1
atggctcccccgttggtctcctggtccgacggcctcccgcccgagatactcctcatcgtgctcgcccacatccactgcctcgccgaccgcgtctccttcgccgccgcctgccgcaactggagatccaccagcaagctcgccgacgcggaggccgacaagccggcgccgccgccgccgcggaggcatgtcccgtggctgctcgccccgtcgcccgtcgagaggcccaccatcaccagcctcgtctcgggccaaacccgccggatctccatccccgcgggcctccgcggcgcccgcttcttcggctcctacaccggcggctggctcgccgccgcgctcaccatgtgcggcgagcacctcgtcgccaacgtccactccggcgagacggtgtcgctccccagcagggtggtgagccaggtgacgtgcaccaggaagaccacgaccgtggcgatcatccgcgccgtggccctgtcggcggcgccgaactcggcgggctgcctcgccgcggcgttcgtctgcggcacctccaacctcgccttctgccgcgtgggaggcccgagcaagagcaacgtgtggacggggatggaggtgttccccggcacgatcgacgacatgatcttcttcgagggacggttccacgcgctcaccacctgtgagctgatgacggtgttctcgatctcgccgtcgccggaatcggatctccccgacggccgcgtcgagatctgccatcgatcgttcttcatgccgatgcggatcgagaccgtgatgccccacctccgcgagtccgccgacatgtcccgctacctcgtcgtgtcccggaacaagctcctcatggtggtgcgctactacgtgaccgcacacaccgccgccgccgccatcgccggcgtcggcgtcagccacgcgcgcacgatgctgttcaaggtgttccaaatggagaaattctgctcgcacggaggattctgggaagagatcgaggacctggacggcagggtgctcttccttgcccgatgctgctctagggctttcgaggtttcggagatccatggattcgaaggtggcagcatctacttcctggatgacatcaacttccatctgtcactggtgatcaaggacaaggccgactacccctgcgccgacgtcggcatgtacgcgatctcaccaaccgatggcgttgctcgccctggtatgcagctcgcagccggtatgcgcccttcaatctacagcaccaagcatcacctgctgcgcattatggattgcaaggggatcggccgcatatatcgctatgtttctactgctcttgaagggtccggtcttatgccaccaccatctggttcggacacggctagtactagtagcagtgcgagtgctgctgctactaataagagaaagaatgagagaagcatcctgggaactatctggggcatccggtctgcaccattttcaaggttctctcctccgctgtggttggagccatag

SEQ ID NO: 2935 - DNA, 3025 bp, Oryza sativa
  Clone ID: PAT_MRT4530_102664C.1
atggcgacgcccatggaggaggacttgccgggggcggaggcggaggcggcggggcccgcgccgccgcccgccgcagccaccgggggcgacggcgacggcgagaatcccgccccggctcccgcttccccgttctcggactccgattcggactccgacgatggaggggagggcggggacgccgccgacgagctccgcatccaggccctggagcaagctctccaggagcagcctctcgactacgagtcacacgtccagtatatacagtgtttgaggaagtcgggtaagatcgagaagcttcgtgcagcaagggaagagatgaacaagtatttcccactcacacctaagatgtggcaggaatggacgaaagatgaggcttcattgaggcctgaatcttttgaggatattgaaaagctctatgaacgtggagtgcaggaatacttgtctgttcggctatggcgcgattaccttgattttgttgaagagaatgataaatcagtgtcccaatgttcaccatctggcctcacaaaaatgaggaatttgttcgaacgtgctattactgcagggggattgcatgtgacagatggtagcaagctatgggaagcatacagggaatatgaaatggccattctaaccatcattgatgacgatgacgaggaaaaggcaaagcaagtacagcgcatacgtgttctctttcaccgccagttatctgttcctctggttgacatggaatcaatacttgctgagtataagagctgggaagccgagcaaggtaatgcaaatgacccaacctccaattttgatggtgttccctcaaatgttgtagcagcctacaaaaaggccactgagatgtacaatgtgcggaaacaatatgaggatcaactgagtaatgcggatgcatctgatgatgacaaattggaggagtttctgaaatacatcaaatttgaggagtcttcaggtgaccctgctcgtgttcaagttttgtatgaacgagctgttgcagagcttcctgtttcaactgatctatggatgggatacacgagttacctggacaaaaccctgaaggtacctgctgttctcaaaagtgtttatcagagggccacaagaaactgtacttggatcagtgaactatgggttcgttatttgttgtcattggaacgcattcgtgcatcagaagaagaattgcggcatgtctttgagcaagctctccagtgttcttttccaagcataaaagagtatctcgaaatttatcttactcgagttgatagtttaagacggaggatggcagacggcttggatttccaactgatcaggcaaacattcatggatgctactgagtttctttcaccccaaatgggaacagaggatttattgcttttacatgcatactgggccaaattagagcgtactcttggaaatgatctagctgcagctcgtggtgtttgggaaaatactctcaagaaaagtggttctgttttggaagtctggcagcactacattgcaatggagatagaaaccgagcatattcatgaggctaggtcactttataagcgctgttataccaaaaggttttctgggtctggatcagaggagatatgccatgcgtggataagatttgaaagggagtgtggcacgttagaagattatgaccttgctgtaaaaaaggttaaccctcgtttgaaggagcttatgatgttcaaggcacagcaggaggttaaggttgacactcatgttgtccccaaagaaactacaggaagtgatttctctcagaaaagaaaatcaagcaaaatccccaccaaacagcagcctcctgctaagaaaaagaaagacaacccaccaaaaagtgctgtgctatctgatgatcatggatcaaaggaacaaattagcaccggtcatgtaaaaactggagaggtctcaggggagaagactcaggcatctatggaagtgaatctggtggacggcagccggagagaaaatacagcttcaaaagaatcaaagtcgaacttctacagtgacaaatgcactgcttacatgtcaaacatagacttgacagcaaacgaagagcacatccggcgtttcttttctgatattggtggtgtgacagcaataaggttgctgagggacaagttcaccaaaaaatcaagggggattgcatatgtggatttttcagacaatgaacatcttgaggcagcaattagaaaaaacaaacataaactgcttgcaaagaaagtaagtgttgctcgttcagatccaagcaagggcaagaaaaaccgtgaagcaggatctttctccaaagaccaagctactagtggcgatcgtggtgaaacggcagaatttgccaataggccagacaaggaaattcccaaagataaacccacaatcacagggaagaacacctttgctgcaccacgatctgtggttaaacctcttggatggacacaaaaggatgaaaaatcagatgtgggcgcagaagagttaaaatcaaatgaggagttcagaaaccttttacttaagaagtgatgctgataggcaggtgtgtggatctccatgttgccatcaaactctgatttctgtaatgtacttttctggtggcttcatgcatcatcttcggtgaacagaaaatcagtgaccttttgggctcctcaaattgaaatctatccatccagctgcaaaagtataatcagcacaggagaatccagacatcattagcaaacttcttagaaaccttcttttttttctagtttgaaggagggaagaattttctgaaagtcgtgtaggacttgtagtttgcagggaaacggtgtatataactcatgtggctgccttaaaactgagctcccgtgctcctttcgctttcgtaagtagttatgctcgtttctcaggttttgtactgccaagaaatttatgatctcccgggttaaaaaggataacggatggttagagagtgcagcttacgtatgtcggatgccaatgaactggcgggtagctgagcatttattcatcacatcagtacaccggtttcccgaat

SEQ ID NO: 2936 - DNA, 154 bp, Oryza sativa
  Clone ID: PAT_MRT4530_102665C.1
tacttcccactccgaagcgtgtctggaacaaccacatatatacgtcctttccaagagaacagcgtgctgaacaactatatccctcggagcgtcacgtcggaaacaattcttaagcaccatgggttttattttagaccatcctgcccaaggactt

SEQ ID NO: 2937 - DNA, 1008 bp, Oryza sativa
  Clone ID: PAT_MRT4530_102666C.1
atggagcagcagcagccggagtcggcggcgccggcgacggaggcgtcgccggagatcatcttccggtcgaagctgcaagacatcgccatcaccaacaccctcccgctccaccgctactgcttcgagcggctcccggaggtggcggcgcgcccatgcctcatcgacggagccaccggcggcgtgctcacctacgccgacgtcgaccgcctgtcccgccgcctcgccgccgcgctccgccgcgcgccgctggggctccggcggggcggcgtcgtgatgagcctgctgcggaactcgccggagttcgtgctgtccttcttcgccgcgtcgcgcgtcggcgccgcggtgaccaccgcgaacccaatcgccgggacgggctgcctccacttctgggacgacctcatgtcggaggacgaagcgtcgccgctcgccggcgacgaggacgacgagaaggtgttcgacccggacgacgtggtggcgctgccgtactcgtcggggacgacgggtctccccaagggggtgatgctaacgcaccggagcctgagcacgagcgtggcgcagcaggtcgacggcgagaacccaaacatcgggctccacgccggcgacgtgatcctgtgcgcgctgcccatgttccacatctactcgctcaacaccatcatgatgtgcggcctccgcgtcggcgccgccatcgtcgtcatgcgccgcttcgacctcgccgccatgatggacctcgtcgagcgccaccgcgtcaccatcgcgccgctcgtgccgcccatcgtcgtggccgtggccaagagcgaggcggcggcggcgcgagacctctcgtcggtgcggatggtgctctccggcgcggcgcccatgggcaaggacatcgaggacgcgttcatggccaagctccccggcgccgtgctcggacagatccaatggcgggaaatcttaacgtgtgaaggactcaagaagcccttcttttcacgtttttatttaggttttgatacaatatatacgcaatag

SEQ ID NO: 2938 - DNA, 699 bp, Oryza sativa
  Clone ID: PAT_MRT4530_102667C.1
aagctgaccattagcaggcgatgcattgttcccgagatgcatggcgtgctagcggagtaactcacgtgcgaactgtgcagccaatgggtaacgcgacaatcatcattggataattgctttttggttttacgtggatcaattgcgcacatagagaatatagcttgcatcagcgatatttccatgcaggatcaaggagtactccccggttccatttatagctatcatcagcataattatgcaaatacatgatgacatagctaacgtgcaaagtattgatatcaaactactacatgcaagtaattagtagatattatatagtgagtagctttactgttgctacaaactaactagtaacatttactattacagacaaactgtattgcaacgatgattccacatgggcagaacaaaatcttttaaaaaaaattaaatgacaatctacaaatcacgttctttgccagtagatcacggtctcaccagaaccgaatgaacaactaaatcaccatatccctttcaccaactggtgtcaattaactcacagatccatttgaaactgtatttaagcattagcggcctagcacaaagccctcgcatttccaatactacggcagaggtcagtacaccgaagcaaacaaaagcagtacacaacggagggagcaaaaccggccggtagtagccagctcagtcgcgagcctgcag

SEQ ID NO: 2939 - DNA, 2006 bp, Oryza sativa
  Clone ID: PAT_MRT4530_102668C.1
aacaataataatgaatgatataaatgtttaaacaaaatattacaaagacaccagcaagaacaataaacaggtctgaacatttttgtacatggcttccccagtgtcctgtctctctgcaaatgagcaaacctagccgacctaacacggtaacaccaccctttgtattgcacagaatccatttgtacctgggtttttttcccccatcacatataaatggaagacacaaactattcagaacagaatgtgtaatttgcaacattagaatcatggaacttgcttgttcatgctaaattcttttcatgtctgaggccggttgtaaattaagcttcttgttgaagatgttgcagctgcttcctcagttcctttctcaggatcttccctgacggcgccttggggattttgtcaacgaagaagacctcccggatcttcttgtagtagatcacctcctttgctacgaattgtttgacatcatcttcactcagctcactcccttcggttttcgccacgaaggcgactggtatttctccgatttcaggctcaatttgtttcccaacaacagcagcatcagcaatgcttggatgggtgatgagaagggcctccagctctgcaggggctacctggaagcccctgtatttgatgatctccttgagcctatccacgatgaagatctcgtcgtcgtcgtcgacgtagccgatgtcgccggtgtgcagccacccttctgcatcaatggtgttcttcgtggcctctgggttgttcaggtaacctttcatgatctgttgccccctgatgcagatctcgccgggcaggttccggccaagcgacttcccggtgtcggggtcgatgatcttcagctcggcgttgcgcaccaccgtcccgcacgcaccggacttcaccttgaagggctccttggcgaatgctaggcacattgacagcactggccctgcctcagtcattccatacccctgtccgagcacggcgccggggagcttggccatgaacgcgtcctcgatgtccttgcccatgggcgccgcgccggagagcaccatccgcaccgacgagaggtctcgcgccgccgccgcctcgctcttggccacggccacgacgatgggcggcacgagcggcgcgatggtgacgcggtggcgctcgacgaggtccatcatggcggcgaggtcgaagcggcgcatgacgacgatggcggcgccgacgcggaggccgcacatcatgatggtgttgagcgagtagatgtggaacatgggcagcgcgcacaggatcacgtcgccggcgtggagcccgatgtttgggttctcgccgtcgacctgctgcgccacgctcgtgctcaggctccggtgcgttagcatcacccccttggggagacccgtcgtccccgacgagtacggcagcgccaccacgtcgtccgggtcgaacaccttctcgtcgtcctcgtcgccggcgagcggcgacgcttcgtcctccgacatgaggtcgtcccagaagtggaggcagccgtcgcggcgctcgtcgatgaggacgacggtgagggcgccgtgggagtgggaggggagcttgtcggcggccatggactcggtgatgacgacggtggcgccggcggcggcgagctggctctcgatctcgtgcggggtggacattgggttcgccgtggtcaccgcggcgccgacgcgcgacgcggcgaagaaggacagcacgaactccggcgagttccgcagcaggctcatcacgacgccgccccgccggagccccagcggcgcgcggcggagcgcggcggcgaggcggcgggacaggcggtcgacgtcggcgtaggtgagcacgccgccggtggctccgtcgatgaggcatgggcgcgccgccacctccgggagccgctcgaagcagtagcggtggagcgggagggtgttggtgatggcgatgtcttgcagcttcgaccggaagatgatctccggcgacgcctccgtcgccggcgccgccgactccggctgctgctgctccat

SEQ ID NO: 2940 - DNA, 396 bp, Oryza sativa
  Clone ID: PAT_MRT4530_102669C.1
atggcaaaattagacggcacggctaataagaggagagagccccacaaagcggtaagtgcagtgcatgacagcatgagcatgacaagactgtatatgtccagtattgcatacgcagcactggagaagtggtctggaaaatggaggctatccgtgagtaagaacataagaaccaatttggttatttcatttctgcccaacaaaaactgcctgttaccggatttcccaggacgcagcagggcagaggcagaggcaggtgcacttggaaaggcgatagtgaggcgtgtacttggaaaggctgactctgcctatgcaattgcacaaacacacatcacacagtgcaatggcaatgcaactgcaaggcagccaaaaagggaggaggaaacagaggagaagtga

SEQ ID NO: 2941 - DNA, 2765 bp, Oryza sativa
  Clone ID: PAT_MRT4530_10266C.1
ctcctccccctcttccttcttcctcctcccgccgccgccaccgccgcactcttcttcctcctcacatcactccactctgatctctctctttcagacagtagcaagagcagcagcagagagagagagatttttatgtgtgttcttgacgactgcgtgatcggctgtgccgccagatatagatagaccgtacaactgcagcgctagctatatatatgtttcgagtggggtgtgtgtttgtatatcgattgttgatttgttggtagatctgagctctgcgagtgttgcttcgtccatggtggatctctagctatttagggttgttggtctagctagatagctatatctttctctctctctagtactggtgtgtgcatatatttgtatatgctctgagggagagggagaggatgatgatccctggccggaacatgtcgccggcgatgatcggccggcccaacggcggcggcggcggcggcggcgtcgcctacgcttcttcttcctcggcgctctccctcatgcagagcttgttggatggacaccaccatcagctgccatcactgctgcagcagcaccacaatggacaccatctgcttgatcagcaccagcagcatcagcatcagcttcccccacaggcgacgacgacgagcgagagcgacggccgtgcccctcgcgacgagctggagatgagcaagtccggtggcagcgacaacctggagagcggcggtggcggtggcggaggtggctccggtggtgatcaggaccccaaccagcgcccccgcaagaagcgctaccaccgccacacccagcaccagatccaggagctcgaggccttcttcaaggagtgcccccaccctgatgacaagcagcgcaaggagctcagccgcgagctcggcctcgagcccctccaggtcaagttctggttccagaacaagcgcacccagatgaagacgcagcatgagagacacgagaacaatgcgctgcgcgcagagaacgagaagctgcgggcagagaacatgaggtacaaggaggcgcttgccaacgcgtcctgccccaactgcggcggtccggccgccatcggcgagatgtccttcgacgagcaccacctccgcctcgagaacgcgcgcctccgcgacgagattgacaggatctccgccatcgccgccaagtacgtcggcaagcccgccgcggccgtctcggccgcgtacccgccgctgccgccgtcgaacaggtcgccgctcgatcatatgggcattcccggcgctggcgccgacgtgttcggcgccgacttcgacaagccgctcgtcatcgagctcgccgtggccgccatggaggagctcgtcaggatggcgcagctcggcgagccgctctgggcgccggcgctcggcggcgaggcgctcggcgaggaggagtacgcgcgcacgttcccgcgcgggctagggcccaagtcgccggagctccggtcggaggcgtcgagggagacggcggtggtgatcatgaaccacgtcagcctcgtggagatgctcatggacgtcgggcagtggacggcgctcttctcgagcatcgtgtcgcgcgcggcgacgctggaggtgctctcgacgggcgtcgccggcaaccacaacggcgcgctgcagctcatgtccgccgagttccagatgccgtcgccgctggtgccgacgagggagacccagttcctgcgctactgcaagcagcaccccgacggcacgtgggccgtcgtcgacgtctccctcgacgggctccgcgccggcgccgggggcggatgccagccggcggcggcgcgcggccaccggcgccgcccctccggctgcctcatccaggagatgccgaacggctactccaaggtgacgtgggtggagcacgtggaggccgacgaccagatggtgcacaacctgtacaagccggtggtgaactccggcatggcgttcggcgctcgccggtgggtggcgacgctggagcggcagtgcgagcgcctggctagcgccatggcgagcaacgtggcgtcctcgggcgacgccggcgtgatcacgacgtcggaggggaggcggagcatgctgaagctggcggagcggatggtggcgagcttctgcggcggcgtgacggcgtcgacgacgcaccagtggacgacgctctccggcagcggcgccgaggacgtccgcgtcatgacgcgcaagagcgtcgacgaccccggccgccctcccggcatcatcctcaacgccgccacctccttctggctccccgtcccgccttcccgcgtcttcgacttcctccgcgacgactccacccgcagcgagtgggacatcctctccaatggcggcgtcgtccaagaaatggctcacatcgccaatggccgcgaccacggcaacgccgtctccctcctccgcgtcaacaacgcgaactcgaaccagagcaacatgctgatactgcaggagtgctgcacggacgcgacggggtcgtacgtgatatacgcgccggtggacgtggtggcgatgaacgtggtgctcaacggcggcgacccggactacgtggcgctgctgccgtcggggttcgccatcctccccgacgggccggacggcggcggcgggtcgctgctgacggtggcgttccagatactggtcgactccgtgcccaccgccaagctgtcgctcggctccgtcgccaccgtcaacagcctcatcgcctgcaccgtcgagcgcatcaaggccgccatcaccggcgacaacggcgtcgcgccgccatgcccacggtga

SEQ ID NO: 2942 - DNA, 354 bp, Oryza sativa
  Clone ID: PAT_MRT4530_102670C.1
atggttctagaagaggaatacatgaagttccagattatggtcaccctaatccaatttggtcaactgttgcagcaagtggccttggctgttttcggaagatttatatgtttttcgtgtgtgccatcgaaatggctatttggagcatgtgttttctatttcggctttgctaaaattatgccgacatatttctgggctaaatacagccagtttgacgatctgccatctaatcttcttcatgattcgtgcaaaaaaatgggaaaatggaaagaagaagaagaagaagaagaagaagaagaagaagaagaagagcagcttaagaatttggctgcggcttataagctaaaggcctgtcga

SEQ ID NO: 2943 - DNA, 1266 bp, Oryza sativa
  Clone ID: PAT_MRT4530_102671C.1
atgccatatcggcccacactctctctttcccctcttctctcccttcctctcatttttcccctgggcgtcgctggatgccgccgccgctccgctccactctaccggccgctcgactcgcgatcgagcacctcccgcaggcacagcgacgccaaccgcggcaactccccggcggcgccgcacagcctcgatatctatatcagctccccggcggcgccacacactcataatgcaaatgaaaacattcagttcagatctatatcagctttatctgtcatgaattctcagaagcagaactggcatgaccaatcacgagctcgaagcatcatgacctgcaacactgaatggcatggtggatctagcacagtcattggggattcattcttcaaaggattccagtccgacaagcccgggaaactctgcttcgacgacgatcggcaatcgagatggaggaggttagccaacttcggtggtttcgtggactgggcgttcgcacaacgcggcgatgccgacatacaatccgtcatcatcttcatgtcccgcctcgacagcgcgaggccggagcaggtcaacgagtggctccgctacgccgtgcggcgcgtcgtcaaaactttctggttcaatgcctgcgattcgacgccgatcggtgcgtggtgggcaccgccaccgcgtgaccatggccaccagctgccaaccgtcgagttgcccagctatgggaggacggcgtccatcaacctcaacctgtcgtcctaccccttccggctcaaactcccggcgtccccagcggcaaggtacgaagcgctgacagatctgagcctcagctcggcgtggttcggcgaggacgaggccgtcgccggccgccgcaccctcggcgacttcatctcgtcctgctgccctcgcctgcgtaagctggagatcatcgatccgatgcggttgccccagctggtgcttcgtgccgaggcgctcgaggagcttatcgttgcatccacgcgagatacgcagacgatggacgtgacggcgcccaacctgcgcatcttcgaactccactacttcaacagcatgacatcagtgacgagctatggggaaagcatcgacttggtggtcagaatcacggcaccgagactggaggaaatcgccataaacaactccaccctggagatcgaggacaacctggacctgcggatacatggcctggcaagcgttcgccgtctcaaaaacctcactctagcgatgcatgggcataactgctgcaacaccgactacggttga

SEQ ID NO: 2944 - DNA, 358 bp, Oryza sativa
  Clone ID: PAT_MRT4530_102672C.1
ggctggattcattcgttcgcatacaggtgtacatgttgtattactgccggttaactcttgatctgttgctagatatgcatgtccgacgatcgagagtgataccatggaaggttgctatgcgggctcttagatctggaaggcagtatggtggattattgtcttgaaacatggggaggttcaggagaaacaccaccacttcgttggtataaccgactgaagaaacacctagcagttatggaatgaagaggaacgtcggttgaagcgagatactgcatatgagggtcatgacaatgagcggggcaacttgacagacggacaatgcattattgagggcatagactctatggactatggaata

SEQ ID NO: 2945 - DNA, 1699 bp, Oryza sativa
  Clone ID: PAT_MRT4530_102673C.1
ttagaccggggccggccgaccggtggggatggctgcggacggcgggcgggcgagaagccgacgccgacgtgcggccggcggctgcgggcggcggacgaggagacgaggccggaggcgggcgggcgcggagggggctgtgagcagcggtagatgaggttggcgctcgatgaggttgcggcggtagagctcgaggatgctggccatggcggcctcccgctcctcggtctcctcgtcgttcgtgtcgagctccttcaccgcgaacgttgtcctgtgcatgttcctccccatcacgatctccctcgtagtcgaagacccctcccctccgtcctcccccgtatgcccaagcgagcagtcgtcctcgcccctgtccgccgtcgtcgccgcatgccacgctccgctggctctgtgtaggcggctcaactggggtataagccaaacgtcttctccttctggatcctttttcttcaaccggctgtacagatctatctccaaaccaggaatgtaccattccaaaccaggagctaatcaaattatttccagttatagcatcatttattatgtcttcttgaatacttccgatgcacttacgatccttcgaaacgacggaaacgccaagctaacacgtaaaacgaggaaaaagactagtaaaaaccaaataaacagcacatgtagagatcacccaaataatcaaccgaaaccggcgaacggaaccggcggctctgaactaaaggacgactcaacacggacgaacgaacgaagcacggggaacatctcattcgaacgaatgagcgaacgactcaacaatggctgtgactaaaccaggaacggaaaggaggcctcaccggggaagaccgaagaggaagaggcaacggcgacgccagcgacaacacacggagatgacgacgacgctagggccaaacaagattagattaaattaaggccctagggaaaaacctacgccggtgaacggcatgggagcggcggttgccggcgaaccacggcacaaatatgcaaacggtgggcaccgggagaaagagcgcgaggcgacggtccttaccaacacttacgcgacgacggacggcaacggaagatggccggcgacgagcttggaagggcggcgaggtactggtcagcgacgcggcgccgtttcggcgatcttcagcggaggaaaaccggtggccgggcttcaccttgacgatacattcccggaggtagcgacggcacagagcggagaagaccgaggcgacggcgaggtgcggatggaccagcggccggcggcggtgaagcttggattcacgtcggcgaggtacttccagaggtcttcggcgtcggggaagtggaggccggtcttcttctcctcctcgcgaacccaacggcggcagcggcgaccgaaggcgacgaccacagcgactgcgcggggctgctggagcggcggccggaggtagagagagaaggagctcgcggggagagcgtttccggcgacggcagcggacgggacttgaggggatgggtagaggacgactagggggtccccactagtcatggtaacacacaagaaccgtgtcatcctcgccacgaccaccaccaccaccatgtcgtcgccttcctctcgccacccctcgtcaccacgctctctacaaatgccagagctccggccacccccaccaccacccaagaagcctgcgccgccgaccggcat

SEQ ID NO: 2946 - DNA, 229 bp, Oryza sativa
  Clone ID: PAT_MRT4530_102674C.1
gcgcattcacgtactacgcgagcaggtgcatcgctgtcgacgatgccggcgacgtacgggacagcgaggtttcagggaagcgatggacacacgatgccgatgcctggcagtgcatgatcacgacttctcagtcaagaccatcaattatcgtccgactagctagaggccgggtccttgtggtgtttttgcgggggccctctagagtcgacctgcaggcatgcaagcttga

SEQ ID NO: 2947 - DNA, 385 bp, Oryza sativa
  Clone ID: PAT_MRT4530_102675C.1
tatgttgccatgctgaatagtaatccagaggattaatatgattgcattcatacatgatgcatcatgacagtatcacttaagggatttaatgacctaaaaattataaatcttgatcttgatgtcaagtatactgattacagaaatcacaggtaaataatggtgttttatggtattggtcttagcaatgttatgctgatcaactactaaggttcagattctgatattatgctcttctagattacctgatatggtgacccttgagttataagtaaatataccctgttataagtaaatatgcctactctgtttattattccatatattcagaataattcttgtactgaactgctacatgtttaacagaatactaatataactatagatg

SEQ ID NO: 2948 - DNA, 817 bp, Oryza sativa
  Clone ID: PAT_MRT4530_102676C.1
cgccatcctattcatccgctaccgccgcctccttccccttctccgccgccgcctcctccttcaccttctcctcctgcacgcaagaaacgggaagcgcatcaaaggtaggcgtggcgccgccgccttcctcggccacagggagccgcgcgcacgcgcccccgcacattaccaagaacggaaagagagaccatacctcgcccatggctgcctgcctctcctcctgctatatgcgccctcttccctcgcgctctgctcctcttcctctcgttcccctcccctcgctcattccaccgccaccgctccctcccatcggccattccaccgccactgctccaccgcgccgccgccctgcctcaccagctggctgaaaggcgttaacggcgccggcgagccctcgccccccctcaccctcccccctccctctcctctccttttcctcaagcgagttgtcccgcgccatcttcttctccgtctccaacggcggggcgccaccaccggccttctcctcctaataatccatctgctttgctcgcaccgcctacaccggccaccgccccgctctcgaccccgtggcttcggcggcggcgccgccgcctcgctgcccgcccgatccgcctcccacagccatccctttaaagccagcgaactcccccctcttcctcctccccctcccccctcccacccccaccccatcctgggaccctaattcgtcggccctctgccggagtttgggttcgtccgcgccggagaagaagaggtggttgccggagttgaagaagaagagcacgaatcataaagcacatcgagtgatccaaag

SEQ ID NO: 2949 - DNA, 204 bp, Oryza sativa
  Clone ID: PAT_MRT4530_102677C.1
atggattcatcggtggtggccattggcgagaggaccacgtacgcctgcgccaccgtggccttggccaaagaagtcatacatcggaaggagcccacgctgttgttggggaggacgtacgagagtgctgtcctggccgcgtcgtcctactcctctgtcgggctcatacagccgcaccaagctaggccagctggcaccatgagctga

SEQ ID NO: 2950 - DNA, 979 bp, Oryza sativa
  Clone ID: PAT_MRT4530_102678C.1
gcacgaggctcgcacccacctcagcgcacctcccccttctcatggtcctcatggccgcctccgcctccgccgccgcctccgaccaccacacggcgcaggcgaaatcctccccctcggcggctcccccggccggctccgccacccgcactcgcctccacagcttctccttcccgaccaccttcggttggggcacccatcgcctcctccgctgctccaagaacggggactccgctcccgcctccgcctcgcctccgaagcagccgcacaccccgtcgccggagaaggggcaggagacctccgctggcggcgcctctcggccgtcgcggccttggaacctccgcacacgccgctccgccaccgtggcgcccgacgcgtcgagatcggaggccgcggggaagaaggcggcggcggcggcgggaggagggcaggcgctgctgcacccgcctgcgccgttgccggtggtcgccaagaagaggggcttctccgttgcgctcaccagggaggagatcgtcgccgacttcatcgccatccgcggcacggcgccgccgcgccggcccaagaagcgcccgcgcgccgtgcggctcgagcttgatcggctgtatcccggattatcgctggcggacgtgaacctggattcgtacaagatcgtcgaggagaggtgattggcgccagcgcggtgaagtctgcaaatgagagcaacttttcagatgttcccatgttttgcttttttttcttctgacggctaacatgtccatccaataattatgttggttcttctagatcagaggatggatatagattttatggttgattgtgaataggttttctaattagaagaaaggtggaatcgtatgcgatgtttgtgccctgtggcatatgtggtgtgatgtttggttagctgtcatgttatgtacatggtttcagtctgtggaaatatttctttcggtgcaaatcgcttcaactcaaaaaaaaaaaaaaa

SEQ ID NO: 2951 - DNA, 419 bp, Oryza sativa
  Clone ID: PAT_MRT4530_102679C.1
aaacaaaaacatcgaccggggcggatcgatcttttttccttttttttttcgggctttcacagaaattcccgcccccttttcaggagagaaaaagggggtcaaaaagaattgagttgtttttttaacagcggcaaccttagcattttaagcgggggggatgggataaaaaaatgagttgattggatttaggggagggcgtcggccccggcaacaatttcaaggatctccccggggatcttggcctggccctggcggttgtaaaccatgggaaggtttttccggagctcgatggcgttgtcgggggcccttttaatggggctcatcctggcggggagctcgctggcgaggaactcctggagcgcccggaggatctggcttttggggtaaagcgggaggagcccctccaggatctggacggg

SEQ ID NO: 2952 - DNA, 234 bp, Oryza sativa
  Clone ID: PAT_MRT4530_10267C.1
atgtcgattttcggatacaaggatttagtcatcgccaacgccatgcttgctcccatgcttccagcctccttgatatttttaaagcacgtgtccggagcagctcgcaatttgtcgaagacctcaactaaatcaattaggtttgactggaatgatggcgaggagaacgacgttgagcagtcgatggatcagacttcatcaaagcaaattcctgaggatgacatttcaaacccttag

SEQ ID NO: 2953 - DNA, 108 bp, Oryza sativa
  Clone ID: PAT_MRT4530_102680C.1
atgaggttgcgatccccgtacacattgtccacgcgacctgaacttggcgccccgaagccacgctgcagggaacgcagcatactccctggagtacggcttagtccatga

SEQ ID NO: 2954 - DNA, 196 bp, Oryza sativa
  unsure (1)..(196): unsure at all n locations
  Clone ID: PAT_MRT4530_102681C.1
cccaagtnaggctgaaaccaaggaaccatgagtggaatgtaaggcaancaatgtgagggtgtgctaaatggtggctgatggacggatgtaccctggtgtagcgttggatgtgatgggctacatttcgttgtgacttgtaatgaatccatgccagagtttctgncaagagcaacttcttgttaaaaaaaaaaaaaaa

SEQ ID NO: 2955 - DNA, 570 bp, Oryza sativa
  Clone ID: PAT_MRT4530_102682C.1
tcagctccaaatttctacatcctttgtcgccatttcatcgaacaccttataggcatcgccttgacgttgccgccgcagccggtcaacccgcgagccaccgccaccggcaggcccacgcatctccgccgcctcacaagccgccgcacaagtgccgccgcacaggccgccgccgtcacctaggctatctcctgccgacgcccccgcacgcgagtcgcctgccgacgccgccgcccgtgagccgatgccgacgccgaccgcaacaccgcccacagccgctgccaccggccacctgccgccaccgatgcgccgcggcccgcgcttgctgcccccgtatgctgccgacgcagacgccgccacaaccggttgtggccgtcgtcggaggatggggaagaagatgggccgccgccacctactggccccgccgccgacgctgccgtagcccaccgccaccagcctccggccacgcgtgcgcgccacctccacccccgtagtttattttatagaagtagctctgccaactccactcaaaaaaaggtaaatcttgaccgtttggcacagctcctgctctag

SEQ ID NO: 2956 - DNA, 306 bp, Oryza sativa
  unsure (1)..(306): unsure at all n locations
  Clone ID: PAT_MRT4530_102683C.1
tgtgatggatatctgcagacttcgctcttagcgtggtcgcggccgaggtacctacaacagcgacaacagttacttaatccattggtagtggctaacccattggtcgccgccttcctacagcagcaacaattgctgccatacaaccagttctctttgatgaatcctgtcttgtcgaggcagcaacccatcgttggaggtgccatcttttagattacatatgattcgtcncttggccgcgaccacgctaaggacgaacggcaacgcaccggcgggggcgggcccccgcccggcgaangccaccacact

SEQ ID NO: 2957 - DNA, 1335 bp, Oryza sativa
  Clone ID: PAT_MRT4530_102684C.1
atgaagaagggctacagcacattaggggaaacccacccactggctttcttgtgggcgcccttcctcttgattcatcttggtgggcaggacaccatcactgcattctccatggaggacaacaacctgtggttgaggcatctactgaacttggtagttcaggtgaccctagccatgtatgtattctggaagtcaactagttggcacaaaaatgtgcagcttcttgttcccggtgtcttcttgtttactgctggaattatcaagtatggagagcggacagtggctctcatgtatgggaaactaaacaacggcatgacatccaacattaaaattagtaaggagaggatctcagaactgaccgagcatgatgtttaccaggaacttgtttgttctgttctaaacatgcaaaaagtcacaaatacattgtttggaagaatgctgctagcttcacctcggacatggtggtggctgaaggatggaggatacgataggctatctcgcatatcatggtattttgttggaaggctgaagagaaggccactgtggtcaaataaaatgggccagtacaacttgctaagttcatacttgggcatgtatgacgagttagcagttacagcgccccaacgactgatgagaatgatgaggaagatggcgagaggagtcggtgttggaggcaaggtgatgaacaagaagctattttgggtgagcacgctgctggagaccaggtatgaggtggtggacaacgatttgatggagtgtgtcatgtgtgagattaaaaagcttggatcatctcaaaggattattaatcggcggtggacgcacttggagccatttgtcaaggagatagaagggatgttgctcctcacattttcttcaaccataattgtgctgcacacaatcacaatggcttacttgatgaagagtaatgcaaatgctgtatccacgctgcagagcggaattgcaaatagtgttggactttcattatcgtatctaaataaggaaatccttgaccacaacgtggatatctccctcagtactctcatagagagattgaaaaatgcacctgttgaatttccttggaggactcagcacgagcagcacgaggcggttctcgaggagttgagagacatttggatgaggctcctcatctacaccgccggcaagtccaggccggagggacacgccgcgcatctggccaaaggaggggaactcctcacattcgtctggctatacatggcatccatgggtgttggggatggcgtggcacagcctatcgagacttcaacctcatctcgagatgcctctggactcagtataatcagcatcttcgatctctaa

SEQ ID NO: 2958 - DNA, 1227 bp, Oryza sativa
  Clone ID: PAT_MRT4530_102685C.1
atgatcgagagaagcaactccaccccttccgccactccggcgaggccaccgctcgccgtcgacgaggagtacaaccaggccttccgctccaagtccttcctcgacctatggtctcacgcccaccaccacctcacccacaccttctcctccttcaagctctccacctccaccccctgcgccggccgcggcggtgccagggaggacgacttcttgcacgccggcggtgatggcggcgcggcggatgactcggagcagtcgtgctcttatactgttcttgacgacttcgtcctcgagccgagcccggagtcgcttgctcggggtgctcgtctccagcaacggcggcggcggcggccgcggcgtcaccgcgtggagacgctgctgattgagtattttgatgtgacggaggaggcgtgcgaggcttgctccgcgctgctcgccgccatcggcgccgcgcggcggcatcacctcacgctccggcggctgctgctccggctcgacgggggagacgacgacgacgccaaggatgccctcgcgcgccatgtccgcctcgacaacccgctctccccgggcagcctctcggagttccacgacgtgcacgcccggtgctccccgctggcgtcgcgcctcgccgcggcgcagcgccggctccgcaggctggcgcgcgcgctgcgcatcgcgcggggcacggccgcggcggcgctcgtcggcgcgtgcgcggcggccatcgtcgccgcggtggtcctcgccgcgcacgccctcgtggggatcggcgtcgccgccgcggcgttcggcgccacacccgcgggcgccgcgcggtggtggggcaggagggcggcggagaaggtgagctcgcggcactacgcgcgcgccggcgcgacgctggacgcggcggcgcgcggggcgtacatcgtggggcgggacctcgacacggtgagccgcatggtgcggcgcgcgcacgacgagctggagcacgggcgcgacgtggcgcgcatcgccatgcgcgggcacggcgagcggccgctgctgcaggaggtggcgagggaggaagaggagtgcgaggaggatctgagggcgcagctggcggagctggaggagcacgtctgcctctgcctcatcaccatcaaccggacgcgccggctggtggctcacgagatggcgcgtgggctgccgccgccgtcgccggcgacggtgacgacgacgtccgaagaaagattaactagtagctga

SEQ ID NO: 2959 - DNA, 1721 bp, Oryza sativa
  Clone ID: PAT_MRT4530_102686C.1
atgccgcggctgatgccggaggacgcgtccctgctcctggaccacgtggtcggcgacccctccgtccccgccgccgccgccaacgcggcgctcgcggcgctccccttcccgtcccgccccaccccgcgcctcctcagggcatccctcctccgccgcctcgccgccgacccggtctccgccgccgccctcgactcgctccagctcctcgcctccctcccctcctccccttcccccgccgcccccgccgccgccgccgccgccgccgcccacctcgccgtcgcggcctacctcgcagtctccgcgcccgacttcgacgccgccgcgggggccctcttcgggcgccccggcggccgcgcgcgccgcgcggtcgaggagggtggggccgccgcgctcgcctccgacgaggccgatgccgtggccgaccagttcgaggccgcggtggggaattcgttctcgcagaccgtgctgagggggctctggggcgaccgggccgcggcggaggagcgggtgagggagctcctcgccgtcgagtgggcggcgattgggcagtcccggctggagatggcggcggagaggattgttggggatggcgccattgagacatggagggccgcagatgaggtcacccgagccaagtatcgcttgctcgctggggaacaaagagcacgtgaaattgagggcaaacttggagaaactatccctcaaggaaatcaaatttcgacaccagaagttcataaggtgatggacgcccttaaatcaagctgtgctaaccttcatagtgtagtagaggacccacttccagctgcaaaggcagcagcagatgaggtactggctgcaaggatggataaagcagtcgatctaaatgcgggagaagttagtaatcagccaacggcttgtgacatcgctggtccaagtgctcctgcggacaatttggatgctccaaggaaaggcacagcagccagccttatggattggaatccaacagcaaggacgtttcaggccgccgctttcttctccaccaccgacggagacgccatgccgccgccgccgtcttccctgcctccccgcgtcctccccaaccttgtctcatgctccaggagagccgtgacatcggctgccaccgcagcagccgcagcctactcgacagccgccgccgcggggggcggcggcggcggcggccgccctctccgctacgccgtcctcggcgccgggttcgcggggctctccgtcgcttggcacctcctcaagtatagccccaagggttcccgcgtgcgcgtcgacatctacgacgagagcggcatcggcggtggcgcatcgggcgtttccggggggcttctccacccgtactcacctaaagacgaggcacagtgtctgatccctgggttatgtgttccgttgaactttgcagtttacatgccattagcgctgaacatcaaccctaagaaatatttacaggtggctttgttcttcgcatgccaaaatatgtctgatgaagcatcattatcatccagcgaacagaaagagtgcaagctgtacaacgaacacgtcgatgatctacagcaattggcagagacctctgttaagaaaaatgttaaaatgcaacacttgtatggttcactgaagctgcttcagtatggacttcttctaacctaaattgctggaggtactgctgaattaagattgtgctgatatgctcaggtgcttccttttttgtttctggt

SEQ ID NO: 2960 - DNA, 1438 bp, Oryza sativa
  Clone ID: PAT_MRT4530_102687C.1
atttcataacccgagaagcacccggagccacgggctggtcgctgcagcttctccttcacttcaccaaccagccgcggcgtgcggggaaactcatcggatcatacagatgcatgcactctttgccgtcgcccgtgacacagccttctcattgtcgccggcgggcgacgagcttaagttacaattgacaagtcagacgagacgtgcaatgcatgttttcagtagcagggaagaagagcatgggagcaacgacgacagcttcagggagagcctcgtttctttgcttgacaacacgagagactacgtgatggctcccgaagtgttcgagggcgtccccgtggcatgcgactacctcaaggggatggacagcgacggcatggccgcatcagctgtcgccgcctatagcctggacaacaacggccagcacgctagtgttagttcaatcgagcatggcatcgctagctcgccgctgctggcgtaccagctggggaagaacagcgctgtggtgcaacggagcatccagcagcaggaggttggatctcccatggccgcatttctgcagcaactgattcccactagtgttctcgatcagtctggtatagggtttgggggagtttgtctggacggctcagcactggaggcttcgttttgcatgagaacttctccggacgtcagctctttcagtggccacaggtcagcaaccgcagaagaattgatgtctacagacacaagggagcaagaaattacacggctggcaagatcttgtagtagcagtggaagtgatcgtaacaagaagaaactatcagagcatcaatcacccaaagtgaagctgggggagaagatcacggctttgcagcagattgtgtcacctttcgggaagacggatacagcgtctgttctgttggaaaccataacctacatcaaatttcttcatgaacaaatacagttattcagccaaccgtatatgacaaacagcacaaacaagggtcatattcactggggaggggaagggaagaggaaggcaggtctggagcatgatttgaggggcagagggctttgcttggtccctgtttcctggacctctcaagaatactgtgatagcatcctgccggagtgctgggctccggcgtacaggaactacttttaccgatgagccccatacacattagacagctcacagccttgtctcacttactgcccgtgcaacggctacgttgggaagatttactgtttacttactctatgtttttcagtccccatgttatatgtattgctgagtttgtagcctagaacgaataaaaagagtgaagtgtataggcggtctctaaacttataagagtgtcatatctaggtccctgaactcttaaaatgtattttaggtttttgaacttgtactgcgtgtcatatatgtccaaatggatcccatctcattccatgtatt

SEQ ID NO: 2961 - DNA, 182 bp, Oryza sativa
  Clone ID: PAT_MRT4530_102688C.1
atgcgatgcgagcagcgagctccactgccgccgttgcaatggcagaaaagctttagaagaagaaggtgctccatcccgtgcggcttcaccgcgctcctcgccggcgacctcccggcgtgcgcgccgccgctgaccgtgctcttgcacttcttcgcagcgctcgggtgcctgcccgagactag

SEQ ID NO: 2962 - DNA, 780 bp, Oryza sativa
  unsure (1)..(780): unsure at all n locations
  Clone ID: PAT_MRT4530_102689C.1
tcattatggagctggtactacccattctatgttgctcctttcgtatctgacctcaaaagtcattgtcggttcgagatatctttcaccgtagacaaaccactgcgaccatttgatcagctcatggcagttttaccactacgaagttcgtgtgctctcccagaatgttacagaaaagtaatgggccgtaaagaatttgaccatccgaagttgcaggctgacacaattggaaaacgtttcttgtggaaatgtatctctgaggaagaactgcttcaggccaccaaagagttagataaagagctgtcgatgcatgagatgagacggaatactccccggcagagaagatctttctgcagaggaactcaaatgctcaggcacttgccaaagttattgtgcaactgcaaacatcgtcatgttcgccggagcaaaagcttccaatagattcagctataagtggacttggaggctggttatcgcctgatggcttgagcaatggtttcttttgctcacccctacaaaatctgcaggacatcacgaatgatcaggcaatatcagcgatgttcttcaaccctgaggcagggaatccaattccaagactacttagcaatgtcaaagtacctgacaagacggttacggaagctgacatctcaaggaggctgctctggcacacgtaccctggctcgaggcngccaccgcccatcgttgagaggccngacaccatctggaagccgatcagcaagccgtcggttcacgggagggagcacaggacgccngaaccggtgg

SEQ ID NO: 2963 - DNA, 684 bp, Oryza sativa
  Clone ID: PAT_MRT4530_10268C.1
tcaaagggcatcctcttcacttgtttcttctgcaaagccatcaatggcatcaatgtcgattttcggatacaaggatttagtcatcgccaacgccatgcttgctcccatgcttccagcctccttgatatttttaaagcacgtgtccggagcagctcgcaatttgtcgaagacctcaactaaatcaattgtactcggaccgttgttattatagaacatggcttggattaagtgcatagtagctttggcgacttcatctctagccccttcaagattcttaattttattcaccaagatgtcgaattgagcttgagatttgatcttgcgatcttcaacatctttgatggccgattccctctctttaataagactgcctttgtctttctcgagggtttcaattcgcttcttcaattcggcaatcttggcagcttggacttgctccttgagcttcatgatacgatttaacaaggtgagggcttgagcggtttcatctcccattggaagtgagttccatgtttcgacgacctcatgagtgttgggggtcgggaaggcttcgccgtacgctggacgccatccgatgatttcttttgccgggagaacgccgtgcaccaccatttccttcaagttttcctccgtgacattggagggggcccattgactctcaaagctttctctctcctctgccat

SEQ ID NO: 2964 - DNA, 194 bp, Oryza sativa
  Clone ID: PAT_MRT4530_102690C.1
tcacgactggctgttgttgataggaaagggtggtgatcgtgttgtaatatctctggcatgagagacccattggttctccctgctcggatgagcggggctgttttaacatcagaatggcaggaaagaaaaaaagaatcctcctaaaaaaaaaaaaaaaaaaaaaaaaaaaaaaaaaaaaatgggggggggggggg

SEQ ID NO: 2965 - DNA, 245 bp, Oryza sativa
  Clone ID: PAT_MRT4530_102691C.1
tagtggatccccgggctgcaggcgaatttgtcgctcggaatgggccggaaatgctagggtttatcaccgtctcccctcacaaagccccgcctggtgattcgccgtctccctccgtcgccgtgccttcccccgccaccgtcctgctcaccggcgttccgccggaacgactcgaagtccacctctcgagctcggcggtctcccccttagggcagaagcggacgaggcgaatggaggaggttagggtc

SEQ ID NO: 2966 - DNA, 121 bp, Oryza sativa
  Clone ID: PAT_MRT4530_102692C.1
tttagagtggaagaatcgacggcctattccgggggtttaattaaagtggcggcgattacacaagagctaagtgcttttgatgtagaatgaggtgattgacccttgtgggctggtagcaaac

SEQ ID NO: 2967 - DNA, 322 bp, Oryza sativa
  Clone ID: PAT_MRT4530_102693C.1
gcaaaacggagggaaatgggtactctgccaaatggactatataatgcacctcttagaccacttcatcttaatcacacttgcagatagtactactactatacaccttccggaatgtatcagaaatatcctatgtgaatgtaattatttcgccactgtttatttagaacagacagaggtgcgcaacgcctggttcagtcacaaaaccaaaacagagtacactttggaacgctgccatgtacatgtgcacttttacgttcagctttgacgctaaatattgagtgcggatttagaccccctaagcttgccggaaatctcccgtctc

SEQ ID NO: 2968 - DNA, 2552 bp, Oryza sativa
  Clone ID: PAT_MRT4530_102694C.1
atggcgtgcgcgttggacatgcaggagtggggcgtcggacgtgcaggagtgggctggctgccagagaagaagggtggggataggacaaaaatggagaaggagaagaaggtgggcattaatttggaatttcacactgtattgtgggaagaactggagaaattttccccatctaggaaagatggtattactgagataatggagtcagaaattcggcagttgtactgttcattcattcgggatgttggcattagactgaaactaccacagatgactatagcaacagcaataatgttctgccatcgcttctatctgtaccagtcccttgccaaaaacggatggcagacgattgcaacagtgtgcatatttctggcttcaaaagttgaagatacaccttgtcctctggaccaagtaattagagtggcctatggaacaatgtacaggagggacccagctacagctcgaagaatccaccagaaggatgtatttgagaagcagaaagcactaattttgaccggggagagattagtccttacaactgttcggtttgatttcaacatccaacatccttacagaccactacttgatgctatggaaaaacttgggatctctcagaaggaagtgaaacaagtagcttggaactttgtaaatgattggcttaaaacaacactgtgcctacagtataagccccaatacatagctgctggttcgctctacctggctgctaagtttcagaacgtcaagcttcctgtgcatggagggcatgtttggtggcaccaatttgatgttgccccaaaacctttggaagagactaagagttacactgctatagctgtccttcagcaaatgagggagatggttcacatgaaagcaaagctgtttgctcatcccagtccggctaagcaaaaggaagttctttttgaaggaatgctgctcatatcaaatagcccagattctgtgttgactcaatctagcttgtcagtaagcagctcgagtcctgaaattggagaccccaatgaccacctgcaggtggattcaagtcaagacatagtgcatattgaggatcgtagcaagtcatatcctgaaaggaatttatcgaatcttactgctgatatgaataatcccggtaaaacacacaataaagaaagcttggatcaggccttaaaaatcaaacatggtggactgatctcatgtaatcagcagataccattagatgcaattgcaaagattgatagcagcactgctaaatgcgtggaacagaatattggcatttgttgcagctcaagtaacacattcaatggcaaaatcttgaacccgttctcaataagtcagcgaagtggtgataaaacaaagttatgctcagagggtggatcatcgcttacagatgtggacagcaaaagcactcaatctgtcgaaccgcccactacaatttgtaaccataccagtgacagtctcaatgtggacagtttgtgctctgatcagagactggctaattccactgcaggtaccacggagaaggcatcatttgtattgcctgtccagataaaggttgatcatttgtgtgtggagcgtaaaaaggtagatgtggcacggataaaggatttgttgatgaagaggaagagacgaagagaaagacaagggcggtgcattccttcagttgacctaagtgaagaagcctggattgagagagaacttgagtctggtatagtttttaaaaaagttgaccatgttgttgcatcgtatgatttaagtgatgaaggctggattgagagagaactggaatctggaattgttattggacaaaaaaatgaccagcctgtatctttagatggtttgactgaagatgattggattgagagagagcttgagtctgggattatagttgaaccaggaccagctggtaagaagctaaagtcaaagcttctttcagagggtcatgagataatgaatagcaggtgggaaataaatggcaaatcaatgcaaaatcaagtcacatagaatatgagatatccatacagataggagcaccattgtttactcgtgttctttatttgattgaattaactatacacctcgtgtacttgaaatgctaggggtgtgcatgggaaagatttttgttctttgtataactagtaacagtgggaattcacaatttcaatctttaggttgtaggtgcaactgtacaataattaagtgtaaatgtacaatccgtccttgttagcagctaatccttcattgtaaactgtacccaaaagaaaaagttagagagcaactttattacaagaacgaggcgcaaaagagacctcaaagctagcaaactgaaactggagaagcgtttttatttccgtgaagattgtagcaccagtggctaggtcatgcgatgaggacttaatcgccaaagccagtatggccgagtcagtctcaatttccacagcagatacaccttggaccgagatggttaacagagctaccaagcatgcccttgcttcagcagaaatagcatcattgacgaattcgatgcgcccagcacccgcaaacaaaagcatgaccctcat

SEQ ID NO: 2969 - DNA, 237 bp, Oryza sativa
  Clone ID: PAT_MRT4530_102695C.1
atgatgggctcgccgccggcgccgccggcgcgtcgtcttggcgctctcgccgtcttcttgctcgctctcttcctcgccgcgccgtggggcgtcgactgcgggtacaacgtcgcgtcggtggccgggtcgaagaaccggctgagggcgcggctggagctcgccggcggcggcggcggcgcggcgccggagctcggccccgacgtgcggcggctcagcctgacagcgaggcaagtatga

SEQ ID NO: 2970 - DNA, 1251 bp, Oryza sativa
  Clone ID: PAT_MRT4530_102696C.1
gtttttgcctttcttggagcttgccaggcaatggctgctgcggtagtggcgaggtgtggtggtgccaagaagcggaagggcgaggggctcggggagatgcacgacgacgtgctcgagcgcgtcctggcgaggctcccgccggcgagctacttccggctcaggggggtgtgccggcggtggagcgacgccgcgtcgtcgcccacgttcctcgccgcgtgcggccgcgtccccgcgcgcgacccgtggttcctcatgctgtcggagggggaggggcaggagcggcgtcttccggccgtcgcgttcgacgccggcgagggggaatgggcgcggtgcgggggcgcgccggggcacgtgatgccggtggtggccgcgtcggggggtcgagtgctgtaccgcgcgccggacaccggggagctcaccgtggccaacccgctcaccggcgcgtcccgcgtgctgcctgcgccgccgcccggcgccgcgctccacgccgttgccatgtacggctcctccccctaccgcgtcgtcctcatcacgggcgacctcccggacctctccatgacggtgttcgactcgtccaagaacgcgtgggacgacgcggtggcgctgtcccggaagccggatgcctcgtcgcccgagcgcgacgcggagggcggcgtcggcggcggcggcggcggcggcgacgacgagacggtctacttcctgagcaagtccggcgacgtgatggcgaccaacatgcagcggagcgcgtcgaggcagtactcgtccgccgtcacgtgcggcgacggcggcgaggccgtggcctacttcctgagcaactccggcgcggtggtggcctgcgaactgtcgcgccgcgccttcgccgagctcccccggatcctgcccgtgtacttcgagtactccatcgacgtcgtggcgtgcggcggccgcgcctacgtggtggtcctctcggagctcctcggcacggccagcctgcgcctgtgggagttcgccggcggcgcgtggcggcaggtggccgcgatgccgccggccatgtcgcacgcgttccacggcaagaaggccgacgtcaactgcgtcgggcacggcgaccgcgtcatggtctgcgtcagctccggcgaggccaacggctgcttcatgtgcgacgtgccgaccaaccgctgggaggagctcccgccgtgcgccggcgccggcggcgagcccatggacttcgtggccgccttctcgttcgagccaagaatggaggtcaccgtctaa

SEQ ID NO: 2971 - DNA, 363 bp, Oryza sativa
  Clone ID: PAT_MRT4530_102697C.1
ctttctttttttttttttttttttttttttttttttttttttttttttttttattttttatttttttttacttccaaaaattcatcatttaagtagggagagaacggagggagaggtaaaaatattataagtaaataagttgaaaaaaatggatcagctagaagttcttcttggcctggaaggggttgtcgtaggtccagtcgcgaggggcgaccccccaggagggggccttgcgggggtcgccggtcatgacccggaaggtgagcgactcgccggtgaggttggcctccgccttccaaagctggccccagttgctctgcaggggcgtccactttacccgcttggtgccttttaccgtaagtt

SEQ ID NO: 2972 - DNA, 592 bp, Oryza sativa
  Clone ID: PAT_MRT4530_102698C.1
caaaccaacaaaagggaaacaaatagggaccccagcacaaaaggaaaaacgaaaagggcccttttttcccccgtaaaaaacccaccccaaaaaacccgggggggggggggaaaataaaaaaattaaaccccggccaaaaaaaaaaaccccaaatttagaaaaggatttttggaaaaaaagggaaaacccaaccccgggcccccccaaaaccgggggccatccggacgaaaggacgggacatctaaaattccaatggatcaaccccttaaggagccaaaaaaaaggcggcccagggcaagccattttgggcccatcggggggaccccaacgccaaccttccccaaggggttgttaaccccgaccggtttaaagggccaaccccccaactaaaagcccggcaaagggagcggaaaaaagatcttccccgaacccttgtttttaaagggaacccccccccccggggccccaagggggcccggggggttaatgaccaggggggcaaaaaacccaaccccctgcttttgttgaggctggcccccggggaacaccttggacaccccctccctcgaatgccccgggccttggaaaaacc

SEQ ID NO: 2973 - DNA, 1230 bp, Oryza sativa
  Clone ID: PAT_MRT4530_102699C.1
atgcagacgcggtcgccgacaaggcgcaaggaggagtcgccgtcgccgtcgccggccatggggacgcgggcagcggggaagcccaagaccacggcggcggtcggggcgcgagcggcgagggggaacaagcaggcgggtgctgccacgaaacgcgaggaggcgacggcgccggcgatcaccagcaccggaagtagccaatcgccgccgccagaggtggagccgagtacccgcaaggtggagggtggagagggagactccgcattggcgaagagggtgcgcgacgatgaggaggaggacaaggaggctgctcaggcgttcaatttccgccatttctggaatttcctcttctccgcccaggccaatttcgaagacatcaaggaggaaaatccaaatgaatggatgattgatctaatcgcagctgatataccacctatgaggcacacggatgatccaggcgcaatatatgccaagtgctatgacgcggtgcaggtgtactcggtcgaggtgaagcaaatcaagtgtgggttgcggtggcctatcgaggtgtttggccatgtcgccgtgcgagacagcgtcgatcgcaagcgcaacctcgtcttcaatcgtggccgggacgattgccaaacgctcacggcggaggactcctctttggtgttaacagggcctagtcgatatgtcttggcaatggacaatccggactttgaagttgagctaaaggtcaagggaattgcggagactgaagacaaggttttgagctctcatgcctttacattcaactgcatctatgacgatggtagtagtgttaagaggcgcgtggcttccaacaagcgcagcacggtgcagatcacgtttgctttaattccagagacagtggaggcgacatttgaggttaaagtcgttgatgggtcattggatccttccctacgcccacatttctttgcttctactcaccaccatcccagcacggaatgtgtgttgcttgatcctcgagagggtgcaatggtgatcagcgacaataatagtgtcaaacttactcgatctgttgtttccgttgaagtgctggggggattgaagcttactgcagaggctctagatgatgaaaaagctgttgttcctaggacaacaattatcttcgaaccacaaagggatggtagagtgtatggatttcttgatcttaattgttgtaagatggtggttaaagtttcctggtctcgactttccatttgttga

SEQ ID NO: 2974 - DNA, 267 bp, Oryza sativa
  Clone ID: PAT_MRT4530_10269C.1
atgtcgagggtgcagctcaagcacggcccggatgtcgggccgggctggcacgggcacgaccccaatcgggccatgccatgcttgggccggaccaaaatggcgtgccttgggctgggccggaggtctcgggccatatggccatctataggttggtccggcgattcaagagaagtagtcgcggtggctgaggcctctgcagtcggcgaggtatacttcgcgcagtgcggcgagtgcaacatgttccgccgccgctggccggtgctgtga

SEQ ID NO: 2975 - DNA, 406 bp, Oryza sativa
  Clone ID: PAT_MRT4530_1026C.1
gttccgccgcacggccgcactaggactgcttatgcagtgctggcagcagatgcaggacgagagccgcgagtgcctatgctccggcatgcaacgcatggagaggagctaccatgctagcatgcaggtgcccctgcagcacggatgaccggcctcggcgtaagagtactacctgggggagggtaacccggcacatcaacggtactacggccaggggctgtctgaggatggctactactgcgagcatcatcagcagctgctgatgaccctcgtgaggctgaccatggtgaggcaacacgcggcgcaactaccgttgatgcgacgactagagctccaccagggcataatcttacgaggacgacaacacatacgttgagctgggtcgtctgatagctagtatgatcacacc

SEQ ID NO: 2976 - DNA, 416 bp, Oryza sativa
  Clone ID: PAT_MRT4530_102700C.1
agtgaatgcagcatgctgtattcatatgcagcaattaacatcagtccgaatctcgctacatgaatgaagatcggaaggcatggggtatacgtgcttcaaagttaaagaaattctacttaagacaaaattacatgcagaattgcaatttgcacaatatggatcacatacttgatttcctgaagaaagcctagcttgctttcctggttgcctgaaacaatccccacgttgctgtgaagaggatgaactgcaattatacaaagaacgaggaagtctctgttcttttttattgcactgtgatatgaacagaagaccttggtagagtgaatgagtgattgtaacatgttttgtcatttctgccgactgtgcaacatgaacaacgacagaatgtaagctatcttgtgagttgtgatgataag

SEQ ID NO: 2977 - DNA, 216 bp, Oryza sativa
  Clone ID: PAT_MRT4530_102701C.1
atggtggcggccgtcgcgctggtcgcggggtcggcgccgtcgccgtcgcggggtcggcgccgtcgcctccgactcctccccactgccgtgtgcctcccgcctactccaagcgacgaggccgagggagacgacccggcgacggaagttggttaccgtttgcgaggctacgggctggagacacgcattgcttctttcagggtgttcgaccaggaatga

SEQ ID NO: 2978 - DNA, 166 bp, Oryza sativa
  Clone ID: PAT_MRT4530_102702C.1
gtttttttttttttttttttgttttcaattttcagaattgtttgtgcagaggtaggaatgcgcatgagtttgtcctgtcctgtatgaggttgtagcttgtatggttggtccgtgcggtttgttctttttttatagccagatttgatgaagaaagcaatcctttcgg

SEQ ID NO: 2979 - DNA, 2193 bp, Oryza sativa
  Clone ID: PAT_MRT4530_102703C.1
gcacgaggctccttcctcggtttcccccaaaaacccccccaaacccctcctcctcgccatggcggcgccgtcccagaccaccgccaccaccacccaccaccgcgtcctcctcccgtcccaccaccaccaccgagcggtgcctccctcgctcctccgcctcccgctccgcgccgcgcgccggggccgcctctccgccgccgccgcggccgcggcgcccgccgcgtcgaccgcggcgccgtcggagcccgccgcgggtgccgtaccggggaagccgacggtgctcgtggccgagaagctcggcgccgcggggctcgagctgctccgggggttcgccaacgtggactgctcctacggcctctcccccgaggagctccgcgccaagatcccgctctgcgacgcgctcatcgtgcggtcggggaccaaggtggggcgcgacgtgttcgaggcatccgggggaaggctccgcgtcgtggggcgcgccggggtcgggatcgacaacgtcgatctcgccgccgccaccgagcacgggtgcctcgtcgtcaacgcacccacggcgaacaccgtcgccgcggccgagcacggcatcgcgctgctcaccgctatgtccaggaacatcgcccaggccgacgcgtcgctcaaggctggtaaatggcagcgcaacaagtatgtgggtgtatctctcgttggtaaaactattgcaattcttggatttggaaaggttgggtcagaagtcgctcgtcgtgctaaaggtttgggaatgcatgtgattgcacacgatccgtatgcttctgctgatcgtgcccatgcaattggagttgagctagtgagcatggaagacgctttgacaactgctgactttatctcgttgcatatgcctcttacccctgcaacaaacaagatgctcaatgatgaaactttcgctaagatgaagaagggtgttagaattataaatgttgcgcgtggtggtgtaattgatgaagatgctctagtcagggctcttgattcaggaatagttgcacaggctgctcttgatgtgttcactaaagagccaccggcaccagacagcaaattagtgctgcatgagaatgttactgtaacaccacaccttggtgccagcacagttgaagcacaggaaggagtggctattgaaatagctgaagctgttattggagctctgaaaggggaacttgcagcttcagcagtcaacgcaccaatggttcctgctgaggtgctgtcagagcttgcaccttatgttgtgctcgcagagaagcttgggcgcctggctgtgcagctagtggctggtggcggtggtatcaagtccgtgaaagtgacctatgcttctgcaagggctcctgatgatcttgacacgagacttcttcgtgcaatgatcaccaaggggttgatcgaaccaatctccagtgttttcgtcaatctggtcaatgctgacttcactgcgaaacagaggggagttcgtatcactgaggagagaatcttgttggatggctcacccgagacacctattgactacatccaagttcatattgcccatgttgagtccaaatttcccagtgcaatatcggagagtggagagatcactgttgaggggaaggtgaaggatggcatcccccatctgacaaaggttggatcattccaggttgatgtgagcttggaaggaagcctgatcctttgcaggcaggtcgatcaacctggtatgatcggcgcagtaggaagtgtccttggtgaggagaatgttaatgtcagtttcatgagtgttggaagaatcgctcctcgcaagcatgccgtcatggcgattggtgttgatgaggaacctaaaaagagcacactgacaaagattggggagattccggcgattgaagaattcgttttcctcaagctctagattcatgcgttgtatgtttgaagctgcaaacatggtgtgcaattttgatgtagctagctatttaatcaggatctagaggactgatggttctcgttggaataagccttttttgggttatggtgctgtttgtcgagtttgatgcagtgtcttgattaatctggcttaggtttgaacatggtgcttattaataagaagccctctgttaatctatgattaaaaagttctatatgatatattttttgcttgccaaggggggggcctgcagcccggggatccactaaaattcgaggggg

SEQ ID NO: 2980 - DNA, 221 bp, Oryza sativa
  Clone ID: PAT_MRT4530_102704C.1
cggacgcgtggcgcggacacgtggtgaagccagatcatgtcagtaggactaggaccaccataaacacttggtggtgagaattgagatgtagaccaaattgtctggttgttttcatgcctggagatttttctgttgcatgactttgttaggaaacatgtacttttcaaatttcatcaaagtgatcagagaacaggattaactaaaaaaaaaaaaaaaaaaaa

SEQ ID NO: 2981 - DNA, 187 bp, Oryza sativa
  Clone ID: PAT_MRT4530_102705C.1
cagttcttgagctcattcacggagacccgcaagggaacacttgttcagaagtacaaagtaaaagtaattgctgatgttcctgggacaggttcttctaaagatggagaagtgaaacaagctccagatggctcagctcaacccgagtgataaggtgctgcagatggttttcaaggagaccaaggtgatg

SEQ ID NO: 2982 - DNA, 532 bp, Oryza sativa
  Clone ID: PAT_MRT4530_102706C.1
gcacgaggcctcgtgccgaattcggcacgagcacaattatcagttaaggacttcagaaggctccggaatagcaaatggatccctggtgatcacaccgagcaccggcgacatcagacaccgatcgggaagagtgctctacgcaagggagacgctcaagctgtggaacagccggcgatcggcgctgacatcgttcaggacggagttcgtgcccaacatccttccacggaatcagacaggagaaggaatggctttcatcctgacgaataacccggaactgcctaccgacagcagcgggcagtggctcggcatttgcaacaaccggacagatggcgatccgaagaaccgaattgtagccgtggaattcgacacgaggatgagcgtcaacgaaactgacggcaatcacgttgggctcgacatcaacagcatcggatctttggatccgtagcctctaagcaatgtttcattaatcctctcgagtggtgctgatgtacaggtcaggatcacttacaatagtacagagcaagtactggtg

SEQ ID NO: 2983 - DNA, 656 bp, Oryza sativa
  Clone ID: PAT_MRT4530_102707C.1
cgatgtaacaagaaagatgattttgactgtgcttcaaacttggtagagtgggggtacaacagctgcgaactaacgcatttagccatagcaaataacaaagctgcaattagcaaccatagtgccactagcataacaagactgaatttgctccagactgttcacagcgaaaggggatgcttgaaacaaaattttcaggttaacataaataatatacaacagcagctaagatattttgaggctagtagttctttggggcaggtttcactaaacccagtccagaaccactccccaaatgcttgaaatctctcgcctctagacgctcatcatgggcagcgaatccagttcctcctttttccaaaggaacgaaattcctctccttgcacggtttgttgcacaccaagcagaccttatcagttacaaggaacttgtcagagcacttcttgcagaagacatggccacacgtgctgatcgtcaccagggacatggtgtttgttagggtagacttgcaactggggcacatgtagctcttctccaccgacttcttgtttttctggtcggtgttttcttcagtgaaggagatagggaagagcgatttcaacttgagcttctcctgtccctcggggcagattgtgtcagtggagggagcttctactttg

SEQ ID NO: 2984 - DNA, 1645 bp, Oryza sativa
  Clone ID: PAT_MRT4530_102708C.1
tttttttttttttttttttttttttttggaacataattgaagtggccagtgccatatatcgatctttctgtaatccctccttattacatgaaaatggagaaagttttggatggatgaatacaaatccaatccaaaccataccaaaaaaaaaaaacaacaactaattaactttctttctttttgacaccaatagacagagaatgcaacaacacaaaagctactatacaccatgaattctcgctgtactggtgttctcacatacacatgcgcgtagaattcaacacaaaattaaaccaattcaacacgagatcgacgagcaccaacaaatcaaaaaaaagaacaagatacacaaaattaaacgacgatgatgaaccaaccatgcgaataatgaaacaaagaattattgaaaatgaggatgcagatgagagctcaagatggaaggcttgatgttgggatgatgaggatgaagaatcagtagtggtgggtgttgacgcggcggcaatggcggcggatctcgcccttggccttgggcggcaatggcagcttgctgagcttgacgagcgcgtcggagaaatcctcgtcccagagcgtgccattgtcggcgtactcgtggacatggccgcgcgccttcttctccgtgagcagctgccaatcggagttgaaggtgacgatcctcgcgaggttgttgtggtagtagctgttgtccaagaactcgaacttcctcagcttcgggaggaaggacgggatggtggcggcgacggcggcggggtcctcgtcgcggacgttgttgggcacgatcgggtcctcgccggcggcgcacttgccggcgaggaggctgcggtatcccgggaggatctgctcgggtggcgcggtgaggcgggcgcggagggaggagcagtggccgacgccgacggcgtgggcgccggagaggatgacgagctcctcgatggtgaagttcttgcggcggaagttgcggatgagctcggagatggtgaaggtggagtccgggaggtcgcgctgggcgtcggcggcgcgggagacgcggccgtcgaggcggccggcgaggacgtcgaagtggacgtggccgttgctgaggaggatggaggcgtcgcgggcggcgtagatgacgatgtcggcgcaggagaccacgcccgggcaccgctcctccaccgccgccttgatctcgtcgatgagctcgaacgcggcgaggccgatgttgatcggcgccgtcttctccgtgtgcgggttctccgccgtcgggtccagcagcaccgacgcgtcgcaccccctgacgaagcagtcgtggaagatgaggcggacgagggcggcgccttccttgcgattcgccttgagcgccttggcgacatggtacctcaccacgttctccactccgggacaactcttcttgtagtaatccacgctcagctccgcctccaccgacatcgccgccgccgccaccaccaccatcaccaccaccgccgccgccaacctcatcgtcatcctcctcctctccggcaacttaatttctcgctatcgatgggtacgtcgccttttctcgctctccggccacgcgccgcctcgtgtgtagcggtggttggttggcgaggcagtgtggagggaagcagagaggggggtgcccggccgg

SEQ ID NO: 2985 - DNA, 153 bp, Oryza sativa
  Clone ID: PAT_MRT4530_102709C.1
atgccggcaacaacaccgaaccatcgcatcacgaaccgccgtgaagaccgaagaagaaacagggagacaggcccctgccgcccaagtggagagaggcaaggtgtgcgtattttgcatttaggtcccttgccgcactctacaaggctgaaaggg

SEQ ID NO: 2986 - DNA, 1755 bp, Oryza sativa
  Clone ID: PAT_MRT4530_10270C.1
gcacccaggagtatcaggggtaccacatcatcatcatcctctctcctccttatgttctcctagctctatcccctcaattctttcaacctcctctctcttctcatcaagcctcaatcaaaaggcttgaagggaagaagagcaactccagcaggtagaaaggccagaagcaaagatggcgatctccagcctacatgccaccacctccctgcactccccatgcaccaccaacacaagcttcaggcagaatcaggtcatcttcttcaccaccagaagcaacaggaggggtagcacaaggtacggaggagcaagaacctttcaggtttcatgctcagtcgacaagccagtggtgattggccttgcagcagactcaggatgcgggaagagcacctttatgcgccggctcaccagtgtgtttggtggtgctgcagagccacccaagggtggcaacccagactcaaacacactcatcagtgacacgacaacggtgatatgcctcgatgactaccattccttggacaggactggcaggaaggagaaaggtgtgactgccctggaccctagggcaaacgattttgatctcatgtatgagcaggtgaaggcaatcaaagaaggcaaggcaattgagaagccaatctacaaccatgttactggtctcctagacccaccggagcttatccagccccccaagatttttgtcattgagggcttacatcccatgtttgatgaacgtgtgagggacctcctagatttcagcatctacctggacatcagtgacgaggttaaatttgcatggaaaattcagagggatatggcagagcgcggtcacagccttgaaagcatcaaggctagtatcgaagccaggaaaccagattttgatgccttcattgatccccagaagcaatatgctgatgcagtgattgaagttctgccaacccagcttattcctgatgacaatgaaggaaaggtgctacgtgttaaattgatcatgaaagaaggtgtaaagaacttcaacccagtttacctcttcgacgaaggatcaagcatcacctgggtcccttgtggaagaaaactcacatgttcttatcctggcatcaaatttgcctatggcccagacacttactttgggcatgaggtatcagtgctggagatggatggccaatttgacagactagatgagcttatctatgttgagagccatttaagcaacctctcaaccaaattttatggagaggtgacacagcaaatgctaaagcatgcagacttccccggcagcaacaatggaacaggtctcttccaaactatcgtaggactgaagattagagatctctatgagcagattattgctgagagggccggtgcacctactgaagcggcaaaagtttaatgagctccacattcatatttcgtgaatctcttcatcaccataccatatcaatgacaatgggcatcctcgcatttcttgtaactagttttggaaatattacagctagaagaaagtaggatggtcattgcataacttgtgaaaccatgcaatggaacttctaaaaatccctctccatgagggtgctcctacatctcttcttgacacatttcaatgtacatcttctatatttcaatgtagaaagaaatacggttgctttctactataaaaaataggtccttcctttagtgcctctcttgttggctattgcttctggtcataagtcaacaacatatgatcgacaagggaagaaaatacagccggaatatttatag

SEQ ID NO: 2987 - DNA, 766 bp, Oryza sativa
  Clone ID: PAT_MRT4530_102710C.1
gtttggtcttcttcctccttgatcactccgagcaattggtaagagttccataatggaaatcctacctcgacagctactgctcggtgtctgcggcgccgtcgtgctggtggccggcttggcgcatgctgcgtacgcagggacagcgccggtcgtggtcggcttggccatgtgctcgggttgcaccaggaagaacatgaatgccgaggcagctttcaaaggtcttcaagtggctgtcaagtgcaagaacagcaggggcgagtacgacaaaatggccgtggggaaggtggacaagtccggcgccttcagcgtccccctcgccgccgacctcgtcggcgaggacggcgtgctgaagcaggactgcttcgcgcggctgcacagcgcgtcgagcgcgccctgcccggggcaggagccctccatgatcgtcgcggcgcagcagcccggccacgacggcgcgaagacgttcgtggcgctcgccggcaaggtgcaccggccgtcggcggaatgcgcctccgcgttcctgtgcgatcctttccacaagcaccaccaccacatcgtcctccacccgcccgtgatcgttcctcccaagcatgaccatgatcactcgctcccgccagtccacgagcctccggtgaccgtgcccgaccacaagccggcgccggtgaccgttcccgatcacaagccgccgtccacgacgacgccggtgtacgcgccgccgaagccgaccccgatctacggccctccaacccagcagaagaacaagcactag

SEQ ID NO: 2988 - DNA, 540 bp, Oryza sativa
  Clone ID: PAT_MRT4530_102711C.1
tgcaggaattcggcacgaggaggtgattgtgcaaaaaggaggtgactttatcaagagttttgtaagtagagtgctctctcaacttttcttcactttatgggcatcattttcagatcgatgtttgggcacccaaaattgaatcaggatattttactttcgcctttgctctgaaaattatattctgagtgtccccctcagatgtcatttgtcggataaaatatatactctaatttttcagcagtaacattccactagatcgaggagcaattaggtatgcagatagcattagcattcccccccgggatgaacgagagccatcgcttttttcttttttttttttttggaggaatatcaataagtggagggacagggctatctatgcagcagcatgcgtgtgtgtgggtatatatagtccatgagcagagtgtgtttactgtcttacagcaagaagctagcacatcacatacatacatatattgttgagacttgagagaatcacatatatcgttaattagagaagtagctagctgctaaacacta

SEQ ID NO: 2989 - DNA, 448 bp, Oryza sativa
  Clone ID: PAT_MRT4530_102712C.1
agacggagattgcccacacgggggcggctagaggcggaggtcactcgtgcagccgaccggaggcggtgattgcccgcacggaagaggagacggaacaggtgaccggcggcagaggcggagcatgcccgggtagcgagcggctgaggcggagctcgcctgtccggcagaggaggcggaccgggtggccggcggtggaggcggagcacgcccgcgaggatgccctccccggggcccgccgctcgcccaacccctccgcgaccttctttcttcatccagatcaccgccttctccgcccggaccaccaccgccaccgcactggggactccatctcgtgcatcgccgccgtggacgcggccaccgacacccgtcactcgtacgtcacgtccgcagtcgcctcctgtcctccgatccccgccccgcccaccaacagcaaagagagagggatgag

SEQ ID NO: 2990 - DNA, 1240 bp, Oryza sativa
  Clone ID: PAT_MRT4530_102713C.1
gttagaaattttggtttatgggggggcaaagcggtcaaggacccacgacgcctgctggtgctgctccttctcctccacgcagatccccttgacgaggggagcgaagcgaaggagcgttagccgcctgcgcccttgctccgccgcgccgtcgtcttggtgtagttggggcgcaaagcgcgcgcgcaccggcaccgcgctcgggccggcggggctcatcgccgagcgcgtcctcgccaacgatgtggctgactacatccgcttccggtccgtgtgccagccgtggcggcggtgctgcgcggcgccgccggcggatgacgccttggaccgccgcttccacccgcggcagtggctcatcctccccgagaaaccccgcattcgctaccactgccgcctcctcaacctctccaccggcgagtgcatcctggcgcacctcccggagttccgtggccacagagtattcagcccctccacggagggcctcgtcctcctgctccatgagagcacccatgtcgcccgccttctaaacccactcacccaccagctcaccgacctcccaccggtcaccactttgttggacctccttctgccgctgtgtgatctcagcgtggacggctttggcctcgccgacgaccgcacggtggtgatccataacacagtgttcctcgccgtcgccaagcccggcgacaagtgctggacggcggtcaacctcagcgattgtctccggccgagcatgtcattagcgggtcgcttctacggcgttaccagcgatgccatcatggtggtggaggtcagccgggagagccagacgccgcagctggtggaggccgccgacctgacgttgcaacacaggttcagcaggatgctcggcagcgcgcacctggtggacaacaatattggcgagctgttgctggtgcaccgtaccctaagtggtaacaagaggttgtaccaggcgtaccgggtggatttggatgggaggaagacggtgcctgtccgtggtctcggtggtcgggccgtgttcatcggccatgactgctcgctatccgtgtcccctgctacattcccctcgatcgttggtgacgccgtctacccgggcttcgactgtggggatagaactggcctggagcacatcgaagcctatcacctggcagatggaaccattgaacactcatgctatgaagaccccggcaaggaatgggaacaccctgtaagtatcgctgattatctatcctcgtgggtgtaa

SEQ ID NO: 2991 - DNA, 687 bp, Oryza sativa
  Clone ID: PAT_MRT4530_102714C.1
atgggaagtggacaacacgacgtcatatggatgatgggatcccatccaaatgatagggacgagatcatgtacacgagctttcgctttggcctcgccgacgaccgcacggtggtgatccacaacacaagtttcctcgccgtcgccaagcccggcgacaagtgctggacggcggtcgacctcagcgatcatctccggccgatcatgtcgttcgcgggccccttctatgccgtcaccactcaccagcgatgccatcatggtggtggaggtcagccgggagaaccagacgccgcagctggtggaggccgccgcgacctgacattgcaacacaggttcagcaggatgctcggcagcgcgcacctggtggacaacaatggcgagctgttgctagtgcaccgtaccctaagtggtgacaagaggttgtaccaggcgtaccgagtggatttggatgggaggaagatggtgcctgtccgtggtctcggtggtcgggccgtgttcatcggccatgactgctcgctgtccgtgtccccagccacattccctccatcgttggtgacgccgtctacccgggcttcggctgtggggatagaactggccgggagcacatcgaaacctatgataacctggcagatggaaccattgaacactcattctatgaaaacagcgaaaaggattgggaacaccctttga

SEQ ID NO: 2992 - DNA, 349 bp, Oryza sativa
  Clone ID: PAT_MRT4530_102715C.1
gtggtaccgacgagatcgtagtcgagttgattcgactagatcacccggcgacttggctcctgtagtctccggcttcgtaggctgtggtcgttgtgtaggctatgagattcgatcccctaagttccctcggggggttccttttatatcgctggtcaggcggtctccaggtaggaactcggagacatcagaccctgtacgatatagtaacgacccagtcctacacgggtaggaacctttccattggtagactccgtgatggatttccttagcgtgtccagataacgtccgtatatgcaccgctatatcgtatttccgtatagcatacatccaagggtagagggtatacctt

SEQ ID NO: 2993 - DNA, 423 bp, Oryza sativa
  Clone ID: PAT_MRT4530_102716C.1
ccgaccaaagattcctgttttatgggggggctccaagaaggggggctcccccccaaagctaaaggggaacaaaaaataaccccggaaaaaagccccaaaaaaaaattccccggtcttcccccttgggggaccgacccaagtttctgggggcaaacagagatgaaatccgccccccgattcccccgcccaaaaccccaaaggaaatccatcccaaacaaaccgggggtccgggggcccaaccaaagggaacccaaaaacctccctaacctaggtaattaaccccccccccccccctgaaaaaaaaaaaaaaggccactcgggggcccccgctccccccccggggcaagcctcccagggaaaagccggagggaccaggccgggaaccaaccggcaaagggggggggggggggggggctccggggg

SEQ ID NO: 2994 - DNA, 252 bp, Oryza sativa
  Clone ID: PAT_MRT4530_102717C.1
ccgaaagctgcccctcgaaaccgagggaaactttcagaaattcagatcgagttcgttcgtttgttgtaaatttagagaacccaaaaaaacaaaagacataaatcaaagtgtataatactagtacatctcttctgttcttctgttcttgttcatcccaactgttcttgtaaactgcaaatcgcattccttctttactctgaattaagaagtgaaatgttggtgttgttatgccaaaaaaaaaaaaaaaaaaaa

SEQ ID NO: 2995 - DNA, 171 bp, Oryza sativa
  Clone ID: PAT_MRT4530_102718C.1
atgtcacgtggccctcccccgaggggagtcaggcccgaggtggggcggcggccactccttcccagcgaccagacggaggaggctgccccccaatgccacgtggccctcctccgaggggagtcaggcccgaggcctgaggtggggcggtggtcactccgtcccagcgactag

SEQ ID NO: 2996 - DNA, 425 bp, Oryza sativa
  Clone ID: PAT_MRT4530_102719C.1
aaaagaagaatagcatcaagcatcggagacaacgaccagcgaacacgacgccgtgctcagctggcttgacacgcagcggccggcgtcggtgctctacatatccttcggctcccagaactcgatacggctgcaccagacgacaaagagctcgcggcggcgctggagtccagcggccgtccgttcatctgggccatccgcccgccggtggggttcgacatgtatcaatggccagttccgcgacgagtggctgccggaagggttcgagcagcgggcgcgcggccacgtcgttcacgggtgggcgccgcgggtgagcatcctcgcgcacgcatgacgcatccactggcgcgttcctgagccactgtgggtggaactcggtgctggagagcctgacatgcggcgtgctggtggtcggctggccgttgtcg

SEQ ID NO: 2997 - DNA, 176 bp, Oryza sativa
  Clone ID: PAT_MRT4530_10271C.1
ctcagaagcactacacttctgaaaaaggggaataatagcaaggctgagtacaaccaccgtactcagcaagccacaccaacgatgcattcgtgcaaggggatacaaggacggtttatggctatttgcataaaggcggttgtgaaacattttattgagcaaatagtaaaacagtagag

SEQ ID NO: 2998 - DNA, 1562 bp, Oryza sativa
  Clone ID: PAT_MRT4530_102720C.1
cttcgtcgtcggcttcgattcgatcgatcgaggcgaggaggaggaggagctagggtttcggatgggaggaggaggagggttgtagaagcgcgggggcaggctgcggtggatcgtcgatgggggagcagccggcgcggggggcggcgtcgtcggcgtcggagtcgtcgccgctgatcccaccgccgtcggagatcgacatcgaggccggggccggggaccagttccagtgccggatctgcctcgagaccgacgggagggatttcatcgcgccgtgcaagtgcaaggggacgtccaagtacgtccaccgcgactgcctcgaccactggagagccgtgaaggaaggatttgccttttcgcattgcaccacttgtaaagctccttactatttgagggttcatgttcacactgataggaaatggcgaacattgaaatttcgtttcttcgttactagagatatattattcatctttgctctagtgcagtttgtcatatctgcattagcgtatttggtgcattttattgatggattacagaattactggttgaggacagcctgggcatttgacaatgaagttagtttttattacatatgtggggcattgctattttttgcccggcttgggttatcaggatgcttcataacttgttatgaccgaagagtacggaatgacctggcacagccttgtcgagagttatgtctttgttgctgccaaccagggatgtgtgcagattgccatctacctggtacgctttgcatgtggacagattgcactacatgctttgagggctgtgcaacgacagctggagagtgtggtggttgcttgggtggtgctggagaagcagggttaccattgctctttatcatgggagtaatcgtgcttggactattcacagttatcggcattttctacagcgtcttggtagcaaccatggtgggtcagcggatctggcagagacactaccatattcttgcaaaacgaatgttaactaaggaatatgttgtggaagatgtcgatggcgagcgcgcggattggtgtccgccccctctcccttcggagcatgtccaacagctgaagtctctggggcttctataatctgtagcccatgattataccaatgatgaccttaatttaggacttgcggcactatccagctgtacaggagatgatacaaattaagcggtgaagcaggcgtttcggtttttaagcagccaaatgcacaacaatatcgttcgtctttttttgtacattgtaacaagggaatacctatctgaaaaatgacaacagcatttgagttttatacgatgaatggtttcacagttttatttcgatgaacctatttcttgtgcactgttaggttggtgatcggaacaacgtgtctagggaaaatatgtgatttctgtgaaatgtattaggaacccttgccatgacttctgtctggtagggatgcctgaataaaaaaaaaaaaaaaaaaaaaaaacaaaaaaaaggggggaggaaaaaaaaaaaaaaactgagactagttctctctctctctccctcgtgccgattcctgcagcccgg

SEQ ID NO: 2999 - DNA, 499 bp, Oryza sativa
  unsure (1)..(499): unsure at all n locations
  Clone ID: PAT_MRT4530_102721C.1
atctacaagcttgccagcatccatcctattataataattggtttaatagtcagcaaactcgtacaggaatagccagatccaattttnccccaatctatatcttcttcctcgggaatttnaaaaggagattccggattcatttgctgatatatgaggagcacccaagccatgtgatcatacatagaaaggtttatctctttacacccagttttggcctttttgatatttgccctgaaaaattttggctcaagggcaaattcctatagtgagtgtataaattgatcctgtatagctgttcctgtgtaaatgttccgtccattccacactagagcgaacataattaagctgggtgctatgatactatccatattggtgccctgcgttcatcgactgctgcgtgtatatcgcagcggaaggttgttgggctcgtccgctatgggcgctcgtggaggacgcccaggatgttccatcgtagcgaattacatgcgagcgacgaagc

SEQ ID NO: 3000 - DNA, 219 bp, Oryza sativa
  Clone ID: PAT_MRT4530_102722C.1
ctctatttataaccctagatcgagatttggggtgacggtggttgcgagcttggtgcggcggatgggttggtcgaggcggccgagtgctcttccgggggcgagctggcgggctcagtggagcccgtggagggcgcagtggctggccccgtggagggcggtgctgtggctggccccttggaggccagtgcggtggctagctctgcggagccctataagctt

SEQ ID NO: 3001 - DNA, 329 bp, Oryza sativa
  Clone ID: PAT_MRT4530_102723C.1
cagacgcgtgagtcggcatcgacactaagccgcgctaccagcgtatagaatggccgatgaacagaaagtacggacatgcatacgaggccttaaagatcatcgacaacaaacccaatgccatactcgactcaatcacctactacgagaaggagaccgaagctcacagacaggaggggactaacgaggcgcctgctcacacacatgacggtaaagatgccctatttaagaatataaagaggaggatgacaccagagccaatcaagatccgtgctgatgttgatatgaaatgtatacaatgtgatggagggcttgacattaagcaagccatg

SEQ ID NO: 3002 - DNA, 766 bp, Oryza sativa
  Clone ID: PAT_MRT4530_102724C.1
ctacatgcgcatccccagcccgcgaatcattcgtattttaaattgtaatagagataagagtcgtgtccagcaaggacaagctatgtacttcggatataaataagacctgacatcttgaaatcaagggacgacagttcaataatacttctgcgcatcaccacccttttctattttacgagtctttgctttcgagttgggttgcatcgggtttgatcttcgacgaagagtgtgtttcaatggatagattatgtatcgttgacatctacagctgatcgagtagatctaatgatcctacgtttattctgaccttgccggtccgatgcaagtcacatcggcatggccctgaatgatacgtcatcggcaatccagctgatcggctatcgtgatcaaaccctggcacgctcagaacccgaagacaatttctttggacctgcactagagttaagcaaatctctcagtccagtgcgtgtttttcgcgtcaacacacctcttggcacacctagtgggactgactttcgtaaaatcttcttcatgcatgaattttcagagcgcaagaaataattctaagcaacaaaaaccaatttcagagtcaattaaaatagaaaacctaaaaataatcccatcttctctttgggttattttcggcccaaagtcctcccccttttccccaaaaatgcttatcctcgcgcgatcggctgggggagcaaaaattgggcgctccccccgccccccgcgtgcgtgcagttggccccctggcccaccacgt

SEQ ID NO: 3003 - DNA, 619 bp, Oryza sativa
  unsure (1)..(619): unsure at all n locations
  Clone ID: PAT_MRT4530_102725C.1
gcaggaggagctccccgccagcctcctccccacccgccggtggcctgctgagacaagatcgagagagagagagagaggaggaaggtgatgacgtggcacgctgacatgtggggcccacgtggggtcccacgctgactcaactgccacatagaccaaaaccggagtcaaaaccaccgaaggaactcgggtgacctgatttgtatagttaaagaacctcgcatatcaggttttgtagttcgaggatgttttttatcccgatgacaagttgagggaccttcggtgtacattttcctaatcgtacaaagtcaaagaagatcgcgaattgggcccaccacggcgacgaatacagcctgcttgacaaatgtcaacaaaatcggtccaaaaatgaaatcagcctagcaattatccatcaacaaattcggccgaccaatgcctcaaatgaaatcagcccagttagttcatatcaaccaattcagcctagcaaggaatttggcccatgtactgccctcaacaaatttagcccaaggaataaatntacccatcaagaaattcagcccaccaaggcctcnaaacgaaagcagcctagntaattcatgtcaacgaattcagcctaaaaatg

SEQ ID NO: 3004 - DNA, 432 bp, Oryza sativa
  Clone ID: PAT_MRT4530_102726C.1
gcgcccacgcgtccgtccacgcgtacgaccacgcagtgcggttaaaaatcaagccatgcatcatcatgcttgacagttgatatgcttaagccctaagcctgctgcgacatcttataactggactgcacacggagagtgacatctactgaccctgctgccaacagcctcttggctgtcgatctgagaaagcctgcggccaaagcccgaaatgcctcgaaggggcgttcattctcgaaagagctagaaccttgctggacagatcttgacggcggaccgctgcgcagccggtgcacaccgaacttgtatatgattcttttgatcagccccaatattagtagtctagacaaattcgaaatcaatctgccatttgattgatgaagatgcaactcaaaagacacgtagatagtaccgactgttatttgacacataatg

SEQ ID NO: 3005 - DNA, 708 bp, Oryza sativa
  Clone ID: PAT_MRT4530_102727C.1
atgtcaggtggtgcggccgcgacggtggctcccgggtggcggcgcgagctcgccggcctcctcgtccccctcgtgcggtcggcgatggaggcgcgcggctgcggccatcatcaccgagatcgactcgacgcctctgccatcaagtcgctgccgtcggtgatgacggtgcgcagctgtggccaacgggggaggcagaggaggtacgcacggatgccctcgcccccgtcgtcgccgccgccaacactaaccaactgcttgagacgtcgcacacgtcatggagaagaacaccgccgccagcgggcaattgatgacctcctccgcggaggcgacgccgtcgtcgccgaagcggccggcggggcgaaccaagttccaggagacgaggcacctagtgttccgtggggtgcgatggcgtgggtgcgcggggcggtgggtgtgcaagatgaattcaatgatcgttttaatccacgaattatcaaaatatcaagtctttctgctactaaccatgataacacaccacctttttcaatggaggaggtaggcgcggacgccctcgccatcatcgtcgatgtcgccactgatgacgaggtccgcgccgctcaccagctcgcacgcctcgtcgtcgtccatgctcgccacctcggtccagcagctgaaccgcctggcgacgtcctctcacctcagtcctccctcccagtgagcgaacaatga

SEQ ID NO: 3006 - DNA, 1196 bp, Oryza sativa
  Clone ID: PAT_MRT4530_102728C.1
atgacggcccagtggatcaagtgggaggagtgccgcaccgacggctgccggggtaggagggccgccgcggccggcaggagggagtgcgacagccagccgatagggggagaacgctgtgcccctccaccatgccccggggcctctccagtctccacttgcatcgcagcggcgacgtgggagcagggaggtttgacagcctgccggcgatgtggcagcagcgacgcggcggcggagacatgggagaaagggaggacggcggcggggcgaggcggcgtcggcgggcgagcgcggcggttcagctgctggaccgaggtggcgagcatggacgacgacgaggcgtgcgagctggtgagcggcgcggacctcgtcatcagtggcgacatcgacgatgatggcgagggcgtccgcgcctacctcctccattgaaaaaggtggtgtgttatcatggttagtagcagaaagacttgatattttgataattcgtggattaaaacgatcattgaattcatctgcaatataatgtattcgagcaaaagagcagtgtaagaatttgtaaccatgcaaaatgaaatgggattttttcgcaggcacaacgatccttttgctctgctactgctgataagctttgacattaacatccaacaatctagtgaagaaagaaagatgaattcgcattgtttggctgacagaacgggtgccgacggaggagcggtcgatgcagcatcgccggaggtggcagtggcagtggcggtgctcccccggcccggcgctggaactcggcgatggccttgcaggcagcgcgttgcacatcgggcagctggtggccggagtccggagacgacgggggcgcgcgggacgtggagcagccaggcagagtcggcgaagttgaggctggcggaggccccgcacaaggcgagcatggcggcgtcgtgcgtgcgcgcggtctcctcggcggtgtcagacgtgcctatccagaaacggtcaccgcggctgcccgggacacgcaccttgcacacccaccgccccgcgcacccacgccatcgcaccccacggaacactaggtgcctcgtctcctggaacttggttcgccccgccggccgcttcggcgacgacggcgtcgcctccgcggaggaggtcatcaattgcccgctggcggcggtgttcttctccatgacgtgtgcgacgtctcaagcagt

SEQ ID NO: 3007 - DNA, 918 bp, Oryza sativa
  Clone ID: PAT_MRT4530_102729C.1
atggcgacggcggcgcaaggcggcgacgcacggcgcggcggctccggggcgacggcgcggcggcttcgaaggtggcggcgcggcggcacgataacggcggcgcggcggcgtggaggcggcggctcagtggagaggggagaggggaggaagggtgaaatggggacgcgaggcggcgacgcgatggcgagcggggcgcggggcgcggggtgcgagacggcgcgcggggcgcaaggcgacgggacggggcgacagcggcgacacgacaggcgcgcggcgtggcgacgggacggtcgcgcggcgactggaataggcgggcgacgcggcgcgggacggcgatgcgcggtgacggctatgcgtcggatggcgtggcaacgggacgcgcgcgcggcggccggtgatggcgacgagcgggcggcgcggcgcggggctcggcgcggcttggcacggggctcggcgtggcgacgacggcgacgcgacgggcgagcggtgcggcagcgggatggcgatggggacggcttggcagcggcggcgcgcggctcggagcgacgatgggacgcgcgcggcgacgggacgggcgacagcggcacggcggcgggcggcgacggcgacggctcggggcacgaggcgcgcatggcaggggaggggaaggggctagggaacacggtcgagcacgtggcggccgatgaacacggccgaaggctgaagccccttcaccacgatcactcccaccgggccgggtatcttgagattgagataattgtggtgggagatagcttcgaacttgttcaaggtcgcacggccgaagatggcattgtagttgtatgggatgtcgacaacgtcgaacaatactcccttatcgactcccccggcctctggcgaatgccgagtagatgctgctacgtcttcggctcctcatag

SEQ ID NO: 3008 - DNA, 555 bp, Oryza sativa
  Clone ID: PAT_MRT4530_10272C.1
tgttttttgagtgaaaccatgggatgctgtagtaacacagacgctaaagatcgcagcattacaaatttacaacacaatgatgaatccatgaataccaaacctaactcgaataggctgccagatacattatccatacaggctacttggaatccatggtaataacgacgcacagtttgcccaaatgtgagaataacctgtttgagaacaatgcaactcgtcttcgccacagaagttatcgagatgcttaattcctaatgcccggtgtattaaatgatacattaagataaataacaggctggcagccttagtttcaggttagtctgtgaaaacgcaactggcatggcaatgaacgcatgttccatacttcaccctactccttactgctgaaatctttgtcaatctccatctgcatgaatttactagtccacaagaacatcatcatcatcaccgccctcatacctatctgtaaaaacatttgcagaagaaacaacattttctttctcattgttgtcaccatcccccaaattcttcttcacagataatagttcttttgcc

SEQ ID NO: 3009 - DNA, 1743 bp, Oryza sativa
  Clone ID: PAT_MRT4530_102730C.1
ggggggtttttttttttttttttttttttttttttttgaaccggaataatcaaatatcagaagcatttagtaagtgtatctcaagccagaaccgacgaggaatcccagatatgcgacatatatacatggttacattctactaataaccctttcaatgtctaaatagccaccatacaagtccatacgtaagccccccggtccttccccggctctacctcacttcgctccaggcatttgacaactgaaggatgttcaaatacgaattccacacattctatatgcccggtgcagccaaaatgacatctccaagaaccaaaatatgtatggttcagtggaataactgctcagcgcatattccttcttgttgatctatcatcactgattaagcatcactgattaagcttctattacagctgccagttcctcctcggaggatgtttcagtggcgagactctcttcaggcagatcactcaggaaatcaccttcatcctcctgctttttaggtgcttgagtttccatcaatttccttaaattcgtctccagttcttttgcgatactttcattttcgttgaggtaagatttaagggcatctttaccacgatatgactcttcgttgaaagaataaaatgcaccacccaactttttgacaagcttgtgctttaatccaagttcaataagctctgaactgcggcatatccctttaccaaattccagctcaaactgtgctgtcttgaacggtggggcatgcttgtttttcacaatcttcacaagcacttgactacctatagtctcttcgcctttctttaccaaaccaatacgcttgatgttcattctaacggaagcatagaatttaagggcatttccaccagaagtaacctccattggacctccaaatcctccaaatgtggtcactttagacctgatctggttaatgaataacaaaattgtctgggaaagtgagagagagtggctcagcttgcgaagagcttggctcatcaatctagcctggagagcaacatgtgcatcacccatctccccgtcaagctcactcttagggacaagagctgctacactatcaacaacaacaacatcaacagagccgcttcgaatcagtgtgtccacaagactgagtgcctgctcgccacagtctggctgagagagaagtaaattactggtgttgaccccaattgattcagccagagctggatctaaggcatgctctgcatctacgaaggcacaataaccgccatgcttttgtgcttctgcaataacgtgaagtgcaagagttgtcttgcctgaagcttctggaccatacacctctataacacgaccctttggaagtccaccagttcccaatgccaaatccaaagagaaagacccagttgacacaacaggtacttctctacgaccttcagaacgaccaagccacattattgcgcccttcccaaatgcagatgttatttgatcaatagcctggtgtagagccaagtctttctttgacagattctcttcaccagagtcagttccactggactttgtcttctttttggctttagacgagaaataccggcagtggaaagtagagccacagatcccttgcttatagcttgtgtgtgtcacaaatgatccagtatttgtcttaagtgcatacaaatacctacaagtctcggggcagggcgcggctgctgccgcgacggcggcgacggcgcgccgcagcgacgcgcgcctcaggaggttcgccat

SEQ ID NO: 3010 - DNA, 556 bp, Oryza sativa
  Clone ID: PAT_MRT4530_102731C.1
aaattactgaggcataaaatctactgaggatgaacagatacacaaatattttaaaaaactctattacattctaaaattgctagaagcccactgggtgataatgcaccagtgttaagaccattagaattcccgatcaggttttaattgttactgtagaaatgaaatcataaacaaaaatgtcagcaagggtccaggcaggaagcataaataaatataaacagctgggtgcgaatgtagtaagcaaaagagtggattctctgactaaagggaatagtcacttctcagccacagttgattgctatgtggatattagagcccaatgtcactctatctttttttttaaataatcaagaaatcaaatctttattttgatcctcatttttgtggcagcaattggaaaatatgcaggccaaatgaaacaaggttctaacacagattaaactcttgggactcagtttatgattgttttaacacagtgtcatagaggcagggtcaagatggcggagatatggtgctcaccttctcccacaaacacatcaaaaaaacatctgcatgt

SEQ ID NO: 3011 - DNA, 378 bp, Oryza sativa
  Clone ID: PAT_MRT4530_102732C.1
atggctctcaaatctgcagctcttctcgccattgtcatcaccatgagccttctctcagtggaggtcgccaatggctgtggtgacacgagctgctcaaacccatccccaccaccgccgcccgctgtgccaacaccaacagggggtacatgccccatcaatgtgcttaaccttgcggtgtgcgctaacgtgctcagcttaaatgttccttcctcgcagtgctgcacactgcttcaagggctcgctgacctggatgcagcgctttgcctatgcgctgctcttaaggcgaatatccttgtcgatgttgctattgacaacaaccatctcatagttgccatcgatcacacccagatccagaggccctaagctcgtgtcagccat

SEQ ID NO: 3012 - DNA, 249 bp, Oryza sativa
  Clone ID: PAT_MRT4530_102733C.1
taatgagccgcccccaccgttcacattattcaccgctcgttacatgtcttgaacttcctcattcgaagcctgaacctataggttcgttccatgtcttccactctatacaccactccaggccgccaaggttttacttttcacattatttattatagggaggccttgcgggatctttcaattggtgtactgctactaccttaattcaacaaagaagcccattgcaaccaaaaattcatcggtgcaccagct

SEQ ID NO: 3013 - DNA, 231 bp, Oryza sativa
  Clone ID: PAT_MRT4530_102734C.1
atggtgatggcaccgtcgacgacattgcgcagccatgcacgaggagctcaggagaccaaggcgacccggtggcatagcaccgagctccaccagcccatatctagagctgatcttcgcctcgacgtggctgatcttggcctcgacgtcgcagccgacagcgacatcaacctcggggcggtgattcactttgtcgtccttgtggacggttgcgacgacggggtttcggggtag

SEQ ID NO: 3014 - DNA, 144 bp, Oryza sativa
  Clone ID: PAT_MRT4530_102735C.1
atgggttgcctagacgctagaggaggcggcagagtagaatacatcggagatggttgggaaggcatgtgcacggaggttcgttggcgtgaggcggcgaaagaggagatccaggtcgatttcttcaagatgacgggcttggtatag

SEQ ID NO: 3015 - DNA, 723 bp, Oryza sativa
  Clone ID: PAT_MRT4530_102736C.1
atggttcacgggattctgcaattcacaccaggtatcgcatttcgctacgttcttcatcgatgcgagagccgagatatccgttgccgagagtcgtgtggatttaactcgtggtatcgcgccgcgccgccggacggccagggccgaccgggcggcgcgggcgtatcgctgtgttccttgacgccgtcggcgccgtgggttctgttgcggcccgggggcctcggttgcctcgcgcgcgagcgctcggcgggcaggggtgacgcgttcgcggatcaaccaggtagcacgtcctccgcgacgagcccgccccgtccgacgcgcgtcgccgccgtccccgggtcgggagcggcggacacggcagtgggcgggcaggctgtcgtcttccgagagcatctcgcttatggcgccggcacgcttgggtgccaggtgctacgaggccacgccgctcgcgccgtcgagccgccgcggaacgcccggtggggcgcccgcggcgcggcggacgtgtgcgagcacctctgcccgtgggacggccacggcggcaaggccgcccaagcatcctgccgcacggagcacggctggtctgctgggaggacggcctaccggagggccaccacgcgtgggagaggtgtcgggagcgagtcccgtgttttcggcggcacgggtgcctcaaaaccgtgcggaacgggcccgtggcgagactgccagggcgccgtgccagcaggctag

SEQ ID NO: 3016 - DNA, 789 bp, Oryza sativa
  unsure (1)..(789): unsure at all n locations
  Clone ID: PAT_MRT4530_102737C.1
cccacgtgtccgacggcactagccgaaccccggccgctgcggggtgtcgcacgtgagatccttcccaccgcctcctagcctgctggcacggcgccctggcgagtctcgccacgggcccgttccgcacggtttttgaggcacccgtgccgccgaaagaacgggactcgctcccgacacctctcccacgcgtggtggccctccggtaggccgtcctcccagcagaccagccgtgctccgcgcggcaggatgcttgggcggccttgccgccgtggctgcgtagcgtatgagcagctttggaccggtgtatgctcgcaggacccccgccctcgtgcggccgactgccggctcccgggccccgtcactccacggccgtccacgcgccgtgccgccccaggcttcaagagatgcttgcgcgctgctacccgtcccacgggcagaggtgctcgcacacgtccgccgcgccgcgggcgccccaccgggcgtcccgcggcggctcgacggcgcgagcggcgtggcctcgcggcgcccggcacccaagcgtgccggcgctgccaaggccacctcgcgcgtgccattggtcccggatgccgcccacgatacaggctcacggcggccccgccccgtgcctacccataagcgagatgctctcggaagacgacagcccgcccggccgccgtcgtgtccgccgctcccgacccgggggcggcggcgacgcgcgctggacggcgcgggctcgtctcggnggacgtgctacctggttgatcctgccagtagtcatatgcttgtctc

SEQ ID NO: 3017 - DNA, 1254 bp, Oryza sativa
  Clone ID: PAT_MRT4530_102738C.1
agagcgcgaaggggagaaggcgcgggggcgggaggcggcggaggacgggggagaggagggacggggagaggagctgggcggggagcggcgcgaggagggaaggggacggcgcggaggaggcgcgggagaaggacttggcgaggagcgcgagggaggaagggagcggccccggcggcggcagcgacggggagcaccagtggaagaagtggagcgccgccgcccgccgactccgacgacgagggctccccgcgcggcctctccctgctcccccgcgaccctgagcgcccgccgcggctgctggtggtgcagccgcgcctccgcccgggctcgctcctcgactccaagctcgccgaggccctcaacctcgccaactccctcgaggagccgcgcgacggcttctacaaggaaggtctcgccgccaagggcgccccgccccacctcgtcgcccagaacccctcatcccgcggccgctcccatcaggaaggagtagatgcagtttttgttaatgcaattctcactggaatccaacaaaggaacttggaggcaacctggggtaagccggttttagatcgtgttgggcttataattgagatatttaatgctcacgctgaaacaaaagaagcaaaattacagtcagagttagcagctctcatgtacatgaagactagacttgtccgtgtccgtggtccaggtggacgattaacttttggttcgagtggtgaagctgaagttgtaagtgctcgagggtatgtctgctcgagaggaagtgggggacgtggcttcataagtggtgctggtgaaacagaacttcaactacagcggaggagaatccaggaatgccgtgtcagattgttagctcaaattgaagatgtacgtcgaactagagcgatacaacgctcaaatcgaaaacggcatggcaactcatttggtcaagagcttgtaactgttgctgttgttggctacactaatgcaggaaaatccactctagtgagtgcactttctgaaactgatctatacagtgatgacaggctatttgctacagtggatccccgcttacgcagtgtgatcctcccatcagggagaaaagcacttcttagcgatactgttggcttcatctcagacttgcctgtgcagctagtggaagcatttcatgctactttggaagaagttgttgaagcagatatgttagtggtatgtataattaacttatctccagtgctcgccgctgccgactccaccgtcctggaggggctc

SEQ ID NO: 3018 - DNA, 541 bp, Oryza sativa
  Clone ID: PAT_MRT4530_102739C.1
ctccgcatcgatcgctcggcgagctggtggagtgcaatccgaccccgacgctggccgaggatactcgggtagggccggcggaagggacagcgaccatgaggaagcgctagcggcagaacccgtgcggcatgtgggggcactaccacaaagtacgaactcccggaggcgtgcgcggcgtgcgggcaccgaccgtcgacgtcggcggggactcaagcggcggcgagggcggagcaggcggcggagccgtagcaagattaggtggtccattaggccagcctacaggactgattctgcttggcgagatgctaatgcggctgccgcgtccgagctgctcaagaccatcagattcgtccagattctcaatactggacctttatgcatcaacgtttaccgaattcggcgcgcgaaccactgctttgaagatgatacgactccgcaggttgatgacgctggcgattttgtagaacagtgcgaaggagataacgcacgtgttgtagtccattgcatggcaaggaaaagcggatcagcaccatttgagatt

SEQ ID NO: 3019 - DNA, 354 bp, Oryza sativa
  Clone ID: PAT_MRT4530_10273C.1
gagattggtttccaaccgatataaccaagactggttctctagtagctgggttgatatatggacatcaaacggcgacagctcaggaataagtgggcatataaagccctttctaattatatctgttcaaaacaatttcagccagcttgacaacaataatttctcaggaacctcaattccttcatcttatgccaatatcaccacacttttgaaattgagtttgaggaactgcagcttggaaggacctgtccctgatgtcagtggaatagcccaacttggctatttggatctgtctcacattcttccagacggatccattcctggaagtttctctggccttcccaatctacaaagact

SEQ ID NO: 3020 - DNA, 260 bp, Oryza sativa
  unsure (1)..(260): unsure at all n locations
  Clone ID: PAT_MRT4530_102740C.1
caagacacagagcaagcgtccatntccgnannttnctccgtncgccaattacatgcgtcccacaccnagntgcttcgccttcacgaccacttcaccgcagttgccatttccaatcccaaaccaagggacttnattggcttgngaggggagtggagttgctgtgctgctgctgccgctncngtcttcgacgnngagaagncaagaaagaggcggaccatgancacgtccaantcgtggctgttcgcagcgaantccaagta

SEQ ID NO: 3021 - DNA, 382 bp, Oryza sativa
  Clone ID: PAT_MRT4530_102741C.1
aaaaaaaaaacatttccaaattggcccaaaaaaaaaatttttaaaacacctaaaataaaaatttttccaaacaacatttaggcaccccggatgcacccccgaaaattcggaccggtaccccaaaggacacacatttctttttattaaataaacaaagcagcctgcaaatcaaattaataatcgttaaatccaactaataactttatctaggatcaacccatacaaacattgcatatccacacttataaatactagaccctggtccccaaaggaggaccccaccccaattaatattcgttcccctcactcccctttttcaaataaaaaaccctatctcccccactttttaaaaaactaccccacccccctgaaaaaggctttt

SEQ ID NO: 3022 - DNA, 1896 bp, Oryza sativa
  Clone ID: PAT_MRT4530_102742C.1
atgggcaatggcatcaccaagaatccgtgcttctccggcgacccgtacgccgccgccgtggcgtccgaccctctcccggacgacagccacggccactccttcacgtacgtgccgtcctccgcggccgccttcgaccactccccgaggtccgccgcggcgtcctccgagacgtcatacttctcgctctccggcgccgccatcagcgccaacccggcgacgtccgcgtcgatgccgtcgttccgcctctacaacgagctgacgtggccgccgtcgacggcctgcaccttcgagagctcccgctccttcgccgcggcgccgctcatccaggccgcgccgcccaggctgtccatgtccgggccgctccacgcgacgtcggggcgcttctccgaggcgtcgggatcggcctccaccgcctccgaccgcttctccgaccacccgttcatggacggcatgctcgaccgcgcctcgtcggcctcctccaccgccaggctcatgcccagcttctctcacctcatgtctgagccccgcgtcgcgcagtccggcctgagcaatgagcgatcgctcatccgatcccttgtcagggtcgcctccaagctccggtttggggtgccgctctccggccgccggtcgaatggacctgccgaaccgacgaccaagagcgacggcgactaccgctccacgcccaagggcaatgtggagtgggcgcagggcatggccggcgaggaccggttccacgtcgccgtctccgaggagcacggctgggtgttcgtcggaatctacgacggcttcaacggccccgacgcaaccgactacctcttcgccaacctctacgtcgccgtgcaccgcgagctcaagggcgtgctctgggacgacatacaaggcgtcgacgtcgtcacggacaacctcccggaccctgctctggccaatgccacacacctctgtttccttgacgcaggcggcgtcggcggcggtggcgacgacgaccccgacgcagagcgcaaggcgaagagggggcggatcgagcgcaatgccgatgacgacggcgcgtcgtcggtgcaccgcgacgtcctgaaggcgctggcgcgcgcgctggcgaggacggaggaggcgttcttcgcggcggcggaggagcgcgcggcgcagagccccgagctgggcctggtcgggtcgtgcgtgctggtgatgctgatgaagggcaaggacgtgtacctgatgaacgtcggcgacagccgcgccgtgctggcgcggcggcgcgagccggacttcaaggacatcttcttcaggcccgaccaggacttgcagctgctcaaggccgaggtgatgcgcgagctcgaggcgcacgacaggaatggcctccagtgcgtgcagctcactcccgagcatagcgccgccgccgaggaggaagtgaggaggatcaggtcccagcatctgactgatcggcaggccgtcgtcaacggcagggtgaaggggaagctcagtgttaccagagcatttggtgccggctacctgaagcagccaaaatggaacgacaggctgcttgaagccttcaaggttgattacatcggcgccgagccatacatcagctgcacgccgtcgctgcgccaccaccggatcagctccaacgacaggttcctcgtgctgtcttctgacgggctctaccagtacttcaccaacaaggaggtggtcgatcaggtcgccatgttcaccgccgagcagcccgacggcgacccggcgaagcacctcgttggagagctcgtcctccgcgccgcgaggaaagccggcatggattgccgcaggctgctcgagatcccgcatggcgacaggaggaactaccatgacgacgtgtccatcatcgtcatgtcgttcgaggggaggatatggagatcgtccgtttag

SEQ ID NO: 3023 - DNA, 618 bp, Oryza sativa
  Clone ID: PAT_MRT4530_102743C.1
tcacttttgggggaaaatactccataaacgtggtaatttgccaatggacaccgcgtcgattagaataataatttccggttgaagaggagagaaatcatgtgaaatgtcaaaaatgcccttgggcccacatgtcagctctcttgtctgtcttctctctcttctctgtctatcttctctcccagaggggcacggggcggcgtcggccgccggggcttgaggacggcgggagcggccgcggcgcttgcgacgggagtggcggaggacggcggggaggagagccgcgtcatcgtcaccaactgcggcggaggacggcgaggccatggcgaagcagcacggggcggcggcgggcgggaggaacatgcgccagagccggtcggtgcgcgggactgagacgatgggcgtgccgatgaggcggagctcggcgggggtgcactcctcaccgccgaagaatggcgttggcctctcgtggtccacatgatatctggactgcatgaagaaatccacgagagcacggatcacgcatcaagaaatccacaagggcatatgatgcgcatgaagaagtccacgagcgcatggaccgcgcgtgaagaagtccatgagggtgtgcgatgcgcataa

SEQ ID NO: 3024 - DNA, 805 bp, Oryza sativa
  Clone ID: PAT_MRT4530_102744C.1
tctccgatcgaccaaaccagcgaaaccaccatccgccggcaatggcagccttgctccaccagacaccactccagccacctcaaaccaccacgagaccgcacccgtggacgcacacctccacaaccaacctctcgccgcctcacgtggcactcccccagcgacggcgagccccactccggcggctacaagccgccggcagcggcggcgccatcggctcctccgccgtcacggacaccgagagcaccaccacagccaaatcgccttccaagaagaagagccgcaaggagaagcagcggatgcggcggcaggagaaggagcaggagcagcggcagatggtgctggaagcgctggacgtcaagagcggcggcgaggtggacgaggacgacgacgagctgccgcagccggtgttcgaccgcatcctccgccggatcatgttcatggtcggcgtcccgatggcgtccggcgtcgggctgctcaacctgtacggcgcgctggagcgcggccggggcgtcgccgtgccgtcgtggctgccgctgctgaccatcctcgtcgccttcggcacgtcggcgctggggatcgccttcgggacgctgtcggcgagctgggacccggagaaggaagggtcgctgctcgggctggaagaggcccgagccaactggcccgtgctgtgggaggaagaaatcgagaaggccaagaagaagaaatgactgtacattgatgctaaattgctactagtagaaagtacagtagagcactgaaaatatgtgtaccttgccagttcagtgtggtatatactacatttcgt

SEQ ID NO: 3025 - DNA, 895 bp, Oryza sativa
  unsure (1)..(895): unsure at all n locations
  Clone ID: PAT_MRT4530_102745C.1
ggtgcggggggaaaaagactcccttaagggggaatgtggggccgggcccccccttaagttaaaaaaaaaaaaaaaaanaaataataaaataatttaattttnttnnnatnannnnnnnnannnnnnnnttttttttttttgtttttcttctgcctgcttgcttcatttttctactttattctgaatgaaccatcccaatattgtacaaactaatagcaatccaggaaacagtgagaaatggcaccacgggcacggctatagaagtcaacattagcagatctctccctaaaagagtcactgataaatcacagcgcaatgcgcatacaaatcacagcgtttcagaaactagatcatatgtggtaaaaatcttcagaggtaatagtaagaaagcagaggtgcagcaaccgtggctacaatgagcatcgccgagaccggagattgggccgccgccgacttcggtgaagatggcgtgccggtggccggtgttgatcctgacccagaaccggaagaagatggtgcgggtgctccagtaggagaggcaccgggaaatttctttgctcagggcggaggagtcgccgccgcaggcggcggggagggcggcggcgcgggtgtagttgatcttgatgccgaagtcctggccgagcgcgccgcagaggcaggcgacggcggccgggctgcccagcgcgctcttcacgccggcgcagcagtccttggccggcctcgcctcggggctccccggcgtgatgtacgtcaggcaccccgccagcgccgtgatcgacgacccgcagtccgacgccggccccgccgccggcgccggcgccggcgactgcgacgccgcgccgcacgccagcgccagcacggccaccaccaccaccacaactacggcgcgcgacat

SEQ ID NO: 3026 - DNA, 190 bp, Oryza sativa
  Clone ID: PAT_MRT4530_102746C.1
gtgctcgcaggagcctagccactgttgatggtgtctcgatctgaatggtagataatgatagaggatcaaaggttaaaaaggaagtcatgcatcatgatgcgcgacagttgaaacaggaagtcatataaatctaaaaaaaatcacctatgtaaatagcacaaaaagacagacaacagataataaacacgaa

SEQ ID NO: 3027 - DNA, 5154 bp, Oryza sativa
  Clone ID: PAT_MRT4530_102747C.1
cgccagcgggagccgcatcgtgttttttttttttttttttatgagcataatgccatttggtatatgaatttccttttcttgcactgttgatatacattgtaactttgtacaatctataactgggagaggccaccaagacattgcctcttcctacaacccatggatattataagactgatttgaatttgccctacaaaagaatgatttgcctgccttgctttaaaagatattgcttttcctagatgtaagggaggaatcccatcccaaccctattgactacctataaggattttacaaaaaactagctggaaaagaaaaggaaatataacaaaagaaagggtacaccatccagcgtaaaggattgaaaaaaatttacaacaaatcaaggaatattctgacaaggtatctaacggtataaagctctgagatttcacagccctaatcctgtaaaaactggaaggcgggattctcgagtagctcctcagctggtttgacatcggtgaagtccttctcctgaattgagttggtgatgtcatcgactgagaacgggatgcttgaattatcatccaacagaaatgaactgctttcagcgttattagagtcctctgtcatcagcacccgcatgttactaagaacatctgatgatacgctctgggtattgtacttgtcatcccagtactgtgtacagattctgtacagctgctgaacgctcaagatcggacataggtcattgacaatctcatcataagatattctgaatttttggaatatgaccagaaagccaacagcctgcctgatatgcttgagctcatcccaggatgctgcagcatactcagttgttgcctttgcacaccataattccaactcggctagaccagctttgacatactctccattgctgaaggagcaacattcacgacgaaggagtaaactgttgaacagttgtacattaatgtatgagaatatctgggtaaaaactttctgagctaaaactgggggtacatggttatcttgcagtttcttcaaaaggatatccaagctctcgatgattctctgccaatggttgctctgagcttgaccagataaccgtccagacattcgcagcatgctagctttcattgttctcggagcctggatacacagagaaatcaaagatgataattcctttttaatattgtcacggatgataccgtaaatcttctccacataagcagttaactgctgcttgaaaagcaaggcaggatacttggcctcaacttgacggacgacatcagttgcctcaacatgcatgttgacaaaagatgcagatcgcaagccttgagccattctgccaaacaatgatgttggctgaggaggtttctttcgtgaaacactcccaggtgcaccagcagctttgagacttctctgaagtaggaacagcaagctagatgtatttgagagccagtaagcaagattatcgttatcttcttcattctgcatcaagggcttcacaacgtaagctgactgggggccaaagaaacttgccaactctattgcagatcctattaactgaataaggcggtcaaaaacacttgtcttctctgcctcaaaagatttccagtgaagaagacatttatatatggtaaaagcagcaactggtttccccccacaatagccaaggttttttgacacacagtcaataagtgcatcgacattttcaagttgcctgtcgacacaagatttcctcaactttggatcaccattcccataatctttaatagcaggaggtgcactttggggttcctttggatcttcaacctcatggaagccattttccaagttctttggaacaattggaattgacagatgttcagacatgctcttgactggcgagctcaacagtgcttgtctctgcaccttctcctcagattccatgttggataatttctcttgaagccttagcatcgccatgttcaaatcgacaatttttgtctcagcgtccattgccttttgtagcctctcttcgctgattttgtttgtttcttcatatttcttctcagtatcatcaattttcttttcaagagaactgaccagagtcttaagtttgtcgttttcatctctaagcttattcatcagttcagtatctatgacaggaacctctttaacaactggtgccacctctgcagccttcttggcagcctctctctccttgactagcatttcctgtgtttctttgtattgttgttgcacctcttgcaaggtagcttgcaactttgcattctcttgtgatttagcttcctcaagatcagctcgcatgcgtttctccaattgcagtcgccatgtaagctcttcaacttgcttttccaatttatttttggcagcttgcaaagcaccagtttcccgtgcagccatgtactgagaaatgtacacagcagtatagcaaaacatctgtaacattttgagctttcgaagctccttcctagcaacctttcctctccaggcacattgtgtagtaatggcagctttcttcgttcttgaataatacaaccttgccaagaactgacggcagcgactctggataacaatagctgcttttgtttgttgtctgaaatggagctctttacgtgcaaccatcccgcgtaaagctgattggatagtaacagccgaagcagaaagttcattgtatgcttttctggcagcatgcatgcgatagcaagtctgtatcctgagagaagcagcttctctgcggagattctggtaaatttttcttgcaagttccccgcgacaaatcgtctgcagttgtacagctgatctctgcagtttaatgaaatttttctgtgccagaaatgagcggactttcctttgaatcatgttggcggaacgtcctaacacttcgtttctacgtgcatcaagctcagccatttgaccagcacgaagaaatacttttgtcttgccaatctcaaccacaatggaccaacgcttctgagatgctagacactgctgataaccttgcagatctaccttctctaacagcctccttacagcagcaatctcatcagagcttccactcaaaacatcaggcgcaagaataccaaagcgatctatgaactcatagaaagttcttctagttggatacccagcacagcttatcctgattgcttccattactcctccgcatcttagctgctgaagaacattctggttctcgaatattgatggcttgagtatattattcggctttacacagcggatatagtggggctcagttgcactcaatgtctctaagagagattgcagttgttgcttgaacctggaaccgatggatgaaaacttggacgattttgaggaatcctcagagaggagagggaaaaggcccgagacaaatgaacattgtgaagcactcaaaagggcctgatgttcagcaactacataatctttgttcttgtccaaaaataattctgtttggtaggtgacatctccagcataatggcatatggtgaagtctgatcgcgataattttggcttagtaaagcgcttattatttttgaaagtttggtacaatttctgagcaaatgtctcgtgtgttgatcttggcagcatacaggcctcatctagaagggcaataattccaccgggtttcttctcaatgagatcgagaacatcctgattgtcgatgaactcaatgtaactccaattaatttcttctttagtgtactcttcctgctccatcttaaagacatgtttttgaaacagtaagatcacactaaacatgaaaaagcaatactctggatccaacattttgcacttcttcaggaaatgtttcagagaaagtgcagtgaagcacctgtttgtcttgaagctttcaaaaccgtagatatccagcactccaattaagcattttgaatttggatcttggccaatagatttgtttatcttatccacaagccaatcaaacaaccgtgagtacacagtcttagcaagtgcatctctactccccttagcagcctcaggatccaaagtttttactatgttctcatcacgagtcacaataatacgtttgcacaatgaatcttcaagtgctttctcgtcacacatgaagagctcagcggcagtctttaaatgaaacagtgatttttcatccttaggttttgatgactctccatcatccccttcagcaaactcaacatttcccaagtggaggatggcagcaacaacccggaaaattgcttcctgctcttcagaactgattccaataatatccatagcctttctagtttcaaggtactctttagattcatctagaccttcaagcttgtagcagttggactgattaagatagtgaaatgttctgggatctcccagtttgtatctcttaagctcctcgggtggggcagcacaaagcatgtagaaacaatgataatttctctctggatcagatatttggcagacacgagatctctcgaggagataagttctgacagcagctcctgatattctcccattctgatcaaactggatctcaacaaacttaccaaaacgacttgaattattgtttctgacagtctttgcatttccaaatgcttcaaggacaggattagactgaagaacttgcttctcaacagttcgcccttcagcggcagccttcccacccatgtacgcaagataacgcattatcattttagtgctttctgttttgccagcaccactttctccactaacaagaattgactggcttattccttcattaagcatcaatctgtatgcaacatctgcaacagcaaaaggatggggacttaattcaccaaaatctgcccctttatattgttccatcatctgagtatcatacaggtgaggcagtcttcgaaaaggatttacagcaatcaagatatttccagtatatgtatatatttcattcatgtcatatctagatttcaaattctgaagaaccccaggttcatgaagataagcaagcttcgtcatgtcatcaactccacatggtgattcctctggatcctttgcgtggacattggaacctttaacagtaaccgtcttttcattggaacacttgacaataaccgtgtcaccatggacttttataacctccccatcgatccaggcaacaccaggatcctcaacccaaacctgggatcccaccacaatggtagcttgagccgc

SEQ ID NO: 3028 - DNA, 587 bp, Oryza sativa
  Clone ID: PAT_MRT4530_102748C.1
ccggccgggatcctcaacaatattgtctacaccatctggaatcttgttaacaataagaatggaaaaatcacaatgagaagataaccccgcaaaaactttggcccggttggcctaattggtccttccggaaagggcaataatggaaacaacaataaggaagaatttccaacaacattaaccaaggggaacatggaatccgggaaggaagaactggaggaaaaggtggggatggggaacttcacaagcaaggtcatggcccaagccaagggggttccggaacaacaaaggtggatggaagtaacaaggatggaggcttcagggcaatgggggaaccagtggccaaaggaggaaaagatggaaacaagtaattggggttgaattcggcaacaacaaaaggataaaaaggggaaggaaaaggcctaactggggaacaagggccccggtaaatttcaaattcccttctgggggtggtggtgaatcaaacgtgggtaactggaacccaagaataaaggggtggataacaatcgggggcaacaccaaaaataagaacccttggattaaataatcaatcattttcgaattggaaa

SEQ ID NO: 3029 - DNA, 612 bp, Oryza sativa
  Clone ID: PAT_MRT4530_102749C.1
atggcggttgcagccggccagccagaggaaaatcggggcgttacacgtggcctggccagcgcgcacacaaggctggcggcggcggcggccgggaccaaagcgacggcggcacacgggccgggtggccaccggcagcggcggcacgatgcgcgcaagcacgggaggcggctggccaaggggagaaagagggaaggggagaggggtgctcaccgagggcggcgacggcaagatgaccacggggaggcagccggcggcggcacgggaggcgacggaacagcgtctccgatggtgagcggcgctcgggaagaggcagacgggcggcggctgcaccatgggatggaagtagaggtgttagggaggacggggcagcgacatggccggccggagaggaaaatgagggaggaagggctcaccgtcgcacgggaaattagacgtccagtgagtttccggcgatgggaagcgacgaccgaggtgctcctcggcgctgcgcagcgagtggcggaggtggcgcgtgcagtgacgtctgcggcgacggcggcgtgcggctggaggcggtttaaggtggtggcagctcgggttcgcggtgggatggtggttccagcggcggtttga

SEQ ID NO: 3030 - DNA, 291 bp, Oryza sativa
  Clone ID: PAT_MRT4530_10274C.1
ctaacggttttcacctagatcgatgacctattaacattattttcaactatctgttttttttgtgacaacagtgcaattaacattgttaagaatccggttcaacattcaaggaccaagcacattgagatacggtaccactttctccgaaaatatgtttagaaatgtaccattgtgctagagtttgttaaatccgagaaacgacatgctgatatttttacaaaacctctctattgagcatgatgtgagttcttgcaaagtgagttaggggtgatccacccctgtggattgcgt

SEQ ID NO: 3031 - DNA, 410 bp, Oryza sativa
  Clone ID: PAT_MRT4530_102750C.1
acgcgcgcgctcgctcgcctcgcctggcagggcaggcggcgcgcgtgcacgacgcacgcgtcgaatgattactccatcccgctcgccggcgtgcaccggcgatcaggagagcaggtctccggaacctctgccttcgacgtcctgcaccgggagaaggcggcaataaggtttttgggaagcgcttagcgcgactgctccctgttcgtccgcgatggctcgtcttcctcttcgctcgcatgctgcgcgccttcgtaaacatctgcaattgcgaaaagttcctgccgagcagccggtctttctaccacctcgtaatgggtatacccacgggcacaaataatctcacgggcatgggtatgggtaggcactacccgtgcccgtcgcgcccgattgccatcccgagttcaagctaa

SEQ ID NO: 3032 - DNA, 484 bp, Oryza sativa
  Clone ID: PAT_MRT4530_102752C.1
tgattttttttggatgagcctgtaaatgatctcccaacgggggtgttgtacaattcattgggatctgttatccacatgttgattggatcaagatatgctgtgcagcgaagtggaaatgtactgatgtcctttaacaacaaggaggcaagctctgcgatcccactattttcacctgtaattggtcctatggcacagagttttggccctatattctcccaattggcatcgtatccaacaatccgatttggggcagaagcagctattaagcagcttgagaatctaaacccacctgttggtaagcaacttctacctttactttaacaacttcctccgttgtatatggacctaataaaagggcgggaggacttcattccaaaaccagaaaagacacgccggctgataaaaacctactatggaatttctcggaatctttagtaaagttaaagatgatcaaattgatgaaacctctacccttgcacaagta

SEQ ID NO: 3033 - DNA, 390 bp, Oryza sativa
  Clone ID: PAT_MRT4530_102753C.1
atgcgacagatcgccgcaacggcgtacaacgtgcgaaggcacggcagcgaacggaagtgcgacgaaagcgaaaaggggcctcacgggccaaggggccgaaacgcgcgacaccggtgtggatttggagcaatggcccagtatgcgttggcgactccggagctccaaacttgggccgagttgctaggcctggagagcccaagacgaactggaggaggaggaatgcaacgttgtgggcttgatccacccctggcattgggggtcaaaggaggtagtggtggagctgttgaaaacaaggaagaaggtgaggcgggggcatgccgttgccgctcggaggagaggcgtgtccctgtgtcagcacgagtggaccacgcagctgtcacgaacatagga

SEQ ID NO: 3034 - DNA, 303 bp, Oryza sativa
  Clone ID: PAT_MRT4530_102754C.1
gttgaattcaatgtatgtaaatcatctttttgctttttaaacaagccgaaaaaggaataaagaactttttttgtggggaacccgcccgaaccccggggggtgtattcatccggaaaaacccggggggcccctaaaaccaaaaaaatgttgctttgttccccccaaagcgcccaaagcgcccatgtgtttaataaaccataaacacccgggtttagttgggctgttataggacaacaaaaaacccacttttattgggggggcttttatgggggccaaaaagggggggggaccccccccccgaca

SEQ ID NO: 3035 - DNA, 1410 bp, Oryza sativa
  Clone ID: PAT_MRT4530_102755C.1
atgtcagcagaaaagccacctctatcatcgacgggcatgtcatcagaccctcaaatcaagattccaaaaccgattgggtccgacgttaatgaagggaacattgttccagtcactatagataagctgtcaccagaacaaaggaaggattttgaattaatgatgaagagcgctcaggagcaattcatgaagtcgttcgtagaaacccgtgggaaagtttaccaaaagtacaaagtaaaagtagttactgccgacgaagttggatcaagctcatcccaaggcgataaaggcattgccgatggctcaggcaagaaaggtgacggccttcaagatggagtggttgaggatcttggtgaagataacaacgaagtgcaaccgcaatttaacaacttccaagatcggattgactacgcagtgcaacatgctttgatcaaccaatcaggagtcctggtcaataccttcacaaaaatggtaaagtatgtggttgatggtacaatagctgagcaccaagttatagggccagtttatcttccaggagacgttttcccaaattacagaaaattggtaactggtaaccaacagtctgctaccaatgcaccatcaatccagccgatggcatcagcttcgactccagcaccagctgcaccgtcattggcaccaaggcaaataattagtaatccttgcctcttgtctagagaacaaccgcaacatgctggtcagaatatcaatcggcggtctcaagagcaaattgcttcaatgtttttgccaactcagccgactggtggatccattcagcacacgccaccaaggcagcagatagttatccctgagcagttagtgcgtaatattcagccgaatgtccagaactaccaagggagtaacttgaattatcaataccagcccccttcacctcatgttcactatcaacaggggggatcgcctcagcctcagtatgctcctaggttcaaccagtttgagccgatacaacaacaagcgcaaggggtgcctcagcagagacaatgggccgttatgattgcagatgtgatgagggagcagtttgggcttaagccgaaggatactggaaacttgtatcggcatccgtaccctgagtggtttgagagggttccattacctaaccgatacgaagttccagaaaagatgggcgaggagtacgacgcagtgcgggaccacctcaggggcctgcgaagccagggcttaacgggggcgatggtgttcggcgactacttccgacgtcgcatcgcgcctctccaggagcggtcccgcggcgcgtgggagtatgtcgggcacaacgatcccatgcgcacccacgtgggtgagcgctgggactggggtgaagaggaaacgctgattcgtgacaggatcctcctcatctgcagcgcccgcgaccggtag

SEQ ID NO: 3036 - DNA, 3611 bp, Oryza sativa
  Clone ID: PAT_MRT4530_102756C.1
gtgtaaatagcaggttcttcactgtggcaccttaacagggcttctctatgggttctgcgggaaatgaaaacagtgacacattactaggcaatggagttgttgggattcttgccgagactgctaatatgtgggaaaggagagcaccattaaccccatcccattgtgctcgccttctgcttggaggaggcaagaggggaactggggtaaatcggattatcgtgcaaccaagtacaaagaggatccatcatgatgctcaatacgaggatgttgggtgtgagatttcaaaagacctgtcagagtgtggtcttattataggaatcaaacaaccaaagctggagatgattcttccacatagagcatatggattcttttctcacacccataaggcccagaaagaaaatatgccactattagatgagatccttgaaaaaagagtatccctgtttgattatgagctaattgctggagatgatgggaaaagattgcttgcatttgggaaatttgctgggagagctggactgatagacttcttacacggtctcggacaacggtacttgagccttggatactcgaccccatttctctctctagggcaatcacatatgtatccttcactcgctgcagccaaggctgcagtcattgccattggtgaagagatagcaacatttggacttccatctggaatttgcccaatagtatttgtattcactggaactggaaatgtttctcagggtgcgcaagagatattcaagttactgccccatagctttgttgatgctgggaagcttccagagatttttcaggctagaagtctgtctcaacatccacaatcaagcaagagagtattccagctgtatggttgtgttgtctcttctagagacatggtcactcccaaggatcccaccagatgcttcaacaaagctgactattatgctcatccagaacactacaagcctgtttttcatgaaaggattgctccatatgcatctgccattgttaactgcatgtactgggagaggaggtttccacgattactgagcattgaccagttacaacaactgatgaagaatggttgccctttggttggtatttctgatataacttgtgacattggaggttccatagaatttgtgaacaagagtacttcaattgagagacctttcttcaggtatgatccttgtactaattcatgccatgatgatatggaaggaaatggtgtgatctgcttagccgttgacattctccctacagaattttccaaagaggcctcccaacattttggagacatattatccaaattcgttgctagattggcctcagctaaggaactgttggagcttccttcacacttgagaaaagcttgcattgcgcatgctggcagactcacttctctgtatgagtatattcctcggatgagaaagactataatagagttgccaccagctccaacaaatctattacctgataagaagtacaacagcctggtgtctctcagtggccacctctttgataagttccttattaatgaagctctggatattattgaaacagccggaggttcttttcacttgattagatgcgatgttgggcaaagcattgatgatatgtcatactcagagcttgaagtaggagcagatgatacagctacattggataagattattgattccttgacttctctagctaatgcacatggagatcctaatgccagaagagaaattgaattatctctaaagataggaaaagtcaatgagtgtggaactgatgacagcatggctaaagaagggtcaaaggttttaattcttggagctggaagagtctgtcgaccagctgctgagtttctggcttcttattcaaacatcttcagcagcagtgcctacgatcatgacattgaccaaattcatgttattgtggcgtccctgtaccaaaaagatgcagaagagacaattgatggcataagaaatgcaacagctgctcaactcgatgttgcagatattaaaaatctttccaatcttgtttctcaggttgaagtagtagttagcttgctgcctgccagttttcatgctgccatagcaagagtatgcatagagatgaagaagcacttggtcactgcaagctatgttgatgagtccatgtcaaagttggaacaatctgcagaaggtgctggtgtaactattctctgtgaaatgggcctggatcctggcatagatcatatgatgtcaatgaagatgattgacgaagcacattcacggaaggggaaaataaagtcatttacatccttttgtggaggacttccatctccagcttctgcaaacaatccacttgcttataagttcagttggagtccagctggtgccatccgtgcagggagaaaccctgctgtctacaaatttcatggagaaatcatccatgtagatggtgataaattgtatgaatccgcaaagaggctcagattaccagaacttccagcttttgcactggaacacttgccaaaccggaattccttgatgtatggagacctgtatgggatctccaaagaagcatctactgtgtacagggctactcttcgttatgaaggatttagtgagataatggcaaccttcgcgaaaattgggttttttgatgctgcaagtcatccactgttgcaacaaactactcgccctacatacagggattttcttgttgaactcttcaatgcttgtaacatctccacaaccgccagaaaggaatatagtgaagtctctggaggacaagatggtgaactgatttccagactcttgagttttgggcattgcaaagataaggaaatagctgctaagacagtcaaaacaatcaagttcttgggattatatgaggagacacagattccagagaactgttcaagtgcatttgatgtgatttgccagcgaatggagcagagaatggcttatatccacaatgagcaggatatggtactgctgcaccatgaggtggaggtggaataccccgatggccgaccaaccgaaaagcaccaagcaaccctacttgagtttggaaaggttgaaaatggcaggcctaccactgccatggctctcacggtcggaataccagcagcaataggagctctgctgttgctccagaacaagatccaaaagaaaggagtgatcaggcctctggaacctgaaatttacattccagcgttggagatcttggagtcatcgggtatcaagctggcggagagagtggagacctgagaatcggacccaatatgtataatgtagcatggtggtagcttctctatatatatgcttcagtgaataattgatttgccgttgtgtggtaattaagcaatgcccgctaataaattgtaccgtagaagtcctatgtacatccgtatcaaaaaataaaaaaagcatcgattagcttgaataaaaaaaaaaaaaaaaaaattggagattaaaaaaaaaaaaaaaaaaaaaaaaaaaaaaaaaaaaaaaaaaaaaaaaaaaaaaaaaaaaaaaaaaaaccccaaaaaccccaaaaaaaaaaaaaaaaaaggggggggcccttttaagggacccaattttacgtccgcggggttgggaaggaaaagtttttttttgggggcccca

SEQ ID NO: 3037 - DNA, 1028 bp, Oryza sativa
  Clone ID: PAT_MRT4530_102757C.1
ccggccggggagcgagggttttatcgccgccgccgccgcttctccactctcccctgcccccgtcgccgtcgccaccgccgccgccatgtccgggaggaagaagacacgggagcccaaggaggagaacgtcaccctcggcccgaccgtgcgcgagggcgagtacgtcttcggcgtcgcccacatcttcgcctccttcaacgacaccttcatccatgtcaccgatctgtccgggagggagacgctcgtccgcatcactggtggcatgaaggttaaagctgatcgcgacgaatcttccccttatgctgctatgcttgcttcacaggatgttgctcaaagatgcaaggagcttggaataactgctttgcatatcaagctccgtgctactggtggtaacaagacaaaaacccctggtcctggtgctcagtccgcacttagagcacttgctcgatctggcatgaagattggtcgtattgaggatgttactccagtgccgactgatagcacacgcagaaagggtggtagaaggggtaggaggctgtaatcttcatgcggcctcaaaccgacaacactctgctctcctagatgttaccgtctgcattggactattttgtttctgtgcttttcattcggtggattatttaaaccagttttgaactctgtttctgcatcaattcatgctgtcctcaatgtaaccaacgttatctgcttcgaccggtgaacatactcctgttggattacttgagcatatgccactacaggccggacactgctttcgttgtttattcgggagagcatggcaaacttgggagatgaaaacctggaaaatggtgcgaggataatgggcataactgtaaaatagtgcgttttgttcgaaaactttatatatgaaagttgttttaaaatttcaggttaaaaaaaaataaaaaaactgcagcgttaggacaggcgttctccgggtttcggtgatttgtgtgtgttagctaatgtagtgttgttagaggataatattagtatagagtgagtatggt

SEQ ID NO: 3038 - DNA, 1260 bp, Oryza sativa
  Clone ID: PAT_MRT4530_102758C.1
atgcacctgtccccacaactcggcgagactatgccctcgaagaaacggaaggtagagctccacgccgacgatcagcctccgccaacccaggcaataatggccacaccagagccctgcagtggacgcccatggccggacctcccgtcggagctcctgggcctcgtgctcctccgcctgccgtcccacgccgaccgcgtccgcctccgcgccgtctgccgcccatggcgctccagcgcgcgggtggagctggatcttcttccgccgcccctcccgtggctcctcctccgcggcggcgccttcatcaccctccccgacggcgcggcccaccgcttgcccgccgtccccggcgatgccacgcacctcgcttccacgggaagcggcctcctcatcgtgcacggcgacggcatgctctccctgatgaacccgtcctccttggcaacgacccctctcgccgccctcgccgccgtgctccctaaatacatcaggtacaaatacctcgccgccgataggcaacgacttgtcccgctgatcaacaaggcggtggtgtctgataacttcaccgctttgctgatcggaaaccgcacttggaaggtcattgtcactattggattttcacctccacttgcacatttccctagctccatcgtcgacattgcatccttccaagggaagctctactacctaacatctgacgtaaggaaacgtcaggaggagctctatatctttggagtcgataatgctaagcagattggcataagatgcataagcagcaccctgaaagatataggcgaggaatcatggtttggcccttgctccaccgaaaggtacgcgacggagcgatatctcgtcgcgtccaacgatcggctgctcatggtgcgacggtggatcaatcttccaccaatctatccaagcgacagtggcattgttaagcgaacacggcggttcgaagtctttgaagccgcagacctgagcagtggctgtggaaggtggatcaaggtggatacattgatggggcatgctctctttgttagcaagggctgctccaagtcgctcagtgccggagctgaagaagactgcatctacttcatgcatgaggacatcaagaatgggaagcctgaagatccttttttggactctggcgtgtacaacatgagagacgggacagtggcgccattgttgacagagactctagtggcggagcctcttgcagtacacggcggtccatggtgtccaacttggcttttcccctctgaaacttga

SEQ ID NO: 3039 - DNA, 1279 bp, Oryza sativa
  Clone ID: PAT_MRT4530_102759C.1
gaattggggaaaacaaacctctctccatcaccggccgcagcagccgcctccgcctccgcctccgcccgcaccagatgcgacgctgaccggctcaccggcggaagcgcggcagggcgcggccttcggttcgagcggtagcatgcagcagggcggcatttgtggccaatgagattcccctattcatgaatcagtctcctccacatatgtctcgaccatcagtgattatcaagctgattctggggttgctttggttcatcgtccacttagcaatcagcctttgcagtttatggtttgatctgatctacagtatagaatgctatctcatttcattcgggctgattccaaagtatcggaaattccaactggataggctcaaacacttggctgttgtggtagatagcagagaagctaaaaatgttgcaaagatcaatcagctcttatgttggctctcaaatgttggtgtgaagtatgtatgtctttatgacattgatggagtgctgaagaaaacatttgcacctgctatgaatggttcaagatatgggaattcaggaaaatatctggatgtgggtgcaaatacaaaagctttgacctgttgtcataaagagatgacaatagagtgtatttctggttctgatggcaaggatgggattgctaaagcagccagcttactttgctcaacttgtgtgaacggcaataggaatacttgtggaaatggtgaaatagtatttacagaagctgacatgtccggtgcattgaaagcaataggttgtggtggaccagaacctgatcttcttcttgtgtatggccctgctagatgccatttaggttttcctgcatggagattgcggtatactgagataatgcatatgggaccactgaattcaatgaaatatggcgccattgtgaaagcattctataaattctcgaagaaataccaaaattttggtaaatgagagctgatactgagatagagaagacaacatgtcatgtgtagaaagccactcctggagctggaagcttaacaatagttttgcctttctttttctttttatcccatgttgctgatcactatactaaacgttacgagcaataattcacagatacaccttgtacttgcttttgcaatattgtaagtgttgctgatagaacatacgggaaattatatcccattgtataacttgctcccattctaatgtgtgatgaggcagttcttgaccacacacgaactgattgatataaaaaaaaatccctaaaaattgaaatggatcacgttgatcac

SEQ ID NO: 3040 - DNA, 1645 bp, Oryza sativa
  unsure (1)..(1645): unsure at all n locations
  Clone ID: PAT_MRT4530_10275C.1
ccggaattcccgggtcgaccccgcgtccgctcctgatccccttttccttcgcccgtttgacatccgcagaaaagaaaagggaaatcctccgatcgaaatcatcgaaccgtctcttctacatcgatcgaaaagagaagaggagcggcggcgagatccaattccaatcgatccttgtgctgctgctgctgctgcgctcgacgatcccatccggatctcgatggcggccatggctcgccatctccctgctattcttcttctctcgtcggcgctgctcctcgcccttgcctccgcctccgcttccgctgctgctccggcgctggccgccttcgtcgatgccgcgtcgcgccgctacctgcgggatcagcaacaccacgaccaggccgcttcaatgtcactagaccaagtttctgcggctgtttctgtcttgcttggttttgcaccaccaccctcgctacctgcacaatcttcttcaaagttagacaagctgttactccctaacccatttgacagaccacgggctgttttcttgctgcaaatcgatggattccatgcctccgttgaaagcatcacatctgaagctggtagcatcttcaaaaccactattgatggtctaagcgattctgctacagggcttacagataaggatgatctagttattgttcattcagatgaatctccagctgttgattcaggttctgagtattttgatagtgatctcactgacttggcaaactggcttggtgggtcctatgagaaggttgatggcaaattgatcattcccttggagagtggagaaagtcttactttgcttattacaaaggaagcagacatggaatttgcatccagcttgatctcccttcgtaaaactataaaaaggggtattcaggttcatgaagatttctcaggaggtgtcatgagccctgcagagttattagtatgccacttcaaaggcattaaggctttggaagaagaatatggttccacagaaattgttaagcagggaactgatgtagtccggacagctgtcaccaaagcatttgatttactacgtggagcatataatggaaaaattgttgggttagtaatatccacaaaggaggcttcaccatccttagtgggtccagcatcttcactgcacatttcgagatggctaaaagagacaagccaaactaacactacaatagcctcttctgagatacttgttagaaagagtttggcatggattacagggatcattcttcttgtctctactctcattggggtttgcttgcttatgaatatgccacttaccagggacaccctcctgtattcgaatgtgaagatcgattagatggaattaggagggagggagagagattagcacattgatggttgtaatttccattttcacacgctgcgtggcctttatgggatggttttgacctttttgtaggccatatatgtttgacataaaaattgtgcttctgtgtgggtcagcccggccggaatgcaaaaccttgtttgtgaattgtcactgcctgtacggggcccttgttttttggttataaataaataatccagaggagcctctgataattgttccaaaaaaaaaaaaaaaaaaaaaaaaaaaaaaaaaaaaaaaaaaaaaacaaaaaaaaanaaaaaa

SEQ ID NO: 3041 - DNA, 708 bp, Oryza sativa
  Clone ID: PAT_MRT4530_102760C.1
atggccatcgccgcggatggcgaagcagacgccgaggtcgacgccaagaccccgtcgaccatcaccggtgaaaagaccccgtcgatcgtcaccggcgccaagacagaggacttcttgcggggagacgccatcgacgacaccacccatgtggcgagtgactcatcctcccccgacgacaatccctccgacattcggccgccgtcgcgcgactcggacggcgaccactcgggctcggcgacgatctccccggcgagtcgatcgggccgaggccgcagagtcaccactgtctacaatgaaggctccaatcgtattcgagctcgcataatcttgatctcagtcccgttccttttcctcgtatgctctccgccgctgctgcgccgccactccggtgacccgctggccctcctgtggacgatcgccctcctcatgtgcacccacctcttcttcttgatctccagcctctcacgcacaatgcgtccctccacagtcttcttccgcgtctcctacggcgtccttgtggccgtcgccgccgacacgttcgctggccccgacgccgggttcgccgtcatgcacctcgccacaggctggacggccggcttgctcgggtacgcctacgccgagcacctgcagcacattggcaaggagacgacggccaagaacatggctcccccaaccttcttgaccgaggaggaggagagctccttcaag

SEQ ID NO: 3042 - DNA, 288 bp, Oryza sativa
  Clone ID: PAT_MRT4530_102761C.1
ccggccgggtataccctctggtcggacaggttaatggctccgtcaagctgacagtgctccggaatgcctcatgtacactgtcgaacttatgccgggcaaagcctcatcctacttttgagcaggcgaacccagcgctttctgcactgaagcggctcatccgttctcatgacgatgacggcctgagtgaagtctgctgaagtctgtcttatctgggtgaggcaactagtgataagatccgacctgagagacaatcctgacacttcccaagggttgtccaacttctcatgc

SEQ ID NO: 3043 - DNA, 154 bp, Oryza sativa
  Clone ID: PAT_MRT4530_102762C.1
ggtttgtttttagctcgcacagacggcaacgcaactctgataatacttccataaaaagagaaagccacagaaatctatccacgatctgatagcacgctaagcccatagggaactaccgaatgagacatctcgaacaaaatggcggtgagcccag

SEQ ID NO: 3044 - DNA, 321 bp, Oryza sativa
  Clone ID: PAT_MRT4530_102763C.1
atgacgtctcgtctcgtccccgacgcgacgcgcacgcggccgcggctcgacggtcactctccgtttcccgggggtgtacgtggtggtagggaattgatgccgatcgagggcatttgccgacaggttgaggccgggtgttttgcacattgccacattgtgctgtgcaagggcgaaccaagccggagtccgttccggccggtcacgtctgggctccacgcgcacgatcaagaaaggagcgtgtgcgccgtgctgccgcatgcagggtgcagggtcgtctcgtgggagctaggaaagctatgggatggccagtttgctatgtga

SEQ ID NO: 3045 - DNA, 1197 bp, Oryza sativa
  Clone ID: PAT_MRT4530_102764C.1
tcatccaaccatttcttccatccatgacaccctcactacacttaatgaaagccaatcttggagggtctccgtggtttcctcgccgttgtcaagatcgctagagtaggagcgatttgtttcaccttcttcaatggccagccaacatgagctgatcatattagcttggccaataactaggatgtgatcattctggacttctggtgacagcagtacagcactttctgcaagggccattcccagactgcagtgtcctgcaagaaccatcccggggggtgcatcgaccgtcttgttcagctcctcgagcttcttcatacgcatcctctcactttcgctcaccagctcaattagcctgtttacaagcagtgccttctccttgttcttctcgttgtacgcctccaggatttctttgtattccttctccttcttgacgcaggttttgccgagaggcttgagctgacggttcaccacgtcgatcctcttcctgatcacctccacctccttcctggttggatccgccatcccttccagttcctgtcggatgaaggcaaggcgcttggactcctcctcgacgcggccgagctgcgcgaacaccttctccctcacctccatcttcttcctctcgatctgctcctccttggccttgaacaccgacagcgccgacctcgacgacgcctcgccggcctcctcctccccgccgccgccgccgccgcccagcgacgacgggtgcttcacccgcagcaccatctgcatcggctgatccacctcccccccccgccacgatcctgtccctctctgccccccgtcccggcttcccgccgcggatgcttgcttcagtttttccctcttcatcttcttcttcgagactggcttctttttgcgaggaggaagcgtcttctgagcgtacacatagagagcgtagttcccgacaaagaaaagcagcaggaaggtcgcgaccacaatcaggactatcattccagggttcagtcccttgttgacctcctcaatgactacattgttcgcagagtccgcgaactgatccgccatggctgaccgggaccaaacaccccacgcgtattctcctcctatctcgttgccggccatagtccacagcgccgacgtcgtcgcatgcaaccgccgtcgcccgccgcggcctccgccgccgtccgcaccgtcgccggcagcggcctccgccgccat

SEQ ID NO: 3046 - DNA, 529 bp, Oryza sativa
  Clone ID: PAT_MRT4530_102765C.1
ccccgacaccgtcgcctaccacacgtgcatcctcgccgccgcgctcggcagcgaggagagggcgaagaaggcgttgctgtacagctaccgggcggtcgccagcgggttcgccgccaagctcacgccgccggagctctccgccctgcagaagcatcctgcagttcttcaggtgcgacctgatcagatgtatcatgctgtggacaacctcaactgaaagcttcttccctttgtgagaccacgagagagagagagagagagagagagagagagagagaggatgataccaagtatagtgcaatactgaaatgttcttcatgcttctccgatgttggtgattatgctaatcgaccatctaattaggcagtaaagaaggctataggctctgttgtgaaagagtttcatgttattctttattgatcttctctactatacatacatcgaaatatatacagccaatgtattactaattgagggaataacaattacttacaatgttcctgctaattcctaaaaaaaaaaaaaaaaaaaa

SEQ ID NO: 3047 - DNA, 1362 bp, Oryza sativa
  Clone ID: PAT_MRT4530_102766C.1
tccccgtcagggtcttcacgaagatctgcatcttggccggcggccgccccttttttttttttttttagacaacgcaacaaacacccaagccaattaattaactgagagaagaggcgaaaaaaaagagagagaccccctttctcttttgttttacaagcaacatgaacgggtcacgtgaacatttcacaaatccatggcactgagattacagagaggaattatatgcctctaggggataacattatctggcgcctagtagagtgaatcgaccgtcttgttcagctcctcgagcttcttcatacgcatcctctcactttcgctcaccagctcaattagcctgtttacaagcagtgccttctccttgttcttctcgttgtacgcctccaggatttctttgtattccttctccttcttgacgcaggttttgccgagaggcttgagctgacggttcaccacgtcgatcctcttcctgatcacctccacctccttcctggttggatccgccatcccttccagttcctgtcggatgaaggcaaggcgcttggactcctcctcgacgcggccgaattgcgcgaccttaaaatccctcacatccctatagatcaattcgggctaaggttcaaccgtttgctgaaataagttgtccaataacggagaatcactatataaagcttatacagaacatagtaactgtaagcactgcggttccagctgatatatatcctgttttctaacaagcgaagagggtcgtctgaatcaaatcagcaacatcataactggtggctctcttcactctcctggggcagagacaccttgcttcagtttttccctcttcatcttcttcttcgagactggcttctttttgcgaggaggaagcgtcttctgagcgtacacatagagagcgtagttcccgacaaagaaaagcagcaggaaggtcgcgaccacaatcaggactatcattccagggttcagtcccttgttgacctcctcaatgactacattgttcgcagagtccgcgaactgatccgccatggctgaccgggaccaaacacctgcaactctctccttttttagatattttatttagcctacggcagctgctgcactattccgctgttcgtggccgatcgatcgtcgggtctcgccctcccgcttacgggattcggttaaggagttcgatgatctgataggattggaaggtgcgagtgaggaatactactgaaatttttgggggagttctgagagacggcaggacgaggattcgagcgaggaggaggggatcgaaggggaagacaacaatcccggccggggcccctcccggctgctgctcaccctcgtgcgggagttctgagaacctcgtgc

SEQ ID NO: 3048 - DNA, 3547 bp, Oryza sativa
  Clone ID: PAT_MRT4530_102767C.1
tcatgagtgatgttcttcctcgttagaagatcctgttttcgttgatgttgtttgaggaacagtcggatggctgtacttcttgaagacccgctcttggttttcccgccaccattcttcagcctgattctctgcaaatttcttcttgctgaaccggacccgcttgaatactttgctaccatccttcagctggataagtgtgacatatacaccaggttcaaactgctcaattaattgaacttctccatgagtatcatgcttcggtacaaaatcgttaggaacctttgcgtggtgttccatgccacgatgggaagggggttcacttgtaagtgaaatggcagagccacttgcagaactggcatcttgtgacatgaacaagtagcgtgtacttcctgacctatgattggaaaaatcatgtaatgcatttccaccactagacagttgaataccatcatgatccataggatttagaagctcagaaggatgacttctttgctccctcagcagtgcctgcacctgattttgtaaggctttcaagctttctgctgcatcgctgggcagttcatgcactataccattgagctcgttatcaagaaatttaacaaactcgaccacagcactgcatctagtatattcttccgtggccatagagacaactgttttagttttcttatctgatatctgaagctgctcgtgttgggcctcgcacttttgttttaagctatcaacctctgtatacttgactgattccgctggtgctgttgtcctggaaggccttatttctggcctctcaagcttctctctcccatcaatagagcgacgagtaacagcatttcttctgttagaattgttgctgccggtctctgcggctttcaattttagaaagcatgaatcacacacacgatgtggcttgcctggagttggtgctagagcagccttcaacacttttcttgaactgcaagcatgacaatgaaccagcccacagttgtagcaatcatgtctctttctagtgaaaccaaatgcttgcctgcaacccgtgcagacagattgatctgcacctgatacccacttatgtatgcaaatacatgttgtgaaatttgaaccacatgatatactcttgacatgccgatctttaagtgcttcaacaagacatggcttcttcctgtccttgagatcgccatgaccaagtcttccattggcacccattccccatgtatatacttcacttcttgaagtcaaaactgtaacatgagaagctccacatgaaatctcttcaaccaactcactagccaatctatcttgaactaagcaaggctgcttgccatcagattttggatttccaagctggccattgctggaactacccatggtaaacacacgaccagatgtagctagggcaacagtcatattatgtccacaagccagctgatgaaaattgtactctaaaagcgcttgaacacatttaggaactaacctaggctctttgtccccatggccaaggcggttcttatctccatcaccccaggtatataacttcttagacatcacatttgcacctgtctgattagtaacctccacaattgctgcagaatgccaaattccacatgcaactttgatcgttttgaatccactcaaggcttctacctcttttgggtatgctaaagtttcacggtcaccatgtccaagaacaccaaatgttccatcaccaaatgtgtaaagttttccacttgatgtggtcaaagcagaatgccatgagccacatgcaacagatagaacttgaagaccttctaagggccctgagactttctttggaagccagtagctaacttcagtgccacacccaagcagtccgacattgtaagaaccatccccccaattgaatagatcaccggaagtagtcacagcacaagtatggaattctccacatgaaataagatcaactacggttagtgataaagactcgacaagcttggggcgactaatatcagcatcagttccgtgacctaggcgcccaccaaattcctcaccccacgtaaacacctctccttgcctggtagtaagagctacatgtctcgtaccacatgctatctgattaacatctaacacgacatcagattctaaaggtttggggatcaaaacatctacttttgagcatgaagagcttgtgtgcccatctgatggggttacatcagtccatacttcaccccagacataaacatcaccaagggattctatgtcatctgttccagaaccttgactgtaagaactaagggcactagaaatactaacccggctactgtctgcagcacttgttcttatcatatttagacgatcaaatcccacatctgattttctgaaactaaatgaattggttccacagtaaccagctgagttaaaactgcgtgaaatatttgaagcaatatctagtgttgaatcataggaatggcgatcttgataataagttacttcggtattatggtatttgtgcgttatatgcatatctacgatgcttgagtcattttttccttctaaaatggtaactgtatagcaaaattcagaaaatgatactctatccttgtgttcgttaatcaaagattttttgcggaatgaacttattaacccctcaagtgctgaaaaccagacttcaacttcagcttgatccttacaaaccagatcaagtgagcgttgcccgtttttaaatatgagggaaaatgataaataatccttctcagggtgtaaaaacctcccaaacacagcagttctctgtccaggaatgatcttagtgacagaagacagtctgaggaacttttcctttttgtgagaaaaccaaattaaagatgtttcatcgctagaaagtctgaacgcacggatcttgggttttcctctccggctatacttgatgagtttagtacctttctttaaagtaataagggcataaatgaagaaatctcgcagcagcaacccatacaatgcaaaactggcgctcatcaagaacgtagagagtgacagatagaacggcatgaactccacagactctgaccgaatcacaactcccatgacagctaacggagaagcgaacatggagatcagcgaagccatgctcacagctcccacaaactgctgccgaagcggttgatcaaagaaaaagacgctcgcatgtgaaactagcgcaaacccgcaaactaccagcaccaagagccctatgatcttcatcctcgtcttcctgctgtccgcgtagaagatgaagaggcaaatgtaggcgagctggaacaccgctccaatgccgttgacggtagcgacgagcagcctgccatcggcgacccagggaagtccataccacaggcagatgaggcaattcagcagcgagaacaggtaagggagcccgtcgaatcgctcggtcgatttggccttcaggatcctcttaaacgtcgtcactggcgacaggaagagagcaagcgcaaagatgttgcctgcaagaccagcagcaaagcaggagatatcatacaaggagtccatagattgcagcttcagcatttcttgattaagagaa

SEQ ID NO: 3049 - DNA, 1820 bp, Oryza sativa
  Clone ID: PAT_MRT4530_102768C.1
cgggctgcaggtcgagggcgcagacaggagggaaggtcgacgagaggggagccagagcgctggctggatcggccagtgggatccgttgccgcctcctgctccggccagtggaatccgcggcgggctccccctcctgcttccagcttgcgcgggcggggggccgaatggcgccaagcgagcgccggggggcaggcgctcctcttcctccgaacaatccgccggctccccctttctcgctgctgtttttttagctcgtgcctgtctggtccggccagccctgcgttcccgtttctaaattaatttttttcccccttcttctctcttcctctttccgctgccgtaaagaggaagggaaagaggggaagagcacgccgtggaggaggaggaacgggagcaatccttggagagagtaccatagcgctctccccctccttcctcgtatcggtccgttcgtgaggagagcgccgccgctcgccagattgggcatgtcggccttgtaccttgctcgcggtgcttccaaggtggtcaggagaatcacctcggagacgtcggtcgagctcaagattctcactgagaaatggcaactcctactcgcgggcctcgtcttccagtacattcatggtttggctgctcgtggggtccattatctgcaccggccagggcctaccctccaagatcttggattcatgattcttcccgagcttgggaaagaaaggggctacatcagtgagacgctgtttactttcatcttcctctcctttgttctgtggacatttcatcctttcatccttcaaaccaagcgcttctacactgttcttatttggcgtagagttcttgccttcttatgtgcttctcaattcttacggatagtcacattctattccacacaacttccagggcccaactatcattgccgtgagggctcagctcttgccagattaccacatcctcaaaatgtagcagaggtggcttctcattaatttcccaagaggagtaatttacgggtgcggtgacttgatattttcatcccacatgattttcactatagtcttcgttgtaacataccagaaatatggaaatataaggtttataaagatgcttgcatggtgcatagctattgctcagagtcttcttatcatagccctctcgcaagcattacagtgttgatgttgttgttgcatggtatacggtaaacttggttgttttctttgtggacaagaagcttacagaacttcctgaccgatcagctggatcaacatctgtactacctgtgagcataaaggagaaagacagcaagttgaaagaggataagactagaatgttgaatggtaactctgttgattctgctgattggagaccatggacacaaatgaatgggaagcacattgagaatgggaaccatcttgataccgaaacaacaaaaacatgatgttttatgctgttggatcaatgtttgctattgtaatgctttatcccaaaggtctagggagtatacgtcgaatggcatctaaaatctttcatacctagaaatgtgatggcttcagtcctatagttcagaaggaagaggaattggtgccctgtgaattggttctatcctgtagaagtttttttttcctacgcattatctcactgttttttgatagcatcagccctttctctttttcttttttggttccctaatctttcaacatgtaattagattatgcattatagaaaatgtctattgttttgaattcattcagattctttgccaagtgtaattacctggaaaagcttaccctggccccctgaaattggaagtcccattaaccttttgattt

SEQ ID NO: 3050 - DNA, 675 bp, Oryza sativa
  Clone ID: PAT_MRT4530_102769C.1
atgcccttaagtcggttataccaaactgagttggttgagtcattccgacgtcggcgtcgggatgcggccgtggtgcgctgcgcagataatggggagaacgatgcgggcgtggagcgggtgggtgacgacgacaaggtcttgaagcggaggggcaccatcctgcccgtcggccgttacggctccggtggtgacgcggcgagagtgcgcagggcgaccgcaccggcgccggcgccgacacaggacgccgcctccagcaagaacggagcgcttctcagctgcggcgacgacgacacacctgtctcacggaacggatcggtcgttaccagcatagacaaacctgccaccgccgccgcctccacgccgcttgtgaccataccgaagcttccagcgccggactccctcgtgatccttccatccgtagacaggccgcagccagaattcatcatcccagacgcggcgtatctaggagctccagcgccgccgctctcctctccttgccggtggccgcgagtagcgtcgacaggggcacggcagtggcaaggctgtcacgctgcgtggctatctcccgtcgcgccgctctcctcctccttgtcggctgccgtcgctctcctcctcctcgtcggcggccgttgggctaggagctcctgcggggtcttcgccatcggatttttctag

SEQ ID NO: 3051 - DNA, 418 bp, Oryza sativa
  Clone ID: PAT_MRT4530_10276C.1
acgaggtgtaattaagatgaagattacaagcacggcgatgctggcgccggtgtacggcacgccgcacccgctcgccggcgcggaggtccagctcaccgtgttcgaccgggcggcgttcgacctgtacgtacccagcgtgctcgcgtaccgggcgccggcgccgtcgaacgaggcgatcaaggagggcctcctcagggccgtcgcggcgtaccctcacctcgccggccgcctcgccgtcgaccaccacggccgccgcttcctccacgtgaacgaccagggcgtgctcgtcgtcgaggccaccgtcgacggcgccgacctagacgacgtgctcgccaacagcggccgcgccatggccaccgacgtcgccgacctctaccccgcgttgccggaggacaacgtcggcgccgcgctgctgcag

SEQ ID NO: 3052 - DNA, 293 bp, Oryza sativa
  Clone ID: PAT_MRT4530_102770C.1
cactccttatcctagagcaagaagctcatctcgggggggtctcacatggaaagcgtgggcaccaccacatccagcctgctgaagacctacttagctggcgcgcgcctccccgtcgtcgactcgaaccccaccgaattcgtcgagccgcgcaccggcagagccatctgcaactccatctcttaggatgacctcactcccccctacgacctcaacagccatcaggttcagccccatcaacgagttcatcgtgtcccgcgagaggacccggcggttcatgaccgacatgatcacct

SEQ ID NO: 3053 - DNA, 339 bp, Oryza sativa
  Clone ID: PAT_MRT4530_102771C.1
aaaccccaaggagaagggagcatttcagggacaatttttttttggaaacaaggatgctccaatatattattgcaaaaacggcaccaagggcgtttctattattcataggggaggggggagtaacaaggggagacagagccccaaccacccaccaaattccactgaactcccccccaactaaatcaaactaaaaaactcccaaattcaatcgaccttacttttttaaggaaaaagagcagggcctaggaatgcaaagcatcctaaaaaatctctcttcttttttcatctctgaacccagagaatggaaacaaaacaaaaaaactccaatgctctcctttt

SEQ ID NO: 3054 - DNA, 510 bp, Oryza sativa
  Clone ID: PAT_MRT4530_102772C.1
cgagaggagacgtggctgcgggggcggcgcctggtgtatggtgtgactcggatacaatggcgacaggacgctctctcctctggcagctgtctccttcggtggccaccttctcccaccggtgagttcctcaccttcccctctcccctcctcttctagggttaggatttctcggacgcgcgcgctgctgctgcggcggtgatggcgcatggcgatggcaggtgtggtgagggacaccggcgcatcacaccctctcgccatggccgttgaagcttcgccgctgctgcaaggagaagcaggaggacacggtttcttgatgtgttcttgatttctgccactgtttcttttatcttttagttcatgttctaggttaatgttgtagaataaacatatcacagctacaccacgtgcacatcatttgtccccctcccccatcttatggtcctacatacacattgactatttctacaatatatttatcgttttattaaaaaaaaaaaaaaaaaaaaaaaa

SEQ ID NO: 3055 - DNA, 184 bp, Oryza sativa
  Clone ID: PAT_MRT4530_102773C.1
atgacggtgccaatgacattggcgtcgtccccctacctccggcaagggatactcggcgctgaccaacttcatataactgacagcttcggaaggggtgacgagagggaaggcaccatggtcatggacgccataatgttagactatggcgccaattatgctggcgctgcttcattgtgtacgaagg

SEQ ID NO: 3056 - DNA, 390 bp, Oryza sativa
  Clone ID: PAT_MRT4530_102774C.1
gccaacacgatctcctcctcctccctcctcgtcgcaggatttgccaataaatagcaagagagatcgatagattagatcgaagtagaacagcggagaagaaggagagtaggagcgacggcgaccgcgcggagttgattcgattccgggtgtcgccgccgctggccatggggataacgctcgagatgaaccgggtcatgcccacccggcggaggcggcagcgccgtcgccgccggcgaaaccgacaccgctatagatcaattgcttaaattgggtaaaagggaaattcttcaccctcccaacaagatgatgattctcaggggttcttaaaagaattgaaaaattcaggggatgtttgcttttcaaaggacatcttggccgccgtattacatt

SEQ ID NO: 3057 - DNA, 137 bp, Oryza sativa
  unsure (1)..(137): unsure at all n locations
  Clone ID: PAT_MRT4530_102775C.1
cgccgtggtgaagcacagcctccccggncgccttcgacctcgaccagctcaacaagctcttcgccgccccttgaactggtacagccnnnggacgaacttgccgatgcgtcaccctatcgtgtgccctcctgacgagt

SEQ ID NO: 3058 - DNA, 614 bp, Oryza sativa
  Clone ID: PAT_MRT4530_102776C.1
cccgggctgcaggaatcggcacgaggcgtcattccttcctttcctttccttccccgcgccgccgtccccgcccgccgcgcaaacttcctctctctctctcttctcggcgcgaatccagaaccttctagaaggagagggagaggagaggagggcccccgcccccacgggtcgccatggccgacgcgtactggaggtacgccgccgccgccgacgccgcgcgccaccaccaccaccaccagctgcccctctccgccgcccccgccgccgggatgcccgccccgccgcctgctgcttctcaggtcgccgccgccgggcagccgctcaagcggccccgccccgccgacttctccgatgtacctggtgctcctgaaatggctggctattactctcgtgatgaagaaaggccagggtatcgtcctgcaagagacactgaggctcttaacgcttcctatgaacgttttctgcgcactgggcaaattcaatcctatggagctggagctggagctggacctggtgctgaatctattaggcctgcggcaggtggcaatgctggatacccagttgaggatcgtccaatgatggctggtgggggcatggaagccagaaatattggc

SEQ ID NO: 3059 - DNA, 1220 bp, Oryza sativa
  Clone ID: PAT_MRT4530_102777C.1
agtgacacttcattttttttctccatcatctcatactgatgactaaaattaacattacactggttcggagtataaatatgcttatgagatctatttgactatactgttagatgcttgctggtacatttgacaggccaaaattttaaaataatgcccagcacagctgggagtaaatgtaacaaaggaaaagagtattgtgcatgttaaccatgccaacggcaaaatgtacatcatgattcatgtacgcattattccaatacttcaaattatcagccgatgctttgaagaaaatgaagaactagtcctcaattaaccacatcaaggaccagcttgcgcgacttgtagacggaccacttcatgcgccggtaatatgcagcttgcagaagtgcgagggagagtagaaaaatccatttcactcccatcagttttctctcttccatctcaggctccgccgcccatgacaagaacgagacaacatcttttcccatctgggcttctgtagctggagtgccatcttcatactcgactgctccatcaataagcatcttgggcatggctatggcaccaccagggaagtagggattgtaatgcaagccttcacgaatcgaaacaccagcaggtggatcacgataaccagtgagaagagcaaaaacatagttctggccattgtgcctggcctttgtgattagactgagatccggggggtatgccccgccatttgaaaatcgagctgcttgctcatttgcgtagggttgtgggaaacggtcgctcagcttacctggacgtgtgaacatttcaccttcatcattaggaccgtcaaccacttcaatctcagcagccattgcttttgtttcctcttctgtataggccacaccaaccaaatctcggtatgaaatcaaggacattgagtgacaagaggcacacacttgtgtataaacttgatggccacgccttattgatgcatgatcatatgagctaaggatgccagcatgtggccagggatagtgtggggcttccaacccatgctccgcttcatcagcagatgcaattgtagcaaaacttaaaaggccagaagcaccaactcccagaatagccaatgctctcaatccagtgaagccagaggactcttcatgatttatccaggatgaagagagcggagatgagctagatggacgaaatgctttcttcaaaagctgactgatgcccctcccagcagccat

SEQ ID NO: 3060 - DNA, 690 bp, Oryza sativa
  Clone ID: PAT_MRT4530_102778C.1
atggcaagggtctactcctcttttcctccgccaccgccgtcgccgccgccgccgtcgacgacgagcgagcagaggaaggtgttcacgctgtggatgaagtcgctggtgctcaacggccgcggctgcaccgtctacgactccaccggcggcatcgtctaccgcgtcgacaactacggctccagctgcagcgacaatgtctacctcatggacctccgcggcaagatcgtcctgaacatactcaagaagaagcttgcattcggcaagtgggaagggtacaaatggagcagcggcgagaggcaacgagacgctgccgccggtgcaggagcaggaggggcgtggttcacggtgacgcggccgtgcagcagcatcctgttccagcggaggcgccggccgtcgtcgacgtgcgagttccggagcggcggcggcggcggcgacgacggcgggcgcgccatgcggtacaagatggacgactgcagcggcggcggcggcggcggaggtaagcagcaggcgtggtgcaggatcgtcgacggcgccaccggcgccgtggtggcggaggtgaaggggaagacgacggcgggcggcgtggcgctgggagacgacgtgctgacgctgacggtggagcccaacgtcgaccacgcgctcatcatggggatggtgctcgtctacggcctcatgaaccacaccatgtga

SEQ ID NO: 3061 - DNA, 2849 bp, Oryza sativa
  Clone ID: PAT_MRT4530_102779C.1
atggcgtcctcccatcaccaagaagtacaagagcaaggccatggagatggagaggaagaggaacaagataatagccaaatcacctctccactgttgcgatcctcaatgcggctcggctcgccggaggagaactcgccggtggagcaggtggcgctgacggtgccggtgggggacgacccggcgacgccggtgctgacgttccggatatgggtgctgggcacggcgtcctgcgtcgtgctgtccttcctcaacaccttcttctggtaccgcaaggagccgctcaccgtcacggccatctcggcgcagatcgccgtcgtgccgctcggccgcctcatggccgccgcgctgccggagcgcgtcttcttccgtggccggccgtgggaattcaccctcaaccctggcccgttcaacgtcaaggagcacgtgctcatcaccatcttcgccaacgccggtgccggttccgtcttcgccattaacgtcatcaccgccgtccgagtcttctacgggaagcgcatctccttcttcgtctccctcctcgtcgtcctcaccagccaggtgctgggattcgggtgggcgggaatattccggcggtatctggtggagccggcggcgatgtggtggccgtccaacctcgtgcaggtctccctcttcagggcacttcatgaaaaggaacggaggagcaaaggcggcatgacacgcacccagttcttcttggtagcatttgtgtgcagctttgcctactacattttcccaggctacctattccagatgctcacttccctctcctggatttgttggatctttcccaaatctgtgctcgcacaacagcttggatcaggtctccatggccttggcattggtgcaattggactcgactggtcatccatctcgtcatatctcggaagcccactggctagcccatggtttgccactgccaacattgctgccggcttcttcatctacatttatgtaatcacaccaatcgcctactggattaatctctacaaggcacaaaacttccctatcttttcagatggccttttcacagtgactggacagaagtacaacatctctaccattatagactcacagtttcattttgatacaaaagcctatgagaagaatggaccattatacatcagcaccttcttttctatcagctatggtcttggttttgcatgtcttactgcaacagttgtccacgttcttcttttccatggaagatacacagataaatttgtgacacctgtgtccagtgaaatttggcagctaagcagatcagcttttcaagataaaaagatggacatacatacaaagcttatgaagaggtacaaacaggttcctgaatggtggttcatctccatccttatagccagtgttgcaatcaccatgttcacttgtgagtattacatagaacaattgcagttaccctggtggggggtactacttgcatgtgcccttgcaattttcttcacccttccaattggaatcgtcacagcaacgacaaaccagactccaggcttgaatatcatcacggaatacatcatggggtacttgtatcctggacgacctgtcgcaaacatgtgcttcaaggtatatggttacattggcccacagcaagccctagcattcctacaagattttaagctgggacactacatgaagattccaccaaggaccatgtttatggctcaggtggtgggcactttgatagcagcatttgtgtaccttggaacagcatggtggctcatggatacaatccctaacatatgcaacaccgagctcctccccccaggcagcccttggacctgcccttatgatcatttattctatgatgcatcagtcatatggggccttattggcccacgcagaatatttggtgatttaggcacttattctgctgtcaactggttcttcttggggggtgccattgctcccctcctcgtctggtttgcacacaaggcattcccaggtcagaaatggatcctacttgtcaacatgcctgtgctgatcgccggaatcagccagatgcctcctgccacttcagtcaactacacggcatggatatttgtagcatttttgtcaggttatgtggtctataagtaccgtcgtgactggtgggagagacacaattatctactttcaggtgcccttgatgctggtttggcattcatggctgtcttgctatatttatgcctaggactagagaaaatcagtttgaactggtggggtaatgatttggatggttgtccattagcttcttgccccattgcggaaggtataactgtacaggggtgtccagtggcaagtgcatagttgtatgtcagtcctggggagaatttggacactcttaaggagcatgtaggggccaacgtaaataggataaacactgtttttttcccagaccatgtaaagatgagaaattggtgttgtattattgtattccttgagttttcagaattgtaatggaagttttgaaaggtacttatttgggtcaccaaacccattgttattcaacactggaaaccaaatgtagcatacttgcgcgaaaaaaagatgaacttaaattgccgagggccaacacacaaactgagacctctggtgccttggcctccaagaaaatagttaaagcctgaacatgattccacttacctgtaaaggtaacatcaggatcaccttagcctttaatcatcacaagaaccttgcaggaaaaagtaagaaattcagatgttacttttgctttgagggaaaatgaaacaatacggtcagcatgtaatcctgtctgaaacatggataatataaactgcattatatattgtttcattggaagtaaaaaaaacctcgtgccg

SEQ ID NO: 3062 - DNA, 369 bp, Oryza sativa
  Clone ID: PAT_MRT4530_10277C.1
ttaggcctgtccgaggttaatgagagcaacatcgtgaccatcactccagacaagctgacaccgttgatccaacccagcagcagccgattcagcaaacaacgccaaggcagcaggttgtgcaaccgattcaacaaacacccccaatccaacaggttgtgcaaccagctcagcatatgccacacagacggcaggttttgcagccaattcaatagacgccacaggggggcaatttgaattatcagtaacagccgccatcaccgcaagttcaataccagcaggcaggatcggctcaaccccagtttgttcctcaatacaatcaatttgagcccatgccacagcaacctcaaggagcaccttagcaacaaccat

SEQ ID NO: 3063 - DNA, 505 bp, Oryza sativa
  Clone ID: PAT_MRT4530_102780C.1
ctggggccatagtggtatggctagctaaactgcctatatttgatatgagtggaagtgtggagcgtgcaacttgctatgtgaggcaaacctcgctaggctgttgacactgtgtgatggctgtgcgctgggctgcagtgataggttggtggtgggaatgtggtgagcggatgaacaatttctacacagggaaacagctgatggaccatggatgtgaacgcgcagaagctgctgagatgacggagctgcagctgatgagggaaagtctgggtgacgccttgcaggtgacctgtgcctggaattgcccggtgcagacccacgctgcctggctacccttttatagggacagtgatgactgacatggcaccctgatggctgatggtgaactgatgctatgatgatggatgacgtgagaatgaagtggggtgtttgatggtgctgaaatgtggttgatgcatggcatggatgatggtgaaagccgtgatgttattggaaaaaaaaaaaaaaa

SEQ ID NO: 3064 - DNA, 973 bp, Oryza sativa
  unsure (1)..(973): unsure at all n locations
  Clone ID: PAT_MRT4530_102781C.1
aattcggcacgagcgacttctccagcagctacctgctcggggagggcggcttcggcgccgtncacaagngcttcgtcgacgccggcatgcgccccggcctcctgccccagcccgtcgccgtcaagcagctcgacatcgccggcctccagggccaccgggagtggctggcggaggtgatcttcttggggcagttccggcacccgcacctggtgaagctgctgggctactgctgcgaggacgaggagcgcctcctcgtctacgagttcatgccgcccggccgcctcgggaaccacctcttcaagaggatatcggcgacggtgccgtggggcacgcgtctgaagatcgccatcggcgccgccaagggcctcgccttcctccacggcgcctccacccccgtcatctaccgcgacttcaaggcctccaacatcctcctcgactcggagttcacggcngaactgtcggacttcgggctggcgaagatggggccggagggttcggagactcacgtgacgacgcgggtgatgggcacgcacgggtacgcggcgccggagtacgtgatgacggggcacctcaacatcaagagcgacgtgtacagctacggcgtcgtgctcctggagctcctgacggggcggcgcgccatggagcatgtcagggggaggagcctccacgccgaccaggtggtcaagatcgtcgactggacccgcccctacctcggcagcagccgccgcctccgctgcatcatggacccgcgcctcgccggccactactccgtcaaggccgcccgcgccgtcgcccacctcgccgtccagtgcaccagcccgcagccgcgcgaccgcccgcgcatggccgccgtcgtcgacgccctcgagcgcctgcagggcttcaaggacatggccgtcaccgtcggcctctggcccaccaacgcccccgtcgccggcaggaacgccatctccgccaagattcgctgcgaggt

SEQ ID NO: 3065 - DNA, 556 bp, Oryza sativa
  Clone ID: PAT_MRT4530_102782C.1
tcaccagtaaggcatgccaaatacaagttgctgctgctgcacaccagtttgtaatttgccttgcaaatattgtagctggttttggtggttgtgccaattcatcatcatcatcagcgcgtcgtccgtgctccggtccggcggcgaagacgtcgtcgtagccgcgtccttcttctccgactccgacgtgcatgccgccgctactggtgctagcaacgtgcagctggtgggcggcgaggaggaggaccggcctggtgccgacggcggcgtggagggcgaggatgaggcggtcgtcgtggtcggagaaggcgccgtggcggatgccggggcggaggtagttgagccagcggaggcggcagctcttgccgcagcggcggaggccatccagttgccgccggtgccgtgctgctggatgtacgaccgcagccgctcgtcgtcctccgccgtccatgccccgcgcttcggcttcaccgccgccttgtcgcagcacgccgacgacctccccatcgctcgctcgctcgatcgaaagggagatgcgagagtggccaggataatataa

SEQ ID NO: 3066 - DNA, 1169 bp, Oryza sativa
  Clone ID: PAT_MRT4530_102783C.1
atcccgcacgaggtccgccgcaaatcaaggtcggaatccatggcgtctcacgaccacgaccacgaccaccaccaccaccacagccacgacgacggcgaccaccaccattcccaccaccaggacggcagccatggcggcggcggcggctcgtgggtcggggaggacgggcgcgtgtggcactcgcacgacggcctcgcgccgcactcccacgagcccatctactcccccggcgacttctccaagcgcgcgccgccgctcatctcgcggcgcttcgcggaacgcgccttcaccgtcggcatcggtggccccgtcggcactgggaaaactgccctgatgctagcactttgcaggtccctgcgtgaaaaatatagtctcgcagcggttacaaatgatatattcacaaaagaggatggagaattcttgatcaaacatggagcactgcctgaagagcgcatccgtgcagtcgaaactggaggctgccctcacgctgcaatacgtgaggacatcagcataaatctaggtcctctggaagaactatcaaacttgtgcaaagctgatttactcctctgtgaatctggaggagataacttggctgccaacttcagcagggaactggcagactacataatctacatcatcgatgtttctggtggggacaaaataccaagaaaaggtggccctgggataacccaagcagatcttttgataataaacaagacagaccttgcaccagcagttggagctgacctggctgtaatggaacgagatgcgcttcgcatgcgggaaggagggccttttgtctttgcacaggtgaaacatggagtcggcgtggaggaaattgtgaaccacatcctgcaagcttgggagatcgccaccggcaacaagcgtcgatagcctgcaggattcttgggcacgagatgttgttgcgctcgcgcgtgtaatcatgtactactccagtatttctgctttcctgaataaactgcatcttttggtggctcggtgttgctgaaagatgctagcatacaagcctccgagacttgtctagctgacagtcgagtccataatctagttctgaatgacaaagtgagaggtctaaactatacctcgaaaaattggtcatgggaatgctattgtcagctaaaaaaaaaaaaaaaaaaaaaaaaaaaaaa

SEQ ID NO: 3067 - DNA, 224 bp, Oryza sativa
  unsure (1)..(224): unsure at all n locations
  Clone ID: PAT_MRT4530_102784C.1
gaaggaaccaagctggancgaccccaaaaattggggtaantctccaatgcttgggatcgcttccaaatttgttaagtccaagaagggtcttgatatcaccaaagggttaaattgatcccatggatgtcgcatttggttggttatgtctgtactctagccatatgagtggagattttgcacacaacggaaaaccttttcatcctnaaaaaaaaaaaaaaaaaaaa

SEQ ID NO: 3068 - DNA, 780 bp, Oryza sativa
  Clone ID: PAT_MRT4530_102785C.1
ctctggcgtgagagcatttcctcacccatgtctcaagattcagttgatggacctcaagtttctgggtgcagtgccacgagtcttggtcagcccaagagtaagcgcaggactggtgacaaggcaagaggggagaagaaggcactcaaagttaagattaaccttgccagcccggccaaaaaaattaagaaaagtagcaaaaagaagggcaaaaagggcactgttgctggcaggatagggagaaaatgcactctctcaagagattctaaagggcgctttcttccaagagagagtaaggggggagacatcggaggaaatgctacagagagtgaagttgattatgaccgcttcatgaactttcaggcacctgacttcgctaccatcttaagtattttgaaaggctggaaaggcatgaagcaatgtaacaagatcaggcgcctcaaggatcctgacttcgtccctctcatgaacgtcatgagcaacactggatatgtgaccgaggatgatggtcactatgatgtgctgaaagtcttgatgcatgcagatggctggtctgcatagtgattcaagctctcaaatcaaaacattcaggcctatggccttgttgctagaacagtggtttcttctttcacctttaaaacttgatggactttgttccatttatcttagaaattttgttgcccttgagtccggtggatatgtactggagtatgctatactgggtgatttaatggtgataatgttaaatcttgatactaaaaaaaaaaaaaaaaaaaaaaaaaa

SEQ ID NO: 3069 - DNA, 124 bp, Oryza sativa
  Clone ID: PAT_MRT4530_102786C.1
ttacatgttacttgaacttcctctaaaagccggtcccagattctcatgggagaattcatattaccgaggtatatgatgatgatctccaatgaaagcccccccagagaaccctaaaacgggcgaa

SEQ ID NO: 3070 - DNA, 588 bp, Oryza sativa
  Clone ID: PAT_MRT4530_102787C.1
atggaggataaaccggtagagttgcctgaacacaccggagctggcctcgggcggtgctgcgagccggcggaggtggacgaggtcgtatcccgtggcgacgttcagtgcccgggggccgtggtgttcaacggcgatgtccatgttgatttccggccggattacatccccaccgtgttcgacaacttcagtgctaatgtttcagtggatggggacatcgtcaacttgggattatgggacactgctggcagactgaggctactgagctacaggggagcggatatatttgtgctggcattctcattgatcagcagagcaagctatgagaatgctctcaagaaggggatgccggagcttcgccggttcgcaccgaatgctccaattgttcttgttgggactaagttagatctacgtgaccacaaatcttaccttgcggaccatcctgctgcttcctcaattacgactgcacagaacatcaaggccctgtttgatactgccatcaaggtggtccttgagcctcctcggagaaggggggagacgacaatggcgaggaagaagacaaggcgaagcaccggctgctcgttaaagtaa

SEQ ID NO: 3071 - DNA, 504 bp, Oryza sativa
  Clone ID: PAT_MRT4530_102788C.1
ctcttccccccccccccccccccccccccccccccccccccccccccccccccccccccccccccccctctcttttccccccagaaaaacccgccccttttgttggtggccagaactaaggaccccggaatccttaaaacaaaaagttttcctcacccccaacattggaaattggtttccttcgaaaaaaaaatttcccttggggaaaaaacggatttttccaaaaactaaggctttttggcccctttttttttttttgtccagccccaaaatttgttggaaggaaggaaaaaacatgggccccccaccttttaaaaaggacggacatgttggcccccctaaaatccttcatccccaatgggaccaacataagggcaaaaatggccccaacaagaaaaaaccccccctggatggtttatttttgggccctcactttaccatggggagctttttttcaataagccgcactaaaactaaattgtttcccgtttttggttaacccca

SEQ ID NO: 3072 - DNA, 1407 bp, Oryza sativa
  Clone ID: PAT_MRT4530_102789C.1
ggtatccgggccgcaggcactgcggcacgtgggaactgttcagagaggaagcatgtgacacttccctctgtccctctctctctctctagcctccaaccatcgctgcaccaagaacccttctccccctccccccctccatgtttgctcccccctcttgcttgcctcccttcttctcgctggcgcagtcgtcgcccgccgctcatgggcgacccgggcgtcgcgggtcttcgggtgcggcgccgtcgggctccgcgtccacggaatgagttgcaggcgccgccggcacagcaggcacaagctgcccagcgaatctgctaccactgcttctgagattcctccggactaccttccaggggaggacaaatctactgtggctgcttgtttttgttggacagtgccgagcgggagaggaggcggtagtcctagtcctagtaggcaagatgagcggcgccaccaagttcatcaagtgcgtcaccgtcggcgacgccgccttcggcaagacctgcatgctcatctgctacaccagcaacaagttccccaccgattacatccccaccgtgttcgacaacttcagtgctaatgtttcagtggatgggaacatcgtcaacttgggattatgggacactgctggacaagaggattacagcaggctgaggccactgagctacaggggagcggatatatttgtgctggcattctcactgatcagcagagcaagctatgagaatgttctcaagaagtggatgccggagcttcgccggttcgcaccgaatgttccaattgttcttgttgggaccaagttagatctacgtgaccacagatcttaccttgcggaccatcctgctgcttccgcaattacgactgcacagggtgaagaacttagaaagcagataggcgccgcggcttacatcgaatgcagttcgaaaacacaacagaacatcaaggccgtgtttgatactgccatcaaggtggtccttcagcctcctcggagaaggggggagacgacgatggcaaggaagaagacaaggcgaagcaccggctgctcgttaaagaacttgatgtgtggcagtgcatgtgttgtttaggacctgtctgaattcttgaaggtgtgtaagcgttgtgtaatggcagagtgaatttgctgactgttctgctgcttccatttactactactaagctctttcgtgtgtttgaattactacatctagaactagagcatcaggctcatagactgacttcatatcaggtgtttgtatcattaatattattatgtaagaaggttgtggtttgtggaacaactaaatacaacaatgcaggctatgttgtagtatgctctgctactggtgtatgttataaatataaaattctgctaaaaaaaaaaaaaaaaaaaaaaaaaaaaaaaaaaaa

SEQ ID NO: 3073 - DNA, 240 bp, Oryza sativa
  Clone ID: PAT_MRT4530_10278C.1
atggcgcgtggagggcccgcggtctcgcgtgttggttttgcgagagcgtacggtgtcgcacaaccaatgtgcgagaccgcatgggctgctcgcgagactgcgtggatcgcagtcgcggccccagcgctctcgcatctctcttgcgcgagaccgcgcccaccggcactctcgctttcctctcatgctagatcgcgcatcgcagcagttgcggggcccaccggctcgctctcgcacttttag

SEQ ID NO: 3074 - DNA, 192 bp, Oryza sativa
  Clone ID: PAT_MRT4530_102790C.1
atggggaattatgccctcctgtcaaagccacgcttgtggccgctcctcccccatcggaacgacaccctcgccgctgccctcctgtccggagtcgggcagtggccggggatgggcggcatcggcgaacaggtggcaaccgacaatgatggtggtagccggcaaagaggcagcaataaccaactgccacggtag

SEQ ID NO: 3075 - DNA, 1115 bp, Oryza sativa
  Clone ID: PAT_MRT4530_102791C.1
tcaggttgggttgaacccatttttcagggtgtttggtttgaggacaggtgggatgggatgatccctaaaagagaatattcccttgagatccgggttgcccttgtccctcctctgccagttgagcaatgttctgtggttgctaccagtgatagctggtttgatgacactcagaacatccttcacctcatcaatctcttcaccagagatgtgattacagttgaagttcagttgcacaaagactggcttgttagtagcatgggtaaagcaccgagctccaacctctggagcatattcgtggtaacaaccttccttcagatcccagtgtccgcgcaaggtcgagcggtcgcgcggtctgatgccctcaatctgcgagaccatggcgaatcttgcgatctcgtggcaccgctttttatatcgtttcttagaaccacaggggcacatagcatttctacttatctgtccactcttttccagattagatctgccaacgtccagtggtgtagaacccattaggtttttcacctcattgaagttcttcggcaacggcttcccttcttctttgagctttactatcttcttctgagcctccttagcccatgtgtacttggccagtatgtgctccacatccgcaatcgtgcagttgcagtgcttggtggcaccgatcttgtcgctgttcttgagtttctcgccggtggggtcgatggtgccgaggtagcggaggacggcggagtgcttctcgaaggcgttgacgacggtggcctcgctgcaccgccccatcacgaagttcttgaacgtccccagcttcctcgccttctccatcgaatccgcgaactggagtagggtgaagttggcggaggggtcggtggcctcgtcgggcttcttgccggtgaaggtgctcttgatcttgtcgaaccagccgagggaggcgaggtgcggggtggagaagatgccgcgggaggcagtgaggagatggagcgaccggcgggacgccatggggtgggcggcgcgggaggctggcttgcccgctctccggtgggtcgccggcggcgaggtgtggtgtttcttgcggggtttccggcgtcggcgacgggaggaagggtcagagtcccggccgg

SEQ ID NO: 3076 - DNA, 315 bp, Oryza sativa
  Clone ID: PAT_MRT4530_102792C.1
cacgatggtacgaagccgaatcgaggcgaaacgggagtaatctgccctgccgggttctctgcggactgtcagcctttgacgctgtgagtctgtgacaagcactttttttttttagcaaaacagaccatgtcctgtgagatggtgacaaagcacaagtgttacacatttttccctttgtatatgtgcatgtaaattttgcattgtgaatgctatctcagtctgttttctgggtccttaaaaaaaaaaaaaaaagaaaaaaaaaattaaagaaaaaataaaaaaaaaaactcgagactagttctctctctctctctc

SEQ ID NO: 3077 - DNA, 2922 bp, Oryza sativa
  Clone ID: PAT_MRT4530_102793C.1
atgaggcagacgcgctcgctggcggcggcggcggccgttctggtggtgggtgtggtgctgcattgggtgggggtggtggacgcggcgacggcggcggagagggggatactgctggagttcaaggccgccgtgaccgacccgaacggcgcgctcgcgtcgtggacggcgggaggggacccctgcgtggacttcgccggggtgacgtgcgacccgtcgtcccgcgccgtgcagcgcctgcgcgtccacggcgcgggcatcgccgggaagctcaccccgtcgctggcgcggctggcgtcgctcgagtccgtctcgctcttcggcaacggcctctccggcggcatcccctccagcttcagcgcgctcggccccacgctccacaagctcaacctcagccgcaacgcgctctccggcgagatcccgccgttcctcggcgcgttcccgtggctccgcctgctcgacctctcctacaatgcgttctccggcgagatccccgcctcgctgttcgacccatgcctccgcctccggtacgtctccctcgcgcacaacgccctcacggggccagtcccgaccgccattaccaactgctcgcgcctcgccgggtttgacttctcctacaaccgcctctccggcgagctcccggatcagctctgcgcgccgccggaaattagctacatctccgtccgaagcaactcgctctccggcgccattgccggaaagctcaacgcttgccggagcattgacctgctcgacgtcgggagcaaccatttcgccggaccggcacctttcggccttcttggcctggtaaacatcacctacttcaacgtctcgtccaacgccttcgatggtgaaatccccaacattgcaacgtgcggcaccaagttctcctacttcgacgcctcagggaaccggctcactgggccggtgccggagagtgtggccaattgccgcagcctgagggttctggatttggggacgaatgctcttgctggagacataccaccaagcattgggaaattgaggtcgctttcagtgctcaggctcgcaggaaatgcaggcattgccggttcaatccctgccgagctcggaggaattgagatgcttgtcacactagatcttgctggtcttgctctcatcggagacatcccggtgtccctgagccaatgccagttcttgcttgagctgaatttgtctggcaaccaattgcaaggagtgatcccggacacgcttaacaacttgacttacctcaagttgctcgatcttcatcggaaccatcttgtaggggggattccagtgacacttgcacagctcacaaaccttgatcttctagacctctcagagaaccaactgactggaccaatcccctcagagcttgggaacctgtctaacctgacccatttcaatgtgtcctacaatggactctcgggcatgatccctgccttgccagttctacagagtttcggtagctccgccttcatgggtaacccattactatgtggacctccactgaacaatctgtgtggggctagccggagggcgaaacaattggctgtgtctgtcataattgtcatagtcgcagcagcgcttatacttattggagtttgcattgtttgtgctatgaacataaaggcttacatgaggaggagtaaagaggagcaagaggggaaggaggaggatgaggtgctggagtccgagagcacaccgatgcttgcatctcctggcagacaaggctcaaatgccattattggaaagttggtgcttttcagcaagagcttgccttcaaggtatgaagattgggaggcaggaactaaggcactgcttgacaaagactgccttgttggtggtgggtcagttggtacagtttacaaggccacctttgagaatggtttatccattgctgtgaagaagttggaaacactgggaagggtgagaagtcaggatgagtttgagcaggagatgggccagcttggtaaccttagccaccccaatctggttgcttttcagggttactactggtcatcatcaacgcaattgattctgtcagagttcatggttaacgggagcttgtacgaccaccttcacgggagtcctcatacattttccggaagcagcagcagagttggtctctcctgggagcagaggttcaaggttgcactcggtacagcacgggcacttgcataccttcaccatgactgccgaccacaagtcctgcatctcaacatcaagtcctccaacataatgttagataaagactttgaggctaaattatctgattatggatttggaaagcttttgcctattctaggtagctatgaattgagtagattgcatgctgccattgggtacattgccccggagttagcatctccaagcttgagatatagtgataagagtgatgtatttagctttggtgtggtgttgcttgagattgtgacagggaggaaaccagtggagagccctggggtggcgacagcagtggttctgcgtgattatgttagggcgatattggaggatgggactgtgtcagactgctttgatcggagcatgaagggatttgttgaggctgaattagtccaagtgctcaaattaggtctggtatgcacttcgaacacaccatctgcccgaccaaacatggcagaggtggtacagtacctggagtctgttagaactaattcatgatctcctgacgtcacggtacagtagcagaataggatgttaaaacaggaaaaaacgttttctggtttttgaacagatgatcacattgtttttattctttattgtgtccccagtcacatttgtaaaatgtagatttgcatctgaataagtggttattttggtcaaattaccaaagcctgtgaggatttatctctgtttttttcgggtgctccctacaccctcttttctttctagtactgtggaaaatgc

SEQ ID NO: 3078 - DNA, 378 bp, Oryza sativa
  Clone ID: PAT_MRT4530_102794C.1
ccacacgcgccgtttgctcaatcaccacacgcgcacactacacgacgcactgatggagcgggcgtgcgcatcatggtgcacaccgccggcggggggctccccgggggcccagggcctcttcgttctttggcgggaggggcaggagagcatgcgcgagaccgacgcaaagcccaagccggcgcggtcggccgtgagcccgcgggacggcgccgaccgcgtactgtacctcgggccgctctgcggcgagccgccgagctaccttaccggcgagttcccgggcgactacgggtgggacaccgcggggctctccgccgacccggagacgttcgccaagaaccgggagctggaggtgatccactcccggtgggcgaagctggg

SEQ ID NO: 3079 - DNA, 480 bp, Oryza sativa
  Clone ID: PAT_MRT4530_102795C.1
acgcccacgcgtgcgcggacgcgtgggccggaggttaacaaggagatgctggcggacctcgaggcgatggggttcacgacggcgcgtgccactagggcacttcatttttctggtaatagcactattgaaggtgccattaactggctttccgagcaccaagaagatccagatattgacgaaccgcttctggtatgatgaatttatattttttgtgctgattaattgattatacctttatttgctttggtatgctggtgtgctaaattgccccttgctgaaaaaataatatgttttggatattaagcggatattttggtattattttcatcgggcttgtgtagtgctacactgaattgcactgtctgacctctgacattctatccatggagtgtcaggaatacccaaaacttctactatatttattcattatttgcgcagctcagtgtatttactgtaacaatgaaaacgcatttcacacat

SEQ ID NO: 3080 - DNA, 1166 bp, Oryza sativa
  unsure (1)..(1166): unsure at all n locations
  Clone ID: PAT_MRT4530_102796C.1
ggcccccccnttttttttttttttttttttttttttttttttttcgtggtgtttgggcttccctccgtttgcctgcctccttcggtgtttgttttttttttttttttttgagacaaaaacaccatcgagtactcaagctggtaatcagttatacttactgctagttcagtaagaaacacagttagtatcacgctcatacagttctgtccacatcccagcttgccatacgagaacaaaggatatataacaaaacgtagagggtgccatcaaattgcattctcgcgtcctacattagtctagtcagcttcttcctcttcctccatgtcatttgcacttattagatgcccaagtgaaactttggcttttttcagttccggtgacctcagtgcagcagcaatgccatcgcttttcctcttctcgccaaaccccgcttcatcttcgtcttttgtagcctcacccgaggacttgtcatcgtcaggcttctcagcaatcgttgacacagaatcatccttcttctccgatggaagctcacctcccttcttcaatgactgctcacattctttcaggaaatcacgaacatcatccttctctgcaacatgtagagccgtctgacccccttttgtctttgcggcgatgtctgcacctttcttgactaaatacttcacaagctccaggtgggagttctgcgaagcaaagtgcaacgcagtgaagcctttcctgttctttgctttcacagaggcaccagatgccagcagctcacggacaacctctacatggcctttctgagaggcaaaatggatcgcagcggtgtcatccatagctgcagctccaacatcagctttgtgcttgcaaaggcacttcacaagctcaacatgtccagcccatgctgccaaatggagtggggtgcgagagaggcgatctctggaattgagggcgagagggttggcctcgcacagagactccgccgccgccaaatctcccgaccgcgcggccttgtgcagatgcaagtcatcctcctcgcctcctccgcggcctcggcctccacggccacgaccgccgccgccgccgccgccgccgccgtgacgcctccccatctctacgctgcagccgctccggatcagagagcctgcagcccgggaattggatcgaaccctcgtgccgaattc

SEQ ID NO: 3081 - DNA, 3116 bp, Oryza sativa
  Clone ID: PAT_MRT4530_102797C.1
gagagagagagagtttttttttttttttttttttttttgaaatgataagactgctaatcgatgtaaaatttctatagctcagcaatatcaaaacaaattagttcgatacaaacaatgcaactacaaagtcgtgaagtcgaagcctttgaggcattaactttgacagcatgccatagagaccataatactgctatacagcgattagaagctgcgattagaagctatggatcacctttctgctggtcctatagcatctagtccatacggaaatcctacacctcatcttttggccgtcaaacaaatgagaaaatttgagcaaccaaaattttgcctctgacaaagtgccttcttggagtatcagtatcatcccaacaaatcctacggggtgccaaggttcacgctaataatcacaactcatcatgagcttcaggttctaaatcgtcagtcttttgtggttcagactgactctcttcaggggcagctgattccgacgatgtttccgtggattcagcttctttggattcagattccgaagagtcagttttctctttgttagcagactcttcttccttgggaggtttcttttctatcttgggttttggtttaggtatcctattgacactagaaaccttatcttgtaggtccagaactttttcgtagacttcttcagatgtgaaagcaggtggactgtagacaggggtgcttttctgtatggcttccttctcctccaaccaagtttttactttctctgcttcacttacaacctcatctaccctcttttttggaagccacggtttgttcgagtcccagttcttaacaatcttttgcaactcagcaagatacaatctagcattttcacaagccgttggccgggcttttagctcactcaatctgaaaagaattgggtcaccgatggccttaagttggtcaaggcgttccttgaattcatttgcttgagcatcttcaccatccatatacaaccaatcttgtacctcattaagtttctctgcaaaagattccctctcctgttcagttgagacggtcaaaatttctgtgttctcttccagcttctccttcatagagtatatgtaagactccaggttatttttcagttcagcagttctcctcctttcagcatccttcttatcaagcgcctctaacctagtttttgcttcagaatacaactccttcgaaagaattgatccagcaccagccatcttttccacaacctttaacgggaccctgaatgttcttttcttgagcaccttctctgtaacaatatcttgtgcattactctcatctattggagcactggacttatttgcatccccatcagaactcacattctccttactgtcagatgtgtcattagctgctcctccttccgaagacaaagtctgactggtggaattactctctagagttaaattcttctttggaacttcaacccattcagttatctcaatcactgcttctgccctatcaagagaaataattccgctcctactcaaagaaaaatgtagatttgccttgatgggtgcagataaattgcggctactgtacttttcgcttgcatctgtcaggcctgatacagaatactccacaaatttgtgtgatgtaacacctggaggcagttcagaagctttttcatagctgatagaaacatcgaagtctttagtatgtctaatggacctgaacatcttaattcccaattttttcatccttggcaccagtaattgatcagtgctttcatctttgacataatctgggccatttatttcaaacacaaaaccataagtagaaccatcaatcatccctaacttacggttcaacttaattccatcacttaagttagctgcatgcagtgaggcacccagaacaattgcttcatctgcatcaagatgcttatccaggtcacttcttcccaggaattcctgcagcttagcctgcaattttggtactcgagtagctcctcctattaattctacagcatagatatcatcaatcttcattccagaatgtgcaagcacttctttaactggagttagagcctgctcccataattcttcacaaagttcttcaaatttttcacgtgtaatggtactcctgaaatcgagatcattatatagtgattcaactgaaattggagcagcagtatttgcactcagaatttctttggtacgcttaacttgcttcttcaacttagccatcgccttgggagactggcggatatcaactccattaccgagttgtttattaaattgatcagcaaaatagtttaccaggcgcatttccatttcaaggcctccaagtttggagtcccatctaacatccttaacctggaactggttcaccgataccgtcttcccaaactccttggccttgtaagctgagtagtacaccagcgcggcgtaggtactacctgcgcccatgtcatagaagataacatgcctcgactcgttcgagaaatccttgtcgatcccgtactgcaacgctgccccggcgtgctcattgatgagcgcgaggacgttaactccggcaagctgcgccgcctgcgtcaaggcccggcgttcggcctgcccaaagtagggcggaacggcgacgacggcgtcacgcacaggagcgccgacgtgcgcatccgcgagcccagcggcgtagtggagcaccatcgcgacgatctcctcgacggtgtagacctgcccgtcgtccgcgcggaccgcggcggcgccgcgcgcgtcggggacgaggtcgtaggggaggaagagcgcctccgcgacggaccgcacgtaggggaagggcttcgcgaggaggtcccgcgcgcgggcgaacaccttggacgggtggcgcgcggtgatgccggacgcctcctcgccggcgagccggttgccgtcggcgagcgcggcgagcgccggggacttgcgcttcgacatctcgttgatggccaccgcgatcgggacgcgtccgggggcgaggtgcacggcggccaccttgagccactccgaccccaggtcgatgctcgccaccgccgcctccgccggcgggacgaggacgacggcggcggccgcgacgaccgcggcgaggaggaggaggagacccgatgtgcggggcggcgccat

SEQ ID NO: 3082 - DNA, 492 bp, Oryza sativa
  unsure (1)..(492): unsure at all n locations
  Clone ID: PAT_MRT4530_102798C.1
aattgggctttagaaccgcccggggnaggtaccctgncctggntgaaaagatcaccacccccaccantantgcaaccnntgtcntaggtgttgcacctnagaaggggcnctttgagggggttggcaagncagttnaatctggngaggctgcccatggctncagctgtggctccagntgcaggtgcaacccctgcaactgntaaggccaaggcgatntatgattgaattgccaangcnccagcctgtttacatnatgaataaataaagagnccatccagtgtgatggctcatgcctgtgtgagtgtgantgaatccatcagtgtgngngtttgtgtcanccatgtgtgaatcaggtgtcaaaaatngtggctggaaatccatgtggtttctggctttatgtaaatgttgtttgtgaaatataaatattgttttgngtatgcaaaaaaaaaaaaaaaaaaaaaaataaaaaaaaaaaaaaaaaaaaaaaaaaaa

SEQ ID NO: 3083 - DNA, 433 bp, Oryza sativa
  Clone ID: PAT_MRT4530_102799C.1
cggacgcgtgggcggacgcgtgggctcgccggcgacagcgacggccggccgacggacacggcagcacgagcagagagctagcgagatgatacaggtggcccaagaaagcgggggaagcaaagctacgacgaacctgtggcgctcggcgcggagaggagcagcgccgccacgagcagcgcggaggcgccccacgcgacggatcttgcgctcccggcgccgccacccgccgccatcatccccggacacggcaccaacaccacaccaccacaccggtaggcaggtaggtacagtacagccagccgcagcgcgcaaccccccgccgatctcgcgcgccgcctgcctcccctcggaatgcgcgcgtcggcgtccgtccggccgccggcaattgggaagcgaggagcggaggtggtggggagatctggggggcggtggt

SEQ ID NO: 3084 - DNA, 2858 bp, Oryza sativa
  Clone ID: PAT_MRT4530_10279C.1
attaacggggagggcaaagcatcacatttcaatcttgtgttattgttgttgttgagtggagcacctaaactaatctatagcaataacaagaacaaacaggaggggaggagggaaacctcaatacagtgtttgtagtgcagattgggacggaaatcgaaatgatcagaagaaggcggtgccggccaatccgcggtggaggaggttgtgcgcgatgtcgtccctcaccttgttggcggactccgactgcacaagcacggtgtcgtcctcctcctcgtcgggggggaggtcgcagcggaggtcggggtccatgtcctcccccctggtctcgcagatgttgtggaggacgcagcaggcggcgagcaccgcggggaggtcctgcagcttcacctccgtgcgcttctgcaggcacgcccaccgccccttgaggcggacgaacgcctccgtggccacgcgccggacctcgcccaccttctcgttgaaggcgtgctgcgtccacgtcaggttgcgctgcgcgtaggggaccagcatccactccgtcagcgggtagctcgcgccgcccaccacccacgacatcgacccagccgccgccgacgcccgctggtgcagcgccgacttgcggagcacctgctcgtcgctcatggaccccggccacccgatgcagacgtcggtgaaggtgccgtcggggccgacgacgccctggaaggtgatggagtaggaggtcttgtggttgcgctccgtgtggcggcggttcaagtaggcggcgacggagaccttgggggcgatgatggggatgtgcgtggtgtacatggcgcccaccacccccgggacacccgaggtggcctcgaagcgcgtcttgtaggcggtggaggtggggtggtcgggccagtggaggaagcgcggcatgaggaggttgcggatggcggcgcagacctcgaggatgagcttgtggcaggtggagatgccgaggccgaagcgcttggagacgacgcggagtggctcccccgtggcgaggcgccagacgcagacggcgacgcgctggcggacggggatggcggcgcggagggcggtgtcctccttggcgacggcggcggcgagcgcgtcgcagaggaagtggaaggtggggcgggacatgcggaaggcgcggcggaagtcggcctccgggtagtcggcgctgctgcacagctcccaccacgcgcgcgaccggtccttcacccacagccgccgctgctggtgcggcgacgacgacgacgaggcgtcagcgtcatctgcctcttggtggtcgttgagctggaggagggggagctcgtggcgcggtggaggtggcggtggcggggcgtcgtcgagggaggtgagtatgttgtcgatgggcgtggtgtcgccggcgtcgtgggcttggggcttggattcgccgcgcttgcgacgccggttggacatcacgtgtatctccttctccttgaccatcatctcctcttgtgtcttgtctactccactatcatcagtgggaactgggtcaccaaggattgacgttctatacataacccccaacttgtccttctggctgctcaaagttacaaaaacataatatccacaacatcttacacggtgctctcccagaccagctacaccaacatcgtcttcagatttccagtaaatactatggacattgccacagagttcctccaggatgctccttactttcttttcacccttttgagaaggtgctagaacagcagacaggaatgatgggggaagaccatatctaagaatgctctctacaaagacacgcacagcacagaagtgcatccaggaactgaatacatagagaagcacaaagttttgcactttagcatgacgtacataaatggtattctcactgtagctggcatagcaccattgcagaagtgatgccctcattgcttcctggtcttgcattagcttttccagctcttccttcctactttcctgtgcttcagaactatactcaaaatcgcgaacctggaaacctttttcacgtgcacggaccttaaagttgtcaacaaccttagcaaacaatgttaccgtgtagagagcatactcattgtcctcataaagttttttagacgatctcggtaccacaaatgtgtcaagggactcatagcttgacaaccaatccttttgagagtacttaggaacaactgcaaggagtgtcactagatgttctgatgtgaccatatcctctggttttaccagattggaaagatcacgaactgctaagcttccagtttgctttctgttgatcgcactaagctggctccttacattattgtattccgctcctcgaaccttcatgtcatcttcaatcttggagacctgtgattggatgctgccgacaatctccttgagcggtgacatcgttgggtatttgccctcatcccacacaaacctggtgaggtaggtgtcgacggggacgccgtcaacggtgagagccccactctcgacacccccggcgcgctctagctcctcgatctgcctccggatcttgtgcgagaccccctcgatgaagacgttggacttgacgagatcgtcgctgagggcgaggagggagtcgagcgtgccgacgcggagatcggggacgttgaaccggtagagcggcgtgtcgaaggagtggcgcgagatggagtcctggaggcgcgcccagagagaattggcggtggagccaggagtctgcacgggaagagacacgatccaataacgtgtggccatctccgccgcagccggaagctcgccggcggtgaggaggagggattcggggttgagatcgatcggagtcggagtcggaggggaaaacaaaacagacgagacgagagaggaacccaaac

SEQ ID NO: 3085 - DNA, 687 bp, Oryza sativa
  unsure (1)..(687): unsure at all n locations
  Clone ID: PAT_MRT4530_1027C.1
gacgtcgcatggcaccgccgtaccgtaagncttggnatttcctctagaagnncggccgctcctgtgtatcggttcgttctcttgattattctttatttcttttccttttataggaaaggcgtacagtattattacagactagtttattccgtggtgggatacgacctaacgtatcttgtagaattttaaaacatgagctgctctaaagttgacagcattaaatattctttgcaattgcgatcatactttaggtcctcaaatggcaacttctatatgactatgctggttgaaaccacccaagcttatgacttacagggctcgattgaatactgctaacgggatgttaaaaatagtcattgtaccaatgcacggatacaatctctaacacaaggcttgaatttgatcaaggtgcagcatcactaggaagatcaaggccgagctgcaatactctcagggcagttagagctgggggaatcagacccatgcatgcttgtgtcgaccaacaccatgtaccggagctcacaggtgacaaagcgcttggccacttcttctattatggctggatgacactccctggtgtacatgcttaaggtgagatataagaatccactatggtttacaataactactgctttatcttcccttgcccataaccacacaatgaacttgatgcccatacttgtgaca

SEQ ID NO: 3086 - DNA, 104 bp, Oryza sativa
  Clone ID: PAT_MRT4530_102800C.1
aattagagacaccttattttagtcaactacaaatgcatcattcaacttgatgcattgctttgaacactagcttgcctttactattaaatgaccgtaaacagggt

SEQ ID NO: 3087 - DNA, 643 bp, Oryza sativa
  Clone ID: PAT_MRT4530_102801C.1
tgttatttggcacatcacagctggaagagaacacagaaattttgaccgtctcaactgaacaggagagggaatcttttgcagagaaacttaatgaggtacaagattggttgtatatggatggtgaagatgctcaagcaaatgaattcaaggaacgccttgaccaacttaaggccatcggtgacccaattcttttcaggtaacttgctctgtatccacttaggttcatataggtcattgactgacattgattttttttttctttattgcccagattgagtgagctaaaagcccggccaacggcttgtgaaaatgctagattgtatcttgctgagttgcaaaagattgttaagaactgggactcgaacaaaccgtggcttccaaaaaagagggtagatgaggtaaaccagtgagcttaatgaagttcgataaattcattctggttatgatgtgattctcattttattggttgtgatgctatctgggtctaggttgtaagtgaagcagagaaagtaaaaacttggttggaggagaaggaagccatacagaaaaggtatgctgagtctagagccaacacaatttcgcgagttctacatttaaatgtgtatatgtgtctaactcccatttatcatattgcagcacccct

SEQ ID NO: 3088 - DNA, 547 bp, Oryza sativa
  Clone ID: PAT_MRT4530_102802C.1
acctctgttaacaaccaaatttggtaattcaagtatcggagatgaagataaaaccgaagcgaaatccaagatggagatcgttctggaaacagagcaagaatcggctaaagtccgaatcggctacgattagaatcggcagagttcaaatcggacaaggttagccgattaagccggttccgacaatatgatatgttcgggcaaaagtctgcagtaaagacttatggtatcttagagtttgttagaaataagagtcgtgtccgatatggacatattatgatctaatcaactggcacgctcacgaacctaaaggcaagatttttggacctacactggagttaagcagatctcccaggcctcgtgtttttcgcatcaacaacctcctcatgaagtcaaaatgctgaaaggattaaaaacgcaagagattaaaacgcagggacatggggaaagttgatcaggaagatttcgccacctgccacctacctctgacaaatccgtgagatacacaacaaacaaaggtaatctctaacctagacatcacgtgtaagtt

SEQ ID NO: 3089 - DNA, 1070 bp, Oryza sativa
  Clone ID: PAT_MRT4530_102803C.1
ggcattactgtatattgagattgagggagtagttcgtacggtgggtgtcctggcggtgtgcggcctcagcagcatgtgagcaggtcttgttgccgccgtcagcgtagctactgcggatggccacatatcactacgtgtgtacatatagtctcaccatatgctctagcgagttacgacaaggaagagttactagttaattataagaatttaaagcaaagcagaaaaatatcgttcattgcacatacgtactgtaacgtgttgtaaattaatacacagccaaatgtgtggcaagaataaacaagaatcgtcgggctaaatcttgagatcgatcggccgaaaatccaggcattttctaaaccatcccggcggctgcaacggcgaggaccaccgcggcgagggcggtgaagcggccgggagcatggttactcgactcggacggcgaggccgacggcgatttctcaggcatttgtggttcagtagatggcccgaggcctgccatcggcgatgcagaaggcgccataggcacaggtactccaagaagcgcgcatgcggtgacgggcggcgcggcgaggccgcagatgcccgggagcgccatggcgcgcttgtagtcgacgctgatgtcgtacgagctggcgccgccggcgagcagctggcagaggcagacgggcttggactcgagcagccccgccagctccgggcagcacggctcgtcgggcttccgcgccgtgctcccgttcatcacgtacgtcaggcagtccgacatgttgagcaccgcgtccatgcacgccgggctgatcccgcccgccggcgccggcgcccccgccggcgacatctgcgccgccgccatccccatcgccaccaccacggccacggccaccgccgccaccgccgtgtgcagccgcaccgtcaatgccattgccctctccctactgatctctcgctgcagtcaggacaggagagaaggcaagcaaaaggctcaaatgcaaatggcctgcgtgtgcgcgggtacacaggagtcgcctgcttatatacagcgggatgagacgagcacgactgcgattttgtacgcg

SEQ ID NO: 3090 - DNA, 213 bp, Oryza sativa
  Clone ID: PAT_MRT4530_102804C.1
atggagtgcctgctgtggattgagatggagaggcgggtgctggctgaggagaggaaggggctgttgagaatcaaagcaaaagcgatagggtttgaggaatcggttgtaaccgaagaacatgatggatgggaagcatcgagccggttgccaagaagcatcaagagggtgagggaacgtggcccaactgctgcagttccttggcgtggagcataa

SEQ ID NO: 3091 - DNA, 145 bp, Oryza sativa
  Clone ID: PAT_MRT4530_102805C.1
ttggttttttgaagaggggggggttaattcttttccaaggcagctatttgatttaatttgcatcttttttcaaaacatagaccacaccttttagccaacatagtataaacatcgtctgagagagtacaattagatagccagtttg

SEQ ID NO: 3092 - DNA, 246 bp, Oryza sativa
  Clone ID: PAT_MRT4530_102806C.1
actgaatgtgaagctgcaaaccatagctttatgagaagtcgggaccggtacacacgctcacatctgtccttacaacacatgcgcgcgtccggatagcgcacataacatgtctgcatataccacaatggcgagcgtgcagagcgaatccaaactggcgccgagatacgagcatactgtgagcttagcaccatcgatcatgcatgagccggcatgcaaaggacctacgtatcgtaacagcatatatac

SEQ ID NO: 3093 - DNA, 1884 bp, Oryza sativa
  Clone ID: PAT_MRT4530_102807C.1
atggctgaactgctggccactcagaaccagctgatgcaatcaatgatcaccatgttcggcacaggaggaccaggagctcgtgtcgccgcaacaagaccaccaggaggagcagccccagcaggccgcaatcccccaaattatggggaattcatgaggaccaaacctctggcctttgccgagaccgtcgagcctctggatgctgaagactggctgcgcgccgtggagaagaagatggaactgattcgttccagtgaaggagacaaggttaggtttgccaccagtctgttggaaggcactgctaacgactggtgggaaacctataaggaatcccgcgaggagggagaaccggaaccggactggaaggaattcactgatgcctttcgtgaagcctacatcccgacagccataatgaagatgaagagggaccaattcagggccctgactcaaggggacctgagtgtacaagaatacctcaatcgtttcacccaactcgctcgttatgcaacacaagaccttcctgacgaagaagttgataacaagattgttgatgctaaccgaaagaggaagtttgctgccctcaagaataagcaacagcagcaggggcaaaggcacagggtcaatactgggcccgtctggaggccagtttattcgggccccgtctgcccaaccactgccccccagcacctgcggccatccccaactttggattcctcactcctgcccctaccattcctgccccggggaagtttcactccggctgcttcaattgtggggtaccggtcactttgcacgggaatgcccccaacagaaagtctttccatatcgcttcgggtcgccaatcactacagcccgtgggactacaaccccggtcgcaccaagggcggccccgcagacccctgtgcggatgaggacgatgacccccctggcgaaaggccgcgtgaatcatgttaccgcagaagaggttcaggaagaccagggagtactcctcggccagcagcaggagatcaaagctccatcctagcctccttatccttgaaggaaacccctgtagtaagtgagtatccggatgtcttcccagaggaactaccgggtatgccccccgaccgggatattgaattcattataaacttaatgcccggaaccgcccccatatcgaagagaccctataggatgctagtgaatgagttagaagaactaaagaagcaaattcgggagctgcaagagaagggattcatccgtcccagttcctccccatggggagcccctgtgttgttcgtgaagaagaaggatggtagccatagaatgtgtgtagactatcgctccctgaatgagcttgaccagtttgtagtagtgttcattgacgacatcctgatttactccaagacggaggaagaacatgcggatcatttacgcatagttctggggaagttaagagaacaccgactctatgccaaatacagcaaattcaatggactccggaaggttatcctcacgaaggcccatgactcggcatactccatacacccaggaagtaccaagatgtatcaagacattaagcaagcctactggtggcccggactaaagagggacgtggcggaatatgtagccatatgtgacgtctgccagagggtcaaagccgaataccagcgcccagctgggttattgcaacccttaaaaatcccagaatggaagtttgatgaaatcgggatggattttattgtagggttgcctaagacggcatcgggatacgactccatatgggtcatcgtggatcgtttaaccaaggtagcccgcttcatacccgtcaagaccacctacaattccgccaaactggccgaactattcatgtcaagacttgtgaacatggggttcccaagcggataa

SEQ ID NO: 3094 - DNA, 2706 bp, Oryza sativa
  unsure (1)..(2706): unsure at all n locations
  Clone ID: PAT_MRT4530_102808C.1
aaaattagggaagaatgcagatgatcttatcaagactaacgtggttcttaatgattttggtggcaacccttcagaaaataaaggggtgctgaatgtggaactaaccatcggcagcaaaactgatcctactacgttctttgtcatcgatgggaagggctcctatagcatgttgcttggaagagattggattcatgcaaattgttgtattccttcgaccatgcaccaaagtttgatccaatggcaaggtgacaagattgaaatcgtgctagccgacagccaattgaagatggagagcccaaattattgctttgagggcgttgtggagggttcaaatttctacaaaaaagatactatagatgatctcgatggcattttaggacagggttttatgtcagccgatgatttagaagaagttgatataggtccgggagatagaccaaggccgactttcatcagtaagagtttatcatatgaatttagaaccaagttaatagagcttttgaaggaatatagagattgctttgcttgggaatatttcgagatgccagggtatcggccatatcaacaaccgcctaggagatgtcaagctgatatgtatgatgatatcaaagttgaaattactcgtttgtatgatgctggttttattcggccatgccgatatgttgaatggatttctaatatagttccggtaataaaaaagaatgtaaaatcaaaggaagtggacgatcatatagacggtttgagggaagtttttgaaagaacaaggaagtatggtttaaagatgaatcccacaaaatgtgctttcggtgtgtcgactggacaattcttcggttttcttgttcataagaggggaattgaggtatctcagaggagcattaatgctataaataagattcaacgtctggaggacaagaaacaattactgtcattgatcggcaaggttaattttgttagaaggtttatttctaatttatttggaatgttagaaccttttacacctctgctcagattgaaagccgatcaggaatttacttgggaggcagagcagcaggaagctttggatagtattaaggaatatgtgagttcccctcctgttctaatccctccactgaaaggagtacctttcaagttatacttgtcagccgatgagaagtcaatcggtttagtttttgtccatgagttggaaggtaaggaaaggaaaatcttttatttaagtcgaaggcttctggatgcagagacaagaaagttaaggcattatttgttttccaatgagtgcaccatagtttataaagccaatgttgtcaaatacatgctatcggctccagttctgaaagggagagttgggaggtggatatatgcattgacagagtttgatcttagatatgaatcngctaaagcggctgagtatgaggcagttctcaagggatttcaactattgaaagaggttgaagccgatgctgttgagattatgggtgactccttgttggagcagaatgttgaagctaacgatttggctcagggggcatcaggatataaacagatggtgaaagatattgaggtcgacattgctatgattacaaccgatgactggagtgccaatcaagctaaggttgtgttgggagaggtgcatgaaggtatatgtggtactcatcaatcggctcataaaatgaagtggttgcttctgcgtgttggatatttttggccgacgatgttagaaggttgtttccgatactataagggttggcaagattgccagaaattagaagtaattcagagagcaccagcatcggctatgaatcctataattaagccatggtcattcagaggttggggaattgatatgatcggtcagatcaatacaccttcaagcaatggacataagtttatattggtcgcaacagattatttcacaaaatgggtggagggcagttcctttgaagaaggttgattctggagatgcgattcaacttgttaaagaatatattgtttaccgattcggtgttcctcaatatatcacaacagatcaggtatcaatctttctgtccgatgaagttgtccattttgtagacatcatgggcattaaattgttaaattcttcaccatactaagcgcaagctaatggacaggctgaagcatctaataagagtttgattaaattgatcaagaggaagatttctgatttccctcggcaatggcatacaaaattagctgaagcgttatcatcctatcggatggcatgtcatggatcgattcaagttccttctttacaaacttgtttatgggcaagaagcagttttaccatgggaaagtgtcaccggctcgaggattatagatttacaagattaattgacagccgatgattattacaatcttatggtagatgaaacggaagatctggtccaatctagattacgtgctttggaaaaagtaacgagggataaggaacgagttgctctccattacaataagaaagttgtgcctaagtcattttcagaaggtgagctggtttggaaattgattctgctgataggaactcgtgacaacaaattcggcaagtggtctccgaattgggaaggaccgattcgagtatacaaggttgtgttgaagggagctgatatgttgcaagggcttgatggagaagtttttggacgagctctcaatgggaaatacttgaagaaatattatccaagtgtttggattaatgcg

SEQ ID NO: 3095 - DNA, 192 bp, Oryza sativa
  Clone ID: PAT_MRT4530_102809C.1
atgcaccgcgcctcccctccccaaaccctagcacgccccgcgtgcacctcgctcacggtgagccgagccgccgacaagcgggtcccacccgggaccatgcaagagcccgaagacccgcagtgcgaggatttcgaggatcaagctcaagatctcgagcaaggcaagtcacctttgaacatcttgcacctataa

SEQ ID NO: 3096 - DNA, 732 bp, Oryza sativa
  Clone ID: PAT_MRT4530_10280C.1
atggttgagcttatagcgcaaggtgttaagactgacaagggtttcaaggaagtccaccttaaccaagttgctagaactgtctctgaccgctatgggtttgagattagtgggacccaagtgtacaaccatcttcgcaaatggcgcacaaggtgggtgcgtattactaggctcaaagacatcagtggggctctttgggatgatacactgtcaatgattgtcctagatgaggagcactacatgctttatatcaaggaccatgctaaggatgctgagtatctgaatgtccctttagagaactatacacagatgcaaattatctttggcaatgggcaagccacaggaagatttgccatgggctcaaatgaagcccttggcaaccctccagacatggctgacagtgctcttggacctcttgatgggattattggggatgtgattgctgctggaccaagtggtgttggtgttgaaggtggtgggactgctgctcgagctagtggagttgggcctactagtgatgagccgactggaggatctaatccagataagaagaggaagagaaccccggctttggctgaaggtgaagttgctctcatcaccaacatgactgattctgtgaacaatgtggcttcaacaatactcgctacaacacatacggaggtgcagcctgatttggagaactcagtgatggacctccactaccaccttaaccaccacatagccaaatatacataa

SEQ ID NO: 3097 - DNA, 1001 bp, Oryza sativa
  Clone ID: PAT_MRT4530_102810C.1
cggcacgaggctcctccaccctttcttccccacgaacggcggcgatggaatccgacggcgaggaggaggccgcggcgaccccgggggccggcggcgcgccggcggcggggaggctgaagggctgcccggagctcatggtggacgacgacatgcgggagatggcgaagacggccgcctggagcgtcagctcctgcaagcccggcaacggcgtcgcctccctccgcgacgacaacctcgacacctactggcagtcggacggggcgcagccgcacttggtgaacattcagttccagaagaaggtgcagctgcagcttgtcgtggtgtatgtggatttcaagctcgacgagagctatacgcctagcaagatctctgtccgggccggcgatggcttccacaatctcaaggaaattaaaactgtggagctttcaaagccagttgggtgggttcatatatcattatctggagctgatccccgagaaacattcattcatacatttatgctccaaatttcggtgttgtccaatcacttgaatgggagggatactcatattcgacagatcaagatatatgggccaagaccgaatcatgttccccatcagccatttcacttcacttcaagggaattcgtcacctactctactgttaggtgacagctgactaatttaattccgtggaaccctccacattggagcttttgttgaagattttggatagctcagcacacatgtgaacagattgtgtggtcgatcccattctctgtgcttcagaattcagtctcgcatgatgtgcacccagaaatcaacactggaagaagcatctgaagcatcaagtctctcattgcctttccggagaattgctgtatttttaatatgtagaaaaattgatattggattcatctgtgtgtacgagctacattttcgtccatggagtgtaacattatcctcctctcgtgtgcaagagaaggttatttattcattgaaaaaaaaaaaaaaaaaaaaaaa

SEQ ID NO: 3098 - DNA, 672 bp, Oryza sativa
  Clone ID: PAT_MRT4530_102811C.1
atggaatccgacggcgaggaggaggccgcggcgaccccgggggccggcggcgcgccggcggcggggaggctgaagggctgcccggagctcatggtggacgacgacatgcgggagatggcgaagacggccgcctggagcgtcagctcctgcaagcccggcaacggcgtcgcctccctccgcgacgacaacctcgacacctactggcagtcggacggggcgcagccgcacttggtgaacattcagttccagaagaaggtgcagctgcagcttgtcgtggtgtatgtggatttcaagctcgacgagagctatacgcctagcaagatctctgtccgggccggcgatggcttccacaatctcaaggaatatattgacattaggctaggtcgcactggaaaattgtggcaggattttgtttcggtgaacatggaaattaaaactgtggagctttcaaagccagttgggtgggttcatatatcattatctggagctgatccccgagaaacattcattcatacatttatgctccaaatttcggtgttgtccaatcacttgaatgggagggatactcatattcgacagatcaagatatatgggccaagaccgaatcatgttccccatcagccatttcacttcacttcaagggaattcgtcacctactctactgttaggtga

SEQ ID NO: 3099 - DNA, 466 bp, Oryza sativa
  unsure (1)..(466): unsure at all n locations
  Clone ID: PAT_MRT4530_102812C.1
tttntatantttcataatttattttatatatattttgggttttttttttttttttattgttgtttaatcaatgtgaaggggatttttttttaaaaaaaaaaataaaggacattgaaaaaaacgggataaggcaaaaaaaaaaaaaccaaataggcacaactaagaagaaaataataaaatctaaaagaacacaaaaaataaattgttaaaggaaaaaacgaaaattaaaaaaaaaacaaactaaaagaaccaacatgtaaccatagcctaacacaaataggaaataatgccttaacaccatatagcagagatgacaaatgatctaaataaggctttgctaaaaaaaacgggaacttacaagtgtatataccaagttgtaaaatgacaaaaaaaataggcaatacttaaaaaaatgaaaaaagtaaagataacaatttttttggtaagaaaaaaaaaaagataatta

SEQ ID NO: 3100 - DNA, 1853 bp, Oryza sativa
  unsure (1)..(1853): unsure at all n locations
  Clone ID: PAT_MRT4530_102813C.1
cccangcgtncgcccangcgctcgcttcacctcatcgccattgccatccaaagcaaagaagagagccaccctgcagacacagtacgcacacgcagagagagagagagagagagagagagcaagggatgaggcttctcggagctcatcgtgctgctctgctggtgctcgcgtgcgtcgtcgtcgtcgtcatccatggcctaggagaggcggaggccttgggaggagggggcggcttcgtgagggcgcaggggacacggttcgtgctcgacggcaacccgtactacgccaacgggttcaacgcctactggctcatgttgctggccgccgacccgtcgcagaggggcaaggtcagcgccgcgctcggcgaggccgccgggcacggcctcaccgtcgccaggacgtgggcgttcagcgacggcggcggcggcaacgcgctgcagttgtcccccggcaactacaacgagaacaccttcaagggtttggattttgtgctgtctgaggctaggaagtatgggatcaaggtgatactgagccttgtggacaactacgactcttttggcgggaggaagcagtatgtgaactgggcaagagcgcaggggcagggcattgggtccgacgatgagttcttcaccaaccctgttgttaagggcttctacaagaaccacgtgaagacggtgttgacgaggaagaacacgatcacgggggtggcgtacagggacgacccgaccatcctggcgtgggagctgatgaacgagccgaggtgccagtccgacctgtccggccgcaccgtccagtcgtggatcaccgagatggcggcgcacgtcaagtccatcgaccgcaaccacatgctggaggtcggcctcgagggcttctacggcgcctcctcgccgtcccgcatcgccgccgtcaacccctccggctaccagctcggcaccgacttcatcgccaacaaccaggtccccggcatcgacttcgccaccgtccactcctaccccgaccaatggttgtcgggcaaggacgaccaggcgcagctggggttcatggggaggtggctggacgcgcacatcgcggacgcgcaggcggtgctgaggaagccgctgctgatcgcagagttcggcaagtcgtggaaggacccgggctacagcagcgggcagcgggacgcgctctacggcacggtgtacgccaagatctacgagtcggcgcggaggggcggcgccacggtggggggcctcttctggcagctcctggtgcccggcatggactcgtaccgcgacggctacgaggtcgtcttcggtgagacgccgtccaccacgggcgtcatcaccacgaacagccggcggctgcgcttcctcagcaaggcgttcgcgcgggccaggcaggcccagccggcgagggggaagggccgacacaacggcgggaaatagagattgaccgctgattaggcccagaaagtggtagtaaaagaaagaaaggcttggtttgatttgtgtgttttacttcatgtgtgggaggtacgtgagtgtgagttgatggctcctcgagatgatttaagattcatccgggagagaaggattagtatttgtcatccttcttggtgccttgggaggacgtgtgtttttaggtgttcttaattatgtggaccacgaagtagccactctgtggtgaagttttatggtacctggctatggaagaagccagccagtgattacaaattacttacgtacttcacactaatataatactcctatatgaatgatgttttgctgtcagtcataatgattttttaaaaaaaaaaaaaaaaaaaactcgagactagttctccctcgtgccgatcctgcagcccggggatccac

SEQ ID NO: 3101 - DNA, 3105 bp, Oryza sativa
  Clone ID: PAT_MRT4530_102814C.1
atggatccggccgccgatccgctgtccgcctccgccccattccccaccatccccgccgcctcgagccccaggaacccccgcgccgccaggccgcggcgccagcccgcgcccttccggtcgtcggaccaccccggcgccgcctccgcctccgcctccgcctcctcgtcctcgtcgtcgtcgtcgacgcggcgcctcggcgtcgatatcccggtccgccacggcgtgcggcgtggcgctggggccgcgggatcgcgcgctccctcgggcttcgtcttcggtggcggcggcggcggcggggacaccgcggcgcccggcctcgtcgacgtggaggggtgctcgccgacgttggcgagctcctggagctcgtccagcttcgtgttcggggcgtcggacacgaggagcagcttctcgtttggatccagcaaggccgcaccgtcgtcgagcttctcagcaacggtgggcgagctcaccatagatgatccccgcaataggcaaggcgatgtcgatgtttctggaggaaatggttcacttccggagatgattacggattcggttttgagtccgaattttgttcgtcaagagatcgatcaccgtgatgaagggcttggtgctccttctcaaacaatgggacgcgagagtacagagagtagctgctcactagttggtcaaatggataggccatcactatgtaccacagaaaatgttgctaagcaattcgcaaaggatgaaggcaaaatttctgcagatggtgctgatagcagggagagtaaatctgtttttgtctttggtgagaattctgaggaaagggggttcactacaaaaataacagaaactgaaattaagaagggagattcagtagagaaaaagattgtagcatttggttctgatcagcttgatgcctcagttgctgaaggtaatgcatgcaccgagtccagttttcagggtgaaaggcatggatgtggctcaagtatgagggatcatcgtggagtttccactagagcaaaagcctcaaatgctttaccttttggccttgtagttcaggatagtggtgcaaaggtttcttccacaaagttgtctgatgaaagacgaagcgctggagtacgaacatcagaacttggcgatttggggttggttgatgagcaatcctttactgtacatgacaacgatgcagcgtccagagaatatggaggggttaagggtgtgagcatgaataaaagagcagttcaacaagagaagttctcagcccaccaggtaccgctaccactctttataagcgatcagaaagcagctccagaagtaaatttgcatttgaaggaagtcactaacttcagactagaggactctgatatcagtaaaggaaactctggcacaaaggaagaagatgttaactgctttagcccgcaagcaacagagagtaatcatgacagaacagtgtttatttctgtgacaaacctggaaaattctagtcgttctgatttcatatttgcggcatcaactgatcatagtaaattgcactcacaaagacgacctagcaagaaaaaaattggaggaatgagtaatcatgctaattctgttgaaagccatccgtcatctgccattggtcttgcacactcagaaatctcaaggcagcaatacacagatttacctgctcaatggaccaaatacaacaaaacagatcctaaaacagttacagtgagtgtaggaccagcaattaaggaaaacattggacatcaagaagactgtgaaacatggcgtataagggggaaccaagcatatgctgaaggacagttagctaaggccgaggagtgctatacccatggaatcaattctgtttctttgaatgaggcttcttggaaatcattgatgctgtgctacagcaatcgtgcagctactcggatgtctcttggtaggatgagagaggccctttctgattgtcgaaaagccactgatattgattccagctttctgaaggctcaaatcagagctgccaattgcctacttgctttgggggatgtagaagaagcacaaaagggttttgaaatatgtttgaagtctaatcatgaagcaagcttggacagtaaaatcacggaagaggcttctgatggcataaaaaaagctaagaaagtatctaattttatgctcctatccaaggaatatattgtaaaaaaggaatttgataagatacccagcgccttacagatgatctctgatgctttgtccacaagtacttattcagataatttgatgatgatgaaagcagaagctttgttactggtctgtatttacgcaattttcctataccttatcctcgtattaatcatgtgcaaatatgatagtcatactcaagaaattgaacaaaaatttcaaggatttcccactagtggcttgaaattattgtttgcttcatttcaggctgctgggaacaaagcatttcaagctggtaaatattcagaggctgtggagcattacactgctgctttgttaagcaataccgagtcaccgcgtttttcagcaatctgctttgctaaccgcgcagctgcttaccaagcaatgggccaaattttagatgcaatagcagattgctcactagccatagcccttgactccaattattctaaggctatttctagaagagctggtttgtatgaacttataagggactatgatcaggcagggaatgatcttcgtaggttaatttctcttcttgagagacagcttcaagaaaatatatacacgccttcagaaaaatcagatggtattcgcagcagtctgaaccgatccaatcttaggctttctgctttggagcgggatgccaagaaggggatctcactgaatgtatatttgatactaggaatcgaaccatcttgcactttcttggatataaagaaggcataccgcaaagcagcactaaggcatcatccagacaaagctggtaattttcttgtgagaagtgaaaatatcaacgatgcagtgtggagagatattgctaatgacatccgcaaagatgctgactatctattcaaactaattgggaaagcatatgctatactttcggaccctacaactaattggtatgcgataatagctgccgatccattttggtaa

SEQ ID NO: 3102 - DNA, 178 bp, Oryza sativa
  Clone ID: PAT_MRT4530_102815C.1
atggccggcagcgaaaatgttttttcgctggcggttacactataccagccgccagagaaaatactaaccaagatggcagccacgtcgagccgtgaagaggacgatgacggggaggatgccaccacctccgccttgccacagccactacagtgccgtgccgcagcctccatcatggccc

SEQ ID NO: 3103 - DNA, 424 bp, Oryza sativa
  Clone ID: PAT_MRT4530_102816C.1
ttgttttttttgattaacgggggcaaacgaggatccattaattcttctcaaagaacaggggcatgtctccttgtttcaccattacataagcttacgcaatagcagataacaaaatctgctccgtctctaggtaaaatatttaaacagaacaccctaataagaacttattacaaggaaaggaccgcgcatggacataaaaggcaacggcaggaatggtaagaataacaatgctgagcagtcaggaaacaaaacaccataatgggactgagcaaaggcctgcgaaggggagctatgaggcagaaggcttctccgacttgaggggcttcaccacctgccaggtgaagtcggggccgcccctgccgaagtgaccgctagccgtcgactagagggacagtgcggcgccctctcacatgagggcaagggt

SEQ ID NO: 3104 - DNA, 175 bp, Oryza sativa
  Clone ID: PAT_MRT4530_102817C.1
gcgtaaactgaaggagcacagggggggataagaaactgcaggatagcggaaaagtacagcaagatcaaaaatcaaaattgtgaggagggatccccagagaaaagagaaggaacttaggaaatgagagtaaagccggacactggggctagagcgcacaggaagagaggaggaggca

SEQ ID NO: 3105 - DNA, 120 bp, Oryza sativa
  Clone ID: PAT_MRT4530_102818C.1
atggcggttataactatgggaattgttcgaattgcctcgcaaccgccatcaggagagcatctggagcgtccataccaaaacctggatccaatggcgatcaccaaggtattggcggcatag

SEQ ID NO: 3106 - DNA, 729 bp, Oryza sativa
  Clone ID: PAT_MRT4530_102819C.1
atcccgacgcttcgacaacctcacccaacgactaatctccctccacccacccaaccaccaatcaataccgcaaaaatggccggcggagttaccgttcgcgatgtcgatgcgcagaagttcatcactgcctactctgctttcttgaagcgtcagggcaagcttcccatccctggttgggtcgacaccgtcaagactggtcctgccaaggagctccctccccaggacattgactggttctacgtccgcgctgcctccatcgcccgccacgtctacctccgcaagactgtcggtgttggccgtctccgcaaggtccacggtaccgccaagaaccgcggcagccgtccctccaagcacgtcgatgcttccggctccgtcgaccgaaaggtcatgcagtctcttgagaagatcggtgtccttgagcaggacgaggagaagggtggccgccgcatcacccaggccggtcagcgtgatttggaccgtatcgcccagaccaccgctgaggccgaggaggaggaggatgacgagtaaatttagtcctcaatcaaattaactccaaaaaagtctggcggttctttacccggtcaatggtagcaatggcaatggatttgggcgttgggtcatagattttgtcatgtatgaatgagattcccctgactctgggtcattcggtttggtcaaattgcacccgtccaacttgtcgttcaaaaaaaaaaaaaaaaaggggcggcc

SEQ ID NO: 3107 - DNA, 458 bp, Oryza sativa
  unsure (1)..(458): unsure at all n locations
  Clone ID: PAT_MRT4530_10281C.1
ggttcgcgattttnagtatagttctgaagcacaggaaagtaggaaggaagagctggaaaagctaatgcaagaccaggaagcaatgagggcatcacttctgcaatggtgctatgccagctacagtgaggtattcagttcctggatgcacttctgtctggtgcgtgtntttntagagagcattcttagatatggtcttcccccatcattcctgtctgctgttctagcaccttctcaaaagggtgaaaagaaagtaaggagcatcctnggaggaactctgtgggcaatgtccatagtatttacttggaaatctgaagacgatgttgggtgtagctggtcttgggaggcaaggcagtgtttttggagtaattactacttttggcaaacaaaaaaccagcgaatgggtccgatgtatattattaattggtgatancgtcaattctttctttgatttattttac

SEQ ID NO: 3108 - DNA, 475 bp, Oryza sativa
  Clone ID: PAT_MRT4530_102820C.1
ctgcaggcatatatatgacagagtacttctcatgataactaaccatattattatctcactacatcttatttgacttcgcataattattaagagtttagcttctaatttattgaaggttgctggttacacgcctttgatgcaaggtaaaacccatcaagttcaattattgtttgctgagcctaatgtgaattgttttctctactaatttgcctatgcagccatgctgtcagagatgagcataccttaggtagctaaatcctacctgttgtaattcttacctgaattagttccgcaaaccaattgttcttgctgctataaaatttgctccatgttagagcttcttttgtttttgcaacccaattgttcttgctgctagaagatttgctccatgttagagcaaaccaattgtttttgcatgtccaaattacaagtgaagcaagttatgctcagttttttttattcttaatcatatggg

SEQ ID NO: 3109 - DNA, 303 bp, Oryza sativa
  Clone ID: PAT_MRT4530_102821C.1
atgagcagtggactggacgacgggagcagcagtggcggcctcggactaagcggatccaccgctggcacttacgagggcagcagatccacccaattcaggaatggcaagtggcggtggcctcataccaagcggatctaccacgatgccacgggagtggcagatccgctcagtccgcctggggacagcatgagcggagatggcggtggctggcatcaagtggcgggagcgacggtggtgatggtggctttggctgcagcgacggcggtagcagctgcgacaataacggctttagtagtgaactaa

SEQ ID NO: 3110 - DNA, 641 bp, Oryza sativa
  Clone ID: PAT_MRT4530_102822C.1
aaaaacgcacggcgttctgcccaaacctggcgcgctagccgcttggacacgggcacggacacggacggacggatcgatgttgcaggatgcggatgttccccgcgtgcttagcttctcggactctcatctctctcacgcctaggggtggacaaaaagctcgggctcgtgagctcggctcgggcttggctcgagctcgcaaagctcggcttggctcgaaaagaaaacgagccgagcccgagccgcctccagagctcgtttgtaaattgagccgagcccgagctagctcgcaagccgctcggcccaatgaaaaccctaaccttcccttgctacagaaactattccccttcccacttcccagttcgtcgccgccgctactccatcgcaccgagaccgagtccctccctctgggcggcgcaaggagttgccggccgctggcccgccgcctccctcccagtccctagcagaagcgccgccgcccagcgacgctcgaccccagtgccatcgcggcgccgcctctctaccctgcaccgccttcggcctccctctcctgtgctacccgcgtccctgactcgacggtcgacgccgtccatcacctcgccgagacgccaaccgatcgatgacagttcacacagcgacgagcc

SEQ ID NO: 3111 - DNA, 362 bp, Oryza sativa
  unsure (1)..(362): unsure at all n locations
  Clone ID: PAT_MRT4530_102823C.1
gccctcgccctcgcctcgcctccgcctcgctcgccacccacccccgcacatacaagcgcgacgaggaagaaggggacgccgacctccaagaacccaccccaacccccccgagggtgggaggaggaggagggaatcgaggccggagcgccggatatggggggcaatccggcgatgcgggccggattggcgttggtggtggtggtggtggcggtggtggtgggggatgtgggcgcggcgttgccgaggttcgcggaggcgccggagtacaggaacggggaggggtgcccggcggcggtggcgggggcgggggtgtgcgacccggggcttgtncacatcgcgattacgttcgacgggaattacct

SEQ ID NO: 3112 - DNA, 260 bp, Oryza sativa
  Clone ID: PAT_MRT4530_102824C.1
gaaaacctccgaccatgtaaccccaatggctaaaattttgatgcattgccataatgatttgccatgctaataatgctgatgctgatgcactttgctttgctgttaaccactgttgaatacatgatgccatgccatcatttctacacatttagcatatatttatcatgtatttgcaccaagcacggagatgtaagtgatttgtgattcaagacataacttttatatacccgcttattcactaaaaaaaaaaaaaaaaaaaa

SEQ ID NO: 3113 - DNA, 498 bp, Oryza sativa
  Clone ID: PAT_MRT4530_102825C.1
ctaaggctggcctgagcttgttgcataactgggccgagccctgctgttgtcagccaccagattaccagtgctaccgacgggccccgcgtgcgtctgcggcaaggcggcaatctcctccgtgctccaagaccaagcagtactgacgagaccgagtccctccctctgggcggcgcaaggagttgccggccgctggcccgccgcctccctcccagtccctagcagaagcgccggcgcgccgctcgacgcggcagcctcagttccgccagccagccgcctccctcccctgcgccctgcgcggctgcgctggctccggcctccctccccagccgcccagcgacgctcgaccccagtgccatcgcggcgccgcctctctaccctgcaccgccttcggcctccctctcctgtgctacccgcgtccctgactcgacggtcgacgccgtccatcacctcgccgagacgccaaccgatcgacgacagttcacacagcgacgagcctag

SEQ ID NO: 3114 - DNA, 436 bp, Oryza sativa
  Clone ID: PAT_MRT4530_102826C.1
ctagctatagatttgtagccagctgtagcacagaatctaagacacaatgtgtgtataacaagtgagactaggtattaatagtatagtatgtaactattgtataaataagttattagattgactacagatgaattgaagccaaataatattaattaaacttgctctgagagagacgtagtccagctagctaaggcaaagccaagcaggtcgagggcggttggttgggtggtatatttggtggtgggtggagcggtcagcaccgcatttgcgttcttggatccaaaccaaccaaaagccaagccatatagagagagagaagaggcaaaggccaaatcttgagcttcttcttattcctcctcctccatcttctctcctccgatgcttcacctcgtcgccctaaatttatcacccagaggcgacttggcaagaggaggcc

SEQ ID NO: 3115 - DNA, 227 bp, Oryza sativa
  Clone ID: PAT_MRT4530_102827C.1
catctgagccttgattgcatattcatagctggttgctctttccataagcaacatactcaaatccagttgtgccgaaaaaatggcctattatgagagcggtcctggcaagtgcccacttgaggagaacgagctggacatgcacttgtacatacaccaagcttgcaggggaccaaaccgtgaccaataattagtactgcacccaaaagtgcgtcccaacgattttggtc

SEQ ID NO: 3116 - DNA, 353 bp, Oryza sativa
  Clone ID: PAT_MRT4530_102828C.1
gcgaaagggaacccctcgagccggccggggaccttctttatctcaaacattacagcggaggaaaggaactagaaacccaccacaatgaagatcattctcttctttgctctccttgctattgctgcatgcagcgcctctgcgcagttagatgctgatactcaaatttacaggcaatatcagctgcagccgcatttcatgctgcagcaacagatgctggggggatgcggcgagtccaaaagggagcatagcagcacaggggaaacccccttattccaatcacgcgtgcataaactgaaaaactggcaaatgatgcatcagcagtgctgccaacaactgaagatgaacgcaccaac

SEQ ID NO: 3117 - DNA, 321 bp, Oryza sativa
  Clone ID: PAT_MRT4530_102829C.1
tccaattaaaccggctcgaggactgagacaaggcgaccctctatcgccgctgttcttcaagccaacaaccactgaagccaacactatcaagagattgctgactctttttggtgaggcaacgggactcaaaaccaacttctgcaagagcgctattacaccgattcagtgcagcaatgaacaacgagttctggttgaatccatcctctcttgccgagttgaagacttccccatcgtctacctaggcctcccgctgggaacaaggaaaccaacgaaagcagagctccaaccgatctatccaaaacttctgcgggctgcaggaat

SEQ ID NO: 3118 - DNA, 184 bp, Oryza sativa
  Clone ID: PAT_MRT4530_10282C.1
gccggaatgaccgaaggcggtcatttaatgcaattaaaataggaagaaaatattacaagaaaagttttacctcgacaggctggctgtcccggaaggatgtgcaccaggagcacacgccttgaaccatggtgccaaccgggccaaacacacgctttccagacagggaaagccaacccaaccgaac

SEQ ID NO: 3119 - DNA, 242 bp, Oryza sativa
  Clone ID: PAT_MRT4530_102830C.1
aagctttttttttttgctaaacagttggttgaaccattttactgggaccaccttacagtggtacgctttatcccgaagttacagcgttaatttgcctagttccttctccacggctcacccgagcgccttagaatactcatctcgactacctgtgtcggtttacggtacgggttgtcttagcctaaccttagaagtttttctcgcgggcttgattagggtcactatccattatgccgaagctt

SEQ ID NO: 3120 - DNA, 792 bp, Oryza sativa
  Clone ID: PAT_MRT4530_102831C.1
atgcgcgcgccgccgttgccgccgctgccggcggcgacgaccggcttctctgacctccagccggagctgatgggcgagatccacggccgcctcagcttcctcgaccacctcgccttcgcggccgcctcctccgccgcgacacgcgacgcgttcaagccggagccgccgtggctggtcatccctggcgacacgccgggcaccgccacggtcttctcgacgagggtcgcgccctcgctcgacagcgtggaggacgcgatccaccacgagggcaagttcttgtccgtcacgtacaccggcatcgtggaggcgtgggaacgcgacggtgtctccggcgagttcacaagcaatgtggtgaccacaaggatggctgacggcggtgacgacgaccaccggaagtacctggcggcggcgccggacgggcggctgatgatcgtgctcaagaacaccaagcgcatgaagcaacaaaaccacttcaaggtgcaggtgttcgacgaaatgacacaacggtgggaagcggcggaggacatcggcgagctccctatcctcgtcggcgtcaacagctcgctgtgcgtgtcgacggcgaaacacccggagatcaacgccggatgcgtgtactacaccgacgacgacatgtgggaggcctcgatgcggagagacttctggtgcagcaacaggaagccgaacgtgggggcgtacagcctcaaagacggcaaggcgatgagcatcccggggctcggagagcacctcagctggccgccgccggcgtggttcacgccttccttcccacgatga

SEQ ID NO: 3121 - DNA, 315 bp, Oryza sativa
  Clone ID: PAT_MRT4530_102832C.1
atggcgtggcttgcccggcttgccagggtcgtccggctgcagacaaggcgctggtcggagcggacctcgcagtcgcagctgaacctcatcgatcagctactgccaaggcaagccaaaggaggaggacacgattggccgccgccggtgaaagatgattccaccgcgtgtcgtgtggatgtggtcccttatccaggtcaccagcaagggctggccctaagacagtgcgggcagtgcgaccgcactgggcctccaaaatatgtatactatgttaccaaacctgataggctactttgtgcattgagaagatgctgttag

SEQ ID NO: 3122 - DNA, 992 bp, Oryza sativa
  unsure (1)..(992): unsure at all n locations
  Clone ID: PAT_MRT4530_102833C.1
ttttttagttgcttgtccatatccttgttccccctttttgcatttctatatttctcgtgaaagctttcctttcccatttgccccctctttcctttctcgtgtgctcgtgatctctcttttttgtatttatacatttgtgcttacaaagtctcctacttttgtatagctccattgaaatagagagaggaaaatggccatggctttgcagagacatttttcagtgttgcttctgctcttggcttgtttgattggatcttcgcactcttatcaattcacagttggtggtaaagatggttgggttcctaacccttctcaaagtttcaatgaatggtctcaacatatgagattccaagttggtgacactgctttgttcaagtataagcaaggatcagactctgtgttggaggtaagcaaagatgactatgacaaatgcaacacacaaagtccaatcaagaagatggaagatggcaactccattttcatgttggatcaccctggtcctttctacttcattagtggcaacaaagataattgcgagaaaggacaaaaggtgcaaattgttgtaatatctcctagaggtaaaactcctactacccctgcttcacccacaactccagctccttccggcgggtccggcacccctccgtcttcttccggcggttctgccacccctccgtctccttccgggggttccgccaccccttccactccctctgggggttccaccaaccttccggcggctggttcggctaaaggacatttacacctagtacaccatacctatggggcaccacctcntctttgcagtttaccaccaacaccaacaattaaacttctgccacattcggagtgctccggtaaagaccaccacgccggacctatacccaatgggaccggagtttcgccgcgggaatgaggtggtggaataatcaggattttgtggaatagaatttttatggccccaaaaagttaagttaaataaccatccccaa

SEQ ID NO: 3123 - DNA, 1935 bp, Oryza sativa
  Clone ID: PAT_MRT4530_102834C.1
atgcgcgcgccgccgccgtcgccggcggtggcgaggacaggattctccgacctccagccagacctggtgggcgagatccatggccgcctcagcttcctcgaccgcctagccttcgtggcggtctcctccgccgcgtcacgcgacgcgttgaagccggagccgccgtggctggtcctcccgggcgagactccggagaccgccacggtcttctccctcgccgaccgccgctccgccaccgtgcgcgcctcgggacccgcgatgcgcggccacgtcatcatcggctccttcggcggctggatcgtgaccgccgacgagcgtgggcggatgcgcctcgccaaccccgtcaccggcgatcagggcgacctcccggccatcaccaccatccccttcgtcaacgccacctcgccgtggggtcaccatttcatcatggacatggaacccttcgtccacatccggtacagaggcgaccacgagtcgtggccgcacccgtacggcacgttcacacacaccgccggcgacatccgcctctggttctaccgcaaggtcgtcctctccgcctcgccgcgccccggcgactacgccgccatgctcctcttggacagctacttcggcgcgccggcgttcgccacggcgggggacggccggtggagggtcgcgccctcgcgcgacggcgtcgaggacgcgatccaccacgggggcaagttcttgtccgtcacgtacaccggcatcgtggaggcgtgggaacgcgacggtgtctccggcgagttcaccggcaaggtggtgaccacgccgatctcatgccccccgcagcgccgcaagtacctggcggcggcgccggacgggcggctgatgatcgtgctcaagaacaccaatggcggcgtcaagaaaggctacttcgaggtgcaggtgttcgacgaaatgacgcaacggtgggaggcggcggaggacatcggcgagctcgctatcctcgtcggcgtgaacagctcggtgtgcgtgtcgacggcgaaacacccggagctcaagggcggatgcgtgtactacactgacgacgagatcgggaaggcatggctgcggagagagtacgggtacagcaacagcaagccgaacgtgggggtgtacagcctcaaagacggcaaggagatgagcatcccggggctcggcgagcacctcagctggccgccgccggcgtggttcacgccttccttccgatgtcagtcgcaaaacggtcttgtcagaaactcagttttcgctattttgggccttacaagattctgggtcgcgttggagcagtggactatcgtttggagttgcctcagggcagtcttattcaccctgtggtgcatgtttcactactcaagaaggcgattaggccaggccggtagggcggggcgaggcggggtgcgtcgaggccggctggagcagcaggacacgcccggcgtgctcagcgtcttcagggagctcaaccccaatgagatgctggccaggaacacacccaagggcaggagaggaaaagttcagacccgacgacgacgacgacgcgccggggtgaccaccgggaagtactggatgggcttcttcctcgccctcagcgccgccgctctgtacaggctcatcctgtcgctcgtcgagctcgcctacaagaacgccgccgccggcggccgcgccgtcacgtatgcgctagcgatggagatgcagctggtcaagggcttcttcgccaccgcgttctgcaccgtcggcatggtcatgtgctcggagaggagaagaaacggagggagtgctatctccaaaatatacaatagagggagtagtagaggtccatgtattatacatactggaggtgtactggtgcccgacgaggagaaggcatcgcttggattcaaggctgtttttgagaaggggatgcggctgttttctgctgggaataagttcacctga

SEQ ID NO: 3124 - DNA, 869 bp, Oryza sativa
  Clone ID: PAT_MRT4530_102835C.1
cggacgcgtgggttaaaatctctcctctctctccaagtccctgcctctcactagatatcattcatacataaatgccaacctgtttgctttctcagctagaaaaacagagttcttgctttcttcagagggaaattggcttcttggaatcctaattagagcaaatacatgatatcctaggagataaacacacacacaaaaatctaattgaggaaactgattgccactagcttcaccaagaaatggagagggagcagatgaggatggccatcctgaggcaagaacaaacattcagacaacaggttcatgagctgcacagactgtaccatgttcagaaacagctgatgaaacagatgcagatcgccaagctgaaccaagctcaggcaatcgctgccaacgccgaaaccaaaccgaaattcgagatcactttcgccgagaattcaaccaaccatcaccaccaccaccaattctacagcttccagagcagcaagatcatgtctccccctgcagcagcagcagcagcagcagatcaagaagaggaagaagaatgcgacctccagctgacgctggcgacggggagcagcggcggcggcgatggcacggcgagggggcacaaggggaagaaggaggtgaggtcatccaactcggactccggcacggcggcgtcgtcgacgtcgacggagtccgagctggcccagttcaagaatcatcatcaccatcagttggactgcgcggcggcggcgccggtggcgtcgccggcggcgaggttccagggcgagagcaagaagagggtggtcgtcgtcgtggacaacgagatgagcctcctccagcctccatggctcaaccagtgcttgagcttgaggatggcgtga

SEQ ID NO: 3125 - DNA, 126 bp, Oryza sativa
  Clone ID: PAT_MRT4530_102836C.1
atgatgctggcgttcattgtcttcttaggcagcgacgttgtgtgttttcatgaggaggtggacaggaggtcctctgtcgaggcggagaaggagctagatttggacctcatccgtttgaagggctag

SEQ ID NO: 3126 - DNA, 378 bp, Oryza sativa
  Clone ID: PAT_MRT4530_102837C.1
tttggtttttttattttttttttttttttttttttttttttttttttttttgagggccaaccaaatttagatatacagatacgatttcaaacgggtgagatcacgatacaaatgctaaacctttggagcttaaaatccgctaaaaagccttcaaaaaattggcatcatgaaacagcaaatagcccgaaataaaaagaaaaggtaaaactcctgaaaaccggttaaatttctgacggggtaaccaagggactaggtgaaataaaaccctccacggggacaactattagtttcgcagcataggcaagaaaccctgggtgcttttagaagctgctgggggacatgaagacggggacctttttgcccatggaggggggccgg

SEQ ID NO: 3127 - DNA, 125 bp, Oryza sativa
  Clone ID: PAT_MRT4530_102838C.1
gtaggtcaatggcaaaaaaggtttcctaatccaataacggcacggtaatgatgaattactaaacgattcttggcgatcgaacaagcacgcagccgctttacagtccctgatgctttttttctaag

SEQ ID NO: 3128 - DNA, 276 bp, Oryza sativa
  Clone ID: PAT_MRT4530_102839C.1
atgcggcgctacgactctcgtggtcagggtgagttgtaccctaactcactcttcaatgtggcagctttgctcgggaccagcatgtgctcggggcacacgtgtccacccctgttgcccaatgtagagttcctcgttggattggacaaccttatcaaagatgtcgatgatggagaaggacttagtcctgagattaagcttaagatgggtggcaacagaccacgcaaagagtatcaacctcagaagaatggccagcaaacgacaactgatcctggttag

SEQ ID NO: 3129 - DNA, 447 bp, Oryza sativa
  Clone ID: PAT_MRT4530_10283C.1
atgagatggttgatgatagctaggctatggcttagattatagacaagatctacatattgagcagcgagacaagcatctacgacacgaaaaataccaccataacagaacatggcttatcaaggatgctcgcatcgcaatcgaatacgcacatcgagtgctagagtggacttgtcgccaagacacctacaacaacactataaaactcatacttgagagtggtatccagcatacttatacgcctctacctgttacaatatcacattcaccgtctgcatcgccaccacctacatacggagtttatcattctacagatcaatctacagtgaatgtatgtggacaagtttctatcaatatagcacatgtgtcctagagatagattttctttaccttgcaatatccaacaatttcaatgttattttagtggcgtttactatacatattcaacca

SEQ ID NO: 3130 - DNA, 161 bp, Oryza sativa
  Clone ID: PAT_MRT4530_102840C.1
gcctatcgctcggcgagctacggggtgggcgcattgggaagcgtccgatactggtacgacggcacacgccggcccggcgagggcctgctcgcagccacgccggcatcgccgctacgggcaggggccgaaaacgccgcgggactccagaccccgaggcacac

SEQ ID NO: 3131 - DNA, 1202 bp, Oryza sativa
  Clone ID: PAT_MRT4530_102841C.1
atggcagccagaacaagcgctaacttctcatcatgctttaccttcctgaaggaagccctagtcctcccaactcagaaccccaagctcttcacacctgtcttcctcctgatcgcgcttcctagcttccttgtcctctctaccaatgtcctattcgtccagccactctccatggacatggccgaacttgcaatcaagctccagaccaccgacccttccagcgccgagtaccgcatgatcctggaggagctgaaacatgacgttacacagctcatcctcgtcgtcgtcgccgtcgagctcgtcgctttggtgcttggcttcgtcaatcagtgcgtcggcttcttcgcggcctcctccacctactccggcgaccgctactcgctcccggagctcctccgcaaggcgatgaaggggaatctcaagggtcctctcataaccatcgccatggtcaccgtactccgggtcacatacatggcgctcctcggtgttctaatctattccgtcatgcaagtgcaacggcactacttgatcaaggtgctctccgtgcaagtcctcctcttcgtcctctgtttcctcgccttcctctacttcaacgtcgttggcatggtgagcgtcgccgtgtcggtgggcgacacggagcgccgcgggatccgggcgctccggcaggcgtggcggctgatgacgcgggtgaggaggaaggaggcctcgtgctggtggtggccatctgcctcttgtcgatagctgtcagcccggtgaacctggtcgctgctgcgtacacgaagaacatggtactggggctatgcctcttggtcgtctatgctctgctgtctggtgcagagcagctgttctactttgcagcagccacggtgtactactgccaagcaatggacagcaagggagaggccatggattatgcatacgccaagatccctaccggtgaagcaaattgctgattggtatggacaggaaagaaataagcttattagtattattagtatctgcgtgtgtcattatgcaatggtatatatacatatgtatgacatatgctattatgttgtgtacgacacatgtgtatcactattattaattagtgatcaaaactacaaccgctcttattgttatgctgatcaccactcgagttagttatatcattgtgggcttcactcattctgaaatatatattcattctacaaaaaaaaaaaaaa

SEQ ID NO: 3132 - DNA, 237 bp, Oryza sativa
  Clone ID: PAT_MRT4530_102842C.1
atggcggccatcggcgccttatcggccggctcgggagcatctgcaaaccatggtggcactagcgccaacaactcgtgctatagcatgccgcaaacgcgagcccgaagcggtccaaggtcgctggcgttggagatgatggcgatggcgacgcggcggcggctgaggagaagccagagccagccaaagactacatccattactccccagattaatcacaatgcgaggccatcctcctaa

SEQ ID NO: 3133 - DNA, 480 bp, Oryza sativa
  Clone ID: PAT_MRT4530_102843C.1
atggtgctggcccgggtggcactacccggcggggtagcgtcggcggaggaggtgccaaccaagggggcaccagccgatggggcctcgctggccacggtgactgtgccggccgacaagcgacggctggggagggacatcggtatcccttgtgggaggtcgggtacccaagaaaaacacaagccgtcgagcgaggggaaagcttatgtggagtcgtggcactcaaatttgggtaacagagacagccaaatacccgaaggaaatggaagctatatttcgaagaccgtggatggcggcaggaccaggatgaccgagacgacaatgccaaagcgtggaggaagtggcgagaaggccgtgggcagcactggagggagtggcagctggaagggtgtagagttccccgcggctattgcagcgaagaatcacgcgccgggtctgaaggccgggcatggggctccaggccagatgctgggccagcgctga

SEQ ID NO: 3134 - DNA, 309 bp, Oryza sativa
  Clone ID: PAT_MRT4530_102844C.1
gaatgttgcagacgttcagaccagttgttttttgcatggaaatggttgtgacaacgattttgctatgtttgtggattcatctggtgcaagcgcaatgattgttgattgaactgctgtggccggctctggtgactggtttggtggacatttggtggtgttataaaggtattgaatgtccccctggtgatttgaccatggactgatgccataatgaggtgagtggcaggcttatggtgttgtggtgaagtacttgaatttggttgacttttggtgatgaattttgaatttgaaaaaaaaaaaaaaaaaaaa

SEQ ID NO: 3135 - DNA, 451 bp, Oryza sativa
  Clone ID: PAT_MRT4530_102845C.1
ctctcttcctcctcctcctctccccattctattcctcccctcacttccgtgagcggccgggcggaggcggaggcggcctcgcgccgcggcggccagctgagtggcggcggcggggcccttgcgctgtggggcggaggcggcctcgcgccgcggcagccgggcggcagcggatccggaggggaggcggacggccgccgccggatctgaagggggaggcggccgggcggcgacctcgtgcagagggccgcacccggcacggaggccggtgcggcggcaggccgtggcggccggcgctaccgcggatcggctgttgcttagttttctttgccattccttacatgtgcgattcgatctgtgttgattgatacgatctgtgttgaatgtgtgatttgatctgagttgctgtgaatgatttggggatggactatggcgtgaatgatttgggatgact

SEQ ID NO: 3136 - DNA, 2458 bp, Oryza sativa
  Clone ID: PAT_MRT4530_102846C.1
ttttttttttttttttttggcataaatcgttcgactgtttacaaagaaaataaggcgtgacattctcagttaaataatgggagatcatcttgtatataatgatcttctgccgtcactcctatacaaacattttacccattacaaaaaccaagaaatataccaaggcgcccaagctcactgtcactgctgactcccctaccactaaaaattctcaagagaggataacgaatgctaagcattagtcttctaagaatggcattcagaactgtggaactatgtgccggctgatgagaactcagcctatgaataaattaatctagccacaactttaacataaagatattggtcagaggttgtatttaactgaacagggatatgctagtattaaactcgaagcatcttctctttcaggcgtgaaatgaacttgaatgtctcctctgctttgacctgttgatacatatcacttcttgatactctgtccggatggaatttcaaaagagcttgcttgtaagcagctttaacctcaccaccttcagcagcaatgcctaatgcacgcaatatagaagccatatcaatgtatcttctttccatactttcgagctccaatctcaccacccctcggtatttttcttttagttgtatatccgcttcattctttcgctgtgattcacggacttcttctaatctttgtttttgtctcttctccatgtcaagtaatcgcattgcttcagccttttttctttttcgcaacctctgtgcctcctcagcctgtattcgcagttgacgctgtctggatgcccactcctcctcctgtgcccgtttgtactcatcggattctttgtgcttttcacgtgcaccgattagaccatcctgaatgtctgcagcaacctgagccacggcaggttggcctgatttttctggaccatcaactaaatccttctgaggtggcatgcaacctcccaatatgacatttgcagaaggattcttattggaggaagcagcagatgcacaacagtttgcatctaaatgtgccgattttttctcggattgctttgagcagtcgcatctgctagaaagaggtggatcttctgttagtcgaccatcgagagaaccattatctggttcaggacacatctctttgttctttgtggtacttttattgtgagcatctattagtgtttcatccttccgtgcatatgtgccatcagataacttttcatccagcttttcaggagtactgacaaatgtaggactttgatccttccaatttgctgaggagcatgcaggaaaaaccctgttggcagagacaaagctgtagtctgtacattgttcaggttcaaaggtttcatctatgtgtggagattgacttctttctgcagttttttcaggcacagaaccattttgggaatgagttgcttcgtcattacaagctgggtcaggatcaattctggaggtggcattgcagtcttcagcttcatttgcattggaagcattgccctttgaacaatcatgggcatctggaactgaaggtttagcatttgcaccgcttgtactgattggtccacctttcttcaatacatcttcactaaaatacttcctgatgtactcatttatatcgcattctgcatcattctcctcactttcatctggctgtgtacttgactcggcacttgatgtggatgtactcttccggaaaccttgaggcatgcttttcctcgaagcagccttctcccactgtttgcgagctgacccagaggcgtcatcaagaatctcacaatccgagccatcatctccgtcggagtgtccttcagacgaatcactctcataactgtcagaaacataatccagtccatatctgtttctcggggagacacggccgggcgtcgtcactgctggagaaccagcggcagcaccggcagagctgggtcctgccctatcaccaccaccaccctcctcctcctcctcatcatcatcatctaagttaatcacattactacacgagctgttccctctcttagtcttgcacccagaagacgcgcggcctttcgccgcatcaccatcgattatgaagacctcctcatcggaggggccgtcgcctaggtcgtcgtcgtcttcatcgatcaccaccacggtgggcggcgcggggggctggtgcctggagcacctcgtcatcgccgggatccccccccggtcccgcgcccggccccctcgccccctcgtctccgcgaaccggtgccggcgccccccggcccggcagcagcggcgtcggcctgggcggggcccgctttcggcggggagaatcgacgggggaagctaccgaatcggagctcccgctctcctgttccgatccgggaggaggagggggaggaacggaaagattggggctttggaccctccgagtcggggactcgagacgagacgagtagacgaagccgagacgaccgaggcgcctcgtgcc

SEQ ID NO: 3137 - DNA, 1148 bp, Oryza sativa
  unsure (1)..(1148): unsure at all n locations
  Clone ID: PAT_MRT4530_102847C.1
gcacgaggctcatccacacaaccaaacccaatttagccaaattttacccaatcgccagcgagagcttgctttgatttgatccgcgcgcggagaagacgaagcgagagagagagggagaggtggaggaggctagctagggttgcgagcgatctgcagcgtgggagatggggaaggggttcatgtcgtacctggcgatgaagacggacgcggcgggaggggaggcggcgcaggcggcgctgatcgacgccgacctgcaggagctgggcgtggcggcgcggaagctcgccaaccacgcgctcgtcctcggcggcggcctcgggttcggcaccaccttcctcaagtggctcgccttcttcgccgccgtgtacctcctgatattggataggacaaactggaagaccaacatgctgaccgctctcttggtcccttacattttctttacactgcctggtgggctgttctctctgttgaggggagaaattggaaaatggattgcgatcattgctgtcatccttcgtctcttctttcctcgccatttccctgattggttagagctgcctggtgctgtgatccttctcattgctgttgccccgaacctgtttgcgagcaccttccgaggcgacttagttggcatcttcatatgcctcatcattggatgctacctgcttcaagagcacatcagggcgtcaggtggattcaggaacgccttcaggaagggcaacggagtgtccaacagcattggcatcctcttgctcttcatctaccctgtctgggccctggtgctgaactttctgtaggcgccaccgcttcagcgcttctctacaccatccagctccgatcgctgttcgttcttgtgtacatgtcttgtacggtgatttggtatctggtgatctggtagtatcgttttgaggagatggataatgtatgtttggacctcctgcctcctgatgcacgttttcttggcattttcgtttgttgtagctttgctatcagcccgtgtttcgtcgttctgagtgtacaagcgtcaataaattcatctctgttgccttctgtaaatttaaagagcttttatccaagttctcttatgtgattatccccactaaaaaaaaaaaacaataatgctatgcagttgtgtgaaaanaaaaaaa

SEQ ID NO: 3138 - DNA, 756 bp, Oryza sativa
  Clone ID: PAT_MRT4530_102848C.1
atggggaaggggttcatgtcgtacctggcgatgaagacggacgcggcgggaggggaggcggcgcaggcggcgctgatcgacgccgacctgcaggagctgggcgtggcggcgcggaagctcgccaaccacgcgctcgtcctcggcggcggcctcgggttcggcaccaccttcctcaagtggctcgccttcttcgccgccgtaggaccaagagtgagctttggttccaaaaggggatctccgatctcgccattttttgggggctcaaaagctccttgtgttgctgatcgggacacgccgacacgggcatggaggatcgatagttggtacctcctgatattggataggacaaactggaagaccaacatgctgaccgctctcttggtcccttacattttctttacactgcctggtgggctgttctctctgttgaggggagaaattggaaaatggattgcgatcattgctgtcatccttcgtctcttctttcctcgccatttccctgattggttagagctgcctggtgctgtgatccttctcattgctgttgccccgaacctgtttgcgagcaccttccgaggcgacttagttggcatcttcatatgcctcatcattggatgctacctgcttcaagagcacatcagggcgtcaggtggattcaggaacgccttcaggaagggcaacggagtgtccaacagcattggcatcctcttgctcttcatctaccctgtctgggccctggtgctgaactttctgtag

SEQ ID NO: 3139 - DNA, 311 bp, Oryza sativa
  Clone ID: PAT_MRT4530_102849C.1
aacgactcatcttcgctggaaagcaacttgaggacggaagaaccttgagcgattacaacatcccaaaggaatcgactctccaccttgttcttcgattaagaggaggagttattgagccttcacttcaagttcttgcccgaaagtacactgcgacagatgatctgcagatcgtgctatgctagacttcaccctagagctgttaactgccgaaagaagaagtgcggacactccaacaaccttcgacccacagaagaaattgaaaaactaaatggttcaatacagccccgatgttcatacaaaaaaaaaaaaaa

SEQ ID NO: 3140 - DNA, 1095 bp, Oryza sativa
  unsure (1)..(1095): unsure at all n locations
  Clone ID: PAT_MRT4530_10284C.1
ttttgttttttttttttttttttttttttgtttacaatcaggctcggcgacctgaattatttatattgatcttttattacgaacctggctgctcaaagttacaaaaacataatatccacaacatcttacacggtgctctcaaagcacaatagatatactaaaggaaacagttggaatattgtagttgccggggataaaatagtccaaacagataccctattgtgccaggaaaatagtccaggttcccccaaaaagctacattattgatcggttcaaactacaggatcatataagctgggtaaataaatcaagaaagaattgacgtatcacaattataatatacaccgaaccattcgctggttttttgtttgccaaagtagtaattactccaaaacactgccttgcctggccacaggtagcaaggaacatactgtgctcagataaaatttattgtgaaggaaacataggggtgagcctcggtttcacctcccagaccagctacaccaacatcgtcttcagatttccagtaaatactatggacattgccacagagttcctccaggatgctccttactttcttttcacccttttgagaaggtgctagaacagcagacaggaatgatgggggaagaccatatctaagaatgctctctacaaagacacgcacagcacagaagtgcatccaggaactgaatacctcactgtagctggcatagcaccattgcagaagtgatgccctcattgcttcctggtcttgcattagcttttccagctcttccttcctactttcctgtgcttcagaactatactcaaaatcgcgaacctggaaacctttttcacgtgcacggaccttaaagttgtcaacaaccttagcaaacaatgttaccgtgtagagagcatactcattgtcctcataaagttttttagacgatctcggtaccacaaatgtgtcaagggactcatagcttgacaaccaatccttttgagagtactggaggaacaactgcaaggagtgncantagacggtcngatngnaaaatctntgtnaaggttccgcnctctccaaatgatattcactannggcatccgcaccaa

SEQ ID NO: 3141 - DNA, 1222 bp, Oryza sativa
  Clone ID: PAT_MRT4530_102850C.1
cccagcaagccgagctaatatacataaattgatccagggatcgatcgaaattaatggcgggcaggagcaggaggaggtcgttttggtccgtgggcgttgcggctgctctgctttgtctgctggccgcccatggctgcagcgccaagcatcacaagcccaagcctactcccggtggcatcagtggcaatgcttcttcttcctcctccaattccagcacccccagtattcctcctcctgttgcccctactcctactgctcctactcctcctattcccagccccggaactggaagcagcaacggcagcagtggcggtggcggcggcgggtggctgaacgcccgtgcgacctggtacggcgctcccaacggcgctgggccggacgacaacggcggcgcgtgtgggttcaagaatgtgaacctgccgcccttctcggccatgacttcctgcggaaatgagcctctcttcaaggacggcaagggatgcggctcctgctaccagatccgatgcgtggggcacccagcctgctcggggctcccggagacggtgatcatcacggacatgaactactacccagtgtcgctgtaccacttcgacctcagcggcacggcgttcggcgccatggccaaggacaaccgcaacgacgagctccgccacgccggcatcatcgacatccagttcaggagggtgccttgtcagtatccagggctgacggtgacgttccacgtggagcaagggtcgaacccggtgtacatggcgatactggtggagtacgagaacggggacggggacgtggtgcaggtggacctgatggagtcgcgctacagcaccgggggcgtggatgggacgccgacgggggtgtggacgccgatgagggagtcgtggggatcgatatggaggctggacaccaaccacccgctgcaggggcccttctccctccgcatcaccaacgagtccggcaagaccctcatcgccgatcaggtcatccccgccgactggcagcccaacaccgtctacagctccatcgtccagttcgactagctaattactactactccactccttgccattaattagtatatactccattatttgccatttgcacatcatcgagacgtcgcttgtgacgtccgtttcagtgcgtatatgcatgttgtactcctccttacttgattacatgtatgcatgcaaattaatgaatcaatcaatggtcggattttctatat

SEQ ID NO: 3142 - DNA, 626 bp, Oryza sativa
  Clone ID: PAT_MRT4530_102851C.1
attccgatgctccttttgaatagagatcttcaggattttacttctttactcgacggggcataaatacaagcgcaactatgttaactcctgctggagggggaaatggaaccctcactaacaacgggagaaatataggttatatatggaaaccgttcgaacaacttaaaaagtaattaaaatagcccgatcaaaacccttcaacccacaccaaaactggacggttcctacaacggtgtctgctgacatgcagaaaaccggtatgacttatattgacgacaaagcccttgattgactccctggtgacgcgaatgcccaacgttgccctgattggtgtgccggagatcatcctaaagacccccccccacgacatcttaatgggccaaacaagctgccaataccgacctgctgataagtgatctcccatgacgccaccgccagtgggcgaggaacttttataccccggggaggcacctggcggtgtagcccttctcaggggggaaggccatcttatggccgacggagtccttagcatagcacccttctgaactgcatgtcaatgattccggcctttttggacctgggctccttccccgggcaaggcatggcgccgaacgccttgccggaaa

SEQ ID NO: 3143 - DNA, 297 bp, Oryza sativa
  Clone ID: PAT_MRT4530_102852C.1
atggtcgctctggtcgaatgtgagcttcacccccgaccagcgcgccttccggaccgcctcatgcgtgggaacaacggccagaagctcccgcctcatggccttgaagcttcggcgagaggcgtgagcgcaaacccccccgtcgagcgtggcgacggtcccctgaggtatctggaaatccagatcctcaccgtctccgccatcatcggcgggggccttgtccttggcctcccctcgccggtcaccgtcggcgagactgtggcggtaagtgttgtgtaccgagcaccacttgtccgctga

SEQ ID NO: 3144 - DNA, 1456 bp, Oryza sativa
  Clone ID: PAT_MRT4530_102853C.1
ccctccttccccaaagcagcaaggccagcctgtgtttcccaaacacccacagccatcacctcctcttcttcctctctgcagtaggggtgctaggctagggtagctagctagctaccatcatcatgagctcaatgccacaagaagccattgctccccatccttcctaaccttcctgctggttttgcaaacatcccacacacacacaaagcagtgacagtgagtgccaatgctgagctcttgtggtggccatggccatgaaaatccaagaagcttgcaagaagaacaccatggcagatgtggtgagcagcaaggtggaggaggaggaggagggcaagagcaagagcaagatgggttcttggtgagagaggcaagggcatccccaccatctccatcttcttcatcatttcttggatccacaagctcttcttgttctggaggaggaggaggagggcagatgttgagcttctcctcccccaatggaacagcagggttgggcttgagctcaggaggaagcatgcagggggtcttggcaagggtcagggggccgttcaccccaacacagtggatggagctggagcaccaggcactgatctacaagcacattgctgcaaatgtttctgtcccttccagcttgctcctccccatcaggagaagcctccatccatggggatggggatcattccctcctggctgtgctgatgtagaacccagaagatgccgccgcacagacggcaagaagtggcggtgctccagagatgctgttggggatcagaagtattgtgagcgacacataaaccgtggtcgccatcgttcaagaaagcatgtggaaggccgaaaggcgacactcaccattgcagaaccatccacggttattgctgctggtgtatcatctcgcggccacactgtggctcggcagaagcaggtgaaaggctcagctgctactgtctctgatcctttctcgagacaatccaacaggaaatttctggagaaacagaacgttgtcgaccaattgtctcccatggattcatttgatttctcatccacacaatcttctccaaactatgacaatgtagcattgtcaccactgaagttgcaccatgatcatgatgaatcttacatcgggcatggagcaggcagttcatcagaaaaaggcagtatgatgtacgaaagtcggttaacagtctctaaggaaacacttgatgatggacctttaggtgaagttttcaaaagaaagaattgccaatcagcttctacagaaatcttaactgaaaaatggactgagaaccccaacttacattgcccatctggaatcctacaaatggctactaagttcaattcaatttccagcggcaacacagtaaatagtggtggcaccgcagtggagaatcttatcactgataatggatatcttactgcaagaatgatgaatcctcatattgtcccaacacttctctaa

SEQ ID NO: 3145 - DNA, 522 bp, Oryza sativa
  Clone ID: PAT_MRT4530_102854C.1
atggcgcggtggaggccggcgccggccctggtgacgacgacgaggaggagtggtggcgacgagttcttctcctctcctccacggatccaccacagagaggcggcggatggcgagacgcggatccggcaccgccgccaccgcctcctccttccttctgcgcctgcgccagggccgccgccatcgccgccgccgcctcctccctccttccgcgcgcctacgctggcgccgccgcatccctcattccgcgtccctcagccgccgccgtcgccgctccctccctccctccacgagccggcacggccgctcgctccctccgtgcgccgccgccgcaactcgcccctccatctgccaccaccgtcgctccctccctccgccccctcagagcgccgccgccgccgccccatcagcgccaccgccgcaagtcgccgccccattggtgctggctcaccgtctcgccgatccgtggagaagagaagagaagagagaagagaggagagagaactgacgggtgggtcccacatg

SEQ ID NO: 3146 - DNA, 408 bp, Oryza sativa
  Clone ID: PAT_MRT4530_102855C.1
atgctcccttcctccatctacgtcttcagcctcggcctctgcagtggccacctcgctagtgccagggatggcggctacctcaccgatgcctacgtggatggctctcctttccttcgctccacgtcttcggcctcagccactgtggagaccacctcgcagcaccggggacggcagccacctcaccgacaccaccacagacggcattaccttcctccacgcaagctcacccttcctccgatccgcatctttggcctcggcctccacagcggccacctcgctgacactgccctcgtccccaccaccgtcatcgccgtggaggttggacgatgtggccatctactcagcgagcgtgatgcctcatcgcggcggtggattcgcccgcgcctctatcttctcctacgtgaatga

SEQ ID NO: 3147 - DNA, 372 bp, Oryza sativa
  Clone ID: PAT_MRT4530_102856C.1
atgaggcggcgggaaaagcggccggatgaagaggaagaggtggggcttaccagtgcgcgaggggagtggaactctggcggaattccggcgaagaggggcggcgaccgaggagcggcgatgttggggacagccacggcgcggcccggagtggttgggagcggcagcactcggcgaccggaggtggcaaaacggcggcggcctcgggttcgtggtggagaggtggttgcggcggcaggttggggaattagagcgagggccggtgtgcggcacgaagcggcggagctgatggtgggggcggcgcggcttgaggtggacgggaacagtggcaagcggcggccggaggtggcaaaacagtggcggcctcgatcttga

SEQ ID NO: 3148 - DNA, 2736 bp, Oryza sativa
  Clone ID: PAT_MRT4530_102857C.1
atggcatgcaagcgcccgacgcctgatggcgacgcttgctccgctaccgctgctgtggcgctgtcgccgtgcaataagccacggtggctgttcatgagcatcttcaactataagaggatggagacgctcggggcgggcacgtacatcgtcgtgtacagggctcgcgaccgccgcaccggcgagacggtggcggtcaagtggcttagggacgtcgccgctaacccgtccaaccgggacatgttccttgtcaaagagttcgtcggcgcccgcagcctccgcgacctcatcgccggccatgcccgtcgtcgtcccttctccgaaggcgagacccgcgcactgatgcggcagctccgcgccggcgtcaggacaatgcatgccgccggcatagcccaccgcgacatcaagccacgcaacatcctcatcggcccgggcggtgcgctcaagatatgtgacttcgggatggcaaccacggcggcgccgccctacgagggattcatggtcggcacgctccactacaacacaccggagcagctcgctggaaagggccagtacaacgcccaggccgtggacatgtgggcgctgggcgaggtactcgccggactgctggccttctacgacgacgagcggatgatggcggaggcggcgctagagcaccggtggttcatggaggaggccgactcccccaccgtcctggagggcctcgccggcttacttcatgatagaagatttagagtagaagcaattagagcaaactgtggccgtccatcgaagagtcggagatcacgtgatgatcgtccgatgcccaccggttccccaataaatccaccgccatggcgccaaccaaatcacacactcgccggcaaccggtgctacggcccggccgtggacatgtgggcgctgggatgcataatgggcgagctcctcaccggtgcgccactgttcggaggcgacatgatagaggaggagcttctcgccgacctgtcggacaaccttggggacccgctcagggagctgttcgaggatgtcctgctggagctttcaccggcgaatctgtccgggctgctgtcctttgatcctgagaagaggctgacggcggcggaagcaatggagcaccggtggcaacgcaacgccaagaagggaagggcagctggtttcgcgaccactgtcgtgccacagtggacgtgtgcggcaggtgaagcacctcgccctcttgctgaaacggggacgactgcgcggcgcacaggcggcactcggctagccgtcggctcgacagcggctagggtttcctcccgtggctcggccggttgcggcgagtttgcaccacgacggtgggtgcggaaggcggcgacgaactcgacggcgacggaggcaactcgggctccagcgggtttccacttccttcctgctcggattcccatggacggcccgtcgggttggttcctgaaggtccctccgccgctccacaccgtggatccgccgggctcccctcctcctgcctccatcctcctcgagccatacggctacttcagcgaccgcaccaaccacaccaccgccaggggcctcaccaggggcggcaagaacatcgtcttcaccttctggacggccaccccgccgcgcgcctccttcttcaccctccattcccccgacgacaccaagtgctccgccttcgccgacgcgcccgacgccgtctgctccgaccaccacctcctcctgctccgcatccccatctgccttgaggccacccaaatctacgccatcaacaaccactacttcgtctaccacgcaggcggcgacggcgagcagcggctcacgccggtccccacgcccccgggcctcaccttcgccttccccaacagtgaggtcgtccttctgcgccgccgccgcccccgcgaagccttcttcctcgccgcgctccatcgccccaccctctgtcgccagtacacccacgagcagttcgatctccacctgtacagctccgagacgggggaatggagcaccaagctgatggtgagcgtcgacgccgatgatgatgatgattcaaccagcttcagattttcctacgctagcaaggcgattgttgtgggaggggagctcggaaccgtgggctgggtcgatctctggcatggcatcctcgtctgcgacatcctcctcgacaaccctcgcctccgcttcatcccactgccgccgccgctggtgcccaggcaactcaagggagacccgatgtttcatcgcaacatcgttgttcttgaagggtacatcaagttctttgaaatgtacaaccacaccaccggatctgcctctgctcaaggttgggtggctgcaacgaagaagatgaagatttcgagcattgcatctgggaacagcagcagcagcagctgggaggacgactgcgctatcaaattctccgagatcccagtggagagcctcacatttgcccagatgctgcggctgcagcctaatctgaagcagggtacgggtacaacgaggctaactttgaagagactccacgctggttatcctgcgctgagcttgcacgacagtgatgttgtctacatcatgcacacacctgatcccgacgaggaggacaaggcgttggtgattgctgttgatatgaggaacaaggctctaaagggtgtggctgattttggctttggaaggcctgtgggctacggtttcacctaccttcaaactgggatctccaagcatctcagcaattgttcttcttcctccaggtaa

SEQ ID NO: 3149 - DNA, 291 bp, Oryza sativa
  Clone ID: PAT_MRT4530_102858C.1
aaaacaaaaacctcttgtttgctgaaatattaaatggttgttaacaagctccgagcaagtcacccgcaaccaatcaacataaaaaagaacagggtcagactgtactgctgtatctaaaactataccagctatcaccatttcaccattaaaatgcttgttgtaaaccaacagttccattcaacctgttttcgccgtttcaatccaaccaggcagaattgaatcaaacttaattacccataaccaatggcttgtttccaatcctttgaccaataataacccccgcgggggcct

SEQ ID NO: 3150 - DNA, 1105 bp, Oryza sativa
  Clone ID: PAT_MRT4530_102859C.1
cccccatccccatcccccacgacatgaatcgtgtgtggccgcatgggtcaggaaaatttctggggtcttgaaagtaaagagtaactgcaatccagctgcttggatgatggacgtaacatcaacatcaatggaggtgcaacacaacatggactttgcgattttgtatgacgaatcatcacagcatagagacatcgtagagctagtggagaagctaagcatcccaataccaaattcagaaattctatctttctcccatcgtttcccacggaatggctggattcaactaaaagcttgcttgtggaaacaaaacttaacttactggagaagtcctgagtataacttgaggcgtataatgctgacagtaatatctgccctggtctacggagtattgttctggaagcgtgcaaaaatattaaacgacgagcaagacctgttcaatgtttttggtgcaatgtatctgggttccacaactatagggtcttataatcatcagtcaatcataccattcagtacaaccgagcgcattgtaatgtatcgtgagaagtttgcaggaatgtactcatcttggtcatattcattcgcacaggctgccattgagatcccctatgtatttatccaagtggtactatacacgttaattatctatccatcaattggttattattggacaacacacaaattcatatggttcttctacactacattttgttcaagtctctcctatatttatgttgggttgcttcttgtttcattaacccccaatgttcaagttgctaccatattggcatcttttttcaacaccatgcaaacactattctcaggatttattttacctgcgcctcaaatcccaaagtggtgggtttggctctactatctcactcctacatcttggacactcgatgccctcttgacatcacagtatgggaacatagagaaagaggtcagagcatttggagaaactaaatcagtttcgatcttcttgaatgactatttcgggtttcataaagacaagttgagcctagtagcagctgttctcattgcctttccttttgtgttgataatcctgttctctttttcaattgagaaatttaattttcagaagagg

SEQ ID NO: 3151 - DNA, 417 bp, Oryza sativa
  Clone ID: PAT_MRT4530_10285C.1
atggcgccggtggcttcccacggtgaatccgatggcgacgacgagccgaggcggcaggcggcggcgcaagaggggaggcggtgggcgctgggtggtggcggcgggtggagacggtgcggccagcggcaggaggcggcatcggtggcgatggccgcgccctcccctcctcgtcagcggcgagtggcggcatcggcggcgtgcagcgggaggagcggcggctgctcggaggcgccctccctccgccagatccggcgggaggaagggctccggagccgcgccgccttaccatcctccatgccaccacccaatgcgccggttaccttgacacccgacatgcctcctcctgcctttgttgttggatttatgataatacatgggtttcttgtgggggtcaaattcatgaggtcgaaagattaa

SEQ ID NO: 3152 - DNA, 589 bp, Oryza sativa
  Clone ID: PAT_MRT4530_102860C.1
ttgtatcaacacatgcaaactgccaactcagacattcttcaaggatcacatgggtgttgatttgtatatggaaccaaactttgaagactatagctgccagttcaactttggggtgtcacctccacctcttgacaccgacaaagccctaaaggagccctgcttggacatatgcacgaacgcgagaagacggaaagagctcggaactggtagtagcacagatggtttgcaatgcccccaagtttgatgagacgcttttgaaagtttggacagcataactgaagatgggaatgagatcctctgcagtactgcgactgacatgtgggccacacttaccaagagcccagatgtcagtgacttctactggcaggagaatactgcagagtctctgaagatgcctggggcatacagccattgtgcccctttttcagttactgccactagacttaactgctatagtctgatatcaatactaacactgttgtctcaaacaacaacttatatttttgggatgtaacacaattctacttggaaatcaatttggagagatgctcatgtgaatgatttgtctgcattgctaaaaaaaaagaaa

SEQ ID NO: 3153 - DNA, 639 bp, Oryza sativa
  Clone ID: PAT_MRT4530_102861C.1
atgcagatggaagcgtcgccggaagaacttccctggggctgctgcgtctgcgcgtgcgtactcatccccgccgtcgtgctgttcgctggcttgatcttcttcgcaatcgacgacaatgacgcgctgtactccgccgctgtcgacgccgtctccggcctcgaccccgtttcggagcttggccgggatcccacgctggacccgactttcgacctcaccgtccgcatcaggtcgcggagctggttgcgcggggacgagtgcctcgagcctggcactgccgtggaggtgacctaccgcggcgtcctgctcgccagcgggcccgtcgagaagttctgctcgggagggaagaaggcgaaggaccagcacgtcgtggcgtggggcaccggggtgcgcttgccggggttcgctctggacgcgctggtggcggacgcgcggcgcggggcggaggcgttcgacgtcgcggtgaagatgccgtccaaacacaggggtcacgtgacggtcgacgggacgctgatatcgtgcaaggcgaggcgggtcggggacgccgccgcgctggggacgccgtgcgacgtgtccagtatggacatccccgtgccatccccgaacacggggaggacgcagaagactggcggtgccaattag

SEQ ID NO: 3154 - DNA, 213 bp, Oryza sativa
  Clone ID: PAT_MRT4530_102862C.1
atgacggagcgatccatcgacgtccgcggcagatcggaaatttggatgggctcacggaagtttttccttgatctttatcgcaacgcgggtcgcgaggtaaactcggacattcttttcgtggttccagaccatgattgtgatttcgtgtattgccgcgcgtgcaaggagaaatcgatttcggggctcgccgaggccgagggcaccactgcttga

SEQ ID NO: 3155 - DNA, 381 bp, Oryza sativa
  Clone ID: PAT_MRT4530_102863C.1
tatagtggcaaaagaagttaccctcaaatgacttgaaaattgacttctgagttctgaccaccacaattttagcagctaaactcatggctctcaattgtaattatttatgtacctaattcgatctgtgctacttccattgactagctgcaacaaataaaccacaccttcatttcaaaaaaaaaaaaaaagaaaaaaaaaaaaaaaaaggaaaaattagaaaaaaaaaacaaaacataaggaaaaaaagaaaatgccaaaataactggaggaagatagagatcaatagcatataaagaggggggccgctttaggagctcaaattgtaaatgccttgatttggacagtcaatgtttttttatgggggccctaaaattaaataca

SEQ ID NO: 3156 - DNA, 267 bp, Oryza sativa
  Clone ID: PAT_MRT4530_102864C.1
atggggatcggcggaggcggaggcggaggcggcagcggtggggaagggcaaactgacgagatctcctcccgctccgtgccagtcccggcggtagcggtggcggccaaggcggaggcgaggaggcacgttgggcggcaggcggtggcgaagaagatggagagttcgtccggaggtgcaagggaaaaacagtcaggtcactatggaaatggatcctctgactttggctacaaagtcacggccgtgcagttgggtgatatcagccgttga

SEQ ID NO: 3157 - DNA, 228 bp, Oryza sativa
  Clone ID: PAT_MRT4530_102865C.1
gggcaactacatcaacacgatgacaaggttagggctggaactgaatgaacgacaaacacatgctgctctcagagagaccgaacctgaaatctacttgcctcaattagcctggacgtaataacgacctggcactcaccagaccattgttttgcagaactgttcatgaggcacatggctaaacgactacaatatgcttgacgctgacaaactgaaaaaaaaatgtatcta

SEQ ID NO: 3158 - DNA, 110 bp, Oryza sativa
  Clone ID: PAT_MRT4530_102866C.1
atggagatggcgcgcgattccggcggaatcgggctgttcgccgtagacgacagacgcctcatcttccgtttctggctccagcacgccgaggagtggacgctgcacaggaa

SEQ ID NO: 3159 - DNA, 614 bp, Oryza sativa
  Clone ID: PAT_MRT4530_102867C.1
gatccccgggctgcaggaattcggcacgaggcaagccctctagatacagctgtttcagatgtggagctattctatcatggcacaaatgctctaccagcttgcaatgtggttgcagagcttaaagataatgatgcttcttcaacatcacaagaatcttcagataaagtggatgcattagaatcatcggaatcatcttcatcatatagttctattgatgatattgaagatgagatggatactgcttgtgataatatgcctagctcgatgttctcatcgtaccgtgcaagttcaggtgaagcaaaatgctcatctgtaaccacaaaattactttcatatgaaacctgttctgtttctgatgggattaatcctgctagccctatcaatgagaacaagaaaaaggacgacttgagttatggacatgttcctatgcactcgcagagtatagaacacgacgtggtctgtgatgctttggaactggacaatcaatacagtgaattttggccattcgacagtttcttgaagaattcattcgatatatcctctggaaaaatgagtttggctgaagagttcttatatacaggagataaaggtgcagagcaagtatcacatgccaa

SEQ ID NO: 3160 - DNA, 419 bp, Oryza sativa
  Clone ID: PAT_MRT4530_102868C.1
cgcactgcgaactaaccttcctcttgcggaggcggaggcggagccactgccggagaagaaacccgaccgcgccttgtctcgccgagcggtgatgcggtataaggcggtagcgatggcacatggagggggtgtacggaggggcgatggatgaggagaggtagccgctgtcagaagtggtgggcgactgcgtgcagcgctggttacaggacgcgctcaaggaggcccggcgaggatactccgccatgcaggtgctcgtcgtgcagatgtaccactcctgctacaggatccgcaagaacaagcacaaaggaagagcgtgggctgagaaggcatctatatacaggtcttcagtcttgaaagttggcacaaagcgtgcggtatataatgtcagtgactcagattctgatgaaatgaatgatgat

SEQ ID NO: 3161 - DNA, 491 bp, Oryza sativa
  Clone ID: PAT_MRT4530_102869C.1
gatgaataacagatgttttttccgacttccccgtaatatgcaaagtttctgtctaacatcgaataaactgcgacagcaaagacagggataactgtgacatggtaacgctcgacttcctgaaaagcagaaatccagctcaagagtcaaagtactgctttagatcccaaaaccaaacactccgcgtatcctctggaagatgagttctctccagcctcgctccgtgttctccaccacagttgaatttccatatctgtcttcctctggcacatcagtttgtttgaggcttatgactgtaactcccgactcaggctcatcaaataccaacctaaccgtcgagtgcacgccgtctggccagctaccgaaccgccacttctgcacgatcagcttcccttcctgcaactcctcattgacgccgctgattgacccatcgaagaggctgaactgccctccgacctctctgcttatcctcgcattgctctgcgtgaacccct

SEQ ID NO: 3162 - DNA, 261 bp, Oryza sativa
  Clone ID: PAT_MRT4530_10286C.1
atggcgacctcagcgactgcggctatgggcgtctcctcccccttctcgccgacgcctgcgggcctctcctcgctggccctacggcccccgcatcgcaacttgcgacctcctcgccgcgcccggccgcgccgcccctgtggacctcctcgccacgccgctaccttggacctcctcgccgcgcgctgccgcgccgcctctatggaccgccggcatagtggcgccaccgcagccgtgagaacgctgaatcggtatagggtctag

SEQ ID NO: 3163 - DNA, 1776 bp, Oryza sativa
  Clone ID: PAT_MRT4530_102870C.1
cccacgcgtccgcccacgcgtccgcggagacaagcgcaccaagcccccccaccaaaccctaatcctccttcccccccctcccatggcgaagtacggagagggcgacgcgcggtggatcgtgcaggagcgcgccgacggcaccaacgtccacaactggcactgggcggagcgcgactgcctcgagtggtcccgctcccgcctcacctccctcctcgccggcctccccgtcctctccggcgagggcggcctcgccctccgcaccaccgcgctcgacaagctcgacggcgaggcctacgtcaacatccgcaaggggaaggtcatcccggggtacgagctctccctcaccctcgcctgggaggccgaggccaccaccgagtccggcgtcgtcaaggtctccggcgccgccgaggtgccctacctcgccgacgagaacgccgacgaggacccggagctccgcgtcaccgttcgcgatctaaagcagtactttgactcttgagctggatttctgcttttcaggaagtcgagcgttaccatgtcacagttatccctgtctttgctgtcgcagtttattcgatgttagacagaaactttgcatattacggggaagtcggaaaaaacatctgttattcatcacgctggaattggcgcgcaatgtttgccaagtgttaatgcgcaactgatggatgagtcgccggccgtgaaggagaagaaggcgaaggcgaaggacaaggaaggattcaagacgatcgagatgacggagaaattctactgccgtgcgaaggacatgtatgagatcttgatggatgagaacagatggaaggggttcacgcagagcaatgcgaggataagcagagaggtcggagggcagttcagcctcttcgatgggtcaatcagcggcgtcaatgaggagttgcaggaagggaagctgatcgtgcagaagtggcggttcggtagctggccagacggcgtgcactcgacgaggttggaactgacttcgtcaaattccctttctgaccatgtcatccctgatttagcatttggaggttgctgtgattttgcagcatttcaggcagcggcatgcaccacctctgcattgggaacacggcagtggggcgctgttttcatggtcggtgactctgcaccgggaacatggcactatgccaccgtcttcttgggtggctccattttcacttgccacttgtcgatggacggcgttggagctggagctgctcctgtcggtggtgtctgtgaatgccgcctctctctgcgcctccctctcctccgcgctcatagcggcgaggtgtccttcaagctctcactgcatgacctctccgtcttgcctaactgcctgagcaaggagtaggttaggttggtatttgatgagcctgagtcgggagttacagtcataagcctcaaacaaactgatgtgccagaggaagacagatatggaaattcaactgtggtggagaacacggagcgaggctggagagaactcatcttccagaggatacgcggagtgtttggttttgggatctaaagcagtactttgactcttgagctggatttctgcttttcaggaagtcgagcgttaccatgtcacagttatccctgtctttgctgtcgcagtttattcgatgttagacagaaactttgcatattacggggaagtcggaaaaaacatctgttattcatcacgctggaatgcgtctgcaatgtttgccaagtgttaatctgcaactgatggttgagtaaaaaaaaaaaaaaaaaaaaaaaaaa

SEQ ID NO: 3164 - DNA, 433 bp, Oryza sativa
  Clone ID: PAT_MRT4530_102871C.1
aacttgaatagtaactactctttgtttggattcaagccaaatctatgcccaatctctgcttaaagcagcacccactatacaaccacaaatgcagaatgaggcaaatagtctaaaccacagtgccctctactgatcgtatatcaactgcaggaaaaatctagaaataacatgttttttgtgtttgatgtcattcgatacacaggtctctcacggtctcaccagatatttcaatcgataataatggcctgaacccaccacctccttctatggcctgcacccaccagcttctatgtccaaaatttcccgatcaaatccagggcgatgggggcgatcttgctaaggatattatacactttatgagccttgtcgcataccgtcaccaccacagtagctttcttatcttctttgaaggcaagaaaaccgacgaagatgc

SEQ ID NO: 3165 - DNA, 613 bp, Oryza sativa
  Clone ID: PAT_MRT4530_102872C.1
cacatcatcttgctactacaacatacgttaactgaactgtggtctggaaacagtattcattgttaccgtaaaatcttgctacagcatacatgaagaaaggtgatttggaaacctttattcattgctgccgtaaaatcttaaaactgtaaactgtttccacaacgcattgctacagctatagcgtgcgattcaaattaccgtccacacagtgaatctctgcaggctgcaccgttgcagacgatccagatctcccttcaatctagtagtaagtcataagtataactccaaatccgcccagctagcttccttcaattgttgcctccttaccagcaagacatcttcatatacaagaatggagtagcttctttcatagttgcagttattcctcacctttgcaaatagattgctgttccaatcaaaacaatccataaagtaacaatcacccatgcgctccttgtccattccgttggaggtcgcaagaaagaaaagtcaccaaagatatttggcgaaggttcaacttggctgctggcagccaccattttccttttcttgtcctcctgctccttgattttgtcactccatgtaccagcgtaccaatcccaactagatccaa

SEQ ID NO: 3166 - DNA, 389 bp, Oryza sativa
  Clone ID: PAT_MRT4530_102873C.1
gggggagtaggttggtttacggacatggagcttggccggcgagaagtaggagatgggggaggggacggagaccttgatgatgccctccaccgacatgatcgccgttgcgcacacgtcgtccgccgccgccgtgatcgcccccgggtgccagttcccctccgcgtcctgccgccgccgcgccgatgtcaaaatcaaaaccaaatcaaatcaaatcaagaaaacgccggcgagagcggtgggacgcgcgtcggcggcgcgcggcggaagcagagggcggcgccgtggggtggagatgggatgcggcgcgtaccgtgagctcggcggtcacgcggagcgagcatacggcgcggccggcctcggcgagggagacgcgcgcgccggcgaggggc

SEQ ID NO: 3167 - DNA, 2250 bp, Oryza sativa
  Clone ID: PAT_MRT4530_102874C.1
atgtcgacttccgccgacccgtccgctgcgccatcaaccagcccgtctgctacaccatcagccgagtacgcagagcatctttccaatcttgttgcggttcccagtttgttgcacgatcaacaatactttcttggtccaatcggcaatcttgatcccactgaattcatcatagccgaaaccaatagaaccccttttaggtcggccaatccaaatataagtcattggaaaaatacttttaaatcctggccttctcttgagaaaagctggcctgtatggtacaaacggatgtcggctaacaagcaagcccattgggatgagattggaatcggccaagccctagcccttacaatagcaaactcggccaaagatgaacccctgatagctgctgctacttatttttggtccaacaccctcaatgccttcctcttcaaccaagggccgatggccctaactctactggatatcatcatgctcactggcttagatgtgacctcgtcggctaaccccatgaacttgaataccaagaacaccttcgagttcaagactaaaagcattggaggctggtcaggatatattgcagcatatatgggcaaaggaccagttacccctagagaacatgtggccttcctgttgatgtggttggaaaaattcctcttctgcgggttaagctatggtcctacaaccaattgtttttatgatggatttcaaaaggatgcccgagtttggttcttctatgctgactcaatggattttgaactaccagccgattttagatttgaagacattaatcatgaaaaatttcagcaatctagagaagttttcactactgctatcagcccatgtattctccctgttggcatccatcaaggaagaaatattcaggtctcctacgagttttatcacccaatgacttcggctagacaatttggaatgggacagctgccaatcggcctgtactttgctgacaagatccagtgtagaggtgacatctcttcaaccttaataatggatcggttgctgaacatcccaggaccccaacttggaagcattgagaacatagagttggcaaggtccaggaaccgggcatttgacagatggtggagtgaatggaagctgcatttgttccatcaatcggcttccatgtatatgacagacctgttccccgatgccattcctcagacaacagaatcctctcctcctcaccaaagtaacagtggcaaggtcattaaatatgcgccaggtctaattccaaatggaggtgcgccatctccttccgtcatcggctacaacgcccccaagacttcagcgcttctccgagggcttatcagagaactagccgatgccggcaagaagcggaaaaccagatcatcggctgaggatactttagtcccagctttaaagaagaaaattaagccgaagaagaccacaccagctgacgatctgcctgctctagatccatccatcgaacaagctctggatgaagaaatcgaatcaggcgaccgcaccccatcggctgcagacagtcatcatgttgaagaggaagaacaaccagctactcctgctattccagttttagccgatctgttctccttcgacatcaaagattacctcgatgaaacggaagaagacaccaccagcaaggcaacagctcctctgtctgataatgtgaagagaactcttgaggatatctctaatcggctagaagcaacactagataacctggtgaccaactgtggctcgatccgggtaagattcacagatatccaagctctccttccagataatttagccgatgcccttactctagccgtctatcttgagcaacaccaattcaagctggagaaggccaggcagaggttagccgatcgccgggagcgcaaaaacatcgaagctacaatccagcacaatcggcagcttgtgcatgcagagaaatccaaacttgatcagttgtctgagggcccgatcaaatcaaatatcgatcggcttgaagctcgtaagattgatctcatggcacaactccaagaatgcaatgctgagctggatatggagcacaagaaactagccgatctcccgcaagctgtcgaagaacagaaggcaaagctgaaatcggctatcaagaacgtcgctgatatgaccaaatccttgagagtcatccctgtaaccgacgctcaagattcccaagccatagaagaagtagaacagattagacaaagggctatatcggctatccagcgatatttgtctcagtga

SEQ ID NO: 3168 - DNA, 548 bp, Oryza sativa
  Clone ID: PAT_MRT4530_102875C.1
tctcctctccgccgcacgccggcgaaaaccagtcgcgcgcccgcatgggcggcagcgctgcggcggcgccgccggccccggcgtggatggccgccggtgcccggaggtggctggaggaagccggcgtcgccttcgacggctccgaccgccgcgccttcaacgcgctgcccctcgccggcgcgcgcgtctccctcgccgaggccggccgcgccgtctgctcgctccgcgtgaccgccgagctcacggacgcggaggggaactggcacccgggggcgatcgcggcggcggcggacgacgtgtgcgcagcggcgatcatggtgtgggagggcatcattaaggtctacgttcactacgacatctcctacttctcgccggccaagctccatgaggaagttgagctggacggcagggtggtggagcagaaagggaagatgacggcggtgacggtggagatccggaagaaggattccggcgagctggtggcgatcggccggcagtggatgtcgaccaccaggccaaagaaggatcaagctagcagcaagctgtga

SEQ ID NO: 3169 - DNA, 173 bp, Oryza sativa
  unsure (1)..(173): unsure at all n locations
  Clone ID: PAT_MRT4530_102876C.1
tctcctcacgcgtccgaaagatgtacctgtcctggtngagggagggtgctaaagaagctggacccgcaggccaaggagctggcgttcgcggcgagcgcgagggaggtggacgagctgctcaacgcgcagcaggagtccgcgttcctcgccggcccggagaagagcggcggccg

SEQ ID NO: 3170 - DNA, 585 bp, Oryza sativa
  Clone ID: PAT_MRT4530_102877C.1
atgcccataatctgctaccgtggacaggttgccctggcacctttgatattgctggcccagcatgacacgggcggcggcggagcaagcggcggcggagcgagcggcagcagcggcagcgtcggagcgagcggcgagcggcagcggcggagcagcggcggcagcaacggcagcagcggcagcggcggcggagcggcggcagcagcgagcggcgagcaacagcggtggagcgagcggcagtggcggagcgagcggcagcggcggagccggcagcgtgcggagaggcggcgaccagcaacggcagcaatggcgcgagcggcgagcggcagcggcggagcggcggcggcagcgtgcggagcggcggcgagtaacaacggcagcagcggcgcgagcggcgagcggcagcggcggcggagcaacggcagcggtgagcggcagcggcggtgcggcggcagcagcatgcggagcggcggcgagcagcagcgcgagcggcgagcagcagcggcatcgagcagcaacggcgcggcagcggcagcagcagcggcggtgacggcgccggagttgaagcagcggggagagagagcttga

SEQ ID NO: 3171 - DNA, 243 bp, Oryza sativa
  Clone ID: PAT_MRT4530_102878C.1
atgtcagtctctcctacatgtctttggatgcatcattttggaattactacctcgtgtgtggcatctgttggtttaaatccagtgctagctaaattggcgctcccatctaacagcattataggactaacaactctcggctccttgcgcacgtgcaggaaaccgcttgtaagcggtgcaccggttaatgaaaatttgggcgctgtggtggtgtgcatgcgtgccgatcagtggaaccggttgaat

SEQ ID NO: 3172 - DNA, 396 bp, Oryza sativa
  Clone ID: PAT_MRT4530_102879C.1
atggccacggccggcgagcggcggggcgcgcgcaagtcccgcgtcgcgggggcggccgtgctgcgcgctctgcgccgcgcccgcgacctctacgtccggggcgccaggggcttcggcaagttcgtcgtggcggcgaaccccagggcgggcgtcgtcggccggccgacgtcgagggtgttcggcgtcggcgagctcaactccgagcaggagctgcgggagctcgtgcgcggcgccggcgccatgtgggcgacgcgcggtgcggccgcggacgcgggagctggcggcaagaaggcggatgctggggctggcgcgccggcggcgtggcgcggccgcgggacggcgccgctcgggaggatcgaagaggacggcgccctcctcgtgcatggcaccaagtag

SEQ ID NO: 3173 - DNA, 306 bp, Oryza sativa
  Clone ID: PAT_MRT4530_10287C.1
atggggttattatgggggcgttacatgtgcacttcagcacttgccagttgccacaccgatcccatgcgtgcacgctccaccggggcgttaatcacagaacaaccagctgtttctctcatctcgaacctaccattgcatctttgcatccgcgtggatctctcatcctccaatgatgggagcactagtgatcgggagatcgggaaaaaaggcaggtgcctcgtcacccaccctggcttgctagctcatgtggacgccacttgcgtgaggtatgctcatttgcaccgtgaggaggagggggagaggtga

SEQ ID NO: 3174 - DNA, 246 bp, Oryza sativa
  Clone ID: PAT_MRT4530_102880C.1
atggctaccacggatgcaaccattgctcacatcatggatgaacaagaagatatcaaggtcaaggcctccaagtgctggaatccgattcggccacctgctacactgctaatttcaaacggccgccaaatctccatacgagctccgttttcggcccgaccccggctcaagtggggcccgtctggggtgcgccccaaccaggtggagaacgacccttggcactccttggtcatcctcccacccctataa

SEQ ID NO: 3175 - DNA, 288 bp, Oryza sativa
  Clone ID: PAT_MRT4530_102881C.1
atggcaatgcaaagcaacaagatggatcagagcaggcacagagtagtgaagcttactagtagaaatagacctctagaaaaacatatttcaggaatggtcctttttggtgcgctagagaggctggcgctgccctccaacatggcgtgccagatggatagacttgttcgtgtttgctatggtggtagagtggtggaaccttatgttggtgcacatgttgagtttgaggatatgtcattgaagaccattttgttttccacccgcccgactctagatgaactaaggtcctaa

SEQ ID NO: 3176 - DNA, 1728 bp, Oryza sativa
  Clone ID: PAT_MRT4530_102882C.1
atggcgcccgagaacacatcgacggtgtccacttccgatgcagccttcgctgcgatcgacgaggctgtcaaagcagtcgccgacgccgtgcgccactcctgtggatacatgtaccaacgttctcaggccactgaccttgttgtctattctgacgctgattgggctggctgtccagacactcgtaagtccacatccggttatgcagtttttcttggtgacaaccttgtatcatggtcatccaagcgccagaacattgtctctcggtcgagtgctgaagctgagtatcgtgctgtggcaaatgcggttgcagaagccagctggttgcgccaactcctccatgagtttcattccccgccgtctaaagccaccttggtgtattgtgataattcggggcatctggggatcatcggcggtgattcggacgaggatcaagcggattgcgatcagccgatgcaagaagcaacagaggatctcaaccagccggggatcgtcggcgatgagttggatgaaggacgtggtcggtctgtctaccttgtggcgtgccactgggattggtccaggtattctaagccctactccgtatacaatgtaggcgtcaccgccactgccaccgccacttcatctccaccgcaggcgaagcggaagcgcctgcgccggatcacccgcctgcccaccgctgccggcggtaagagcttcacctctgtgcggtcgatccatcgcgcgtggatcgttggcgtcgggggcgatcccggcgacaccatcatcttcgacacgaggacagagaaggtcatccatgggcccgctctcaactccgcaaaatggtgccctgccctaatggcagtgggcgacaaggtttatgccatgtccaagtccccctcctggattgcagaccccgatttcccgccatggttcgagctactcgatctctcccaatccaaagtcgtcgctgctactgctggccgcggctaccacctggagggatgttcctggattaagctaccacatccaccttgcttcccttggaagcttcgcccggtagattacacattgctgccggttgtaatcgtcatgtcctatgtggtggttgatgcctacatattggtatcattcaatcagccatggggcacgtatgcatttgacaccaactcaatcaagtggcacaaggttgacaacaagaagctacctttcaccggatgcgccgccccacatggctctgtgttccttggcttatcaaaggataatgggcccatcaatgcttatcgcatcaatgtcacaacttctgacaagaaccatgatccttgcttatccatcgttgtgctcccggtgaaatacatggaacatgaagttgatgcagggtcatgcttcttttccttggaggatggactcttctgttccttaagtttctcgcttgacagcaacagcgtgattctttccaagaacctcgatttttttccaaccaaggcacacgtagacttgagaacctatcaaacagagaacacttcaccattggaggctccagaggaaacattgttggctgtgaagccagagaagagcgggaaggtaatcttgtccactgatgccatcaccttgaacttttggattgataatgagggaatggacgaggagattttgatggacatgtggaacacagaggcagatgttgaggttgaggcagtgttggatatgggacaggcggcgaagaggctgccgccaaggtgcactgcctga

SEQ ID NO: 3177 - DNA, 603 bp, Oryza sativa
  Clone ID: PAT_MRT4530_102883C.1
atggatggtctatggtatagatgggatgtgatcaagccaacagattcatatgctcaaacggatcacatgaccacatgtgtcagtcggcgagcagccggctgcggatgcgcccgcgctgctccaggaggatctggatcccgctggcgtagtctccgtggcatcggcggcggcggccgggcggtgggaagcttcagctccggccaggtcgacggcgcgctcgccgccggcttcagcgaagaccaccagattacgagctccaaaaaatttggtgcaaagtttgttatgggaacctgctacctcaacaacaccacccggaagaacggcaagggcttcgccaacccgggcaacaccagaattatattggctgaagtcctaatcctccaatctgcaccttcatacaactgcatggtggttcagaaccacatactgtccaaggatatcctactgtttgagaacctgctgaagcaaatagcaatgttgcaaagaggcggcttggcagaggatctcatgcaggcaaccgtcagcatcctggtggcggatggcgtgccagcaatgatcggtgtcgtggagttggccatcgagcggcatcgacgtcgagcatga

SEQ ID NO: 3178 - DNA, 579 bp, Oryza sativa
  Clone ID: PAT_MRT4530_102884C.1
atggcgaaggcggtggtgctgccgctggttagcaagcttcaggaggtggccctgagcgaggggagggcgctggttggcgtcggcggcgagatcaaccgcctccgcgacaagctcatgtggctgatggccttcctccaggaggcggacccccagaggcgggcggccgacgccggcggcgagctcatgcgcgtgctcgtgcaccagacccgcgacgccgcgttcagcgccgaggacgccctcgacgactacgccgtccgcgtcgacctgtcccgctaccccggctggtcgcgcgccgccgtcggcttcctcgccggcatcaccacccagctgcgcgtccgccacaggctctccagcgacatcgcggccatccatgcccgctttgaggagatcgtcggcaacaaggacaagtacaggctggagggctctgcgccctcgtcgttgctgacgtggactgcctccgccgcctcctcgagtgaatcaatcctctgtttaaaaagcgtgcacgcgataaataaggaagatgagttagagttcatgggaaagaacacagctaggcttttccttggtttcaacgattag

SEQ ID NO: 3179 - DNA, 918 bp, Oryza sativa
  Clone ID: PAT_MRT4530_102885C.1
atggctggaggtggttctcgtatgaagaagtcttgtgcttgttgcaagagatacctggaacatttgggtggaaaaatgagttgcttcctcattagaatgactactgattctatgcatagcatgataattccagataggtttgtgaaccattttggaggaaagatcccaggaaccataaaattggaatctcctaatggtattctgtatgttgttgaagtcactgagtgcatgaataagacggtcctacaatgtggttgggaggcatttgttgatgcccatcacataaaagtgggtgactctttgttgttccgacacattgagaattcctgttttgaggttatgatcctagattctgatggctgtgagagagtattctcctgtgctggcataaaaaccagttcttgtgttcatgacaaaactgtagatcctgttgatacttcaggcagatctagtgatgataccgcgcaaccatcacggagtgaaagatttgctagatgtcaaagggatacgtccaatgatcaaaatgtttccctgaaaagcaacaggaatggagtttctgatgaatctcaggagagtgaggattctgaaggccctgctggccctccctacattctatcatggaagagcaagagtcgtctatcttcattgcaaaagaagataatcaaagagaaagtacgatccatccaatccgaagttcccatttatgtagcaatcatgaacaagagcaatattgggttaactagttccccttgccagctagaattaggtgcaagatatgcagctgctgtgcatcttccagacaggaggcaagccgtggtgctccagcggggggcagcgatgggacaccgtgatgcagaccaagagcggcagatgcaccaccaggcggttcctgatcaatggctggagcaggatagttag

SEQ ID NO: 3180 - DNA, 1051 bp, Oryza sativa
  Clone ID: PAT_MRT4530_102886C.1
gaggagttggagtatccggccgggacagcagataccacttctgcatcacgccgctgttcttgccgtgcgcttttctcccctttccaccagctgaactcctgatcggtctcccccgatcagagagatccattcatccacccagcaaggcaatggatgcctctgaccaaggttgccggctgctcggcgcccagagatcgctgcacggcctcctcggcggcggcgccagtgagctaagctcagttatcttcttcagttcgcccgccgtagatcgcctcccctgcgggctgtggttgcgcggcttcgtttgcattttgcgttttgtgatgtggtgggttttgtgggcgccgcagtggcggatgtggtgctgtggaggaggaaggaggtggccggctggtcgctggcggcggtggcggcgtcctgggtcctcttctactgcttgcctggctacacgctgctctccttcgtgtccagcgtgctcatgatcgtgctcgccgtcctcttcgtctgggccaaggccgcgcggctgctcaacaggccacctccacctgttccactgatcaaaatatctgaagactcaatgagcaaagcagcagctgcagtgggtaacatcctacataaggcactacagggttttgaaaacattgcacacggaaaggactccagtctcttttacaagatggcttcagtattactgctgatctccatagttggccgtgtgactgatctcattactttggtatatgcatgccttgttcttgctctcaccatccctgcattggtggataaatatgaagaaaacattgccaagttcttaaatcaagcgtcagcaaatattcaggcatgtggacaagcatggaaagcatataaatctaagattaagaactgatcttggaaaacaataaactgttttgatctcattgtacagttgtcaacaaaattttgccttgtatacttgtcttcctagagttaaacatgttgacatccgtcttactgctctgtctgactgtctatatacttcagtcttagcactgcaaaaaaaaaaaaaaaaaaa

SEQ ID NO: 3181 - DNA, 101 bp, Oryza sativa
  Clone ID: PAT_MRT4530_102887C.1
caagacttgcgcatccttcttattagcggccgtcgacgcgtgtgcgactttccggcctgtcgtactggcagacataccgtaggctatctgactacaacaca

SEQ ID NO: 3182 - DNA, 202 bp, Oryza sativa
  Clone ID: PAT_MRT4530_102888C.1
tcgtttcggtacttgtactagccccaagatacaggtatcattaataccgcctgagtggactaggacgaatggcttggagtgcacgccttatgtattgtaccaatagccaagtgacaggttggcctgtgtgagacacacacaaacaggaccgttactctcgctcatatagggcttgtgaactcacaagacgattggcatgttt

SEQ ID NO: 3183 - DNA, 883 bp, Oryza sativa
  Clone ID: PAT_MRT4530_102889C.1
aaagaccattaacattttatcatttttattgatgatttacggggtctatacacaacgaataacacggtagtgcattttacactaccagctttattttttaacaaggcccttgatgttccttttgtcgaatcggtaattgatttttcttcacgaagatctaatgatcagaagcgttagttaaaatcaacttgggcaagcaaaacaatgcattaaatagtgttaagctgttgagcatcttgaaaactactttagtattcctctaacaaaattttccgcagtaacacctgtagaatcatactgtggctgcgaggcaaattctgcttgcacaaaaagaagcctgttaactgggcactaaccatcaagcaccactctacaatgatgaaaaggtttgttcgatccaatcagatagcctccgaatttttttggtcatatcagtgctctttgagaaataagactgggcatttgcaagcatcacagtcgcatcatgtcgaatagcttccagagttctgtagtaattgttctcaagccttatcctaatcacctcaatggaaaactggacaggaaacctgttaatgaaatctgatttctctgcaacactgttcaacttcagaacgccatagcgatcctgatttctgtgagacaattcgagtaagttgtccaactctgatagcaatttgtcctttataccaagatcaatgtgtggatgtttccatgggacccacagattaccagtatcatggagttcccaggggctatgtgggtgatcagaaccatcattcttatactggataacatatttctcccatggactctcaggaaaatcaagtgatttaggttttacggctgatacccttccttcccaccaacttcccggacgcgtggg

SEQ ID NO: 3184 - DNA, 153 bp, Oryza sativa
  unsure (1)..(153): unsure at all n locations
  Clone ID: PAT_MRT4530_10288C.1
cgtgggggtcgggggggnnnnnnnnnnnnnnnnggacgggagaacacccaattcatataactgcaaagggacacaagtgatttcttgctacatcaaagttcaaattttgctctttgcacctaccaggtaactggcaaagggtaaacattggtt

SEQ ID NO: 3185 - DNA, 1599 bp, Oryza sativa
  Clone ID: PAT_MRT4530_102890C.1
atcgtaggcagcttccctctgcatacaagaggctgcctcccatttctcttctctgtcggtgttctcctcaagatctgtcttaagttcttgagatctgtttcagaactaagctgagaagatggtgaagatctgctgcattggagctggctatgtcggcggcccaaccatggccgtcattgccctcaaatgcccagcaatcgaggtggtggttgttgacatttccaagcctcgcattgatgcctggaacagcgaacagctcccgatctacgagcctggcctcgatgaggtcgtgaaggagtgcagaggcaggaacctcttcttcagcactgatgtggagaagcatgtcgccgaggcgaacatcatctttgtatctgtcaacacccccaccaagacccgtggtcttggagcaggcaaggctgctgacctcacctactgggaaagtgctgctcggatgattgctgatgtctccaagtctgacaagatcgttgttgagaagtccactgtccctgtcaagactgcagaggccattgagaagatcttgacccacaacagcaagggcatcaactaccagatcctctcaaacccggagttcctcgcggagggcactgcgatcgaagatctgttcaagcctgacagagtgctcattggtggccgggagacccctgagggcaagaaggctgttcaggctctcaaggaggtgtacgcccactgggttcctgaggacaggattatcaccaccaacctgtggtccgctgagctctccaagctcgcagccaacgcgttcttggcacagaggatctcctctgtgaatgccatctccgccctatgcgaggcgactggtgccaatgtggccgaggttgcttactctgtgggaaaggactccaggattggccccaagttcctgaacgccagtgttggctttggtggatcctgtttccagaaggacatcctgaaccttgtgtacatctgcgagtgcaatggccttcccgaggtggccaactactggaagcaggtcatcaagatcaacgactaccagaagagccggtttgtcaaccgcgttgtgtcctccatgttcaacacagtctccggcaagaagatcgccgtccttggctttgcgttcaagaaggacaccggtgacaccagggagacaccagccattgatatcagcatctacgatccacaggtcaccgaggaccagatccagcgggacctcgccatgagcaagttcgactgggaccacccgatgcacttgcagccgaccagccccactgcattcaagcaggtgagcgtggtgtgggatgcatatgaggccaccaagggggcccatggtgtctgcatcctcaccgagtgggacgagttcaagaccttggactaccagaagatctttgacaacatgcagaagcctgcattcgtctttgatgggcgcaatgtggtcgaccccgagaagctcagggagattgggttcatcgtctactccatcggcaagccgcttgatgcctggctcaaggacatgcccgcggttgcataataagattcatgtgaattttaatcgatcgattcgattctcaacctcgattcgagctgcaggaattcaacttg

SEQ ID NO: 3186 - DNA, 1912 bp, Oryza sativa
  Clone ID: PAT_MRT4530_102891C.1
ccggccgggacacaacttgtaggcagcttctctctgcatacaagaggaggtctctccttcttcagcgactccctcaagatcttgccctaacttgctgagatctgtaagagcagtaggcgaagatggtgaagatctgctgcatcggagctggatatgtcggcggcccaaccatggcggtgatcgccctcaagtgcccggcgatcgaggtggtggtcgtcgacatctccaagccgcgcatcgacgcctggaacagcgagcagctgccgatctacgagccggggctcgacgaggtggtcaaggagtgcaggggcaggaacctcttcttcagcacggacgtcgagaagcatgtcgctgaggcagacatcatcttcgtgtccgtgaacacgccgaccaagacgcgcggcctcggcgccggcaaggcggccgacctcacctactgggagagcgcggcgaggatgatcgccgacgtgtccaagtccgacaagatcgtcgtcgagaagtccaccgtgccggtcaagacggccgaggcgatcgagaagatcctgacgcacaacagcaagggcatcaactaccagatcctctccaacccggagttcctcgccgagggcaccgctattgacgacctgttcaagcccgaccgcgtcctcatcggtggccgggagacggcggaggggaggaaggccgtgcaggcgctcaagtcggtgtacgcgcactgggtgcccgaggacaggatcatcaccaccaacctctggtccgccgagctctccaagctcgccgcgaacgcgttcctggcgcagaggatctcgtcggtgaacgccatctcggcgctctgcgaggccaccggcgcgaacgtcaccgaggtggcgtacgccgtcggcaaggactcgaggattggccccaaattcctcaacgccagcgttggattcggcggctcctgcttccagaaggacatcctgaatctggtgtacatctgcgaatgcaatggcctccccgaggttgcgaactactggaagcaggtgatcaagatcaacgactaccagaagagccggttcgtgaaccgggtggtgtcgtccatgttcaacacggtctcgggcaagaagatcgccgtgctggggtttgcgttcaagaaggacaccggcgacacgagggagacgccggcgatcgatgtgtgccacggcctgttgggtgacaaggcgcagatcagcatctacgacccacaggtgacggaggaccagatccagcgggacctcgccatgggcaagttcgactgggaccacccgatgcacctgcagccgacgagccccacggcgttcaagcaggtgagcgtggtgtgggatgcgtatgaggccaccaagggcgcccatggactctgcatcctcaccgagtgggacgagttcaagaccttggactaccagaagatctttgacaacatgcagaagcctgcattcgtctttgatgggcgcaatgtggtcgatcccgagaagctcagggagattgggttcatcgtctactccatcggcaagccgcttgatgcctggctcaaggacatgcccgcggttgcataataattttccatattccacacctgaacctcatagctctctacactctgctggtgctgaagagagtctgcgtcgaagaggaatttggttgaccatcattttttatagctcgttgttcgtctttacatacaggagaggctaccattttgtcaaacagaaagttgatttctgttagtatctttgttcaagtttttcttgtgttgcaccattgtagatctgaaatcttcaggcctctaccgtttgagtgccaccctcaatcttgtatgatgacatgaattcttatagccgatttattcttcaaatgtattcttgtgtcgctaaagattaatgatgcaattttttcttggccc

SEQ ID NO: 3187 - DNA, 747 bp, Oryza sativa
  Clone ID: PAT_MRT4530_102892C.1
atggtccgggaagagaagcttgactttgtgctggtgccgctgggcctggccgtgctggccgtctaccacctgtggctcctctacgccgtcctccgccaccccacccgcaccgtcgtcggcctcaacgccatcgcccgcaagcgctggaacacggagaagaacggcgtgctggccgtgcagacgctgcggaacaacatcatggcgtcgacggtgcttgccacgacggccatcacgctcgtctccgtcatcagcgtcttcctcggcgccacggcgggaaggtccccggcgtccccctcgtcgtcgtcgtcgggggcgccgctgctggtgtacgggagcaagaccggggaggtgttcgcggtcaagtacctggccatctcgctctgcttcatgctcgccttcgtctgcaacgtgcaggccatccgcctgtacgcgcacgccagcttcctcctcggcctgccgcccgtcgccggcgagggggagggggaggcggcggcggcggcggcggtagcgcgggaggagttcgcggcgtacgtggcgcggacggtgaacagggggagccactcctggtcgctgggactccgcgccttctacgcgtcgctggcgctcttcatgtggacgttcgggcccatcccgatgctggcgtgcagcgtgctcatgtgcggactgctctacttcctcgacaccaccagggagcgcgccgccgccgtggccgggatccaccacggtcacaaggatagcaccgtgtag

SEQ ID NO: 3188 - DNA, 503 bp, Oryza sativa
  Clone ID: PAT_MRT4530_102893C.1
ccttgttttttttttttttttttttttattttttttttttttttttttttttttttttttttaaatgaaaaggagcaccatcctttatttatcagctaaaaaaaaaacaaaaaccatagcattacatcatattatggcattttacaagccataacaggacaaaagcaaactaaaattttcttctttaatttaaaaaggagaaaagcaaaccccctttaccgggttgaaaggcgaaaaagggaaaaaaaaaatctttccatggggccggccatttttggtgaaaaccataaagggcaatgatccaacgggggggaatgtttcacccacaaacaccaaagggcaaaaatcgcaccgccacggggaaaaagcagcatcctaaacggaaatctccaggttccacctgtacatttcctgctccggaaccggaaggtaaacggcaacaagccccgtgtcgccgtaaaaggggaaccccacgtgggggccggcaagcgcgcacctcgccg

SEQ ID NO: 3189 - DNA, 276 bp, Oryza sativa
  Clone ID: PAT_MRT4530_102894C.1
atggaggaggtcaaggagttcacttacttgtcggcagccaacttcactaatctcctcttcggaggaggagggaggccgctcgaaaaagaaaaggccaacgtagcaagaacgatgggcctcacctcagacccgctggacctctaccgagatcccacaggagcgctcgcccgggcccaaggtttccttttggtcccgcttccccctgcgacaacggggattgaggagatagcggcaacctcctccgcaaccttctcctcgagggaggctgaggcctag

(The sequence listing continues in the following parts.)
